United States Patent Application Publication US 2007/0072175 A1 - sequence listing, part 15

SEQ ID NO: 39778 - DNA, 702 bp, Macaca Mulatta
  misc_feature (1)...(702): n = A,T,C or G
ggaactattactaggccttgaaggacctgcctaactggatgctcattgcctggacaaggcctgtttaggctggtcannnnnnnnnnnnnnnntnnnnnnnnnnnnnnnnnnnnnnnnnnnnnnnnnnnnnnnnnnnnnnnnnnnnnnnnnnncgccaacgtggcannnnnnnnnnnnnnnnnnnnnnnnnnnngttagctgggtgtggtggcagagnnnnnnnnnnnnnnnnnnnnnnnnnnnnnnnnnnnnnnnnnnnnnnnnnnncagggccagaggttacggtgagttgagatcgcactgctatacccagcctgggccacagagcaaannnnnnnnnnnnnnnnnnnnnnnnnnnnnngaaaagggactgtttaatgcactgctgggaatggattgcttatggccgtaagataggttgatctcgcccttacctcgcagatacttaccccagggtctggtgtatgctgtgctttttctcacagtaatggctctgaaatctcttaaatgtcccaacttcaaatgttgtgaaaatggtgaagttttaaaccttgcttcctaaaacccctgccagggaatccttttagcacttaaatgtccttatgcctcaatctaatttgggggtttcagacccccccnnnnnnnnnnnnnnnnnnntccccctgtttttggagaaannnnnnnnnnnnnnnnnnnnnnnnn

SEQ ID NO: 39779 - DNA, 584 bp, Macaca Mulatta
  misc_feature (1)...(584): n = A,T,C or G
aaaattatacttaaaactctgatgtgcctggcaagatagtagtctaatttcagttatattatttttagatgaaaaaaaaatcaagctaatgccatactttatttctgctcaaatgaacaccaatttttgaaagtatagtagtagnnnnnnnnnnnnnnnnnnnntaggctcagatgtaatgtgtgtttgtgactacatgtaaaaggatattgctgattttccttttctctcatacataccattttctagtcttgcttttattggttagaaaacattcgtggcagatgtagtaatggggaaattatattaacatttaagtattaaattagcttgtagccagagtctccttctaatatgatgacatttagcaagttcaggattttaaggaccatgttgcgcaactcattgttacacatttcctgtttgccttttttgaaaaagtatctgagatctgttttttcagattggaaatttccattgtggatttcaatgttgtagtagttttaccttgctggtcagtgtacgtcattcatgtattaagaataggtagtatactgaccataatgagaatagtaagtgattgg

SEQ ID NO: 39780 - DNA, 508 bp, Macaca Mulatta
aaacaaacaaattcacaacatcagtgttttgagaactttggaccactcctgtccctgtagctcagtcatcaaagcggaagcctggctttgctctattaagattggaaatgtgcactaccaaacactcagtccactgttgatccccagtgctggaagggatgagggcctttcttcctgtgttaattacatagaggctacaggggttagcctggactaaaggcatccgtgtcttttgagctattcacttcagtagaaaagaatctaagggaagatcactgtagtttagttctgctgacctgtgcgcctaccccttggaaatatctgctggtacttctaattccacaggtcatcagatgcctgcttgataatatatgaacaataaaaacaactttcacttcttcctattgtaatcgtgtgccatggatctgatctgtaccatgaccctacataaggctagatggcacctcaggctgagggccccaatgtatgtgtgggtgtgggtgggggt

SEQ ID NO: 39781 - DNA, 683 bp, Macaca Mulatta
  misc_feature (1)...(683): n = A,T,C or G
gggnnnnnnnnnnnnnnnnnnnnnnnnnnnnnnnnnnnnnnnnnnnnnnnnnnnnnnnnnnnnnnnnnnnnnnnnnnnnnnnnnnnnnnnnnnnnnnnnnnnnnnnnnnnnnnnnnnnnnnnnnnnnnnnnnnnnnnnnnnnnnnnnnnnnnnnnnnnnnnnnnnnnnnnnnnnnnnnnnnnnnnnnnnnnnnnnnnnnnnnnnnnnnnnnnnnnnnnnnnnnnnnnnnnnnnnnnnnnnnnnnnnnnnnnnnnnnnnnnnnnnnnnnnnnnnnnnnnnnnnnnnnnnnnnnnnnnnnnnnnnnnnnnnnnnnnnnnnnnnnnnnnnnnnnnnnnnnnnnnnnnnnnnnnnnnnnnnnnnnnnnnnnnnnnnnnnnnnnnnnnnnnnnnnnnnnnnnnnnnnnnnnnnnnnnnnnnnnnnnnnnnnnnnnnnnnnnnnnnnnnnnnnnnnnnnnnnnnnnnnnnnnnnnnnnnnnnnnnnnnnnnnnnnnnnnnnnnnnnnnnnnnnnnnnnnnnnnnnnnnnnnnnnnnnnnnnnnnnnnnnnaaccgtttttccggctacccgaacaggcgtctataaggaaaatgcttaaaaatcgtgggcccaatctaacctctacccatttttgcaagctaacccacaaaaatctttaaaaagaacttttttcccttaaacacctgcc

SEQ ID NO: 39782 - DNA, 780 bp, Macaca Mulatta
  misc_feature (1)...(780): n = A,T,C or G
gggaacctaaattactcagtataattatcaattcaactgaaaaatgcaggctgctttactttacatagttaaaaagagcagtctcataaactttcaagtatttaaatacagtagtttaaataatagcaagttttatagaaaatagcacaaaacatacaaagtactggaataattcctgaccattaactagaatgtaagtaggttccaactcaccaactatagctttaagaaaatattttctattttaatatttcgtgtatacaagaacatgtgaatatttttagctactcaggattaaaattaggaattgtgttctttggggaaacgaatccctaaggctaagtagccagatgatatacaaaaatgttgagaaaaataattgactaagccgtagacagttggggttaaataaatgttagtccttattaattttaaatcaaatagtttaataggaagccttttgctgcattttctcaaactgttacgtttttgccacataaaattatttccattaattttttagtcaaaattaatcatttttaaaatttaagttgaagaatctgatatcagggaaaaactccccaaacaagcaaacataaatactgaatctaaataaaacataacattggttgtatttaaaaaggcaactttttctgagaaggangaatctggcttaccttatagcagaaacatagttctcatcaaaatgtcttagcttacccctttagaactttttctttcagccctgcttcacgggtgatatttctttgcttttgacag

SEQ ID NO: 39783 - DNA, 352 bp, Macaca Mulatta
caggtcctcgaggactgtgagctgggttcctgtgccaaaatacagtttttcattagttgatgatgctctgacttattcgctgctggcacagaaatacaaccccgagtcccccagctccagagagctcaggtttagttcagagtgcaagtcagggaactgttgtgctgagaatctttcaagaatgtttccttttgctctctcttccccattataatactgaatgaggaactggaggccctggcccaggctctgttggtaccagtacacggagcggtctccagacctaggggagcatctcagcgtcatttgctgtccaattgctgtgatcaggtgctttggggtttgtgtgact

SEQ ID NO: 39784 - DNA, 750 bp, Macaca Mulatta
  misc_feature (1)...(750): n = A,T,C or G
ggagttcatttttgatagatttgttgtccagccattatgaattaaatggtttcttattaggagtttgactaaatttttatttttagtatgtatagcatgaattctaccaaaggagactacaaacttgcagcttaaaatgggaaccagttcccacactggcttaatttatataactgcttggctgtattgcgggtaatattagaagcaagaagcacttcatttttaaaagagatgttactattatattgcttaaatgccttagcacttggactttttgagatgcagatgtgtgatttagagtgctggcttatttaaaggtcaagccaaggagtttgtggatcagccacaactactgtttcctaagactattgatgtgaaggacttagtgaagtaatttttatattttggacttcccagcaagatgtccttttaatgactgccatgcttcttttggactcagtaaatatttgtaatgttagaaaagtctcattacttttataaaatgcatgacattttaagtatgtgttgcataaaatggattatagcagttctcatggtttaggatttttaagaaatagtccatttaatttcagcttaaccttttaaatgacctgtaaaatttctttaatagtttaggaatgttngtggggagggttcattaataaaagttcagcaatttttttaactgaagtagtttatctcctttacctagtcacaaaaaaaggtatgttaaacaaggccatttatatg

SEQ ID NO: 39785 - DNA, 726 bp, Macaca Mulatta
ggagaagtcatttttctaataataaaaaaggtcattaaaatagcctaatcatttataaaaatagttatacttaatatttttttcatattttcaaatagaccatctctcagtttcattattctttatgatttttgttttgtagccctggtaaaaaatttgcaaccactatatagcacatatatgtttcaatacagttaaacgttaaaaaggattaaggaaccaaaatttatatagatccccaaagtttaaatactatgaaaaatgctagcttatgttgactgattttggtaaacaaaacctcttagaatatttctttgaatgtaaggtgaaatcctgtgtcaacttaactttcaataactttccatttttattattttgtctggagtaggacatgtgttcttaaattttaactgtgctgtgtggaaaaaataatatcatggagaggtatggaatttaacgtaaagataacagaaaagttaatatattgttttctttttgttttgagtaaagataggacaaacaaaatgtggggagtttggtttaaatttgtcatgacccttacctatataaactttatactagcattcgctatctctcttctagggatacaaaacctaaccgctcaccacctaagaaaccttctcctcctctggcctaagagggaaataataaataatccgctcctttaaattatgggcccaccccttaatttgcccttcaaaaaaa

SEQ ID NO: 39786 - DNA, 872 bp, Macaca Mulatta
  misc_feature (1)...(872): n = A,T,C or G
ggggcttcacacgggtaccacgaacacccagtggcctcctgaagacggaatccggtctcacattccccagcttcctatgcataaaccccagcgaagggtgagcgcacggcaggcacctgcagcatggggttcacgttctagaaggttccgtctgactcccaccctgcccttcccttcactggccgagtaaacttgcagaagttacttaacccttgacctagaagagcctcctctcacctgaaaagggaaagtcgggattgtaaggaaaggaatctcacagggcttctctaggagacaagtcattgcgttgggcttagatgttccatccatggtcaggacaactacagatgtgaaggctgggagggggcctccttccccctgaggtccccaaaggactggggttcatccctctccatctaggactggagggacatccttctccatccaggactgagggtcatctttctccatgcagtacctgagggacgtccttctctatccagggcctgaggacgtccttctctgtactcccttgggactgcacactttcctgtgccgtccttcagaatgccaggctgtcacttgttgtggattgaattctagcatcttatctctattctaggcattatgaagagcaccaaaatgcaagccacacaatagtagatgctgtttacaattcattcaaccaacaaagggtttacatgtcaaccacagagagaactgtaggccagtgtggaacaccngaagaactgcaggccagaaaggactacagggagactgcagtcagcgaggatcacgggagaccacagccacgaggaagaccctgattaaagaaatgcccgtctgatggactcaaaaaaaccaactcctga

SEQ ID NO: 39787 - DNA, 696 bp, Macaca Mulatta
cctgaggctgcctgctctgagtaatcaacttgattcgagggactgggcctggggggcagcttcaggatctggactgcagcagctccgacgacgaaggggctgctcaaaactccaccaagcctagtgcgaccaagggcacactgggtggcatgtttggtatgctgaagggccttgtgggttcaaagagcttgagtcgtgaagacatggaatctgtgctggacaagatgcgtgatcatctaattgctaagaacgtggctgcagacattgctgtccagctctgtgaatccgttgccaacaagctggaagggaaggtgatggggacgttcagcacggtgacttccacagtaaagcaagccctacaggagtccctggtgcagattctgcagccacagcgtcgtgtagacatgctccgggacatcatggacgcccagcgtcgccagcgcccttacgtcgtcaccttctgtggtgttaatggagtggggaaatctactaatcttgccaagatttccttctggttgttagagaatggcttcagtgtcctcattgctgcctgtgatacatttcgtgccggagctgtggagcagctgcgtacacacacccggcgtttgagtgccctacaccctccagagaagcatggtggccgcaccatggtgcagttgtgtgaaaagggctatggcaaggatgctgctggcattg

SEQ ID NO: 39788 - DNA, 809 bp, Macaca Mulatta
gggtagaaacacttttatcctctggcccatgacacaacagtttcctggtcttgcctctacctgtcttgtggctcatactcctctgtgccagtcactgacgactggacaccctctttttctcatgccatcatctctctcttggcaaactcacctgttctcatatctttcaggaaggctacaaattggtctcattgactcacacatttatatctgtggcctagatttccccgatgggttctatcctcatatactcaagatgtcagtctcatcctggccgtttcagagacaactcactcagtacatcctaaatcagactcatatttttctcctctgtatctggtatctgaccttcaaccctgggatattgcagtcaccttctgcctgatccacccatctccactcttgcctcacacagttcattttccacactgtggcaggcatggtgttttcaaaggcagatctgaatatgacgtctttttatttaaaactcatcaccgatcttagaataagtaccataatgatcaaaataatcaatcctggccaggcgcaatggctcacgcctataatcccagtactttgggaaggctgaagtgggcagatcatgaaggtcaagagatccagactaatcctgggccaccatgatgaaaaccctatctctgctaaaaaatacaaaattaagctggacattgattgccccgaaacctattagtccccacctactccaggagggctgaggccaaggaaaaatcccctggaaacttctgaaaagtgggaaggtttgcaaattgaccccaggaatctgtgtccac

SEQ ID NO: 39789 - DNA, 802 bp, Macaca Mulatta
tacagagaaggagaacgaatttgtcctcatcaagaaggatgtggctgaagctaacatgaatgaggtaaagcaggactctcgcctggaagggttgaatgacgagatcagcttcctcaggcggctgtatgaacaggagatcctggagctgcagtcccagatctcggacacatctgtggtgctgtccatggacaacagtcactccctggacatggacagtatcatcgctgaggtcaaggcacagtacgaggagctcgccaactgcagcggagctgaggctgagagcatgtatcagatcaaatatgaggagctgcaatgttggctgggaagcagggggatgacctgcggctcacagacactgagatctctgagatgaaccggaacatcagcgggctccaggctgagattgagggcatcaaaggccagagggcttccctggaggatgccatggcagatgctgagcagcatggagagctggtcatcaaggatgccaacgccaagctgtccgagctggaggccgccctgcagcgagccaagcaagatacggcatggcagctgcgtgagtaccaggagctgatgaacatcaagctggccctggacatcgagatcgccacctgcagtaagctgctggagggcgaggagagccggctagagtctgggatgcagaacatgaatattcataggaagaccaccagcagctttgcaggtggtctgagctcggcctatgggggcttcacaatccccggcctcagctactgcctgggctccagctttggccctggcgtgggctctagctccttcagcc

SEQ ID NO: 39790 - DNA, 776 bp, Macaca Mulatta
gggactggctaagccctcagcgctgtgctaggcggccctcgcttataccctacttattcccacttctgccttctccccgtggtgtccccaacctcttcctttcccttgggcacaccaccactcctgcagaaatagctcacgacgacgtgctcaattccacgacctgtggattctccgtggccactggcctccttgcagtttctgttgacgctatcaggggcagcagcgagcgcggactcagtgaagaaggcctctagcttgcggctgggagttgagctggaaagggtctggataaggccttgccaagggaatgttttatccagttttgaattttgccaatctgataggactatgaataatttcgacctggcaatactcaccatcagggatataataaatggagatttctttgtctgaaattgaaaagatgtagtaatactctattgtacttgtaaaaattctggttttccagttggcttcctctcggtgaagtagttaagtagtcctggtatatctggagggtcataaacgtgtcatagaaaggagtactggggattatggaaaacctgggaggttaagggagcttccacagttttgggccatttttggcaggggcaacactcgttagaagaaatgcaagttgccctgaagaggcgcggttttccctcgcgggcgggagagagtgggaccgtagggaaccacgtcccgatggtgaaacagatgtgctaaccagggagactgaagggggtggaagcagtagaaagtggacgaagtat

SEQ ID NO: 39791 - DNA, 770 bp, Macaca Mulatta
  misc_feature (1)...(770): n = A,T,C or G
cagtttacaagtggtggcagttaccttactactgggtaggaatcaagctgtatgattttgttgcaggaagtaattgcctgaaaagcagtatgtcctcagcaaatcaagagcccttgaatattgcccaatgctccagaaggacaaactggtaggaggaattgtctgctatatgggcgacataatgatgcatgaatgaatcttgccattgagctgactgctgacagatatgggggtgccacagtcaatgacagggaggtagtgagcttgctcaagaagacagacaccaagacannnnnnnnnnnnnnnggcaggaatgtgacatgagagccaaatgtgttatcaatgccatgggacatttcacagacactgtgtgcaaaatggatgataaggacgctgcagctatctgccagccaagtgctggtgtccatattgtgatgcctggttattacagcccagagagcataggacttcttgaacagtgatggatgagttattttcttcttaccctggcaaaagatgatgactgctggcactactgatactccaactggtattacacaccatccacttccttcagaagatattaacttcatttgaatgaagcgcgtaattacctgagctgtgatgttgaagtgagaagaagggggacatcctggccgcatggagcggtatccgtccccttgttacagatcccaaatctgcagatactcagtctatgtcctgaaatcatgttgtcgatgtcagagagagaggccttattactacagcag

SEQ ID NO: 39792 - DNA, 169 bp, Macaca Mulatta
tataaagtattcgttatgttagctggtcagtgattataggaattgtttttatgagatttagtagtgcacacaaagtaattttcaaaggtaattccattagtgtattaagttttagtgttagaacattccattttgttcttttaagtgcagaaacttacataggcctact

SEQ ID NO: 39793 - DNA, 704 bp, Macaca Mulatta
caatgtggcacaaaatcagtacatcttacacaccatgaaatccctgtggctgtaaattctaaggaatcttttgacacttccagcccaaagaacttagtttttatttcatattatataagagtccccacctctactccatgtaccccaaaaagataagctgtcctcagatcctccttctacccaggagggaaataatggatattgccaagggaacaatcaaaactttgaaaatgacctgccaattttgggtagcaggttcagacaacaagagagtaacaactggtagagagccacaggttctggaaaagatgctcccagctggcagggtgagaaaaggcagggaagaattgggcctgtgctaatccaggaaggttgttttgtttgcttgtttcttgtatttactcgtgactaaattttattcatttaagtcagaattttgatatttgaaataagactactttcccttttcttaatatctataaaaaagacgaggcagggatgctgtgttctttctgtccaattctaaatgtgatccttgccattgattatttgaattcaagaaagctgtactttttcatcacatataactcacagtttcattttcacatttgtggattagacttattaaaacctaaatggaaagtaagtccctaaacctgagcctaggagcatgtataagttttagaaacaataccaggctactc

SEQ ID NO: 39794 - DNA, 643 bp, Macaca Mulatta
  misc_feature (1)...(643): n = A,T,C or G
ggggagttgaagagctgagggcagctgtagtgggagtgttccaggattcgctttgtatatttaaagttggagttcgttgctaaagatggcagacccagatgtccttactgaagttccagcagcattgaagcggttagccaagtatgtgatccgaggattttatggcattgagcatgctttggccttggacatcttgatcaggaacccctgtgtgaaagaggaggatatgttggagctgctcaagtttgatcggaagcaacttcgatcagttttgaataatttaaagggagacaagtttatcaaatgcagaatgagggtagagactgctgcagacggaaaaaccactcgccataactactacttcatcaattatcgtactcttgttaatgtggtaaaatataaattagaccacatgagaaggaggattgagaccgatgagagagattcgaccaaccgggcttccttcaaatgtcctgtctgttgtagtactttcacagacctagaagctaatcagctctttgatcctatgacaggaactttccgctgtactttttgtcatacagaggtagaagaggatgaaatcagcatgccncaaaaagatgcacgcacgcttttgggcaggttnnatgacaattgagccatt

SEQ ID NO: 39795 - DNA, 938 bp, Macaca Mulatta
  misc_feature (1)...(938): n = A,T,C or G
acagacgatatccctggtttgggaccaagaattcccgataagatgaccaaggagcactttttgaactcattctggcctttactacttaaacatcaaaggtttgcttgatgttacatgcaagactgttgccaatatgatcaaggggaatactcctgaggagattctcaagaccttcaatataaaaaatgactttactgaagaggaggaagcccaggtacgcatagagaaccagtggtgtcaatagaagtgaaatgttgtgcctgacactgtaacactgtaaggactgttccaaatactagtttcactgctctttttataattgttaatattagacatacagtaaacaaatgcagcagcaagtcaattgtattagcagaatattgtcctcattgcatgtgtagtttgagtatagattccaaacctatggctgagtttcttctagtatgatcgaaagtttcttttttctttgctctgaataaaactgaactgtgggttctctataagtggcattttgggctttccctcttttttgtaaagcaatttctgcctagtttattgtccagttaactttagtgaccttttgaaagttggcattgtaaataaaacaagttgcaaaagagttttttggaatagaattaacacactattctctttattcatgagttggagactggaaaaaggcttcttgaggtaaatgttctgagtggagttaccatgatgtcttccagcctcctgcagtcgaggagtaccactgtattgattagcctgtatgtagcanggctcccttcgctgcatctgaggacttggtttctttttctttaattttagttttgatcctcttagttttacatatattgcctagagactcagttactagccagtttgtgggtatctgggagaacttaactggaaagtttgttagcttttcaattaaaaac

SEQ ID NO: 39796 - DNA, 244 bp, Macaca Mulatta
cccttccaagccagccttggaaagaaggtaaaggccgagggcagcagcagttcttctgatgatgattccagtgaggataaggaagagaagcccaagggcaagtgctctccaagtccacacccaaggccaatggcacctatgcactgactgtccagaatggaaaagcagctaagaacagtaaggaggaagaagagagcaagaagacaagaaaaatgtagcagtggcagtttccacaccaggttca

SEQ ID NO: 39797 - DNA, 2288 bp, Macaca Mulatta
  misc_feature (1)...(2288): n = A,T,C or G
atctgagctccagaactgcagggtacaagtcactgctgaagatcaccatgacccagtccacagtgcccctgaacctcatcagggttcacctgatggtggctgtcgaggggcatctcttccagaagtcattccaggcttctcccaacctggcctacaccttcatctgggacaagacagatgcatatggccaaagggtgtatggactctcagatgctgttnnnnnnnnnnnnnnnnnnnnnnnnnnnnnnnnnnnnnnnnnnnnnnnnnnnnnnnnnnnnnnnnnnnnnnnnnnnnnnnnnnnnnnnnnnnnnnnnnnnnnnnnnnnnnnnnnnnnnnnnnnnnnnnnnnnnnnnnnnnnnnnnnnnnnnnnnnnnnnnnnnnnnnnnnnnnnnnnnnnnnnnnnnnnnnnnnnnnnnnnnnnnnnnnnnnnnnnnnnnnnnnnnnnnnnnnnnnnnnnnnnnnnnnnnnnnnnnnnnnnnnnnnnnnnnnnnnnnnnnnnnnnnnnnnnnnnnnnnnnnnnnnnnnnnnnnnnnnnnnnnnnnnnnnnnnnnnnnnnnnnnnnnnnnnnnnnnnnnnnnnnnnnnnnnnnnnnnnnnnnnnnnnnnnnnnnnnnnnnnnnnnnnnnnnnnnnnnnnnnnnnnnnnnnnnnnnnnnnnnnnnnnnnnnnnnnnnnnnnnnnnnnnnnnnnnnnnnnnnnnnnnnnnnnnnnnnnnnnnnnnnnnnnnnnnnnnnnnnnnnnnnnnnnnnnnnnnnnnnnnnnnnnnnnnnnnnnnnnnnnnnnnnnnnnnnnnnnnnnnnnnnnnnnnnnnnnnnnnnnnnnnnnnnnnnnnnnnnnnnnnnnnnnnnnnnnnnnnnnnnnnnnnnnnnnnnnnnnnnnnnnnnnnnnnnnnnnnnnnnnnnnnnnnnnnnnnnnnnnnnnnnnnnnnnnnnnnnnnnnnnnnnnnnnnnnnnnnnnnnnnnnnnnnnnnnnnnnnnnnnnnnnnnnnnnnnnnnnnnnnnnnnnnnnnnnnnnnnnnnnnnnnnnnnnnnnnnnnnnnnnnnnnnnnnnnnnnnnnnnnnnnnnnnnnnnnnnnnnnnnnnnnnnnnnnnnnnnnnnnnnnnnnnnnnnnnnnnnnnnnnnnnnnnnnnnnnnnnnnnnnnnnnnnnnnnnnnnnnnnnnnnnnnnnnnnnnnnnnnnnnnnnnnnnnnnnnnnnnnnnnnnnnnnnnnnnnnnnnnnnnnnnnnnnnnnnnnnnnnnnnnnnnnnnnnnnnnnnnnnnnnnnnnnnnnnnnnnnnnnnnnnnnnnnnnnnnnnnnnnnnnnnnnnnnnnnnnnnnnnnnnnnnnnnnnnnnnnnnnnnnnnnnnnnnnnnnnnnnnnnnnnnnnnnnnnnnnnnnnnnnnnnnnnnnnnnnnnnnnnnnnnnnnnnnnnnnnnnnnnnnnnnnnnnnnnnnnnnnnnnnnnnnnnnnnnnnnnnnnnnnnnnnnnnnnnnnnnnnnnnnnnnnnnnnnnnnnnnnnnnnnnnnnnnnnnnnnnnnnnnnnnnnnnnnnnnnnnnnnnnnnnnnnnnnnnnnnnnnnnnnnnnnnnnnnnnnnnnnnnnnnnnnnnnnnnnnnnnnnnnnnnnnnnnnnnnnnnnnnnnnnnnnnnnnnnnnnnnnnnnnnnnnnnnnnnnnnnnnnnnnnnnnnnnnnnnnnnnnnnnnnnnnnnnnnnnnnnnnnnnnnnnnnnnnnnnnnnnnnnnnnnnnnnnnnnnnnnnnnnnnnnnnnnnnnnnnnnnnnnnnnnnnnnnnnnnnnnnnnnnnnnnnnnnnnnnnnnnnnnnnnnnnnnnnnnnnnnnnnnnnnnnnnnnnnnnnnnnnnnnnnnnnnnnnnnnnnnnnnnnnnnnnnnnnnnnnnnnnnnnnnnnnnnnnnnnnnnnnnnnnnnnnnnnnnnnnnnnnnnnnnnnnnnnnnnnnnnnnnnnnnnnnnnnnnnnnnnnnnnnnnnnnnnnnnnnnnnnnnnnnnnnnnnnnnnnnnnnnnnnnnnnnnnnnnnnnnnnnnnnnnnnnnnnnnnnnnnnnnnnnnnnnnnnnnnagatcaagtgcggaacagctaccagctctgtaataacggtaccctgcgggtgatgtatgctaatgggatgggtgtcagcttccacagcgagccccatgtcctagcaggcaccatcacccccaccattggacgctgcaacatctccctgcctatggagaatggcttaaactccattgagtggcgcctaagaaaggaacagattaaaggcaaagtcaccatctttggcaggaagctccggg

SEQ ID NO: 39798 - DNA, 287 bp, Macaca Mulatta
gggggaccagtgtcctttcctctggccccagggccccattttggtaccccaggctatgggagccctcacttcactgcactgtactcctcggtccctttccctgagggggaagcctttccccctgtcccggtcaccactctgggctctcccatgcattcaaactgaggcgcctgcccttctaggaatgagggacagggggaggggaggagctagggaaagagaacctagagtttgtgccagggcttttgggattaagttcttcattcactaaggaaggaattgggaac

SEQ ID NO: 39799 - DNA, 686 bp, Macaca Mulatta
  misc_feature (1)...(686): n = A,T,C or G
gggaagnnnnnnnnnnnnnnnnnnnnnnnnnnnnnnnnnnnnggaagagagaaaacagaaattgaatgtatctggaacatttttggccttcatagtgcagatatactatgttaacaagtaatacatttacctgtcagatctccaggttgtaaggttttgagctttctagtattagaattcattaaatgtttaattcatttcatattctaaggaattaggttatttacgtactaattcaggatgttaaaataacatccaacacagacaaccaccaccaatgcacagagttaatgagattcctaaaatacagttaagtacaatgtaacaaacagaattttgcatttgttgccaaaatcagatgtttaattacagcttattggcatttgtgggacttctggaacatagaaaccattgtcttacctggttatcccttgactaatagcatatctgcaggaaagtaccttgtttgtagtgatatgccccaatactgattgatttcactcttgaaatgagttatatcacttaatttgtataaacgttctgagtggagagacatgtacatgttaaaagcatgttgcattatatagagattctttttttaactccataaatgtaagactaatatattgcagaatattttcttacttcatggtacaaatcttctgcaccccccctttcattatgtg

SEQ ID NO: 39800 - DNA, 793 bp, Macaca Mulatta
ggatcctattttgtatcaatcagcagagtatagttaaagcttgtcttgatgttgcattcttgcaaatgtcttcaactcttacctgagaaaacatgggaaaatggtcagccagaccctttcagtttttcctttgcttttctaaggctcggggaaaccactgtttcagttgtataagattttttttgccacattcttatggcccagtcagattaatacccttttatctcactgagagaggaacacgtactgcctgtcataacagcattgtaatgccagtgtctcagtaagtaacagaaccctggtggtattaattgggtgttttttgccctggagaattcagattcccttctataccttctattctgcccagaagaggggggaatcaccagtgttataaaattagaagattgttttgccctatttactgaatatttgaacactgcagcattactagccaccagtgttaaaggacagatgaggggaaacatttgtttttagcagtaattccatgattcatctttttttagtaatttgttccaaatgaaagcatttattgacttgatgctcacaaagatcattttgaagaaagacgaattgggggtagatgataaattctagggaatctgggtgatttggaggattttcatttggtttttgcattaccagcaagttggctctcaggtaaaaagaaattttctgggtggaaataactccagggttaaactgggctgtgtggcccaaaaaccacggggtcccttttccccatgggggcccctcccccttaaaattcatt

SEQ ID NO: 39801 - DNA, 556 bp, Macaca Mulatta
gcccatggcgagaaccagattcacgacctgagtctgaacatggttctgaaccagactttttacacaagtaagtagcaaaaatttgtcttcttgggaaaaaacctttaaagaaagtaaaactatttaagaaaaactttatttgttcatcagaacatattgctggtcacttcatgataaaagaagccagaaacagagggtaaaaaccttatgtgagaagagctatacaaaatctgcaaacattgttgaagatatcagttcctggaagttcacagacctttaaatgtatggtgtctcaccaagtgctaatttcagttagcactttgcattttcattgggcaggtctgtttcttctcagggatttgccaagaaatgcaggttacttcctaggcaagaaaacctgtaagagcctatgttgtcagtagtctgaacaccaaatagactatatgacctttatcatccatttaattaatatttggtcttgttacatttatattttaaactcaaacttctcatggattaagaatttttaaggatcttacttgataaattctgagac

SEQ ID NO: 39802 - DNA, 787 bp, Macaca Mulatta
  misc_feature (1)...(787): n = A,T,C or G
ggagttgaaccctcactcagtatcnctgctaatntntnggttaaaaataaattaacatcataattgtcaaaagttatacataaaaatgaaaaatgtgctactgcacatataatgtcatttttcaagttcaaagctgacactatttttatctctgtgtggggaatatgtttcnnnnnnnnnnnnnnnnnnnnnnnnnnncaagttcttttttcctgccttatatatgtagaccatttcgtggcttacagtttccatttatatttagagggatattctccattttaaatgaccaagacatgccatctctgacttctcatgacatcttctgacaaaacaagattgtgctgtctataagaattatttaacaatcatatataaaccaagaagccataaatgctaacatgttataatcttgggctaatatatggaatattattttattttccatttcaacttaaattcaagtattattatcttttttttacattttccatttatttcaacaaacatgcatggaaaaatccattgtgagtcaaatattgttcaatgcccatagtaaaaaaattcctccccctcccaatagccctactcatatgatccacctcaatacccaatgcaatctaccagcattcccccctcaaagccttagtttcaatagatcattatgataaactaccaacataattgtggataatacaaaaaacaattgttgttcggtcccccttacaaccctctaaaaaactttgctaagaacatttttttatggttactccgagcgctcaataaa

SEQ ID NO: 39803 - DNA, 622 bp, Macaca Mulatta
  misc_feature (1)...(622): n = A,T,C or G
gggagaggggnnnnnnnnnnnnnnnnnnnnnnngtggcgcctttttttaaaggggggttttttgcgcggggttttttccattttcccccgtttttgaaaaaccccacagggcgggccnnnnnnnnnnnnnnnnnnnnnngggattttcaagccaaaacggaaaaaggccgaaggggcctttggggggcaaggggacccnnnnnnnnnnnnnnnnnnnnnnnnngggaggggaaaaggnnnnnnnnnnnnnnnnnnnncgggcctgttcgccctttgccaattcttaaannnnnnnnnnnnnnnnnnnggacatgtttttccccctctttgagcacttcttagaaaaactttgagaagttgactgaagcatctgggtgcttcttcttatgctcctcccgacaagtttgcacaaaaaatgcatatgatgacattntgcctctcggcttcttaggatctcctttgcccatgtttagttatttttcctcagcgaggcacagagtcgcccagtgcccgtccggctctcacttgccccggcgctgtctctatggagctcaatgtactgcaatggctgtgagagcgggagccagacgcagcctcctcactctctccgctctgtaacccc

SEQ ID NO: 39804 - DNA, 827 bp, Macaca Mulatta
ggggggcgttttgttcttgcctgttttgttcttccgtggtgttgatctgtgagttgtgttaggactgctaataggaagatgtcttcaggaaatgctaaaattgggcaccctgcccccaacttcaaagccacagccgttatgccagatggtcagtttaaagatatcagcctgtctgactacaaaggaaaatatgttgtgttcttcttttatcctcttgacttcacctttgtgtgccctacggagatcattgctttcagtgatagggcagaagaatttaagaaactcaactgccaagtgattggtgcttctgtggattctcacttctgtcatctagcatggatcaacacacctaagaaacaaggaggactgggacccatgaacattcctttggtatcagacccgaagcgcaccattgctcaggattatggggtcttaaaggctgatgaaggcatttcattcaggggcctctttatcattgatgataagggtattcttcggcagatcactgtaaatgacctccctgttggccgctctgtggatgagactttgagactagttcaggccttccagttcactgacaaacatggggaagtgtgccctgctggctggaaacctggcagtgataccatcaaggcctgatgtccaaaagagcaaagaatatttctcccaagcaagaattgagcgcctgggcctgtttttagtgccaaggctgcagtgggcaacccatgaaaaacaaaaccctcctcccggtaattttattttttatatccgttggagttaaaaaccccaggaactttcagaatttcagcctcaaatttgtgggttcg

SEQ ID NO: 39805 - DNA, 828 bp, Macaca Mulatta
  misc_feature (1)...(828): n = A,T,C or G
ggcagtatgaccccatttggcagagtgagactgacctgcagtattgatctcaatcatgtcttttaggggtcatggatttagccagttaaaacaaatcccaccaatcataaaggtctgtgttaaaaagccaggtggcttccttcttaagtttttgtgtgaaccattttgatctagcctggggtattgatttaggtgtagcacagctctgacagtgtgttggcagttgacccaaaaaccttgcaggcctgaagtggtatccagatagccagggcacacacaagaaacacaatcccccaggtcacacatggtccccatgcagacacacaacttacaattgttagggcatcttaggcagtacagattaacagagcccccagtgtggcctcccacccaagaaagatgtggcaggcatccttttttcttgtgcttttctgaaaagcagaaagtatgcctttatagttagaatttaaaagtttattttagtttattttcaaaattaatatggaccctataaatccaattttaattttaaagcattaataaaaatgggaaaatcccggttgttttcccattttttggaaatttacctggaacatgggaaaataaccctaacctggctaaataaacctttcaaaaatttaagaaaggaatccaaaaaagggggttttttttcccgtttttaattaaaaatatttgtcccttaaaagaggaaagtggaaaccttagttttttggaatcctccaactttctacaaaatatcaaaagtagtgtttacgcgcaaaatattttgaaggaattttctcatctctcaacaaagagagaacgaan

SEQ ID NO: 39806 - DNA, 638 bp, Macaca Mulatta
  misc_feature (1)...(638): n = A,T,C or G
ggggctgagctgggagaaagatggcggcagccgtgcgacaggatttggcccagctcatgaattcgagcggctctcataaagatctggctggcaagtatcgtcagatcctggaaaaagccattcaattatctggagcagaacaactagaagctttgaaagcttttgtggaagcaatggtaaatgagaatgtcagtcttgtgatctcgcggcagttgctgactgatttttgcacacatctccctaacttgcctgatagcacagccaaagaaatctatcacttcaccttggaaaagatccagcctagagtcatttcatttgaggagcaagttgcttccataagacagcatcttgcatctatatatgagaaagaggaagattggagaaatgcagcccaagtgttggtgggatttctttggaaacaggaccaaaacgtacatgtagattataactggaaactactgaaaattgctagctatatctggagatgaaatcattcaggcggagcttaaaaataagccccttgctccaatgatccccttgacaatccgaacttttaggttcgtgcccggnnnnnnnnnnnnnnnnnnnacccccaaggaatgacctcttaaaattcccaaggaaaaaaagcctaattt

SEQ ID NO: 39807 - DNA, 223 bp, Macaca Mulatta
  misc_feature (1)...(223): n = A,T,C or G
ctttatttgatatctaaggtgcaagacaacaatatattacgagatctatagacatgaaggcaaagctcatgtatctcttatcatccaaacacctcaatttatattataaactttgtccatatatcctgcttatgcttttatataatatatggactaaacaaaataaaataacagtannnnnnnnnnnnnnnnnnnnnnnnnnnnnnnnnnnnnnnnnnnnnnn

SEQ ID NO: 39808 - DNA, 468 bp, Macaca Mulatta
  misc_feature (1)...(468): n = A,T,C or G
atgttactttctagcctgctgaaggtggtcacagcttcattctggctaggatctggcattgcccagaagataactcaaacccaaccagcaatgttcgtgcaggaaaaggaggctgtgactctggactgcacatatgacaccagtgatcaaaattacggtctattctggtacaagcaacccagcagtggagagatgatttttcttattcttcagatgtcttatgtcaagcaaaatgcaacagaaggacgctcactcattgaacttccagaaggcaagaaaatccgtcaaccttgtcatctctgcttcacaagtgggggactcagcaacgtatttctgtgcaatgttgactcaggggggatctgaaaagttcgtctttggaacaggcaccaggctgaatgttgtagcatnnnnnnnnnnnnnnnnnnnnnnnnnnnnccagctgagaggctctaaatccaatgacacgtc

SEQ ID NO: 39809 - DNA, 563 bp, Macaca Mulatta
cactccgctctccaactcctgaaatgcctctgcagttgctggagaaaagggcccgaaggtcaccgttttcagacagaagctgccgtgtgtgcgcccggcatgatctcctcgtcccgccggggccagtgaggctctgggggctttgcccccgccgcggcagctggtagagaagagccgtgtttcacctccccgacgtctggaccagtctggaagggatggagacgctgtggccaagtgcagtctctctcggggtctctccccgcccgggtggacgtggcgctccctcctctgcccctggggcttagcagcagccctgggcagccgtgcggccctcgcctgcgtcctgcggccgtcccgcggtgtcacgccggcaacaacacaaagtcgtcgttgacgtcgaccatgggcacgtagaaggagggcacctcgttcacgcacagggacttgtgcccggcggggtccagctcctgcaccttcagctgccactccatcctctgcacagcgttcagggccgcggcctcgtgctgctgccgcatgaggaggcacgtctgtgggacacacag

SEQ ID NO: 39810 - DNA, 850 bp, Macaca Mulatta
  misc_feature (1)...(850): n = A,T,C or G
ggnnnnnnnnnnnnnnnnnnnnnnnnnnnnnnnnnnnnnnnnnnnnnnnnnnnnnnnnnnnnnnnnnnnnnnnnnnnnnnnnnnnnnnnnnnnnnnnnnnnnnnnnnnnnnnnnnnnnnnnnnnnnnnnnnnnnnnnnnnnnnnnnnnnnnnnnnnnnnnnnnnnnnnnnnnnnnnnnnnnnnnnnnnnnnnnnnnnnnnnnnnnnnnnnnnnnnnnnnnnnnnnnnnnnnnnnnnnnnnnnnnnnnnnnnnnnnnnnnnnnnnnnnnnnnnnnnnnnnnnnnnnnnnnnnnnnnnnnnnnnnnnnnnnnnnnnnnnnnnnnnnnnnnnnnnnnnnnnnnnnnnnnnnnnnnnnnnnnnnnnnnnnnnnncctaatcaaatcttaattcacagcaaatcccttccaaactccttcctctcttaccaggtttttaggccccccgggggatttaccccattccctaattaaacaaaaatatccgcaaaacccctccaaaaaacaaannnnnnnnnnnnnnnnnnccccccttattcttttcccagagaggaaaaaaatacccccccatacccaccctacacatataaataaaaaaacacccaccacccccccacgttctttatagtgtaaatattatgtatgggggtggccacccccccagcgcgcgataatgtgagacaacaataacctcatattaattttattatataacctccactccccttcctttcgctatatatatatcttacgctnctccgaatcactcatncacgtatcgacttcacttcacctatcacacaactaaatgcacttaatattaatatataccctcttctgactcagaaaagcaaa

SEQ ID NO: 39811 - DNA, 753 bp, Macaca Mulatta
ggggatgtggagaaaagagaaccctcgtacactgttggtagaaatgtaaactaatacaaccactacgaagaacagtgtggaggttcttcaaaaaactaaaaatgaattaccatatgatccagcaattccactactgagtatatatccaaaagaaagaaaatccatgtatcaaaaagatacccgcactcccatgtttattgcagcattgttcacaacagccaagatacagaatcaacctaagtgcccatcaatggatgaatggataaagtgtggtatatatgcacaatgaaatgttaatcggccataaaaaatagtgaaaccttctcatttgcagcaacatggatggtactggagactactatgttaaataagccaagtacataaagacaaatattgcatgttttcagtcatacatggcagctaaaaatgtggatttcatgatgacatagagtacattggtggttaccagaggccagaaaggaggggatggagtaggagacgaagggggaaaaaggatatatttattaccactgaactgtacacttaaaatggtaaagatgatatgttatatattacctcagtttacaaaagaaaaaacaaatggcatcaatgtcaataagtgtaaaagttgtactagggataaatctgccatttgaaagggaaattagaaatctgaaataacgagtgcagttagcctgtgaaaccccttgaagaccccaaaagtctcattcagaaactgggtcccaaaatggc

SEQ ID NO: 39812 - DNA, 790 bp, Macaca Mulatta
  misc_feature (1)...(790): n = A,T,C or G
aggctttttctttaaaccaggatttggggggtggtttccccaacccaattttaagtttggggtttttttacggatcagggaaagtcagaagcccagcaggggcagggtgccacttatttttgttccagccagaccccttgcccttgctgattcaccgtccctggggctggactgcttcacattaagtgttctttgggccttggagtttcctttttcagagccttgggcccctgggctccttcactcagtacttggtgggccaccatcacaccctcccgtgcagtaggtattggcttgcctggcggagtcatgtgggagaatccttgtatggttcctacagactttcctctttgagatagcgtttctccagttttgattgcttacagatcaaagtgccaaaaacgaacctcaagatagctgaaagttttctttacgcttttacatttattctcaacattttttgtgtgttggggagggtggtgaagtgtttatccagtgatctttnnnnnnnnnnnnnnnnnnnnnnnnnnttttactctgtcgctcaggctggagtacagtggtgctcactgcagcctcgttctcctgggtttgagcaatcttcctattnnnnnnnnnnnnnnnnnnnnnnnnnnnnnnttccgccaccacaannnnnnnnnnnnnnnnnnnnnnnnnnnnnngggannnnnnnnnnnnnnnnnncannnnnnnnnnnnnnnnnnnnnnnnnccatttgcccnnnnnnnnnnnnnnnnnnnnnntnnnnnnnnnnnnnnnnnntcgtgcc

SEQ ID NO: 39813 - DNA, 623 bp, Macaca Mulatta
  misc_feature (1)...(623): n = A,T,C or G
ggggccaatannnnnnnnnnnnnnnnnnnnnnnnnnnnnnnnnnnnnnnnnnnnnnnnnnnnnnnnnnnnnnnnnnnnnnnnnnnnnnnnnnnnnnnnnnnnnnnnnnnnnnnnnnnnnnnnnnnnnnnnnnnnnnnnnnnnnnnnnnnnnnnnnnnnnnnnnnnnnnnnnnnnnnnnnnnnnnnnnnnnnnnnnnnnnnnnnnnnnnnnnnnnnnnnnnnnnnnnnnnnnnnnnnnnnnnnnnnnnnnnnnnnnnnnnnnnnnnnnnnnnnnnnnnnnnnnnnnnnnnnnnnnnnnnnnnnnnnnnnnnnnnnnnnnnnnnnnnnnnnnnnnnnnnnnnnnnnnnnnnnnnnnnnnnnnnnnnnnnnnnnnnnnnnnnnnnnnnnnnnnnnnnnnnnnnnnnnnnnnnnnnnnnnnnnnnnnnnnnnnnnnnnnnnnnnnnnnnnnnnnnnnnnnnnnnnnnnnnnnnnnnnnnnnnnnnnnnnnctcagtgccatagtggcctaacacacccatctattagaaaggttcatctttgccccaccnnnnnnnnnnnnnnnnnnntctgattaacttgtggccccagcccccttaaacttcagacatctttgggcgagcttctt

SEQ ID NO: 39814 - DNA, 1118 bp, Macaca Mulatta
  misc_feature (1)...(1118): n = A,T,C or G
ggcnnnnnnnnnnnnnnnnnnnnnnnnnnnnnnnnnnnnnnnnnnnnnnnnnnnnnnnnnnnnnnnnnnnnnnnnnnnnnnnnnnnnnnnnnnnnnnnnnnnnnnnnnnnnnnnnnnnnnnnnnnnnnnnnnnnnnnnnnnnnnnnnnnnnnnnnnnnnnnnnnnnnnnnnnnnnnnnnnnnnnnnnnnnnnnnnnnnnnnnnnnnnnnnnnnnnnnnnnnnnnnnnnnnnnnnnnnnnnnnnnnnnnnnnnnnnnnnnnnnnnnnnnnnnnnnnnnnnnnnnnnnnnnnnnnnnnnnnnnnnnnnnnnnnnnnnnnnnnnnnnnnnnnnnnnnnnnnnnnnnnnnnnnnnnnnnnnnnnnnnnnnnnnnnnnnnnccttggtattgtaggcctctcgtcatccaaacccccactgaaagctttttccgagctgcaacccgtcaccttataaatacgactcaaacgggaatgcagccgtctttgcccagtgttaactttctcggccctaatcccgagatttcaataaccttctaggaaatcggcccctcctctactataactcttgttatacgtcatataccttaaacttgtggttccatcacgataagagtgaaacatcttaccacaaaaatatcccctctgaaatcatgtcgcaccaaaatactttaaaagatccaacggtgccctcccctattttctagggggaaatatgagcaatttgtttaaaattcanaagcgctctcagaaaagcaccacttctataaatcttttaaaagacacctttttttgttccccactcttggaaccgcctcctctctctcaaacatactaaatttacataaagccccttcaagctttttaggggggcctccaaaaaagctgtcacaattttaggagataagataccacaccggggacaccctcttaaagagttatgtttgacgcgggaaaagtccgctacagtttagaaaaaacacctagttagaaatttgcgttattgtcaaacgtgggcggactcctatacacaacaagaacgctaaaaatcaaagggaggggcagcacaatacgatagccccactccgctcaaccgggatgttaatttccgctttaaacacag

SEQ ID NO: 39815 - DNA, 1468 bp, Macaca Mulatta
  misc_feature (1)...(1468): n = A,T,C or G
ttgggggataaagagttctggtccggatggcacaaacttcccattaatcgtccaagaatactctgccggtgggttagagttcgccctcgtgccgaattcggcacgaggctttttcaaatcatatttaattatttcttgatctttactcaaagaatcattctatgctaaatttacaacatgaagcaataattaagcctggatctgataagttattgggtgactagaacctaaaacacaatttatttttaatttagactctcaagtcttattaaacttggggggaaaattgaacattcagatgatattttaagttttctttgtgactagatgtcaataatgtcatgctttattttactgtacatagatgacccatggcacacaaagtatatgtataatatcacaattttgtacttccacctttaaaagtatgccaaagacttcataatgaattcactatatttaatgaataaggcaaattaatgttttatctgaaatcaaaatgagattggataattcctggaatctgatttctgtaagtttcgatcctaaagggaccttaaatatctactagaagttcagtgtattcctcagattatatgacattagtcaaccaatttagttgtaacacaaagtggggaaagtcttacgtgttgaaggagtgtgaaaataaaaatctcatgcagtttctacttcattttccaaggattataatatgctgagtaaactcttggcacaaaggaggaagccagctacggaccacataatgaaaactattcagaaaacatttcagcaaatattactactttgaataccgttcaagtcgtattaatataaatacttgtttccctacattaatttacccaaactgggattaattcactggtccccacaaaaagaccaaggggattaatctgaatccccacattctgccccatgccagtttaacttaccacttttcacccgttttaaaaatcctaaagatctttccttccaaacaacatgcaattcacaatttttacannnnnnnnnnnnnnngnnnnnnnnnnnnnncctttccgagggagaaaagaataccccctgttacatccttcatagaaagagcacctttgaaaagcgataatttccccacttattttactgtggaattatgatgaggcaaaaactggcccatacaagaaaccacaactgggaccatattctcagggtttgtttgaatactgggttagcacttacctacaagaaacacgcaacaaaccttaaacgtggactcctcattaaaatcccccatacatcaacgttgtatgttacatagcaagatacaaactctggtagagctgtcaactctctaatcttatgcttttacatattcctgccctccgtaatatattcgtctcgcacattctctaatactacttatcnctgctcagcacattcgtgaccataatacaactcgatgactattcaacaa

SEQ ID NO: 39816 - DNA, 693 bp, Macaca Mulatta
acaaatgaagggaagagtaatggagaagattaaatttgccaaaagcctctcagaaaatcactgttctctgggttccttatagaattattaaaaaggagaaaaataggcctttcataaataagtgaaaaaacaaatagcatttgtggaaagaacccatcttcattcataagcaatatagccaaacgtatttaaattaactctctatgacaagttttatcattattactttcttacgaatttatttgaatctaaagtaaacgtcagcccttgactagaatgttctttgttattctttttgcttctctgaactttaagtcagagtcacttcctatggtttgactcagtgctcatgcaactttacatagtgtcaaagccgtttggtttatcttctttaattttgttagtttggggattgtctccaggattttaatttgcctatttgcttaccaattatgcattctttttctgcctcaactgcaacagaattaggggtatgatagtttatagatagctggctctgacattcattcattcattaaatattggttgagggcctaagtggtacctacgatgccaggttctgggattatagaggtccctgcccttgaggaatttataatctcctgcgtgcaagatttaaacaagcaatacaatcatgcacgctaagtgtaatgccagagcagttgctgggtg

SEQ ID NO: 39817 - DNA, 189 bp, Macaca Mulatta
atacacagccgtccccctacagatgctgtgtcgggcatgaggtgccagagggcaggcaagttaaggaatttgcttgcaggcaccaagtcaacctcagcccatgtccctctccctaggaacctgagttcttgccttattgttacacttttccagaagtggtgtggcttctcctgcctctcgcttaatgag

SEQ ID NO: 39818 - DNA, 647 bp, Macaca Mulatta
  misc_feature (1)...(647): n = A,T,C or G
atgccgtggcgcaagcctgntggtcccagccaatcagtaggctgaggcacnnnnnnnnnnnnnnnnnnnnnnnccgaggctgccgtgagccaagatcgtgccactgccctctaacctgggcaacacaaaaaaaagaacttggacatgcccccatatatactagttgtggtgaagcattatttcgagttaagtcgtataagaatgactgtatgaccaaaggcaaatatatgtggaagaaactcaccaggaattcttctgtgggtttttattcaatacatgtcagtaggggagttatacccccttttaacaagtttgtgttaacctacagtctaatcgaggcatcttatcccagggaatgccaccaccattccccctgttcccaaactggtaacacggaaatcatcttaagacatcttcctctccctatcacttcttcaagtcctgtcatttttaccttgtaaccatctctcaaatgtgtctacttcacttctcaccactccctaatctaagctaccatcagcaccttttgtatgcataactgctgttgtctcctaactcttcttcctgcagcgactcttgccctccctgtatntactctgctgcaggcagaattcttctttttattcaaagttgaatttaatccagac

SEQ ID NO: 39819 - DNA, 629 bp, Macaca Mulatta
  misc_feature (1)...(629): n = A,T,C or G
agaataaagtctggggggaaggtgaagcacccagcccaagactcagcagccaggaagtggcccggcgctctttccaccacaggtgcaggaattctcacagaaaagtggaggccaaggtgtgagaattcctcaatgactgccttttaaaggaagaggnccaggcttcctgtcagagactggggacccagggagaaacatgtcccggcccctgtccccctccacaattcagaggcccacattctaaccggggaggctggccaattaaacagatcatgacatctagagctaagagctctccgactatgaaccagatgcctggagaacacagatgaatggtctgagcatgagcgggggcgggaggcagcgttaagtgaggcatcagagtcagaacatggcaaataagtgtttgtggagaggaattcgtagaaaagggcaatgtgggcatcacatgggccaaggaacagaggggtagcagtagctgttgtgccaagcggcaggtcttatacgctaccctctagatctgggtttccttaaagcaacttgagaggacaaccctgcaaagcctggcacggtggccgagagggaaaggagcattcgaggtctcagtccttgctctgagcctacttctc

SEQ ID NO: 39820 - DNA, 333 bp, Macaca Mulatta
  misc_feature (1)...(333): n = A,T,C or G
cccgagactccctggaaccactgcccaccatcctgcaagccatcgaggagggccagcctgtgcttgtatcagtgccaatgcgtctcccaccgcccccggcccagatccactccannnnnnnnnnnnnnnnnnnnnnnnnnnnnnnnnnnnnnnnnnnctccccaagcacacccctctcatctccaagagccagtctctgcgcagcgttcgccgctcagagagttgggcccggccacagccggacgaagagcggcccctgcggcggccccggccggtgcagcgcacgcagagtgtcccaacccggcgtcctaaccgccgccgccaatctgcggg

SEQ ID NO: 39821 - DNA, 568 bp, Macaca Mulatta
  misc_feature (1)...(568): n = A,T,C or G
ggaggttttccaactagaaattcggagcccagaaggtcaaggctccagagatccctttctcatcatccttcagttgtctgaggagacagtgagtgtcacagtgagtgctgattcccccagaatcttgcaatctttaaagctctccccgctgactcacacagccagtttctctgctttcaaatttgtgtggacccacttgtgaaagttgacagggcagcctacccaaattcctggtcctaaaaaaaaaaaggcaaggcttcttgccccccatgggcaagnnnnnnnnnnnnnnnnnnnnnnccctgggccnnnnnnnnnnnnnnnnnnnnnnnnnnnnnnnnnnnnnnnnnnnnnnnnnnnncccnnnnnnnnnnnnnnnnnnaatnnnnnnnnnnnnnnnnnnnnnnnnnncnnnnnnnnnnnnnnnnnnnnnnnnnnnnnnnnnnnnnnnnnnnnnnnngnnnnnnnnnnnnnnnnnnnnnnnnnnnnnccccctttannnnnnnnnnnnnnnnnnnngtggtccccccccccccgcggcggggngggagagaaaacgccccccccc

SEQ ID NO: 39822 - DNA, 771 bp, Macaca Mulatta
  misc_feature (1)...(771): n = A,T,C or G
gggaactggtaatagtatcctcaaagtagaagaattaacacnnnnnnnnnnnnnnnnnnnnnnnnnnnnnnnnnnnnnnnnnnnnaatctctgtatttaaaaagctgggttactcagtaagtctggaatgtcttttagttcttaccctctaagataaaatatcaattatgtcttaaggtatctgcttagggaatgaatgcttgctgctggaaaccacatgtaagatttactcaagagcaactactaaaaaacatcagcgaaggtgtgcaagtcattagtcaatgaattgaatacatcagtgatatggcctgcattacctaggtggagaggcaaatctctgcaaaatcaaaaaactggtttaatcaggcatgattcatgagcagcattccctgataagaatccaagatagttgagtgattccttcttcaaaatcttgaacattatacacaatactcagtaacttagaaaataaagcgattctttaaagagtataaaaatatactctttatttatttaatattactaggaattaatagtgtcagatagtttttagtatggcagaggatatgggcccatccattttactttaacgatttttattaaaatcttctgaagtatatgcttccctgtcccttgaggataataaacagtggttgacttangaaacatcagacacccaacctgtgtttttaatacaggggactctttgcatcactcagggccattaaacatcttggaatcaaatgggcccctaaaattgcctggtaattc

SEQ ID NO: 39823 - DNA, 783 bp, Macaca Mulatta
  misc_feature (1)...(783): n = A,T,C or G
gggaagcacatgagtgtaaataaatatatggagattattggccactctgtaaactatctgaagtagtagttttaaatatttttacttgtgagtgtatgtacttaaaatattcttaactagagtctaacaactagaaggccagtgtagcttcatcaggcattgaggacttgttccttaccaagaaaataatttgaattattgtgaagcaaaggaaattgatctttcttgaggcttatttcattgactttaagaatttgcctgctatcaannnnnnnnnnnnnnnnnnnnnnnnnngaggtagagtctcactctgttgcccaggctagagttgcagtggcacagtcttgannnnnnnnnnnnnnnnnnnnnnnnnnnnnnnnnnnnnntgnnnnnnnnnnnnnannnnnnnnnnnnnaacaggcacgcactaccacccctggctaatttttgatatttttagtacagacannnnnnnnnnnnnnnnnnnnnnnnnnnnnnnnnnnnnnnntctcaaatgatctnnnnnnnnnnnnnnnnnncagtannnnnnnnnnnnnnnnnnnnnnnngcatcctggccccactttgtttaacatttacctcatccagttacttctcccgtgtaatcttcatttgaaagtaatgacatgagctttcttttggggaatctaaaagcataggctgcttctgtcagcttgatgctgtatcctcactggccccatttttcttttgggctgcttaaagggttcacagaactctggtactgaattgggaaaatgttttt

SEQ ID NO: 39824 - DNA, 663 bp, Macaca Mulatta
gcttacttaagattccctttggataggtagggcagaagaccaagctacgctgtgataatgaaaagaaagagagaaattcactggcttgtggaattgaaaagccaagatccagctgtgcttttaagcctgagccattctcccgctcttggctctgcctctcgctgtcttggcttcacccttcgcagactgccctgcaaggactgagggggagtctcattggactggctcaggtcgtgtgcctagttctgaaccatccactgtttccagagggatggggtgtcctgatcaggtaggaagaagtcagacctctctgagctaactgtgctgagaatcgggtagaggaggccccccaaaagtaaagctgggcactgcagtacaggagaagggtgatcactggttgctaagcaaccataaagtaaccaacatctcatgtgggttggggtttgcccctgtgaatagataggtggcacttggaatttaaatgcagcacatccagtgctcaagctcctgggcttcgtctgctctgcactttttcctctgccctttgggctaaagccattgggtttgggacagaaggggagagctggtacctcttccctttttagcccaggaaaggtgtttctccatcatttcacggatcaaagtcattaagtctgagtaatt

SEQ ID NO: 39825 - DNA, 674 bp, Macaca Mulatta
aggggcttatcttggtttctctgaggtgcctgtgttccccgttcttagactggatgcctggattcagtgctggcaagtgaggttagcagtgtgacatctgagcggctggattattgataatccttcatgccttttctgtatttcccaagtggaccgtgcgaaggacaagggagaaaacaacagagcaggcagtggatgagcatcgttttatagcccaaagaaccaccttcctcatcctaaccaatgaaggcagaagacttagcagccccatccacatgatgattccagtcatccaggctttgaacagcaggttttgctgatgtgtctgttacttttcggaactagtgaactgaagggtgtcaggtgttctgtaaatatttagcaggcactttttgtgcccctgcggttgtggcccagaggctgtcccaaggagaagcggaagcctcaacacatcatttgaaaatgtggtagttaatacttagatgcttatagtccttaatcctcaaattcttattccatttttgtgggcagacagaggatcagaaaaaaataatcacaatgtgcagagagaatagagcaaatgtctgctgaggccgtgtgagtgataggagcccagacaactttcttggggaaagtttataggtagatgcatcacagaaaagtcgggccaggtg

SEQ ID NO: 39826 - DNA, 4147 bp, Macaca Mulatta
  misc_feature (1)...(4147): n = A,T,C or G
ggcagcatgaagcgcaccccgaccgccgaggaacgagagcgcgaagctaannnnnnnnnnnnnnnnnnnnnnnnnnnnnnnnnnnnnnnnnnnnnnnnnnnnnnnnnnnnnnnnnnnnnnnnnnnngtggcagctgaaatatcctaaactaattctccgagaagccagcagtgtatctgaggagctccataaagaggttcaagaagcctttctcacactgcacaagcatggctgcttatttcgggacctggttacgatccaaggcaaagatctgctcactccggtatctcgcatcctcattggtaatccaggctgtacctacaagtacctgaacaccaggctcttcacagtccccnnnnnnnnnnnnnnnnnnnnnnnnnnnnnnnnnnnnnnnnnnnnnnnnnnnnnnnnnnnnnnnnnnnnnnnnnnnnnnnnnnnnnnnnnnnnnnnnnnnnnnnnnnnnnnnnnnnnnnnnnnnnnnnnnnnnnnnnnnnnnnnnnnnnnnnnnnnnnnnnnnnnnnnnnnnnnnnnnnnnnnnnnnnnnnnnnnnnnnnnnnnnnnnnnnnnnnnnnnnnnnnnnnnnnnnnnnnnnnnnnnnnnnnnnnnnnnnnnnnnnnnnnnnnnnnnnnnnnnnnnnnnnnnnnnnnnnnnnnnnnnnnnnnnnnnnnnnnnnnnnnnnnnnnnnnnnnnnnnnnnnnnnnnnnnnnnnnnnnnnnnnnnnnnnnnnnnnnnnnnnnnnnnnnnnnnnnnnnnaggccctgaagaggaaagtgatgatgactctcatttcgaaggcagagatcctgatatttggcatgttggttttgagatctcatgggacatagagacacctggtttggcaataccccttcaccaaggagactgctatttcatgcttnnnnnnnnnnnnnnnnnnnnnnnnnnnnnnnnnnnnnnnnnnnnnnnnnnnnnnnnnnnnnnnnnnnnnnnnnnnnnnagtgctcaacaggaaccttggattatattttacaacgctgtcagttggctttgcagaatgtccgtgacgatgtggacaatggtgatgtctctttgaaatcctttgagcctgcagttttgaaacaaggagaagaaattcataatgaggnnnnnnnnnnnnnnnnnnnnnnnnnnnnnnnnnnnnnnnnnnnnnnnnnnnnnnnnnnnnnnnnnnnnnnnnnnnnnnnnnnnnnnnnnnnnnnnnnnnnnnnnnnnnnnnnnnnnnnnnnnnnnnnnnnnnnnnnnnnnnnnnnnnnnnnnnnnnnnnnnnnnnnnnnnnnnnnnnnnnnnnnnnnnnnnnnnnnnnnnnnnnnnnnnnnnnnnnnnnnnnnnnnnnnnnnnnnnnnnccaggtgccagtcgcgaattgcccggactttacctgctgatcagaagccagaatgtcggccatactgggaaaaggatgacgttacgatgcctctgccgttgatctcacagacannnnnnnnnnnnnnnnnnnnnnnnnnnnnnnnnnnnnnnnnnnnnnnnnnnnnnnnnnnnnnnnnnnnnnnnnnnnnnnnnnnnnnnnnnnnnnnnnnnnnnnnnnnnnnnnnnnnnnnnnnnnnnnnnnnnnnnnnnnnnnnnnnnnnnnnnnnnnnnnnnnnnnnnnnnnnnnnnnnnnnnnnnnnnnnnnnnnnnnnnnnnnnnnnnnnnnnnnnnnnnnnnnnnnnnnnnnnnnnnnnnnnnnnnnnnnnnnnnnnnnnnnnnnnnnnnnnnnnnnnnnnnnnnnnnnnnnnnnnnnnnnnnnnnnnnnnnnnnnnnnnnnnnnnnnnnnnnnnnnnnnnnnnnnnnnnnnnnnnnnnnnnnnnnnnnnnnnnnnnnnnnnnnnnnnnnnnnnnnnnnnnnnnnnnnnnnnnnnnnnnnnnnnnnnnnnnnnnnnnnnnnnnnnnnnnnnnnnnnnnnnnnnnnnnnnnnnnnnnnnnnnnnnnnnnnnnnnnnnnnnnnnnnnnnnnnnagttttaattttaatataaaatgcagctcttcagttgccctggccacatttcaagtgcttaatagcctcatgtgactagtgactgctgtatggacggtacagatatggaacattttcatcattgaagaaagtcctattggacaacgcttctataagaagtttgaaagcaggaattctcatttccattcttctgtagcctctatccccaaaggcaaagaaactaaaagagaaatgactcattgaagattggcctctctcctttctctaagacgaacctaagtaaaagcctgagctttgagttctatgctcagcgcacaggaaggagatgttaacaattaaaataaagttgatatcctgtctttagggagtttcgctgatctcttgaaagagacacagccctatttacattattccgcagatttcaccagcatagtataattttttctgtaagtccctcattcttatgtaataacaggtggaactgaggtttgaagaacctcagtggctcatcctgatgacattggagactcagagagacaagagagagtagggtttaaaacctgagctttaagactcccactagctttgtgtcctttggtattaacgtgcctcagtttcctcatctgtataatggggatacatgaaaggcaccactcccaaggtgaacattaagtgagatgattctagttacagacttagaacaatttccagcacatagtcaaatatccaggaaattctagtaccgttatgtgtgggtgaactgacctggatgtagatgctttcatctttctttctgacccctccgccagttttgtcttgtgatgccgctaacacatctccccctttccgacctggctcccgcccannnnnnnnnnnnnnnnnnnnnnnnnnnnnnnnnnnnnnnnnnnnnnnnnnnnnnnnnnnnnnnnnnnnnnnnnnnnnnnnnnnnnnnnnnnnnnnnnnnnnnnnnnnnnnnnnnnnnnnnnnnnnnnnnnnnnnnnnnnnnnnnnnnnnnnnnnnnnnnnnnnnnnnnnnnnnnnnnnnnnnnnnnnnnnnnnnnnnnnnnnnnnnnnnnnnnnnnnnnnnnnnnnnnnnnnnnnnnnnnnnnnnnnnnnnnnnnnnnnnnnnnnnnnnnnnnnnnnnnnnnnnnnnnnnnnnnnnnnnnnnnnnnnnnnnnnnnnnnnnnnnnnnnnnnnnnnnnnnnnnnnnnnnnnnnnnnnnnnnnnnnnnnnnnnnnnnnnnnnnnnnnnnnnnnnnnnnnnnnnnnnnnnnnnnnnnnnnnnnnnnnnnnnnnnnnnnnnnnnnnnnnnnnnnnnnnnnnnnnnnnnnnnnnnnnnnnnnnnnnnnnnnnnnnnnnnnnnnnnnnnnnnnnnnnnnnnnnnnnnnnnnnnnnnnnnnnnnnnnnnnnnnnnnnnnnnnnnnnnnnnnnnnnnnnnnnnnnnnnnnnnnnnnnnnnnnnnnnnnnnnnnnnnnnnnnnnnnnnnnnnnnnnnnnnnnnnnnnnnnnnnnnnnnnnnnnnnnnnnnnnnnntgagacaaagtctcactctgttgcccaggctggagtgcagtggtgccacctcaactcactgcaacctctgtctcccaggttcaagggattctcctgttcagcctcccaagtagctgggactacaggcacgtgccaccatgcccagctaatttttgtatttttagtagagacggggtttcgccatgttggccaggctggtctcgaactcctgacctcaggtaatccgcccgcctcagcctctccaagtgctgggattacaggcatgagccactgcgcnnnnnnnnnnnnnnnnnnnnnnnnnnnnnnnnnnnnnnnnnnnnnnnnnnnnnnnccatcctcgcatggcaacaagctaaatagcatcttcccactgcgagttggggcatgacccagcctatagtttgccatactccctctttttctccattttatcattaattgtgaacctgacccgtgtcacctcttcatgttagcgctctccaaacctgcttgcttgcacccctctagtcaaaatgttttgtgctcaccccaatatatgtgtgactattgagctctatttgtagactgcttgtactaatgtcatgtgcatcataaaatattcatatccaataaaaatattaaaaggatg

SEQ ID NO: 39827 - DNA, 764 bp, Macaca Mulatta
  misc_feature (1)...(764): n = A,T,C or G
gcccaaggccttgggcccaaaaaattggtggaaaacccccggttcttcttctggaaaatttccaaaaaatttgccctgggcatgggtgatggggcaccctgtaatccccagcttacttggaaggcggaggcaggaaatttgcttgaacccagggtgcaggaggttgcaatgagctgaaatcgggccattgcaatccagcttgggcaatggagcgagactacannnnnnnnnnnnnnnnnnnnnnnnnnnnnnnagtacttcctactaggacttaaagttacttaagaggagtcaagagtaatgaggagggctggacacggtggctcatnnnnnnnnnnnnnnnnnnnntggaggccgaagcaggcnnnnnnnnnnnnnnnnnnnnnnnnnnnnnnnnnnnnnnnnnnnagcgnnnnnnnnnnnnnnnnnnnnnnnnnnnnnntgtggtgatgggtgcctgtacnnnnnnnnnnnnnnnnnnncnnnnnnnnnnnnnnaatagaacccaaaggtggaggttgcagtgagctaagattgcnnnnnnnnnnnnnnnnnnnnnnnnnnnnncgagattnnnnnnnnnnnnnnnnnnnnnnnnnnnnnngtaactaggaaactgttttacatgtgggcttattataagaagaaatttaataaaagctgagagatgggtctggataaaacttgctgattcaaagaaagtggatgggaactttactgatcttggtttaaaatatcctgagtcacctgccttatgaggtgcc

SEQ ID NO: 39828 - DNA, 674 bp, Macaca Mulatta
  misc_feature (1)...(674): n = A,T,C or G
gggcttggtgatacaataaacagcaccctgtcataaggaccgcataaaacatggcctgacatttctttaaaagtaaaaagaaacacaactgcagcagatgaccttttctctgagggcacagctgttttgtgtggttagagggacctgcggtctcatatttgggggctacgatatatgactggcttttcacaaagtgtttccatgagaaattacagtacgttccaaaggggagcaccaattcacatcaggcagggaggattttttttcccctcttgatgttttccaaatgatatttgtgctgaatatttgctattagaaacttctttggtgcatgaagtgtgagtggtatcggaaataccaaggtgtcttgcttcctggtggagtctgatgatgggctttctaccaccgtggtgggccagcaacttcgtggacttttgaagatccctccagccgtggtgcttctgttggtccagattgaaatttctggggaaatttaaaacagcccctttgttaaaatgggaggcgattttcgnnnnnnnnnnnnnnnnnnnncccttttgtggaatatatttgggccagggcgaaaaataaataagaacggccaataactcaaaaaaggccgtttttcactggtaaaataaataaataacaatattctcactcacactaattaa

SEQ ID NO: 39829 - DNA, 1021 bp, Macaca Mulatta
  misc_feature (1)...(1021): n = A,T,C or G
gcacgaggcccgaagattannnnnnnnnnnnnnnnnnnnnnnnnnnnnnnnnnnnnnnnnnnnnnnnnnnnnnnnnnnnnnnnnnnnnnnnnnnnnnnnnnnnnnnnnnnnnnnnnnnnnnnnnnnnnnnnnnnnnnnnnnnnngttaacagccccttttttccttagccacttctcgtcttgaagggcgcacgttgtattcccagaattgtcgtgtccactggtccccttaggaagatggctttccttgttaaggttccaagtgcttttccttacagtgccttctgtagcgtctaccttcttttgccttttgctgtgtaactcttgtccgcccacgtcagcctgtctttacggaactgcccgctagttcgtcctacgtgtatcagggactctgtggtcatattctagtgtctgtgttcagtgccctcaacacttgtcacctacgggccggcaagaaaagttgggaaaagtgagagtgagcattcttcagagacccagcaagtgcgacgtgcacctgagagtttcctctcctcaccaggggagatcgatgtcattgatgtctggaactgcatttctaaaggagagcacctcattcctcccccaaagatatatccaatgattttatttaacaaaaatttatttcacaagaagaaagtcaaacaaaatcaaagcagcaggacagtgataaactgaagtccctcagagttcttcagttcaaaaagagtatgtgggtgatcatcagacagaacactgacccctgttgttgcgcgtaagggccctgggacaagggcttcttaacactatgggatattaacaatctagagacacgcacagcgactcaggcggcaaaaaccaacagaatatgagaaacatgatattttttctcttttttcttctcttattttattctcacaccaacccagttgccaacaacaaagaaataataacgaacaacagaacaaaataagcacaaatacagacaacacacaacaaacaatcaggaacaagaaaaacagcacaa

SEQ ID NO: 39830 - DNA, 1460 bp, Macaca Mulatta
  misc_feature (1)...(1460): n = A,T,C or G
gattcaaaattcatttnnnnnnnnnnnnnnnnnnnnnntacaaattttttaccatttttttccgggggtggggggacatttaattccccnnnnnnnnnnnnnnnnnnnggggggggaaaagccagggggagagggaaaaaaacccgttttggaaataaactatttgggaagggagagttgacatgaagaggggcaaaccctaaggttttcatttattaccaatcaaatggnnnnnnnnnnnnnnnnnnnnnnnnnnnnnnnccaaaaaaacctttcaattcttcaacacttctttaaaagccccactttcttaagctactggccaatccacacccaattattaaaattcacttgatacacaccttttgtcaactgggtaaattatattatgcccactgctgcagcacgcataaaccaacacccctgcatggctgaacagggcctaatctaggactgatgggagacgggcttgcaaaccaagatcaaggtgtcgtttctctgctaatactgtctaccaagccgatccctacaaaaatgcacatacaagcaggcaagtttagctactgtgttgcaagagaaaccaggaccttgttaaatagttctctccattaccatttattctctcaagggaagnnnnnnnnnnnnnnnnnnngaaaaacaacacattggtctggctacctcatgaatccaacaagcattggtgtagcatttcagtggagaaggaaacgtggggggaaaaactcatcaaggttgtaaaaaaaggctcccaatttaactgtccctgtccctatttatccaccatccaagaccatccattattctagagcactctgatctataaaaggggtcaaagcatcaggagcaggcaaggagtgagaaccaaaagacatcaagaaaccgatttgcttgagaaaagcagcgattcttcctttcacagctctccatggctgagagagaaaatgcccaagacatcatctatgtgacttaagagactgctttttgggaggttaagagtagcacgaagaacttaagatgacgacaagagtctaagtttttagtttcaaggtttcaacagaatgtggatatattcaaactttcaaaaaggacagtgtttagaaagggtaaaactaggacacagaaaacactgggaattacgacgacccccaagtgcttccggctccaggaaataaccattcatgtgtttgctggaggtcacacaattttccccattacctggtacaaaatgactcatcacttcccaaaagcttcttttcaaaccacgattttcccatttattttggtccaatgcagtcctattctttatggcctatagtctcactcccaactaccccctggggggttaaaaaaaaattccccctaggctggccccgaaaactcagaattaataagaggaggggctggcnnnnnnnnnnnnnnnnnnntaaacagaggcctcgtcc

SEQ ID NO: 39831 - DNA, 551 bp, Macaca Mulatta
  misc_feature (1)...(551): n = A,T,C or G
atgtgggttnttgttacgggtccctgatctgaaaggtggatttcccctatcaggacaagctgttcggatacatcacaaactacagcaggcgcttctggcagggcagcacggaccaccgcggggtccccggcaannnnnnnnnnnnnnnnnnnnnnnnnnnnnnnnnnnnnnnnnntatggggtgttgcttacagattttcactaggaaaggaagacgaataaaagcataccttgacttcagagagaaaggaggctacagaaccacaacagtcattttttatccaaaagatcccacaacaaaaccattcagtgtattgctatatattggaacatgtgataatcctgattatcttggtcctgcacctctggaagacattgctgaacaaatttttaatgcagctggtccaagtggaagaaatacagaatatctttttgaacttgcaaattctattaggaaccttgtgccagaagaagcagatgagcatcttttcgctttggaaaaattggtaaaggaacgtttagaagggaaacagaacctcaattgcatataa

SEQ ID NO: 39832 - DNA, 670 bp, Macaca Mulatta
  misc_feature (1)...(670): n = A,T,C or G
atcgaagacagccaaccnctggatggagccaatgtacatactgcaggacagagggtcactgggcagagaggctgccctgacctccataaaacaggacagccggcaggcaaccctggccagtccctactcctcaccaagctttcagatgagattgatagacaccgcctgacagcaccctggctccgactgcagcacactccatcatcatcacaccacggagcctcaggtcacctttgatgtggcagttccaggaactggccttaggaaatctaaatatgaaaccaaggttatggagtgtcccacctcaggaaggaacactgaacaactgattgacagtcttcgtcccgccagccagaccaccaagtggcccattaatcaagataaccaacgcaaccagatacagtgacccgcatcccctacccctcacgtgctttgcccggcccagcctgcacaccttactcgtgatgtcaattcccacgcttcgctaataaaaacatccctgcaagcctcttcagggagccaacnnnnnnnnnnnnnnnnnnnnnnnnnnnnnnnnnnnnnnnnnnnnnnnnnnnnnnnnnnnnnnnnnnnnnnnnnnnnnnnnnnnnnnnnnnnnnnnnnnnnnnnnnnnnnnnccgtnnnnnnnnnnnnnnnnnnnnnnnnnnnnngc

SEQ ID NO: 39833 - DNA, 588 bp, Macaca Mulatta
gatgtctgacacgagcgggtaggttgcatcagcaggagtctggcagccccacacagaggagctgggtccagacttgactgaggcaggggcattcctgaaggaggagggattcacaaggaatgcagcccacagctggccttgaggagaagccagaccatgccaggccagcagcactggctggccttataggcctctcttgtgtcctgtggattggggaaatgagatgtgagaggccttgggccagatgtggacacttgcaggcacaggccttgtggaataggactgtgtgctggcagcaggcctggcagtgtctccagcagaaggcagacctccctgcggggagccagggggaaggctggctctcccattcaaatgcatgcacgcgtgcaggtgtggatgtgtcctggcctctccggtggctgacgctgctgaccacaccctccgcttcactctcctggtctctgtgacactcactataatcataataagtaagatttattgagcttgctatgtaccagaccccgtgccagatgctgtaaaatgcacagcatctctaatccttacagctatctgggaagtaggtcttat

SEQ ID NO: 39834 - DNA, 1728 bp, Macaca Mulatta
  misc_feature (1)...(1728): n = A,T,C or G
ggggctttttcgcaacggggttgccgccagaacacaggtgtcgtgaaaactggcccctaaaagccaaagtgggaaaggaaaagactcatatcaacattgtcgtcattggacacgtagattcgggcaagtccaccactactggccatctgatctacaaatgcggtggcatcgacaaaagaaccattgaaaaatttgagaaggaggctgctgagatgggaaagggctccttcaagtatgcctgggtcttggataaactgaaagctgagcgggaacgtggtatcaccattgatatctccttgtggaaatttgagaccagcaagtattatgtgactatcattgatgccccaggacacagagacttcatcaaaaacatgattacagggacatctcaggctgactgtgctgtcctgattgttgctgctggtgttggtgaatttgaagctggtatctccaagaatgggcagacccgagagcatgctcttctggcttacacactgggtgtgaaacaactaattgttggtgttaacaaaatggattccactgagccaccctacagccagaagagatacgaggaaattgttaaggaagtcagcacttacattaagaaaattggctacaaccccgacacagtagcatttgtgccaatttctggttggaatggtgacaacatgctggagccaagtgctaacatgccttggttcaagggatggaaggtcacccgtaaggatggcaatgccagtggaaccacgctgcttgaggctctggactgcatcctaccaccaactcgtccaactgacaagcccttgcgcctgcctctccaggatgtctacaaaattggtggtattggtactgttcctgttggccgagtggagactggtgttctcaaacccggtatggtggtcacctttgctccagtcaacgttacaactgaagtaaaatctatcgaaatgcacgagtgaaacgtttgagtgaatgctcttcctggcggacgatgtggggcaaacaaatgaggaggaatggtgatcggtccaaggaatggttcgaacagtgggcaaacgtttgcgtgggtgaacacgccaaaatagctaacccaagccgaatggataaagcaaggcttggacgtagcaaattgactacgggggtaagaaaagatgcgctcgggataacacttagctcggggatgccgcagagaatgaaaaaacagggtgctgtggggtttttatattgtgcctagacgaatatggatgggangttttggtgtggagaagatatgcctgtcggggatgaaggaataaaaaggatgggagactgagagtaagtcggcgcagaaagaagacacggagaatgttgtgaatacacagaaggcaaatgactgtctgcgaaagaaggtaaatagagatgatagagcgttgagacagtggaatgcccggcacatgtcccgtgtggatgaaagaaaaggaagcgagcgcagtggcaagaaaagaaatgggacngcggcggaaagagaagaggtccgccggtagagaaggtaatgtgtggtgtgaaaaagatggccatcgcgacagaaaaggatgtgggaagagcgcggaagagagtgtgctgggggactggtaacggagagagacggtgagtgcgggtcgcccgcgaactgcggcgagcaaacgaaccgctgcgacgccgtggtggtggtatgtaggacgcgttaacatagaagtctgcaagaaaaag

SEQ ID NO: 39835 - DNA, 371 bp, Macaca Mulatta
tcacccctgagagggctcctgcccaggatgggaacctcagagaagagctctaaggagaataaaccccatagcatcagagaggacacgtctggcttccaggagaaaggaggctccgttttgcaaagtggaggagggacgagggacgggggtttcaccaaccagcaacccgggccttgtactgtctgtgtttttaaaaccactaaagtgcaagaattatgttgcactgtttctccactttttattttctcttaggcttttgtttctattttaaaacatattttcttggttttctaatggagtatatagtttagtcatttcacagactctggcctcctctcctgaaatccttttggatggggaaagggaaggtg

SEQ ID NO: 39836 - DNA, 783 bp, Macaca Mulatta
  misc_feature (1)...(783): n = A,T,C or G
ggtcataaccatttttttgctttcttaatttagttgtcctaaatgaattttgaattttgaatgcagaataacagatgtgatcaagcacagaatgttttcgatacatcctgttatnnnnnnnnnnnnnnnnnnccttattttgatgtaatggaagattttcacgaaagacagtgactgaactggattcatttgtttctcaaagttagcaaatcttttacttctcaaagttagcaaaaaacagctttttaatgtaaataccacttgcagatagggttaacaatgnnnnnnnnnnnnnnnnnnnnttgtgataactaggatgcaaaatgcttcctttctagaggttgaagttataataagcaagagtatccatcattcagttggaagatgactggggtggaggcagcctgagttgtgctgctggggcagtcatgacataaagggtgagtaagtagacatacttgcaaagatgtcaggaaagacatgtttctttccttatgagacctaataaggaacctctctcctgtcttcctgtcctgtcccatctcttcttcctttcccctcctgtcatcttcaaaacaaactccccttcagatctctcctgctccctctttctctaaccatccttcaacttttaaaatattttccaaataatcttttcccaggggggaattggagaagaagaatccagaatggaattccaaggcctttgaattccnnnnnnnnnnnnnnnnnnnnnnnnnnnnccccaattataggatttaattggtttttataaacccccca

SEQ ID NO: 39837 - DNA, 728 bp, Macaca Mulatta
  misc_feature (1)...(728): n = A,T,C or G
ggggggggtgtgttnttgtatacaatnnnnnnnnnnnnnnnnnnnnnnnnnnnnnnnnnnnnnnnnnnnnnnnnnnnnnnnnnnnnnnnnnnnnnnnnnnnnnnnnngggtgttatnnnnnnnnnnnnnnnnnnnnnttttnnnnnnnnnnnnnnnnnnnnnnnnntttcaaaaagggggggnnnnnnnnnnnnnnnnnnnnnnnnnnnnnnnncccgggggaataannnnnnnnnnnnnnnannnnnnnnnnnnnnnnnnnnnnnncccaaaccctgggaaaaacttgggggtttttggaaaaaggggaaacggggggtaattgcnnnnnnnnnnnnnnnnnnnnnnnnnnnnnnnnnnnncaccaaaattttttcatcattaggaaaatcccataattatgaatgagcacacattactaaatgtttaatgagattatagtttcttatatttctgattctgacaaatgttcagattttcatttggtaataatggtaaacagcaatcatagatttcctctgaacatattcatttcatactttgctcctgaataacttttcttcagaaatacaatanncanggtatagacgcagattacttcctgggatgtgtacacagttccatttaaagtgacaagttaatgataagtcactgacctgcaggaaaaatgataataatattagggttagagatgcacagcaaattggccagatttcaaggcgtgaccc

SEQ ID NO: 39838 - DNA, 258 bp, Macaca Mulatta
agctctggctccttgtctctcaggctgatcctttattcagaacaccacaaagtaaggacattcagctcgaggctccctgccgtgttgaagagttctgactgcacaaaccagcttctggtttcttctggatgaataccctcatctctatcctgatgtgatatgtctgagactgaaggcgggaggttcaatgtcaagctgtgtgtagtgtcaaagcttcaggaaggattttacccttttgttcttccccccgtccccaac

SEQ ID NO: 39839 - DNA, 313 bp, Macaca Mulatta
ctccctggactgtggcccacaggagaacaaggagctctactccacaggacaccagaacatcagcaaacgtgtggcaatgctgtaggatgctggtgaccaggatcctgccccgggagccactaagctgccagatgacacagtcacccaggcaaggctgtgaatagcaccccctatccctactgctctccctctgagccatagacagagatcatgctggtggggaataaggtctcatgatgtccagaactatagtagaaaactgtaagctgatctcctgctcctcactaagtgatgacgggtcacacaacacaac

SEQ ID NO: 39840 - DNA, 410 bp, Macaca Mulatta
tatcagtgtgtagatagctctataatgatttaactgtacacttctaagtgtgcaatgcaagagcttgtttatatttcatactttttatactttgaggataaaaagtcaaagaaaaattgtgtttgagagaaaaatcatgaacaagtaaaggataaatttaaaaaatagccccatgagacttgacatacacactaatgggattccagttattgtggagtccttccatacccctccactccttctccccaaaaggttttctttgcaagtccttttgaaactaagagctaatatcttggattaactgatgcctgctgctgctttctgattactcacattctgtttcttacttttaaaaaaacagtaaagacaagagtgttgaaccagtattgcagttctgtagtgccatttct

SEQ ID NO: 39841 - DNA, 589 bp, Macaca Mulatta
  misc_feature (1)...(589): n = A,T,C or G
attcacctaacgtgaggagttagaatcacctcctctctccagtcacaggggccagcagcagctccacacacaccatgagccagatgggcgtgcgcttccgttctcctcggatgaatcacatttttctttttctttattccttttctctagaagtgaggtttccaccccaactgtttnnnnnnnnnnnnnnnnnnnnnggggctcannnnnnnnnnnnnnnnnnnnnnnnnagcatgagccaacacacccagctcagatgtctgttgaattgggcatttgcagtggtatttctgtactagtaattgctaccatgtattcattgctcactgcaggcctcttggaagcctgtgacatgtgctatgttgttaattctcacaataaatctggatggtatttccccccatttacaggtacagaaacctcagagagcttaagtaactttcccagggtcactcactgttgttgttacgtgaaagaggtgacagtcaactcaggtactgtcgcttcagagctgtactcttgnnnnnnnnnnnnnnnnnnnnnnnnnnnnnntgctcttgtcatnnnnnnnnnnnnnnnnnnnnntgat

SEQ ID NO: 39842 - DNA, 567 bp, Macaca Mulatta
ccacctaccaagctcggggcacccatgagcctgagggctaagcgctgctctttggagagtgtggggaaccatttccccatgtttctctgcgcatgagactgagagggccagctcccccattctccgttttctctaaactctcccaggtcagcctgtctgtccccttgacactcctctcctgatctcgccaggaaatgaagtccacgtttcaggaggggatggggtgaggtatctggggcccctccactcagggtgccaggcttagcaggccctgccctaatggctgggtgatgtttctccaggttctcggggtacaaggcaggggcctgcaagcaggcagaggaggtagtggtcaccctcaaggtcctcatcggtgccgtgcccacttgcatgatccttgctgggctctgcatcctcatggtcggctccactccaaagacgcccagtcaggacgcctccagccggctgagccttcggaggtaagccccgcacgtcccctgcacccagggaggcacagtgtgcgctgctgggggaatgactaacaccagtctgcagacgtccctgctg

SEQ ID NO: 39843 - DNA, 827 bp, Macaca Mulatta
  misc_feature (1)...(827): n = A,T,C or G
gggtagattaactgttattgactgtcaaaactattgcagtgtttgtgtcattttacttaataatgaccccaaagtgcaggagtagtgatgccagcacattgttttaattgttctattattagttattattgttaatctcttactgtgcctaatttttatacattaaacatgatcataggtgtgtatgtacaggcatacctcattttgttgcacttttattacacttttcagannnnnnnnnnnnnnnnnnnnnagctgacagtttatggcaactctgtgttgagcaagtctgttggtgccattttttttaacagcatgtgctcacttcatgcctctatatcacacttggtagttcttgcaatatttcaagctttgtaaattattgttatatctgttatggtgatctgtgatcagtgatctttgatgttactattgtaattattttagggcaccacaaactgggcccatataagacaacagacttaattgataagtattatgtgtgttctgactgcttcaccaactggctgttttcccagtctctctcccctctgttcggggcccccattctccttagaacaaaaaaaaaacctccgatttacacctaatcctaaacccctaccggtggggtctctggattggttcaacggaaaacgggccatagcccgtcttggtcttccccctctaacaatcccacaggcttaggcaaatgaatttcgcgccctctanttggagggcgaaggccccacttccaacaattggcgcgagaaccggggcttgcaaaaacccctagggggcctctcccgtgtggtggcgtagagaacaac

SEQ ID NO: 39844 - DNA, 620 bp, Macaca Mulatta
  misc_feature (1)...(620): n = A,T,C or G
tctaataccatacactcantgcaggttttgaatgtccccccaaactcatatgttgaaatctaaatccccaaggtgttggtattagatgatgtagcctttgggagggaattagggtggtgccctcatgaatgggatttgtgccattataaaacaagcccaaagaaatttggtcgccccttcctttaagcgaggacatggcaaaaaggcactttctgtgatccagaaagtgggctctcactagacaccaaatgctggcgtcttgttcttggatttcccagccttcagaactgtgaaaaatatatttctgttatttataagccacccgctttttggtattttgttatagcagcctgaagagacgaagacagccagtcccaaccttccacatttagacctgactcccaagttttgctcagcccactgtgtatcccttcctcctcccaactaaagtgtccccactctttatcctgttctgcccattattcaaggtctaacttctgtcactttttcaatgaggcatttgcaagctgtttaaatcctcaaggattctccattcattcaccatatctatattgagcatctacaaaggacaaggcactacgaaagactctttacatgcc

SEQ ID NO: 39845 - DNA, 847 bp, Macaca Mulatta
  misc_feature (1)...(847): n = A,T,C or G
gggtttctagtttgctatttttgttactcagctatatatgttgcacagttacttatatccacacttacctatctatctcattttttaaaaaatgaggctgcagagtagttcattggatagatataccaggttatttaaccagacctgtattgacaagtggatatgctgcactgaatatgctttttccattgtgtacttgtgtgaatagatccacaggtacattcttgcagtgaattgcttccaaaacagtgatagatttaccctctatccaagaaggagtgagaatgttttcctgtactctcacccttccaggacttaattttttaaatttacaataaaaatgatacagaagttggccaggtgcannnnnnnnnnnnnnnnnnnnnnnnnnnnnnnnnnnnnnnnnnnnnnnnnnnnnnnnnnnnnnnnnnncnnnnnnnnnnnnnnnnnnnagtgaaacatnnnnnnnnnnnnnnnnnnnnnnnnnnnnnnnaatgtgggtggtgggacactnntgtagtcccaactacccggggaaggctgagcaggaaaaatnctcttgaaacccggggagggcagaaggtttgcagtggaggcaagaaccatgccaatttgcacttccaagcctcggtggaataagaaagacgccatcttcaaaaaatgacaccagaagttaagggttttnnnnnnnnnnnnnnnnnnnnnnnnnnnnnnnnnnnnnnccagtctttgctcaagtcacccagggctggaattccagggggcctcaatccacagtttcactggtagcctcaaacctccctggggctggagtgatcctccagcctcagcctcctggaaaagctgg

SEQ ID NO: 39846 - DNA, 319 bp, Macaca Mulatta
ctgccacaaagtccaagaagcgtcctctcttcagaagtccatcgcctgctgaaaaaacacccaacccagggcctgggctcagagtctctggggagcaatccctggcttgggggctgggtggtccctcacagtctcaaaagagaaagggtgaccccttggtctccaggaagaagaagaagcggcattgtagccaataggggcttccgggcaggttttctggtgccagtccgcaagggtgggggtctggcatccaatgccccaaagcagtcaaaagcttcttcctccccagggctgatcttgctgggccttagctttggag

SEQ ID NO: 39847 - DNA, 513 bp, Macaca Mulatta
ggtggtgtaccggcgcttcacgcgagatctatgagttccataaaaccttaaaagaaatgttcccgtattgaggcaggggcgatcaatccagagaacaggaccatcccccaccttccagctcccaggtggttcgacgggcagcgggccgccgagaaccgccagggcacgcttactgagtactgcagcacgcttatgagcctgcccaccaagatctcccgctgtccccacctcctcgacttcttcaaggtgcgccccaacgacctcaagctccccacagacaaccagacaaaaaagccagagacatacttgctgcccaaagacggcaagagtaccgcggcggacatcaccggtcccatcatcctgcagacgtaccgcgccattgccgactaatgagaagacctcaggctccgagatggctctggccgtgggggacgtggtggaggtcgtggagaagagcgaagagcggttggtggttctgtcagatgaaagcaaagcgagggtggatcccagcat

SEQ ID NO: 39848 - DNA, 774 bp, Macaca Mulatta
gggatcccttgctctccttcctggttcctaacacctttagctcccttcccctcctgtacccatccacggcccatttatcgccccttccccacacccttcactctagcaccattttcttgggcttctgggaaacacaacagctttggttcaactcacagctcaggcacactcatgggtccctccagagcctctcaactttcctcctacagtccctcagctcctccctgtggtcctaactcggccatctctaccctctctgctgagcctaaccatccacagtccatcgcatcgggatttgtgtacagcagtggattaactcagcaggtctgaattggtcaaaccctgcgcattcctaaaaaaggaaataactaaaaaaatcaaaagaaaacttttcttcatttatggctctctcttacctcctggaatgaggtgtccaagtccataaaatattccacctgataggagtgtctgtggatgtctgcagccttggaagatgcggtacgagtttaatcacgagtttgtatatagtgtatttgcgagggtaagtgtgtatatataggcacatatacatatacaacatgttttccttatctaatcataataaatagacactaagtttggtaccatatatgtgctactctgaaataacacacaataaaaataaatgcaggcatctgtctaatataaaatttatttttcctttgagccaatacccaagtagtgggagttgcgggaatcaaataattagttcgattatcagtttctctggagtag

SEQ ID NO: 39849 - DNA, 1080 bp, Macaca Mulatta
  misc_feature (1)...(1080): n = A,T,C or G
gtcacttgttctggtttgggggaaaagtgtctggggcagctgctgaccctgtggctgggttcttcatcaacaggagccagaggacggggtctggacggctcatgccttggnnnnnnnnnnnnnnnnnnnnnnnnnnnnnnnnnnnnnnnnnnnnnnnnnnnnnnnnnnnnnnnnnnnnnnnnnnnnnnnnnnnnnnnnnnnnnnnnnnnnnnnnnnnnnnnnnnnnnnnnnnnnnnnnnnnnnnnnnnnnnnnnnnnnnnnnnnnnnnnnnnnnnnnnnnnnnnnnnnnnnnnnnnnnnnnnnnnnnnnnnnggatgactgtggagatggcaggaacactgatgggggccactgtccatgggctcatcgtgtctggcgcccacaaacaccacaggtgcgaggccactgtgaccccggggccagtcaccgtctcccccaatgcannnnnnnnnnnnnnnnnnnnnnnnnnnnnnnnnnnnnnnnnnnnnnnnnnnnnnnnnnnnnnnnnnnnnnnnnnnnnnnnnnnnnnnnnnnnnnnnnnnnnnnnnnnnnnnnnnnnnnnnnnnnnnnnnnnnnnnnnnnnnnnnnnnnnnnnnnnnnnnnnnnnnnnnnnnnnnnnnnnnnnnnnnnnnnnnnnnnnnnnnnnnnnnnnnnnnnnnnnnnnnnnnnnnnnnnnnnnnnnnnnnnnnnnnnnnnnnnnnnnnnnnnnnnnnnnnnnnnnnnnnnnnnnnnnnnnnnnnnnnnnnnnnnnnnnnnnnnnnnnnnnnnnnnnnnnnnnnnnnnnnnnnnnnnnnnnnnnnnnnnnnnnnnnnnnnnnnnncgatggtgccctttgcgatcttgctggctgctgtgcccacagcacctgtggcttatgtcgtggcctttgtatctggcgtgagcattgctgtgtccttgctgctaccctggtnggtccatgctgccagacgtggtggatgactttcagctgcagcaccatcacgggccaggcctggagaccatcttctactcctcctacgtcttcttcaccaagctgtctggtgcatgtgccctgggcatctccaccctcagtctggagtn

SEQ ID NO: 39850 - DNA, 2115 bp, Macaca Mulatta
  misc_feature (1)...(2115): n = A,T,C or G
agcccggacctccaggtgaccagggtcctcctggaattccagggcagccaggattgataggcgaaattggagagaaaggnnnnnnnnnnnnnnnnnnnnnnnnnnnnnnnnnnnnnnnnnnnnnnnnnnnnnnnnnnnnnnnnnnnnnnnnnnnnnnnnnnnnnnnnnnnnnnnnnnnnnnnnnnnnnnnnnnnnnnnnnnnnnnnnnnnnnnnnnnnnnnnnnnnnnnnnnnnnnnnnnnnnnnnnnnnnnnnnnnnnnnnnnnnnnnnnnnnnnnnnnnnnnnnnnnnnnnnnnnnnnnnnnnnnnnnnnnnnnnnnnnnnnnnnnnnnnnnnnnnnnnnnnnnnnnnnnnnnnnnnnnnnnnnnnnnnnnnnnnnnnnnnnnnnnnnnnnnnnnnnnnnnnnnnnnnnnnnnnnnnnnnnnnnnnnnnnnnnnnnnnnnnnnnnnnnnnnnnnnnnnnnnnnnnnnnnnnnnnnnnnnnnnnnnnnnnnnnnnnnnnnnnnnnnnnnnnnnnnnnnnnnnnnnnnnnnnnnnnnnnnnnnnnnnnnnnnnnnnnnnnnnnnnnnnnnnnnnnnnnnnnnnnnnnnnnnnnnnnnnnnnnnnnnnnnnnnnnnnnnnnnnnnnnnnnnnnnnnnnnnnnnnnnnnnnnnnnnnnnnnnnnnnnnnnnnnnnnnnnnnnnnnnnnnnnnnnnnnnnnnnnnnnnnnnnnnnnnnnnnnnnnnnnnnnnnnnnnnnnnnnnnnnnnnnnnnnnnnnnnnnnnnnnnnnnnnnggggaccatggcttcccgggctcctcaggacccaggggagaccctggcctgaaaggnaggacaaattggaccaattggtgagaagggatcccgaggagaccctgggaccccaggagtgcctggaaaggatgggcaggcaggacagcctnnnnnnnnnnnnnnnnnnnnnnnnnnnnnnnnnnnnnnnnnnnnnnnnnnnnnnnnnnnnnnnnnnnnnnnnnnnnnnnnnnnnnnnnnnnnnnnnnnaggaacacctggagagaaaggtgtgcctggcatccctggcccacaaggttcacctggcttacagggagaaaaaggtgcaaaaggannnnnnnnnnnnnnnnnnnnnnnnnnnnnnnnnnnnnnnnnnnnnnnnnnnnnnnnnnnnnnnnnnnnnnnnnnnnnnnnnnnnnnnnnnnnnnnnnnnnnnnnnnnnnnnnnnnnnnnnnnnnnnnnnnnnnnnnnnnnnnnnnnnnnnnnnnnnnnnnnnnnnnnnnnnnnnnnnnnnnnnnnnnnnnnnnnnnnnnnnnnnnnnnnnnnnnnnnnnnnnnnnnnnnnnnnnnnnnnnnnnnnnnnnnnnnnnnnnnnnnnnnnnnnnnnnnnnnnnnnnnnnnnnnnnnnnnnnnnnnnnnnnnnnnnnnnnnnnnnnnnnnnnnnnnnnnnnnnnnnnnnnnnnnnnnnnnnnnnnnnnnnnnnnnnnnnnnnnnnnnnnnnnnnnnnnnnnnnnnnnnnnnnnnnnnnnnnnnnnnnnnnnnnnnnnnnnnnnnnnnnnnnnnnnnnnnnnnnnnnnnnnnnnnnnnnnnnnnnnnnnnnnnnnnnnnnnnnnnnnnnnnnnnnnnnnnnnnnnnnnnnnnnnnnnnnnnnnnnnnnnnnnnnnnnnnnnnnnnnnnnnnnnnnnnnnnnnnnnnnnnnnnnnnnnnnnnnnnnnnaggacttccgggacccatggggcctccagggcttcctgggattgatggagttaaaggtgacaaaggaaatccaggctggccaggagcacccggtgtcccagggcccaagggagaccctggattccagggcatgcctnnnnnnnnnnnnnnnnnnnnnnnacaggctctaagggtgatatggggcctccaggagttccaggatttcaaggnnnnnnnnnnnnnnnnnnnnnnnnnnnnnnnnnnnnnnnnnnnnnnnnnnnnnnnnnnnnnnnnnnnnggtctcccgggtcctcctggccccccaggtccttacgacatcatcaaaggggagcccgggctccctggtcctgagggccccgcagggctgaaagggcttcagggacctccaggccccaaaggccagcaaggtgn

SEQ ID NO: 39851 - DNA, 652 bp, Macaca Mulatta
  misc_feature (1)...(652): n = A,T,C or G
tacttatctgtgaaggttgaaggatgtctacaaatatttgcttggtttctatnggtgaaggcagagagatcaaatgtgtgattgtttagtgttaaaatcaaaactacactatactgtacttctacaaagagaatgagtttgttacttgaaacataatagacgtttaataagtggtaactattttaagtttcacgagttcaggaggaaatttaaacagtgcagcctgaaggaaaacatgggcccttcaggcattttaaaacttcattttacaaaaataaaatggtccttgcactttattaaaaagtcatctgttgactaaagatcatgttggtggacttgcagaatgcctggtgtagacatggggacgcaactatgtcctgtaaaatttgtactataataaaaaccccctgtcctgccctgtgttatccctccttaccctataactctccatacttctgtcttctggctacccatacatttgttggaacatatgtttattttatgcttgctttatacaacgctctgcgagggactgggattaaaagtccacttagaaatactctctaccctcaaaggactggctttgggcctagtagaccataaggatacaatgattgagatgcagtatggtaagcactgaaatcatttatgc

SEQ ID NO: 39852 - DNA, 731 bp, Macaca Mulatta
  misc_feature (1)...(731): n = A,T,C or G
gggagaataaaggcttttannnnnttntttatacctgagaacccaaaaggccacatgcacacccagggtgagcaaatactcagaaaagacttgagagagccttaaactctcacctctggctaaccatcaggctctactcaaaataggaagtgaaaactaaggtgaatttgtaagttgcttagctgaatgttgaaggtgtgcccccacacttacacagagcccactggtaaagactgagagtgttttctttttgtcttggtttcaggcatttaaggaaatctgtttctctgttgaatcactagctgcaaattaagctaatagaacggaagctctactggttacacacagcaacgaatacagactttgtaaagttcagaaaagttaccaaacaatagtaaaccataacaagtaccatcaaacaaactattggggagggaaggaaaaatctgaatttcccagaagttacccacattataaatacctactccagaaatgtccacatttttttgcccaaatattttacaaaggcnnnnnnnnnnnnnnnnnnnnnnnnnnnngggccccattacccccnnnnnnnnnnnnnnnnnnnnnttatagaaaaacttacccccctggaaaaaaaacccccagaaccttttttggggatgggttcccataaacccaaaggggcccttttttttaatcccaacacccttttttttataaaaataatgccctaaaaaaaaaag

SEQ ID NO: 39853 - DNA, 448 bp, Macaca Mulatta
  misc_feature (1)...(448): n = A,T,C or G
gtctgctgagacatgagaaaatccggcatctctctctcatgaattgactgctttttgatgcctttggaattcanctgaaaagaaccaaaacagagaaagtaaaaggacgagnagacaatgggatttttggagttccgcttacagtcctcctggacagtgaccgaaagaaagaccctggagtgaaagttcccctggtattacaaaaannnnnnnnnnnnnnnnnnnnnnnnnnnnnnnnnnnnnnnnnnnnnnnnnnnnnnnnnnnnnnnnnnnnnnnnnnnnagcaataccgtgaagaacttgatgccaagtttaatgctgataaatttaagtgggacaaaatgtgccatagagaagctgcagtaatgttgaaagcatttttcagagaactacccacctctctcttccctgtggaatacatacctgccttcatcagtctaatggaaag

SEQ ID NO: 39854 - DNA, 159 bp, Macaca Mulatta
  misc_feature (1)...(159): n = A,T,C or G
ntggcagctctgcagactgagatggagaacttggccctgcatctcttctacatgcagaacattgaccaggatatgcgggacgacatccgtgtgatgaagcaagtggtgaagaaggccgagacggagaggatccgggcagaaatcgagaagaaaaagcag

SEQ ID NO: 39855 - DNA, 886 bp, Macaca Mulatta
gctgctccgacctggtgctgatagctgctttgtcgatctatgctttaatatttttctttataatatgtccccagatggctcctggaactagtcataattacaaactgtaaaaatcccccctccccagtgtagacatttaaaccagagtaagtgatggggagacattctgtggtctctgaatgtgccttccccctcaccatgtgttaaaacacaaaagccgaagttccatggcatcttgattccatggggctggagggtaagaccccctccacatctagaaggggatctgtttgggctcggtcccgttagcgagtaggggacccttgctgtgtgctgagaggctgctaggactcacccagttggaattctgggcaggctcaagaagtctagagccacgtaaaaagctggtaggcacgaatgtgccaggtatttgccagcctgtgtctccttttgcatcccccagtccagagttttctttgttttgactaaattggctcctgcagggggaagggcagaaagctaggccctctgctctgggaagtcggcctgaggtttctgtcaagttaacccttaaaatcgacacctctcagcccgccctcccctttggccttcccagaatctccttcagtggttgctctcctacctgtgccataacatcagcttccatgacttggactggcacttccttgacaatccctgttggcatcacaccggctacaaattatgctgttttctaaggaatttgaactttttttcttcttttcttgagacagggtcttgctctgttggccaggctggaatacagtggcacaatcatagctcactgcagcctccaactcctgggctcaagcaatcctcccacctctgcctccagagtagcccagat

SEQ ID NO: 39856 - DNA, 782 bp, Macaca Mulatta
  misc_feature (1)...(782): n = A,T,C or G
ggtgaggaatgtgcagctcctccagctctcttgatgacctctatctggctttggagaagtttggattcagagagaccatgggacacagccattgtcatccccttaggaggatgcagtgttcaaggcgttatcttggaagcaaaggccaggctctcagcagacaccaagtctgccagcagatttggactttcccgcttctagaactgtgagaaataaatttctggtttttactaattatccagtggaatactttcaccctttattattatctaaaatctttgttgtgaggtttcttgctggtttgtttttcgatatttgttatcacgctatggaggttccttctattcctgtatgtaagagtgtttaatacgagaggatgttgaattttatctaatctttttttttctgcctctattaagatgggtcacatgatctttctcttttaattggttaatgtaatcaaccacattaattaaagttctaatgttagttaaccttgaattcctggggacatcccaacttagtactagtttcttaattaacccgcatgccctgttcatttacttttaagtttttattttgaaaaataggtaaatttctaaaaatatgatttttaagccctaagtacatatgtatccttctcgtcaaaaggtatgattcttcaaccaacaatccccctaaaatttttttggatatccccatctggaccattttcacgtatgttctaaaaaatgtgtgtcctaaatctgcggaactgttcccattaacacaaaggaccaccn

SEQ ID NO: 39857 - DNA, 761 bp, Macaca Mulatta
  misc_feature (1)...(761): n = A,T,C or G
cagagaaactactgtgactgtgaagtttcttcctgtagctttatgctagtccaaagaacaacattactttatgaattctcagtaaatgtacagaagtggtaatgtgtgaccaaactttaatatctgcttggaactagtgctttcttatcatttggaagaaaaaaaattgtcattttaaaccatttaacatctgggaatggctataattatgacagacaaactttattttcactagaagatagaataggatagtgaaaagagcactggaatgaaaatcaggaacccagggtctctacttgcccttttttttcagtaactggctatgggaccttaaacaactcatttaatctctgagttttagttactgtgtaaaatgagagcattagaattaaatatcaaggtcctttccacctaagggaaggaaattttgtaataaaacaaatagtattaaggaggacacccaagactatttggttagaatcatccagttgagcaagaaattaaaaagnnnnnnnnnnnnnnnnnnnnnnnnnnnngttatttagcatgatttagcagggagatagtatgggatccagagacagaagaggagttgaatcctggcttaatcattgctggctatgtggccgtaggcaaataactctgattttcaattttcttatctttaatacggatataattactaactatgacagagactgcagatatactccagtagccatctgcgtatctctttccgagataaaatttagtctggctga

SEQ ID NO: 39858 - DNA, 283 bp, Macaca Mulatta
  misc_feature (1)...(283): n = A,T,C or G
taatttttcccatccaagttcatgtatcttctgaattatatccgtgaatcccttagaggtctgtggatgntaggttaagaacccctgccctagctaatcagatccaccaatgatgtttcaaataggactataacatattcaaaggccaatgatacttagcataattcaattttaatattattcacatttcatgtcacaaatttagtaacttacatgtgttatgtgatgttttgtttggatagattatgtcttactcctaaataaaaagtcaagatttttgtag

SEQ ID NO: 39859 - DNA, 647 bp, Macaca Mulatta
  misc_feature (1)...(647): n = A,T,C or G
cttccaagaatgataactgttattcttcagctgcatggagacactggggctttcttttcaatagcctgtatgcagtgccagtctgaagccctgccctggattaccaatgaggcaagtatcctgcaaatgaaattgcgctgggagtgcagccttggaagaacataaacatacttcttgtaaaggagtttctagtggtgagaagggaagataatgggaaaaccccttgagctacaattctaaagactcttcttttggaatatacttggcatcagacatggtagaaaggcattccaggagccagatttgaacaacttacccagcctcggatcttgaagaagatcagattttgtggtggttttagaannnnnnnnnnnnnnnnnnnccgtaagttggagtcttagagattttattggaaagtatagactatttctgcctagtgtttataagtgatgaaatgctaaactgggaggtttatctgtcttcaaaatattaacacactggaaagacctagggccttctgcatattgcatgggaattttagggccctggtggaatgaagtatatcgaggagcgtggcacctttttaagatgtgaatgtcacacaatcacagcatactcctatgtgcttaaatagtgatactttcagt

SEQ ID NO: 39860 - DNA, 1406 bp, Macaca Mulatta
  misc_feature (1)...(1406): n = A,T,C or G
tcagggaaataattttgaccaggttgctgtaaggggaatatgaaatgggtggtagaagaatgaggtagattattaactttggcctcatgatcagcttcagagagaaactgtgacagctatgcacatctttgttaatagaatcttttcttcctgtcgtctggttatatgaaaaacacttgagacaatagttataaatcaggtttcaggtgggcgaatatggaagcattagcattatcctgtaacagtacaatggctgatgggatttatttatgtgcctgcttccttgttgggagaatagaatagcaagaatagatgcagaatgtgaaaggagtaggccatggagcttagtctttattttcccacacatccatattaatttcctgtcgttctnnnnnnnnnnnnngccctgggaggctgatcgttagggactacatccccctggctccatttgtaattgcattctgctctgggattggtcaatggaatgcactggcacagctttggcgggaagaagagagaagacaatgtatttcttcactgctccnnnnnnnnnnnnnnnnnnngtatttcttcactgctcccactctgatttggactattttttattggcagtgactacatcccttcaagattttagcttcttccagaagtcccctcctccatgactctagctctcactaggctccagaaatactatttcttcctcttgcccttttaggcctaggataatagctacctgctattgctaacctctgggtgccacaaaattgcttgttgggtctcataatcttgcatttccctctgtaagtagtctctacattaaagtcccttgaaccatctgatttagattgttttttctagctaggactctcactgaggtgctggtatgaggcctagaattactgcagctatttttataccattacaatgcacagtcaaggataaagcttatatgtaaggaannnnnnnnnnnnnnnnnnnnnnnnnnatgaagcagaatcttagtcaaattgtacttaaagtcggataacttctggatgcaacttactgaagtaagaataggtgaatatttcttaaatatgacaaaatatatacatttctaacaagaagcctttcatgtttaagggataaacactagaagcatttccattaaaattaggaaaaagacaagaataccagttatttccataattatttaacattgttctagaagtactagttaatgcaattaaccaagagaaataaatgtaatattaatattggaaaggagggggcaggcaagattatcattactacaaatgaagcaaatctaacagaatcaactaaagactacttgaaacctttggaactccataaaaaggctggttatgaaatcaatagattaaaaactgatcactttcatatat

SEQ ID NO: 39861 - DNA, 800 bp, Macaca Mulatta
  misc_feature (1)...(800): n = A,T,C or G
gggagagcaggtcaagagttgaggtcaggagtccgnnnnnnnnnnnnnnnnnnnnnnnnnnnnnnnnnnnnnnnnnnnnnnnnnnnnnnnnncgtggtggcannnnnnnnnnnnnnnnnntacctnnnnnnnnnnnnnnnnnnnnnnnnnnnnnnnnnnnnnnnnnnnnnnnnnnnnnnnnnnnnnnnnnnnnnnnnnnnnnnnnnnnnnnnnnnnagcaatnnnnnnnnnnnnnnnnnnnnnnnnngaaattgaaaaacaaacagtaaaagtatatcatttttaagttatgtaaataaatatcagaagaagcacctatggatgctctgagagcaggacacaggagggaaagtcataaagagatgagacagaggactggagttttaattacaggttatctgagtacctggcttggggccagaaaaattcagatttcaaatcttgttgaatttcagattttgtcagattttggaagacttgcgttgccagttgggcatcccaaatccaaatatttaaaactcaaaatgctcccatgaacattttctttgagagtcatgctggcactcaaaaagtttaacatttttggatttcagattttttagattcgggatgctcaacctgtataacccttgtagaacaattttcttttttacggcacagctgtataagtccaannnnnnnnnnnnnnnnnnnnnnaaacaaaaccagggggtcttttggttattcaaaacaattaaatacccccccaaatttctggaaccatccctatgtggtcaaaaacctttttctagggtgcttgg

SEQ ID NO: 39862 - DNA, 376 bp, Macaca Mulatta
tgtgttgactaccactacttttcccttcctctcattatgtctggaaaagttgcggatcctgggctcggcaatgtgacgattgcgactgacccagtggctgagcaacgcccgaggattcgtgtaccagtttaagggcatgtgctacttcaccaacgggacggagcgcgtgcgttatgtagaccagatacatctataaccgagaggagtacgcgcgtttcgacagctacttggggttgtacctgccggtgacgccgctggggcggtcctgtcgccgagtactggaacagccagaaggaagtcctggagagcaaacgggcggagttggacacggtgtgcagacacaactaccagttggagctccgcacgaccttgcagt

SEQ ID NO: 39863 - DNA, 1109 bp, Macaca Mulatta
  misc_feature (1)...(1109): n = A,T,C or G
ctcaatctgggtgaaataatcaaaggtgtgaatagctcagatccagtcctatgtttccaggccacccagacagccaggnnnnnnnnnnnnnnnnnnnnnnnnnnnnnnnnnnnnnnnnnnnnnnnnnnnnnnnnnnnnnnnnnnnnnnnnnnnnnnnnnnnnnnnnnnnnnnnnnnnnnnnnnnnnnnngaggctgcctgggccctgaccaacattgcttcggggacttcggagcagactcgagccgtggtagaagggggagccatccagcccttgatcgagctcctgtcttcctccaacgtggctgtgtgtgaacaggcagtgtgggctcttggtaatatagccggtgnnnnnnnnnnnnnnnnnnnnnnnnnnnnnnnnnnnnnnnnnnnnnnnnnnnnnnnnnnnnnnnnnnnnnnnnnnnnnnnnnnnnnnnnnnnnnnnnnnnnnnnnnnnnnnnnnnnnnnnnnnnnnnnnnnnnnnnnnnnnnnnnnnnnnnnnnnnnnnnnnnnnnnnnnnnnnnnnnnnnnnnnnnnnnnnnnnnnnnnnnnnnnnnnnnnnnnnnnnnnnnnnnnnnnnnnnnnnnnnnnnnnnnnnnnnnnnnnnnnnnnnnnnnnnnnnnnnnnnnnnnnnnnnnnnnnnnnnnnnnnnnnnnnnnnnnnnnnnnnnnnnnnnnnnnnnnnnnnnnnnnactccttctctccgcaccgtggggaacatcgtcacgggcacagatgagcagacgcaggtggccatcgacgcgggcgtgctgaacgtgctcccccagctcctgcaacacaacaagccctccatccagaaggaggcagcctgggccctgagcaacgtagcggcggggccctgtcaccacatccagcagctgcttgcctacgatgtcttgcctcccttggtggccgtgctaaaaaacgggagaatttaaagtccagaaagaggctgtctggatggtggcgaactttgcaacaggggccaccatggatcagctgatccagctcgtccactctggggtcctggagccaatggtgaatctgctcacagccccagatgttaaaattgttctcatcatcctcgatgtcatctcttgcatcctccag

SEQ ID NO: 39864 - DNA, 441 bp, Macaca Mulatta
  misc_feature (1)...(441): n = A,T,C or G
aaactactcaagagctgcaaggtatttgttggcagattcaaaaaccgaaaagatcgtgaagctgaactcagaagcaaagccagtgaattcaccaatatttacatcaaaaactttggaggcgacatggatgatgagagattgaaggacgttttcagcaaatatggcaaaactctgagtgttaagnagctgaaaagggaacgaattcgtgggtaccagggagtaaagctctatgttaagaaccttgatgacaccattgatgatgaaaaactacgaaacgaattttcttcatttggatcaattattagagttaaggtaatgcagcaagagggccagagcaaagggtttggcttcatctgcttctcctctctagaggatgctactaaagcaatgatagagatgaatggctgcttcttgggctccaaacctattagcattgccttg

SEQ ID NO: 39865 - DNA, 412 bp, Macaca Mulatta
atggtcagtaggacagaaggtaacactgatgactcgctcattggtgggaatgcctccgctaaaggcccagagggcaaaggtacccaaagcacagtaatcactggtgtcgatattgtcatgaaccatcatctgcaggaaacaagtttcacaaaagaagcctacaagaagtacatcaaagattacatgaaatcaaaggcaaacttgaagaacagagaccagaaagagtaaaaccttttatgacaggggctgcagaacaaatcaagcacatccttgctaatttcaaaaactaccagttctttattggtgaaaacatgaatccagatggcatggttgctctattggtctaccgtgaggatggtgtgaccccatatatgattttctttcaggatggtttagaaatggaaaaatgtta

SEQ ID NO: 39866 - DNA, 170 bp, Macaca Mulatta
tgaccaagtgggagacagcagcaccagtggtggcagaaacccctgatatcaagttctttgggaagtggagccctgatgatgcacagatcagtgacatttcccttcaggattacactgccgtgaaggagaagtataccaagtacctgcctcacagcatagggttgtatgcc

SEQ ID NO: 39867 - DNA, 222 bp, Macaca Mulatta
ctgtgccaggcatcctgggccggagtgtggtcctccttagggagaggccctgcagggtgaggtagcaaatgtatttgaacatataatgtcatctgttgcagcctccagtttcttcttcctgataagcaatttctctccattcccaggtgccatcacaccaccatcagagctaactcttaaaaattacggtgtgattttattattactctggatataaacctc

SEQ ID NO: 39868 - DNA, 658 bp, Macaca Mulatta
  misc_feature (1)...(658): n = A,T,C or G
tatttttttttcccaactggctcagtggtccacgtagcaattatttccatgttacaccccatgatttaagatgctacctttatcgtatgctaaattccttgtatatatttgaatttattctgaacttcctatgataaatagtagtttggaagagagaaatagtctgatgctcaaaagacgtcctagccaggagagtaaaaagacaatattgctgaattacatgtaacaaagatgccggtgaagatggaggactgtttgggtgtgtttgttttaaagttttatttgggagagagaaccgaggagaagcaaagacgtcagataatctaaagaatagtccagccaaaaattagccggggatggtggcannnnnnnnnnnnnnnnnntactcgtgaggccgagacatgaannnnnnnnnnnnnnnnnnnnnnnnnnnnnnnnnnnnnnnggatcgtgccactgaactctagcctgggtgatagannnnnnnnnnnnnnnnnnnnnnnnnnnntaggcgcaaaccagaaacagattgttgaccgagtcttaaatatattattttccatatacaaaactaatgagtgctaataagtcaccactggttcataaatagcccatctcattgtgaataccacatgtacctgtgaattggagccttaga

SEQ ID NO: 39869 - DNA, 760 bp, Macaca Mulatta
  misc_feature (1)...(760): n = A,T,C or G
ggggcccctgcctcttnntncncccccctcaaatttcacgagatggtattagagccttcacccatggaacattacaaggcatgatgctactccaaggacaccgacagctgcaggaatggcagtccctaccatccagcctctcccactaaccgtcgcccctacccagcaggaagcagccggatgacaacggtgcccctcttctgttacctactaaaaggctggaatgttaaggaccccaaaagaatgcaacaagccccctcccctaaatgcagtttatatttcttccaaaaagttgcccctgccccaagttcccagaatgacaggtacagctataaccactcccaggctaaaccatatcctgatgccctgagccaagtaaggcaagaactgacaattgcagatgtagacacaccccaaaagcccctaaacacccccacaccctctccagaaaatacttacaccccctaacctgtaagctcaggtgctgccctcctctgactgttaaggagcagcccgggcaggttaataaatttgcttgcctggactttaagtctttctcatccctttctctagggtaacgttacacttttctacttacctcgggcgttgccttctacatttcccattcttttttaaatcatttccctgctattcctcctgttctgccagaaatttcctccaatctgaaatctttccctccctttaaaaaacttgggtttttaagaaagtgaagctatttccaaccaatggaaatttgaaa

SEQ ID NO: 39870 - DNA, 426 bp, Macaca Mulatta
  misc_feature (1)...(426): n = A,T,C or G
aaattttacagtgtaaaagaagaatgtatatcaaagcaatttccagtcaaactagttgaaacttttagaatctaagccaatagagcctgtgcctnttctagatgtgagactgttcttggcatgtttgcagaggtcagtgtagcttctgagctacctttaacccttgctcagtgtgcctgtttcctaagccctttatcacactctgtaccctttccaaattgccaatatcaatttcaaagccccaaggcagacataatattctcataatatctgaccactgctaacagctgtgggaagaaaacttgctgtttttagagcctctgcttcagtgtacgtatcccattttcatctctcgtttcttaaaagaattatattgctgacaaatttaactttgagcccataataaatcttggaaattttttctgg

SEQ ID NO: 39871 - DNA, 798 bp, Macaca Mulatta
  misc_feature (1)...(798): n = A,T,C or G
gggaccaagcagctagaagagagggtgcagcatccccaaggagaggcctgaggagtgggtgttccagaaagggctccagcatgtaaagctgcacagaagtcgagtaagataaagcctgagaggaatccatgggatttcttggcaaagggattgttggtgatatcagcaagagcagcttcagtggttcgtggggagacaagccaggttacaggagaatggtgtgggcccgggaggcgnnnnnnnnnnnnnnnnnnnnnncggcagnnnnnnnnnnnnnnnnnnnnnnnnnnnnnnnnnnnnnnnnnnnnnnnnnnnnnnnnnnnnnnnnntagaagaggctgggtgcagtggctcaagcctggaatcctagcgctttgagaagccaaggtatgggaggattgnnnnnnnnnnnnnnnnnnnnnnnnnnnnnnnnnnnnnggcaagagcctgtctttacnnnnnnnnnnnnnnnnnnnnnnnnnnnnnngtggtggcgcacatctatagtccccactagagaggctgaggtgggaatattgcttcagcccaggaggtcaaggttgcagtgagctgtgatttcaagactgccctcccgcttggatgacagaatgagacctttgtctcagcnacaacaaccaaaacggcccacggtggctccacgcctgtcatctccaactttttggaaaggcccaggtggggtcgggcgtggttggctcacgttctctccgtctcaacacttttggggaggctaaagccggggggatccctttgacgttaggaatttccaaacaagcctgg

SEQ ID NO: 39872 - DNA, 523 bp, Macaca Mulatta
tgtagttctgtggctgccaagttgtggtttttgacagatcgtcgcatcagggaagactatcctcaaaaagagattttacgagcgctgaaggccaaatgttgtgaggaggaactggactttagggctgtggtgatggatgaggtggtgctgacaatcgagcaaggaaacctgggtctgcggatcaatggagagctaatcagtgcctacccacaagtggtggtagtcagagtaccaaccccttgggtgcagagtgataatgacatcactgttttgtgccatctagagaagatgggatgccggttaataaaccgacctcaagccatcctgaactgcgttagtaagttctggacatttcaagagttagctggccatggtgttcctctgccagatactttctcttatggtggccctgaaaattttgctaaaatgatgatgaagcagaagtactggagttcccaatggtagcaaagaatacgcggggtcatagaggtaaagctgttttcttggctcgagataagcacca

SEQ ID NO: 39873 - DNA, 815 bp, Macaca Mulatta
gggtggacacagggagagacttcactgcctagggaaaggggaggggagaatggaaggactttgtattgtggtttcagcaccagcttaaacacagtagaaaagagtaccaggtaaatttctacgatttgttactctaggccttggctcctggatacatctccggacccacctggggcccaaaggaactttctgtcattaagggaaggacacaagactggctggcttcactacttgctgattgttgagccttaggatcttgagcaaatatagatgcaagccagatagtggttacagtggttcttggacaagactccatgctgtgctgccttcaggtctgacccagcatagtcccggtggtggtggccacaggggtgcttttggtgcccctcttccagctccaggaagctcagcacatagatttcatttgattgggagaaagtaaatgaagagaagaagaatctctgctgtctaggccacaagaaaataaaaagacaggtaatcaaaagaattcttccagatctatttgaagacttaccatgtcagtaccctctatgaagtctgccaataatttcaggtgtttactgggactttgggggttgcccttcctaatttcaccatattaccctggcagttgaacccaaaaaactttaagatttcccacacaattcccaaatttcccctttcaaaaataaatcctaggaaaaaggccctgggcttcgcaaggaatatggaatggggggctaataaaaaacaaaaaaccccccaaccccctgggagaacaaacaaaactcgccccacttttattaaaccccccc

SEQ ID NO: 39874 - DNA, 203 bp, Macaca Mulatta
agtggactgcatggaccccacatgttcaggccggggtgtctgcgtgagaggtgaatgccactgctctgtgggatggggaggcaccaactgcgagacccccagggccacatgcttagaccaatgttcaggtcacggaaccttcctcccggacaccgggctttgcagctgtgacccaagctggactggacacgactgttctatcg

SEQ ID NO: 39875 - DNA, 626 bp, Macaca Mulatta
acactgtcatggctttattcaaaacacagttgcacaaaagtattaacttcaaagttttgaaggagattcttgaggaacttaacacactatatacatactgccatacaaagagcattaaaataggaccgaaaacttctacaaaatataaaacccacccttacttatttgcatgaaaataccacccacaaagctaaataagtcttaaaagttatctggaggctctaagtgttgttttcaaaccaaagtactctaattttgattgcacagtaagatgattgataagaaagtcaatatatagatttcattttaaaaataagtattttgtaatctggcatagtatgtaacgagaattgttaggaactaaaatagggaacttcaatttttaaaagcagaagaaaaatgttagttttttggggattccaatcccctcactaaacttatcccaagtattttatttcagtcagttgtgtaacttttttagtttctccacaagtaacatcataatttttactttaaaacaccaagtcatacattttacattgtagaagcagtagcagcagtactatactcagtatttaaatatgtcccagtatagaagcataacttcaattaatttgctgacacta

SEQ ID NO: 39876 - DNA, 1163 bp, Macaca Mulatta
  misc_feature (1)...(1163): n = A,T,C or G
gggttagacttttaacaatcccatccatatctgtaattctctgatggcaagaatggatggagcatttctgagttaacgtgctgaacagtattgtactgggtgtcataaactctttatgaatggtaatattatgtaaattgaaatctggccctcatactatattgcaactttcagcacatatgttcgaaggcctcttttgttaatgatcctgataatgcatgatttacgtacttgagttattaaaaaaacaatatgtaaagcttccataactactcctttggcgttaaaagtcagcgtaaattgaacaggaaagaaactattgggttttagtttctcgcgaataaacgggcaccccaaagcttatttggctaatttgaattctgcctgctatgtaagttaacaaattactagccttttaatcattagaaccctgagtacgctcccggtggatttcctctccatgccttcccttagcgaattttatcccctttagacatcatagaaatatccaaagatattattaaaggcctgagacaaaactttacatggagggaaacttttaatcacatcgtcccactaaaataaactatgcactaggtaaaaaaattagacatatacaattacaacccgcgtcctcgacttctcatcgcgtattcaacaccattggccatcaaacgtcacattgacctctcttccggggtgttaacgaaatacccaataatctacctccagctcacttatgcctcaggcctcgtgtaattaatatcacaggattaactataaaggatctgcgcccatgtgctacgttttgtgcacacggggaaacgaaaaacaacatacacgcaaggctgctggcatatatgttaattataaactcacatatattttcctnataacaaaacataatgtttctcctcatcattatgacacatgtttgtcgtgtctagatncgagaatacacagcacgatataaccanagtcgttctccactaactaatgtcgtagatgtcttacaacatataatgcgtaacgcgcgtcattctagtcaaccgctcatgtctgtattgtctgtattgaaatactccaacgcgggtgtgcttctcccccatccgagattgtagcggaagagcattacctcatgagtgccgccatcgncatagatn

SEQ ID NO: 39877 - DNA, 775 bp, Macaca Mulatta
gggactgcattcagccgcgtctgccatacagggtcattctcacggtagactcggggtattcctcgccgtcaggtgcgtccactgtacagttccatatgccaacgatgtgcgtaccaaactaattgctccaagacaatctttcatagagccacggagatttctgccctgaccagagctgcgggaattacagatagaaggggccaaggccaccactcgagtccccttcttgaaagggagatcacatttaaaaacaagtaaaattatactggtttgggttgaaagggagagggctgttttcagagtgaggagcctcaaaatgtcctgtgacatcgcctgaatcgcttctgaaaagtcacatttggaaaactccttcccttgactaaagctgttccttatgaaggagaatgaaatggcaattctggcggctaggaagtccaaggtcaaggatccagcagatttggtgtctaggcactcatttgctgctcttgcaagtgctgccaccgatgtgatgccatctgccgtataacacagcatgtggtcctttccagaagtgactgcacaatcttgaacgtactagtgtccagaactgaggaagggagcgtttctagaaaagaattgctttgaatcactgagtaaataaaaagaagattgtccagactgatgcaagtacaaagttgctcagaaaagctttggtgaaaaagaggtcctgaagacccattttctgcaaactcctacaagggcctggatgtccatatgaccaagaattcaaaaaaaa

SEQ ID NO: 39878 - DNA, 297 bp, Macaca Mulatta
  misc_feature (1)...(297): n = A,T,C or G
aggggctgtcgtccgaatggaggaagaccgtgatgggagctgcagcacagtcgggggtgtaggttatggggacagtaaggattgtatcctggagccgctttccctgccagaaagtccaggtggcaccaccactttagaaggttctccatctgtgccttgtattttctgtgaagaacattttcctgtggctgaacaagacaaacttctgaagcacatgattattgagcataagattgtcatagctgatatcaagttagttgctgatttccgaaggtacattttatattggaggaaaan

SEQ ID NO: 39879 - DNA, 822 bp, Macaca Mulatta
  misc_feature (1)...(822): n = A,T,C or G
ggatcagaaagaaagtaccnnnnnnnnnnnnnnnnnnnnnnnnnnnnnnnnnnnnnnnnnnnnnnnnnnnnnnnnnnnnnnnnnnnnnnnnnnnnnnnnnnnnnnnnnnnnnnnnnnnnnnnnnnnnnnnnnnnnnnnnnnnnnnnnnnnnnnnnnnnnnnnnnnnnnnnnnnnnnnnnnnnnnnnnnnnnnnnnnnnnnnnnnnnnnnnnnnnnnnnnnnnnnnnnnnnnnnnnnnnnnnnnnnnnnnnnnnnnnnnnnnnnnnnnnnnnnnnnnnnnnnnnnnnnnnnnnnnnnnnnnnnnnnnnnnnnnnnnnnnnnnnnnnnnnnnnnnnnnnnnnnnnnnnnnnnnnnnnnnnnnnnnnnnnnnnnnnnnnnnnnnnnnnnnnnnnnnnnnnnnnnnnnnnnnnnnnnnnnnnnnnnnnnnnnnnnnnnnnnnnnnnnnnnnnnnnnnnnnnnnnnnnnnnnnnnnnnnnnnnnnnnnnnnnnnnnnnnnnnnnnnnnnnnnnnnnnnnnnnnnnnnnnnnnnnnnnnnnnnnnnnnngatcccacatttcctctttgggactgccctcaacccgccaatcttataacatcaactttccgaaacggaaacaaatcatgttacagattttcgaaagaaccgaccgccaagaaaagatagaacgactttgcggtggtgaatgttaatctcggtgacatacatcgcccccctagagaaattcacggatggtcctaatgggaaaagagaggaaatccccccctagaggataatgcgaggagaatntgtaaaacaaattaagaaataaagtgtaaatacatt

SEQ ID NO: 39880 - DNA, 644 bp, Macaca Mulatta
  misc_feature (1)...(644): n = A,T,C or G
gggggatatgtgacataccgttttgtcttgagattataattaatgatgtaatcagaatagtgtggactttggagccagggagacctttactcaaaaccataatataacttttcttagtaccatgacctaattttatcgtctataaaactgaaacttaatgagacctttttatagagttttaatgatatatgaaatggaaactatgactccatcattgcattcattacaattaaaacataattatctatgtgtatgtttttacctctacattgtaagcaccttaagcactgggatattttttcccaagtgtataatatagattctggcatatagtacatgagaaaataataatggatgttccttaccttgctttgacttcttaaaggtttttacttgatgaaggacgctaactttctgcagtgccatataatagaactgccagtctctaatcatatatatcatatatatcagcattgtgtctgaagaacatcagccatatgatatgcagttaatagagattatggaataaatgtataaaggtggggtactggcacctcagtgtttcaatgacgtagcccagttttgaagctcggtggtattgagtaactggtcaaagatactttgtgaaccagtttattatttgn

SEQ ID NO: 39881 - DNA, 521 bp, Macaca Mulatta
agaaggaagtgagggaaagcttaaaacactaagagatgtgctaagacgtgattctatctttcaagacactgacttttactcttaagtctagaactccattatcatagtcctcatctaacttaagttttaagtttattttggcattgagttaaatattaatgccaagattcagaagtaggtgacagacctagactgttggttaaattactcagattgttttaattttaaatatgtttcttaaaaatctaagcaactttttgtttgatacagatgatgtctaccgtagaaaagcctcagaaagacagtatcagagaaggctggaagatgaatgagactgaacttcagcagtcaataaagtcaatatgaatttttactattggtttcagtgccttttaaaatgtacttttcagatctcttgttctgacacagcttgtccttgatcagctgcacaatattaaagtaactgtctttgcaaagaatttttatagttctgtctctgcttgagtacttcccaagtcact

SEQ ID NO: 39882 - DNA, 784 bp, Macaca Mulatta
  misc_feature (1)...(784): n = A,T,C or G
gggaggtttggttgctttggagtacagcttcaagtgaagttaatctgaggtgaagcaaacagaaaattgtggaggttttgttggtgtgcaacggaggaacatggctcaagaaactaatcacagccaagtgcctatgctttgttccactggctgtggattttatggaaaccctcgtacaaatggcatgtgttcagtatgctataaagaacatcttcaaagacagaatagtagtaatggtagaataagcccacctgcaacctctgtcagtagtctgtctgaatctttaccagttcaatgcacagatggcagtgtcccagaagcccagtcaacattagactctacatcttcatctatgcagccaagctctgtatcaaatcagtcacttttatcagaatctgtagcatcttctcaattggacagtacatctgtggacaaagcagtacctgaaacagaagatctgcaggcttcagtatcagacacggcacagcagccatctgaagagcanagcaagtctcttgaaaaannnnnnnnnnnnnnnnnnncgctgtttcatgtgcaggaagaaagtgggacttactgggtttgaatgccggtgtggaaatgtttactgtggtgtacaccgttactcagatgtacacaattgctcttacaattacaaagctgatgctgctgagaaaatcagaaaagaaaatcccagtagttgtttggcgaaaagatccaaaagatttgaactcctgctgggaaacaaaattccttgaacatctgcaaacttaaaattggactt

SEQ ID NO: 39883 - DNA, 635 bp, Macaca Mulatta
  misc_feature (1)...(635): n = A,T,C or G
ccagtgcaaagacttgggaaataaaaagatcctcaaataatatacccttctcagtcttccaggttatgtcatacttcagtgctgttctaggttcactcacattccatcacattgagtttaattcacttattctaacttcaattctgatatacaaaccctgacctccaaaagaagtgtcagatgagtctctctctcccttgcccccaaagttttgtggggctctccctttggtttccctctacaatggaactgtgttgcccctagctacctgtagatgagaaaatgtagttgttcctgnnnnnnnnnnnnnnnnnnnnnnnttggattttaccaagcttacttaaattggtatctttccaatcatctaggctggatattacccacatctagtaggctatactcaccttgcaacatatgaggcacaacatacatatagtacaccaagcacgtggtaagttagaaatgacaggaaaatgctccccaaagcagtgggagaggcaatgtggtctctcacatccattcaatgtgcattcttttctctggagtatctgttacccacccttctcaggagcaagacccaggacgagggggagtatgtgtcaaataagtacaatcatcactgcactggtgccccc

SEQ ID NO: 39884 - DNA, 773 bp, Macaca Mulatta
  misc_feature (1)...(773): n = A,T,C or G
gggttgaaacttgacagtactacttgaattgctgaaagattaattaattacaatcaacatggataagaatttcttccaagaatataatgcaaaatttcagaagttagaatgactaataataatatacattgggagaaacctaggaacagcatgtgtaaattatttgatttattttcctgcaaaggttgttgaagaaaataatctcaaacaaggcgtattgttggtcagcagtggtttcaacccaagggccgtatagaatatgcatgcttcaacagtcctggtttggctagttgacaaatacaattgtttggaagtgatgtgaaatagtggaaaatgaaagacttagagagtcaaatggaaataggtttaggaatggctctgcctctcactggctatgtaaacttgaagaaatagcagcatgtttctgatgcacagttcctcatgttatcatatctatctgtattgtgagaattaaatgatctattttatgtagtttaggcaattctacttttgttacaaaatcatattaaatagtaactcttacttaaaaacacaacctagtaaatcacattttgatatctgcttttgctcttctccctctgttcctaaccacagtgacctttatattttatgtaactaacttggatgtgtagaatctgggcaggtgtggtggctcacacctgtaaattcagcaattttgggaaggcccagcaggcagaattactggannnnnnnnnnnnnnnnnnnnnnnnnnnntaacaaggttgaaaccc

SEQ ID NO: 39885 - DNA, 648 bp, Macaca Mulatta
  misc_feature (1)...(648): n = A,T,C or G
tgtctgaggctgggcctgaccctgctccttaccccgtggatgcagcacagccatgaagaaattagtggtgctgggcctgctggccgtggnnnnnnnnnnnnncattgttggcctctgtctcttgctgcccttggcctccaaggaacctgacaaccatgtgtacgccagggctgccgtggctgcggatgccaagcactgctccgagattgggaggnnnnnnnnnnnnnnnnnnnnnnnnnnnnnnnnnnnnnnnnnnnnnnnnnnnnnnnnnnnnnnnnnnnnnnnnnnnnnnnnnnnnnnnnnnnnnnnnnnnnnnnnnnnnnnnnnnnnnnnnnnnnnnnnnnnnnnnnnnnnnnnnnnnnnnnnnnnnnnnnnnnnnnnnnnnnnnnnnnnnnnnnnnnnnnnnnnnnnnnnnnnnnnnnnnnnnnncactaactgtagctctctctccccaggggggctgtcagtggcggtgcccggggagatccgaggctatgagctggcgcaccagcggcatgggcggctgccctgggctcgcctcttccggcccagcatccagctggcccgccagggcttccccgtgggcaagggcttggcagcagccctggaaaacaagcggaccgtcatcgagcagcagcctgtcttgtg

SEQ ID NO: 39886 - DNA, 796 bp, Macaca Mulatta
  misc_feature (1)...(796): n = A,T,C or G
aaggttttttcatttttaaatgggtaagtctaactttaaatnnnnnnnnnnnnnnnnnnnnnnttggtaaatagtttttggcttttttctttccatattcagggaagtcctttgccaaaaccccaaaggtcactaagatttttatcttatagtttccttgtataaattttatggtttaaaatcttatatttagatagcctatgatccatttcagattaatttttgtatgaggtatagataacagttgaggttcactttattgcatgtggatttataattactccagcaccatctgttagaaagattatccattccccattgcatttccttggtacctttgtcaaaatttcagttagttgtatatgtgtggatctgtttttgtactctgtgttctatttgatccatttgcttttctttatgccaatactacattgtcttaatcttaaaatcactgcctcttgccctgtttacctaaatgcttcctaataattcttttagctagtacaatttgtatgaatttatggttcttttatgatactttttttatttgttgcttaattagcaaatatttatagtaatgcaatacaggctttgtgagtagatgagccgttacgagaaaatattctagtcaagcttctgggaatgttgcctttaagatttcttttgatttttgtgatggtaaataagtgtgttagccaggccttgccagagtagtccaannnnnnnnnnnnnnnnnnctattgttcaaatatagcaggtattcaaataatactgatttaaacagtacttgacaccc

SEQ ID NO: 39887 - DNA, 674 bp, Macaca Mulatta
  misc_feature (1)...(674): n = A,T,C or G
atggtcctggaattctccgtgtccattctttggattcagttggcatgggtgagcacccagcagctggagcagagtcctcggtttctaagcatccaagagggagaaaatttcactgcgtactgcaactcctcaagtgtttttaccagcttacaatggtacagacaggaccctggggaaggtcctgtcctcttggtgacactagttacgcgtggagaaatgaagaagcagaagagactaacctttcagtttggtgatggaagaaaggacagctccctccacatcactgcgacccagcctggtgatacaggcctctacctctgtgcaggatgctgaatgagactgacatactgacctttggatcaggcaccaagctgaatgttttagcagnnnnnnnnnnnnnnnnnnnncnnnnnnnccagctgagaggctctaaatccaatgacacctctgtctgcctatttactgattttgattctgtaatgaatgtgtcacaaagcaaggattctgacgtgcatatcacagacaaaactgtgctagacatgaggtctatggactttaaagagcaacggtgctgtggcctggagcaacaaatccgattttgcatgtacaagcgccttcaaggacagcgttattccagcagacaccttcttccccggcacagaaagtgtctgtga

SEQ ID NO: 39888 - DNA, 818 bp, Macaca Mulatta
  misc_feature (1)...(818): n = A,T,C or G
ggnnnnnnnnnnnnnnnnnnnnnnnnngaatctctnnnnnnnnnnnnnnnnnnnnnnnnnnncnnnnnnnnnnnnnnnnnnnnnnngcttcctgggttcaagcagttctnnnnnnnnnnnnnnnnnnngnnnnnnnnnnnnnntgcccgccaccacgcccagctaatttttttgtagttttagtagtnnnnnnnnnnnnnnnncnnnnnnnnnnnnnnnnnnnnnnnnnnnnnnnnnnnnnnannnnnnnnnnnnnnnnnnnnnnnnnnnnnnnnnnnnnnnnnnnnntgcgcctagcccagataaattttcttcttttccaatttgcctaattgcactaactagaacttttaacattatgttgaatagaagaagtgagggtgtgcatgctaggcttgttcctcatcttaaagaaaaggcttttagtctttcaccactgagtatgatattatctgtgagggtttcatacatggtctttatgattttaaggcagtttccttctaattatcatttggttgatgttttatcaaaaaagggtgttgtgttgaatcttgtccaatgccctttttgcatcgagaggggcatcttttttgcccttatctgtgaaagcgatgggttacattggattgaaaatccgtagggtggaatcataccttgccattccgcaaaaggaattccaaattgaatgaggggaaatgtaaattccttttaacatgcccacgtggaaattggcaaaatatttttggctggaggggtgtttttggcctccaaaatccccacagagagaaagattacccccggtaggtttatatctttta

SEQ ID NO: 39889 - DNA, 907 bp, Macaca Mulatta
  misc_feature (1)...(907): n = A,T,C or G
ggtcttgccataggcttagtaaatagagtacaatccactggctcctagcccagctgaaatctttgggcagttacttcagacttccagttagctgtgatgggagtgaatctttgaacagagatagaaatggcctgaaagaatgcaagtgcttttcccttctgcatccctcagttgcctaagaagagatcattctggagtctaaacctacatcatgatctnnnnnnnnnnnnnnnnnnnnnntggtactggatcagtccctatgctttcagtttcaagtaacaacagagtgcctaaactgtgtcatgaacaatgagtaaaatttatcatcctcacatcgacaaaaagtatttctaggataggcctaagtcaagtagcacagtatgcaccacgtggtgtttccccaccatttcgtgttcctggaaatgcgaatttttagtaactgaaagcacaaaagcctttaaatcaatcacggcccaaaatccttcctggccccaactgggtggtgggggtggtaaaaaattttgttccccagggccctccaattgtngaacacactgacaataaaattagccacccaaagtggcctattaccaaagccagagggncccgaccccattgaacaaactagatgcccaaggcttttttattttgggagggccgaaaaaaattgcgccccgagtataatgattaaaaaaagggttaaaattatccacgacacagattttgtccaccagattaaaaaaccccttccccaatttgaaaaatgcccaaataggccccaaccccccccgggaaaatagagaggacaacgccgttgccaatgctaagggaaaaacccggtcctcccaaaaaacaaaacaatcgggggggccttcccccgggaagacgacgtcccacaacgcccccg

SEQ ID NO: 39890 - DNA, 265 bp, Macaca Mulatta
ttccgcaaactggtggaagagttctcctcagtggccgacttcctgctggtctacattgatgaggctcatccatcagacggctgggcgatacctggggactcctctttgtcttttgaggtgaagaagcaccagaaccaggaagatcgatgtgcagcagcccagcagcttctggagcgtttctccttgccgccccagtgccgagttgtggctgaccgcatggacaataacgccaacatagcttacggggtagcctttgaacgtgtgt

SEQ ID NO: 39891 - DNA, 640 bp, Macaca Mulatta
  misc_feature (1)...(640): n = A,T,C or G
gaaattaatgatcatgagctcgtatttgatggactctaactacatcgatccgaaatttcctccatgcgaagaatattcgcaaaatagctacatccctgaacacagtccggaatattacggccggaccagggaatcgggattccagcatcaccaccaggagctgtacccaccaccgcctccgcgccctagctaccctgagcgccagtatagctgcaccagtctccaggggccgggcaattcgcgaggccacgggccggcccaggcgggccaccaccaccccgagaaatcacagtcgctctgcgagccggcgcctctctcaggcgcctccgcctccccgtccccagccccgccagcctgcagccagccaaccgccgaccatccctccagcgccgccagcaagcaacccatagtctacccatggnnnnnnnnnnnnnnnnnnnnnnnnnnnnnnnnnnnnnnnnnnnnnnnnnnnnnnnnnnnnnnnnnnnnnnnnnnnnnnnnnnnnnnnnnnnnnnnnnnnnnnnnnnnnnnnnnnnnnnnnnnnnnnnnnnnnnnnnnnnnnnntcgagatcgccaacgcgctttgcctgaccgagcgacagatcaaaatctggttccagaaccgccggatgaaatggaa

SEQ ID NO: 39892 - DNA, 624 bp, Macaca Mulatta
tgtgcagctccttatcagtggagagtagtttgtcgtttactctctgctccagctggtgttaagtggctgggggtttgtggtggcatattcagagatgtggccctaaaagggactctttacctttgaagattaaattctgatttttttttcttgcccaaattcctatctaaggggtttggggagtcatgccctacaaatcataaattctcattagatgggttttatttaaccctgtatgtcgtgacttacttttcaatctgactctggcctaacatcacaagataaggaagaaattcaaaatattttaccccaaaacatgtttctttgccatattttgaaatggccccacaaagctgttctttgtaggggaaaatttacatctgtaaagaatctattaaaatagctagatctttttcttccagacactcccaatcctaaagagattaactgagatctgaataggaaacatttgtcatctattgtctctaagggcagacactataagacttcaaaacaactttagtcaccacaattttcgtcttaacctgaacaatccctttctatgaatcccaggtttttagacaaactcaaccaatttgtcaaacagaaaatgtttcattcacc

SEQ ID NO: 39893 - DNA, 313 bp, Macaca Mulatta
ctttggtgttaattgaaataaaaatgtaagtgctggaggacgaaatggtaatgtggaatcactggaataaaatattgatttttaaaatctattaagtgctgaaaactattagttaaaatattattggactaaaaacattagttttaaataaataagtcaaaacaaaataataaataggatgctaatgatgcaagtgagctttcagtaacttccctgattacttttacgctttgcaaaaaacctcgtatatggtattgggcatatattaaaattctaacactatttatcaaaaactttcctatgcaaaaaaaaa

SEQ ID NO: 39894 - DNA, 456 bp, Macaca Mulatta
ggcggttctgggactggagggcaggggtgacgtggacaatcttgggcctccgtggagatgaggtgcttggctttcttcccaggacccacaggctgccgtgggattgaaagcatgtggaggcgggaaaggtgacagagtagcatgcctcgaaggcccccttcatcccagtcctgctgtggggaaagtgggctttgaacgggatccaagtctaagatgtttccggtgagctgccagggacaaagggctctcagacatcttgggtccccagtggctggggtgggcaggggctgattcagccaaaggaggcattagcccagaacagaggaagccagagcccctgccccattcctgagcctcacagagcttgtccccagcttgattcactgtgcaacacaggcttcagattcatgtatttgaaggtatgcatgatgttgttctcttatcacctctgccccc

SEQ ID NO: 39895 - DNA, 86 bp, Macaca Mulatta
ttttaagtcaagggattgaagactggaactgccagacgttttcccaatgggtgttatctcatccaggacaagtggtacttactgtg

SEQ ID NO: 39896 - DNA, 83 bp, Macaca Mulatta
agcaagcagtgaataaccagttccccttctccgtgcatgacaatcggcacagtttggagaactctggatgctaccttgactcc

SEQ ID NO: 39897 - DNA, 343 bp, Macaca Mulatta
accctgttctcaggaggaagccaccaagcacttcctcctgccacacacacattgattttatttcctctcctccagtggccctgtatttgaacaccttttctatgaaacagtatcattttgggtgttacttataacacaaaagagatagatgaaaaatctggagctgggatcacatggtcaaaggtgcaggcttatttaatttcacagtacttgctgctaaattgtttctcccaagcactgcccctctggggacttcccttttggaagggagcccatttcagcactcctcactagcactgagatctgtctgctctaaacgggcatcacaaccagcaaccacaga

SEQ ID NO: 39898 - DNA, 1540 bp, Macaca Mulatta
agcgtggtgtgtgttgggttgttcttggtccagagggcttgtccatacacgggtggtcaggacaagaccttcctgtctgtctggcccagcgctgtggtgcctcagggaggacacgtgactcttcggtgttactatcgtcgtgggtttaacaactttaccaacttcactctgtacaaagatgacagaagccacgttcccatctttcacggcagaatattccagcagagcttcctcatgggccctgtgaccccggcagacgcagggacctacagatgtcggggctcatacccgcactcccccactgagtggtcggcactcagtgaccccctggcgatcgtggtcacaggagtccacagaaaaccttccctcctggccctcccaggtcccctggtgaaatcaggagagacggtcaccctacaatgttcgtcagatatcgtgtttgagcacttctttctgcacagtgaggtgacctttgaggagcccttgcaccttgttggagagctccatggtgggggttcccaggccaactactccatcaattccacgacgtctgaccttgcagagaccttcagatgctacggttctgtcactcactccccctatgtgttgtcagctcccagtgaccccctgaacatcgtgatcacagggagggggagtcccgtgaacttagtgtctctgcagtgcgaagtgtcaatggaacattccaggccgacttccctctgggccctgccacccacggaggaacctacagatgcttcggttctttccgtaccgcaccctacaagtggtcagacccgagtgacccactgcccgtttctgtcacaggaaacccttcaagtagttggccttcacccactgaaccaagctccaaaaccggtatccccagacacctgcatgttctgattgggacctcagtggtcatgatcctcttcaccatcttcttctttctcctgcatcgctggtgctccaacaaaaagaatgctgctgtaatggaccaagagcctgcgggggacagaacagtgaacagggaggactctgatgaacaagaccctcaggaggtgacatacgcacagttggatcactgcgttctcacacagggaaaaatcactcgcccttctcagaggcccaagacacccccaacagataccagcgtgtacatggagcttccaaatgcagagcccagatcgaaagttgtcttcaccacagtcaggccttgagggggtcctccagggagacaacagccctgtctcaaacccagcttgccagttccaatgtaccagcagcaggaatctgaagctgtgagtctgcatcttagggcattgctcttcctcacaccacgaatctgaacgtgcctctctctcgcttacaaatgtctaaggtccccactgcctgctgcagagaaaacacactcctttgcttagcccacaattctccacttcacttgacccctgcccacctctccaacctactggcttacttcctagtcctactggaggctgcagtcacaccaaggaactcacaattccaaacatacgagagg

SEQ ID NO: 39899 - DNA, 717 bp, Macaca Mulatta
  misc_feature (1)...(717): n = A,T,C or G
gggactacatcagccacctgccagcctctaaaaaacagtgattcagcctcacagggataaatacctggatttattccaaacatggatttgcctttctagtgctgtaaggctcagccagcactattgctcatgcctgatccaaagacatgaaataccaagtaatataacatccaacccaggagattcacttcatagcaaaaatgctatcggagtgtaagagtagataacaactctaaatatatatgtatccaacaacagagcactcagatacataaagcaaatactataaaaaataaagattccaagacaataactattgagaacttcactccactgtcagcattggatcatctaaacagaaaaatcaacaaacattggatttaaactgcactttagaccaaatggacctaacagatatttcagaatcttttatccaacagctgtagaacacacattcttctcatcagcacatggaacgttctccagggtaaacctaatacattaggccacaaaacaagtctcnnnnnnnnnnnnnnnnnnnnnncagggtctcactctgtcatccaggcaggagtgcaatgctgttatcatagctcactgcagccttgaactcttgagctcaaatgattcccctcttcagcctcccagctaatcaggaaggctggaggcaaggaaaaagggcatggaacccccccaaaggtggaaactttggcaata

SEQ ID NO: 39900 - DNA, 830 bp, Macaca Mulatta
  misc_feature (1)...(830): n = A,T,C or G
ggatgccccagttagatacatcaacatgattcaccactattatgacgatgcttcccacactatatcttatcatgcagctaaagctactaaacacaaatcaccaccaaccaccccttacaaaaacccccacccttcagtctcacaatgtccgnnnnnnnnnnnnnnnnnnnnnnnnnnnnnnnnnnnnnnnnnnnnnnnnnnnnnnnnnnnnnnnnnnnnnnnnnnnnnnnnnnnnnnnnnnnnnnnnnnnnnnnnnnnnnnnnnnnnnnnnnnnnnnnnnnnnnnnnnnnnnnnnnnnnnnnnnnnnnnnnnnnnnnnnnnnnnnnnnnnnnnnnnnnnnnnnnnnnnnnnnnnnnnnnnnnnnnnnnnnnnnnnnnnnnnnnnnnnnnnnnnnnnnnnnnnnnnnnnnnnnnnnnnnnnnnnnnnnnnnnnnnnnnnnnnnnnnnnnnnnnnnnnnnnnnnnnnnnnnnnnnnnnnnnnnnnnnnnnnnnnnnnnnnnnnnnnnnnnnnnnnnnnnnnnnnnnnnnnnnnnnnnnnnnnnnnnnnnnnnnnnnnnnnnnnnnnnnnnnnnnnnnnnnnattctaatgctaaaagccaatcgaaaaactatcagttctaacttatttcacccaatgacgctctggccctactaaattaatcgccaaaaattaacaaacccgggcctatcgtgcctaaatcaacccgggattcgggaaatcctgggtacctaggcccatattctgagcactccaaaccttcttccgctaaagccctctttcttaagccccatccttaaaaacttttctggggggatatttcacaaaacact

SEQ ID NO: 39901 - DNA, 694 bp, Macaca Mulatta
aggaaaatggcaaatgcacgacagcggccttctgaacatcaccaaggtatccttctcagaccgaggtaaatacacgtgcgtggcttctaacatctacggcactgtgaacaacacggtgaccttgcgcgtcatcttcacctctggagacatgggtgtctactacatggtcgtgtgcctggtggccttcaccatcgtcatggtcctcaatatcacccgcctgtgcatgatgagcagccacctaaagaagaccgagaaggccatcaatgagttctttaggaccgaaggtgcagagaagctgcagaaggcattcgagatcgccaagcgcatccccatcatcacctctgccaaaactctagagcttgccaaagtcacccagttcaaaaccatggagttcgcccgctacatcgaagagctcgccaggagcgtgcctctgccgcctctcattatgaactgcaggactatcatggaggagattatggaggtggttgggctggaggagcaggggcagaattttgtgaggcatactccagagggccaggaggctgcagacagggatgaggtctacacaatccccaactctctgaagcggagcgactcccccgccgccgactcggacgcctcatcgctgcatgagcagcctcagcaaattgccatcaaggtgtcagttcaccccacagtccaaaaaagagcatgc

SEQ ID NO: 39902 - DNA, 1297 bp, Macaca Mulatta
  misc_feature (1)...(1297): n = A,T,C or G
ctccatttgccggcccacggtgttgctgccaccctgatggagtgccctctcgtgtggcacctgcctggcccctttcccaagccccagttctgtccatgcagctgtgggtgcttcctgcattgggggtcccgccgggaagagccaagagtgcccctgggggagtcaggaaagaattccctcttcacctcactgccagaaaatgaccatagcagcttcgccacccctgcaggaacctatctcggtaaagaaatggagcctatgtggtggccgagcctcaggtgtggctaagcttcgggtgtgacccttatgcacagcacagcnnnnnnnnnnnnnnnnnnnnnnnnnnnnnnnnnnnnnnnnnnnnnnnnnnnnnnnnnnnnnnnnnnnnnnnnnnnnnnnnnnnnnnnnnnnnnnnnnnnnnnnnnnnnnnnnnnnnnnnnnnnnnnnnnnnnnnnnnnccccaggctgcttcatggcctctgcagggagcttcgtagaggtgaggctgataccatctgtctgcttcagaccaccgcaggctctgcgtgccctcacagtccccttggcacttctctgtggggtggagaagcccttcccatgaggtctccactagcctggctgctttgttcctgccgccccctccccttcaggcccccagacaagatctcagtttacttgctggtgccgggtagaatggggaactttgtctcccacccacttgctagcatctgtgcaacctccaggcatcatctcagctgacagtgacgccatcctggggaagctcccctgacccccggttctcctggaagcctgtggtgctccttcacnnnnnnnnnnnnccttcataggtcccgtaagccagtgtcacaaggatccggcttttctctcctgtgtctgcctgccgcgggactgtgggcagcttcagggccgagagagtgcctttccatccgtgaatctcctgatccgtcagaatactcggaagagannnnnnnnnnngagtgtattcagtaaagaattaatgttccttacaggatcatttgttgttgaactgatctgacatgtgtatagtaatctcacgaacaagagagaacgtgttcatacgttcgcttaaactgaatgtagcaatcgcattaggataatgatacttccacaatgtatatgcactatctttttaaatttaacttatttgctttttagacggaagctcgtcagtcttagagagttctgaaggtggatttctcagccacgttcaacctgatgagttcactggttcttccccaaacattgcagaactgca

SEQ ID NO: 39903 - DNA, 545 bp, Macaca Mulatta
tcctgccacttcttcccactcccaggacccagcccaggtcacctcgctgattcctgcccccttgccagctgcaagcatggatgggggcatgagaagcccaaggcctggcacttctgctcctgcagctgctgcagcggcccctcccccccccactttgacccccacgtcggggtccctactgagtggagtggatggaggcccttcacatttccgggcctcaaccacaggtgcagcaggttcccagaggtcagaagtcagatataaccagagatcccagacctcctgcatgagctcgtgtcccaaacgaaatgccatctcgagctcctacagctccacgggaggcttcccgtggctaaagcggaggaggatgggggggccagcctcatcccactgccagctgaccctcagttcctcaaagacagtgagtgaggccaggcctcaggctgcctcttcgggtcacacccagtgtgaaaaggtggcagatacaacaccagggcagacattcgcccccaggactggctcccccagatcccaggcctctaggc

SEQ ID NO: 39904 - DNA, 784 bp, Macaca Mulatta
  misc_feature (1)...(784): n = A,T,C or G
gggcattaatgagtactaggagaaaaacaaataagcaaacaaaattttatttttttgggatggagtcccactgtgtcaccccggctggagtgcagtggctcagnnnnnnnnnnnnnnnnnnnnngannnnnnnnnnnnnnnnnnnnnnnnnnnnnnnnnnnnnnnnnnnnnnnnnnnnnnnnnnnnnnnnnnnnnnnnnnnnnngnnnnnnnnnnnnnnnnnnnnnnnnnnnattaatagagacagtgtttcactacannnnnnnnnnnnnnnnnnnnnnnnnnnnnnnnnnnnnnnntgcctgcctcggcctcannnnnnnnnnnnnnnnnnnnnnnnnnnnnnnacgcctggccagtaagcaaattttaatgtggttggaacatgttcttgagttgtatgaagggagacaggtaaattgagagtaatgttacgattgtttcatttgttggaaatgatgaaaacttgcacgggttgaattgtgggacaagagggggtgtctgtcaggagtcagaattatcatttacatggaagtttctgttttacttcagagaaagaatgtcggctacctttcccatgttagcttctataccttttcctgagattaccataaataggtaatattgtcttttactgagattgttttaagtagcgaagtgtgctgaattaatatctgttcttgctaaattattaggatcaataaaggactatatttctagatagcttttggttagtcagtgaatttggtttaaatttaatgtgggataagaatcacctggagggc

SEQ ID NO: 39905 - DNA, 715 bp, Macaca Mulatta
ggccgcgggtaaacgctcctgccagtgtctgatcgctcctcgcctcgccgcctggattgcattattattttatccgggttgccgtttgctgcggatggtgcattactctactgactggcagagacaggagaagtagatgtccacgcccacagaccctggtgcgatgccccacccagggccttcgccagggcctgggccttcccctgggccaattcttgggcccagtccaggacccggaccttccccaggttccgtccacagcatgatggggccaagtcctggacctccgagtgtctcccatcctatgccgacgatggggtccacagacttcccacaggaaagcatgcatcaaatgcataagcccatcgatgggatacatgacaaggggattgtagaagacatccattgtggatccatgaagggcactggtatgcgaccacctcacccaggcatgggccctccccagagtccaatggatcaacacagccaaggttatatgtcaccgcacccatctccattaggagccccagagcacgtctccagccctatgtctggaggaggcccaactccacctcagatgccaccaagccagccaggggccctcatcccaggtgatccgcaggccatgagccagcccaacagaggtccctcacctttcagtcccgtccagctgcatcagcttcgagctcagattttagcttataaaatgctggcc

SEQ ID NO: 39906 - DNA, 2468 bp, Macaca Mulatta
  misc_feature (1)...(2468): n = A,T,C or G
ctgcgcaggaaggtgcgggaagatggcagtcgctggagtcggaggctgggcggtgacgnnnnnnnnnnnnnnnnnnnnnnnnnnnnnnnnnnnnnnnnnnnnnnnnnnnnnnnnnnnnnnnnnnnnnnnnnnnnnnnnnnnnnnnnnnnnnnnnnnnnnnnnnnnnnnnnnnnnnnnnnnnnnnnnnnnnnnnnnnnnnnnnnnnnnnnnnnnnnnnnnnnnnnnnnnnnnnnnnnnnnnnnnnnnnnnnnnnnnnnnnnnnnnnnnnnnnnnnnnnnnnnnnnnnnnnnnnnnnnnnnnnnnnnnnnnngttgattccccagatctcctccttgacatggtatacaactatgacacccctgatggtggtgctgtccataacagctgtgaaagatgccatcgatgatctgnnnnnnnnnnnnnnnnnnnnnnnnnnnnnnnnnnnnnnnnnnnnnnnnnnnnnnnnnnnnnnnnnnnnnnnnnnnnnnnnnnnnnnnnnnnnnnnnnnnnnnnnnnnnnnnnnnnnnnnnnnnnnnnnnnnnnnnnnnnnnnnnnnnnnnnnnnnnnnnnnnnnnnnnnnnnnnnnnnnnnnnnnnnnnnnnnnnnnnnnnnnnnnnnnnnnnnnnnnnnnnnnnnnnnnnnnnnnnnnnnnnnnnnnnnnnnnnnnnnnnnnnnnnnnnnnnnnnnnnnnnnnnnnnnnnnnnnnnnnnnnnnnnnnnnnnnnnnnnnnnnnnnnnnnnnnnnnnnnnnnnnnnnnnnnnnnnnnnnnnnnnnnnnnnnnnnnnnnnnnnnnnnnnnnnnnnnnnnnnnnnnnnnnnnnnnnnnnnnnnnnnnnnnnnnnnnnnnnnnnnnnnnnnnnnnnggccagacaccaaattaatgcagaacagtggaaagtccacttttaaacgaacacagatagaccatctcatgaatgtccttgtactctgggnnnnnnnnnnnnnnnnnnnnnnnnnnnnnnnnnnnnnnnnnnnnnnnnnnnnnnnnnnnnnnnnnnnnnnnnnnnnnnnnnnnnnnnnnnnnnnnnnnnnnnnnnnnnnnnnnnnnnnnnnnnnnnnnnnnnnnnnnnnnnnnnnnnnnnnnnnnnnnnnnnnnnnnnnnnnnnnnnnnnnnnnnnnnnnnnnnnnnnnnnnnnnnnnnnnnnnnnnnnnnnnnnnnnnnnnnnnnnnnnnnnnnnnnnnnnnnnnnnnnnnnnnnnnnnnnnnnnnnnnnnnnnnnnnnnnnnnnnnnnnnnnnnnnnnnnnnnnnnnnnnnnnnnnnnnnnnnnnnnnnnnnnnnnnnnnnnnnnnnnnnnnnnnnnnnnnnnnnnnnnnnnnnnnnnnnnnnnnnnnnnnnnnnnnnnnnnnnnnnnnnnnnnnnnnnnnnnnnnnnnnnnnnnnnnnnnnnnnnnnnnnnnnnnnnnnnnnnnnnnnnnnnnnnnnnnnnnnnnnnnnnnnnnnnnnnnnnnnnnnnnnnnnnnnnnnnnnnnnnnnnnnnnnnnnnnnnnnnnnnnnnnnnnnnnnnnnnnnnnnnnnnnnnnnnnnnnnnnnnnnnnnnnnnnnnnnnnnnnnnnnnnnnnnnnnnnnnnnnnnnnnnnnnnnnnnnnnnnnnnnnnnnnnnnnnnnnnnnnnnnnnnnnnnnnnnnnnnnnnnnnnnnnnnnnnnnnnnnnnnnnnnnnnnnnnnnnnnnnnnnnnnnnnnnnnnnnnnnnnnnnnnnnnnnnnnnnnnnnnnnnnnnnnnnnnnnnnnnnnnnnnnnnnnnnnnnnnnnnnnnnnnnnnnnnnnnnnnnnnnnnnnnnnnnnnnnnnnnnnnnnnnnnnnnnnnnnnnnnnnnnnnnnnnnnnnnnnnnnnnnnnnnnnnnnnnngtttttgacagaattcaagagtgcaggagacttccacggcagtccccagcccggaccaaactgaaacactcaagcactcgacgttctgcctatgcattctcccataaacatggctttggggccctcatcacttctggccagacaatgaagtccaggatgtccaagaaaaacacccttttttcaaaaagatagaggccctagggaaattccaaaggaggcagtcagtgctcttcctccctcgtattcatgaaacttaggaagaattagagtccctgggaagccagcataaacctgctccttcattctcactagggactaagcctcctaattgtccagaaggctatgcccaggtaaggcaaggagaggtaaggaaagagcccccagatgtctgccagagttgcagcatttcannnnnnnnnnnnnnnnnnaacctcaggcctgcctcccaccgtctcttgcaagttttaatccagacaagcataagcatatgtagaggtagggggtgacaagggacagtatggggaagggaaaggatgattcccctagaaaggattttactctgggccctatctcctatacttagagcaagcataaccttcccag

SEQ ID NO: 39907 - DNA, 690 bp, Macaca Mulatta
atacatatcccttcacacttcgatatttaactctctcaactgcatgtgaaagatcttagctgaagatgactgacagtgttatttattccatgttagagttgcctacggcaacccaagcccagaatgactacggaccacagcaaaaatcttcctcttccaggccttcttgttcttgccttgtggcaatagctttggggcttctgactgcagttcttatgagtgtgctgctataccagtggatcctgtgccaggagcctgctccaagatttcctcagtgaggcctttcactgggttggtctgaggaacaattctggctggaggtgggaagatggatcacctctaaacttctcaaggatttattctaatagcttggtgcagacatgcggtgccatcaacaaaaatagtcttcaagcttcaagctgtgaagtttctttacagtgggtgtgtaagaaggtcagcccttgatggatgaccactctgtcctgaccctcagatctgtcatgtatccctaaaaggagggagctggcccactggctgttgggaaagccatgagtatgtagttagcaaatactgaacttgctcagatatggcattagatgcaagacaacctcctggggattgatgcctaactgatggattctctttgagactatttagattttatgtgcaccatttaagaccagatataag

SEQ ID NO: 39908 - DNA, 140 bp, Macaca Mulatta
tggacggtggggagctgtttgaccgcatcatcgatgagaacgacaatctgacggaacttgataccatcctgttcatgaagcagatatgtgagggcataaggcacatgcatcagatgtacattctccacttggacctgaag

SEQ ID NO: 39909 - DNA, 156 bp, Macaca Mulatta
atgtcttctcacaagactttcaggattaagcgattcctggccaagaaacaagagcaaaatcgtcccattccccagtggattcggatgaaaactggaaataaaataaggtacaactccaaaaggagacactggagaagaaccaagctgggtctataa

SEQ ID NO: 39910 - DNA, 345 bp, Macaca Mulatta
tggagaacagtgccttcttgactgcggcatctggcagcaggactagtaagaggccgggaatccaccgccctctggtgggacattggggtgggactggggtcactccactcccttctccctcccctgccaggctccagcacacagcatcctgggcacatggatccagtgaggggtacctggtgcaggctgcgtaccagatgcactcaggcttccaggccagggtcgacacctggcccaagctacgccagtcccagtcactcctggctggagagttcctctgtggttgtgggaatcgtgggataccaggcccagatctgtcaaaagccattgtccaccctgggggaa

SEQ ID NO: 39911 - DNA, 771 bp, Macaca Mulatta
  misc_feature (1)...(771): n = A,T,C or G
ggatagcttggattccccagaacagctgtctggaataaggatgattagacatcttactattactactgactatcacacactggttgccaattatatgtctgggtttctctccttattagctacaggcaataccaaaacaaggtttcatattttgaaaatgctactgaatttgtctgaaaatcttttaatgacaaaagaactactcagtgctgaagcagtgtcagaatttatgggtctttttaacagggaagagacaaatgacaatattcaaattgttcttgcaatatttgagaatattggtaacaatatcaaaaaagaaacagtgttcactgatgatgatttcaatcttgagccgcttatttctgcattccacaaagttgagaaatttgctaaggaactgcaaggcaaaacagacaatcaaaatgaccctgaaggggaccaagaaaattagtaatgtttaattactgacctcagattgtccttatgttcctgagttatgatctttgagtaatgctttggctttaacagttggttctgtgttgcaacatatatctttagtgctgacactaactttgtccaactctgtctgtaagctggagcatttttctgatgccaactgaatattagagctgaaaacacatttttgttgatatttgtcctgtccagattgtgatgttcggtattttgagcttatagttgacctgagcccatcataaattaagcaaccctttctgattgtccgttccaacgggnatggtgggtggggggggg

SEQ ID NO: 39912 - DNA, 662 bp, Macaca Mulatta
ctgtctgatacgtgcgcagtaagatgggtcttggaaaatgacagtggattattttagtcaggtgataattccatttttaactgttgtgttagataaatgctcatgattacagtccctggagtcatgcatctactggtttcactctctactctgaggaacagaaaccactggaagcattttgctattacctagaagggataagagttttcatttactgttctaactcaggcatacctctgttctccagctctgtaccagaaagaccttgattccccgaatatccctattctaagagacagcaaactaattttgctaaatcagttgactaaatcacattaacagggcctggagagcacaaagaagcagacacttcagctctgtaggtaagacacacgttttgcaaggtgggagataaatacagtgcatctcagtgaagtttcttagagtgtccagtaccctagacatatgtgtagtacttctgtcaccacaaaagaagtacaatgctatttggatatagttggttctactgctatcagatcctggcttgctactgggctttgatggtgaatgaaggcctaactataggacatcaggtaatcttatgacccaatgtgaccaactacgatcgatcatccatccagatagaaagtcaagcatgccta

SEQ ID NO: 39913 - DNA, 819 bp, Macaca Mulatta
  misc_feature (1)...(819): n = A,T,C or G
gggctttttgtccgacatcttagcaaggctgcggtgtctgctgctgctccccgagcttcgcaatgccgcccaaggacgacaagaagaagaaggacgccggaaagtcggccaagaaagacaaagacccagtgaacaaatctgggggcaaggccaaaaagaagaagtggtccaaaggcaaagttcgggacaagctcaataacttagtcttgtttgacaaagctacctacgacaaactctgtaaggaagttcccaactataaacttataaccccagctgtagtctctgagagactgaagattcgaggctccctggccagggcagcccttcaggagctccttagtaaaggacttatcaaactggtttcaaagcacagagctcaagtaatttacaccagaaataccaagggcggagatgctccagctgctggtgaagatgcatgaataggtccaaccaattgtannnnnnnnnnnnnnnnnnntttattaaatcnnnnnnnnnnnnnnnnnnncaaaaagtttattaatgtaaaaacacgccaacaataattnnnnnnnnnnnnnnnnnnnngggnnnnnnnnnnnnnnnnnnnnnnngaaggaacaaccccttgttgtgggcgcccccctcggtccctttgaaaaaannnnnnnnnnnnnnnnnntttttcttttgggcgccccccgcgcggcccccccatatggggataaaggggagaaacaatggggtaaaataaaacttgttttttctccaagagaagaataaaactcttggggcaacataaagaggaataaaggcgcctcttgaggagatatacttcca

SEQ ID NO: 39914 - DNA, 1008 bp, Macaca Mulatta
  misc_feature (1)...(1008): n = A,T,C or G
ggtgnnnnnnnnnnnnnnnnnnnnnntacccnnnnnnnnnnnnnntnnnnnnnnnnnnnnnnnnnnaagataccgtgcctgaccgatgcccnnnnnnnnnnnnnnnnnnnatgtctttataaaaaatacataaaattaggccaggcgcagtggctctttcttgtaattctaacacctggggaggcccacgcaggtggatcaccctgtcagaaaatcaagaccttcctggctaacactgttgaaccccctctctactcgtatactcgggaccttagcttggcgcattggccagctcccttgtggtccacttacccggggagtatgggggaggacaacttataggactcccttaccccgaataagcgcaccaatccgagctctggccgcttattttcagcgcaatcgtcagcaatacccttatgccaatggcccccggtcctctactccccttttcttgatcaacccagctgttgtgaatccctcgttttctgaattacgcggttccctattccgctgctctgcttgctatcctcccttgtttcccgtttcgggaatttttatttgtttccttttcttctctttgagcggcgcacgagttccgatttgatacaggccatgtccgcctctgacagcattgattggcgcctgtgctctattatgcgcagtgacccatcgcggagagtggcgggtacaaacgccctagccccagtttgtcgtgcttccaccctntatgctgggncgacagctgtttgtcccaaccacgttgatgttaccactcaatcacactgttgagcttccatattttgctacacccctgcgtgctgctgtggggcattcgtaatgccgtttggtcgcatgctccataatcgttaagtcaagaacctagttttgtgtgggccggtcactgtattcttcgtcaaatgctccagtttgatttgcagtgcagcaagaggtggctgccccactagtcaggatgacggtgaattaacccgccccatatgcgtgtgt

SEQ ID NO: 39915 - DNA, 268 bp, Macaca Mulatta
tgttggaggtctgattacaggtcagcataaaaagtgaacacttccctgtatcttatgctctcagattatttacaatagataattagtgagcaagacaattgctaaattcaaaaatgttctaatcttctggcagtaaagtaattatgccagctaaaggggatgattttataataggatattaactactatgcaaatagattttcctcttcagcatcacgacatgactcattttccctctaccatcacaggtttaattctaaagttgcct

SEQ ID NO: 39916 - DNA, 1804 bp, Macaca Mulatta
  misc_feature (1)...(1804): n = A,T,C or G
ggccctggccctgaccgagacccgggccggctcgcactccttgaggtatttcggcaccgccgtgtcccggcccggccacggggagccccgcttcatctacgtgggctacgtggacgacacgcagttcgcgcggttcgacagcgacgccgcgagtccgagggcggagccgcgggcgccgtgggtggagcaggaggggccggagtattgggaagagcagacagagctcgccaaggcccgcgcacagactgaccgagtggacctggggaccctgctccgctactacaaccagagcgagggggggtctcacacagtccagtggatgtatgggtgcgacctggggcccgacgggcgcctcctccgtgggtatcaccagtacgcctacgacggcaaggattacatcgccctgaacgaggacctgcgctcctggaccgccgcggacatggcggctcggttcacccagcgcaagtgggaggcggccggtgaggcagagcagatgagagcctacctggagggcgagtgcctggagtggctccgcagacacctggagaacgggaaggagacgctgcagcgcgcggatcccccaaagacacacgtgacccaccaccccgtctctgaccatgaggccaccctgaggtgctgggctctgggcttctaccctgcggagatcacgctgacctggcagcgggatggggaggatcaaactcaggacaccgaacttgtggagaccaggccaggaggagatggaaccttccaaaagtggggagctgtggtggtgccttctggagaagagcagagatacacatgccacgtacagcacgagggattgccggagcccctcaccctgagatgggttgtcaccggagctgtggtcgctgctatgatgtgcaggaggaagagctcaggtggaaaaggagggagctactttcaggctgcgtccaaggacagtccccagggctctgatgagtctctcatggcttgaaaagcctgagacaactgtcttgtgtggaactgagaggcaggatttgttcaggccttctctttgtgagttgaagaactctggcatttctttctgcaaaggcatctgaatgtgtctgtgttcctgttggcataatgtgaggaggtgcggagaacaccccatccccgtgtccaccatgaccctcttccccacgctgacctgtgttccctcctcatttatctttcctgttccagagaggtggggctgggatgtctctatctctgtctcaacttcatggtgcactgagctgtatcttcttccttccctattacaattagaatctgagtataaatttaaaacaaccgaaaccaaaaaaagccacggcacagacgaagcaccaccaacaccgcggccaacgtttcctaccaacgcgtccggaaaggaagaaaaaatttggtgggccgccttgggcccttgnnnnnnnnnnnnnnnnnnnttcttttgggccccggggcccctgtagggaaagggaaactggggccaacgcgtgtttcccgaggaaaatcctggggcccgcaactaggggtttggaatttcnnnnnnnnnnnnnnnnnnnncgggggggccacccaaagcctttttttaaaccaaacccccaagtgggagttttgcgggggccctttccctgggattcttttccaagcgggcggtttccaacgctagtcctcataatcaaatttatgccccccccgccctgtgcacttcgttttggagaacaacggggatgggccgttctctttataaccttttttgcgccgatcttttgaagaaaccccctctctcaacang

SEQ ID NO: 39917 - DNA, 596 bp, Macaca Mulatta
catgctatgtactccccgagtaatccctccagctgaagtggacaaatggacaaatcatcatcatctgcatttcttgaagaaaaaatacacttaaaagaactgtatgaggtgattggttgtgtacctgtagatgatcttgaggtatatttaaaacacctcttaccaaaaattgaaaatctctcttatgatgcaaaattagagcacttaatttaccttaagaatagattatcaagtgctgaggaattatcagagattaaggaacaactttttgaaacactggaaagtttattgataatccatgatgctaacagtagactaaagcaagcaaagcatttctatgatagaactgtgagagtctttgaagttatgcttcctgaaaaatagtttatacctaatgatttctttaagaaattggaacaacttataaaacccaaaaatcatgttacatttatgacatcctgggtggaattcttaagaaatattgggctaaaatacatactttctcagcagcagttgtcacaattagctaaggaaatcagtgtgagggctaatacagaaaactggtccaaagaaacatagccagatacagttgatat

SEQ ID NO: 39918 - DNA, 609 bp, Macaca Mulatta
gttgtcatatttctatagttataaagcaagcccataatggtgctgagattgaacctattacttcaggtcccctagcttttcttgtgtctttaatgagcagcagtgaatgtctgttatccaagtgttaataaggaacatgtatgtgtgttctgtaaaatgagagatgaccactctgaagagaggcttgatcctgaagagcttcattctgaattgacctgagattgagatggtgggaagagcagggccaagagctgctgactctgggtaaccttggatgaatcctctcctgcttgaggtttgggcatcctgtgagcctgtgaggagtacctgttagtcaggaaagggcaactcctaaccatctactgggaacagtaggtggcagcagggaggcacctctggctctgcacgagtgaggttctcttccttgaagaagccattgagctggagtctgcaagaggtagtggtcagggaccttggactgtggccctgacttaacccactaacagtaagacttgggcaactcatggcagtttactaacctcccctgccttcctcctagatttttgaagtgttagagctaaatctagaagatcatagaattattgtatt

SEQ ID NO: 39919 - DNA, 935 bp, Macaca Mulatta
aaaatgttgtaggagcccgtaggtcatcttggagggtcgtctcaagtattgaaccaaaaagacggaaggggctgagaaaaagcagcagatggctcgtgaatacagacagaaaattgagatgtagctaagagatatctgcaatgatgtactgtctcttttggaaaagttcttgatccccaatgcttcacaagcagaacaaagtcttctatttgaaaatgaaaggagattactaccgttacttggctgaggttgccgctggtgatgacaagaaagggactgtggatcagtcacaagaagcataccaaaaagcttttgaaatcagcaaaaaggaaatgcaaccaacacatcctatcagactgggtctggctcttaacttctctgtgttctattatgagattctgaactctacagagaaagcctgctctcttgcaaagacagcttttgatgaagccattgctgaacttgatacattaagtgaagagtcatacaaagacagcacactaatgcaattactgagagacaacttgacactgtggacatcagatacccaggagacgaagctgaagcagaaaaaggcagggaagattaactggccttccaacttttgtctgccttattctaaaatttacacagtagaccattcccgttgtcatccatgtggtcccacaaatagttttttgtttacaacttatgacaggtttatgttacttctatttgaatttctatatttcccatatggtctctatgtttaatattaggggagtggagccacttaacattcagggagttatctgttttcatcttgaggtggccaatatggggatgtagaatttttatacaagttataaatatttggtatagtacttttggtacattgtggcttcacaagggccggtgttaaaactgtttccatgtctaagcaaagaaaactgcct

SEQ ID NO: 39920 - DNA, 129 bp, Macaca Mulatta
ctcatgctccctgccctcccccagaagcttggcgagaagcagctgcctatcttaagcgttccctggaagaatggggcatacacactccccaagagcatccagcccacgataaagaggatggccattgag

SEQ ID NO: 39921 - DNA, 3883 bp, Macaca Mulatta
  misc_feature (1)...(3883): n = A,T,C or G
gaaacaaagtaagagtcagacactggagaaannnnnnnnnnnnnnnnnnnnnnnnnnnnnnnnnnnnnnnnnnnnnnnnnnnnnnnnnnnnnnnnnnnnnnnnnnnnnnnnnnnnnnnnnnnnnnnnnnnnnnnnnnnnnnnnnnnnnnnnnnnnnnnnnnnnnnnnnnnnnnnnnnnnnnnnnnnnnnnnnnnnnnnnnnnnnnnnnnnnnnnnnnnnnnnnnnnnnnnnnnnnnnnnnnnnnnnnnnnnnnnnnnnnnnnnnnnnnnnnnnnnnnnnnnnnnnnnnnnnnnnnnnnnnnnnnnnnnnnnnnnnnnnnnnnnnnnnnnnnnnnnnnnnnnnnnnnnnnnnnnnnnnnnnnnnnnnnnnnnnnnnnnnnnnnnnnnnnnnnnnnnnnnnnnnnnnnnnnnnnnnnnnnnnnnnnnnnnnnnnnnnnnnnnnnnnnnnnnnnnnnnnnnnnnnnnnnnnnnnnnnnnnnnnnnnnnnnnnnnnnnnnnnnnnnnnnnnnnnnnnnnnnnnnnnnnnnnnnnnnnnnnnnnnnnnnnnnnnnnnnnnnnnnnnnnnnnnnnnnnnnnnnnnnnnnnnnnnnnnnnnnnnnnnnnnnnnnnnnnnnnnnnnnnnnnnnnnnnnnnnnnnnnnnnnnnnnnnnnnnnnnnnnnnnnnnnnnnnnnnnnnnnnnnnnnnnnnnnnnnnnnnnnnnnnnnnnnnnnnnnnnnnnnnnnnnnnnnnnnnnnnnnnnnnnnnnnnnnnnnnnnnnnnnnnnnnnnnnnnnnnnnnnnnnnnnnnnnnnnnnnnnnnnnnnnnnnnnnnnnnnnnnnnnnnnnnnnnnnnnnnnnnnnnnnnnnnnnnnnnnnnnnnnnnnnnnnnnnnnnnnnnnnnnnnnnnnnnnnnnnnnnnnnnnnnnnnnnnnnnnnnnnnnnnnnnnnnnnnnnnnnnnnnnnnnnnnnnnnnnnnnnnnnnnnnnnnnnnnnnnnnnnnnnnnnnnnnnnnnnnnnnnnnnnnnnnnnnnnnnnnnnnnnnnnnnnnnnnnnnnnnnnnnnnnnnnnnnnnnnnnnnnnnnnnnnnnnnnnnnnnnnnnnnnnnnnnnnnnnnnnnnnnnnnnnnnnnnnnnnnnnnnnnnnnnnnnnnnnnnnnnnnnnnnnnnnnnnnnnnnnnnnnnnnnnnnnnnnnnnnnnnnnnnnnnnnnnnnnnnnnnnnnnnnnnnnnnnnnnnnnnnnnnnnnnnnnnnnnnnnnnnnnnnnnnnnnnnnnnnnnnnnnnnnnnnnnnnnnnnnnnnnnnnnnnnnnnnnnnnnnnnnnnnnnnnnnnnnnnnnnnnnnnnnnnnnnnnnnnnnnnnnnnnnnnnnnnnnnnnnnnnnnnnnnnnnnnnnnnnnnnnnnnnnnnnnnnnnnnnnnnnnnnnnnnnnnnnnnnnnnnnnnnnnnnnnnnnnnnnnnnnnnnnnnnnnnnnnnnnnnnnnnnnnnnnnnnnnnnnnnnnnnnnnnnnnnnnnnnnnnnnnnnnnnnnnnnnnnnnnnnnnnnnnnnnnnnnnnnnnnnnnnnnnnnnnnnnnnnnnnnnnnnnnnnnnnnnnnnnnnnnnnnnnnnnnnnnnnnnnnnnnnnnnnnnnnnnnnnnnnnnnnnnnnnnnnnnnnnnnnnnnnnnnnnnnnnnnnnnnnnnnnnnnnnnnnnnnnnnnnnnnnnnnnnnnnnnnnnnnnnnnnnnnnnnnnnnnnnnnnnnnnnnnnnnnnnnnnnnnnnnnnnnnnnnnnnnnnnnnnnnnnnnnnnnnnnnnnnnnnnnnnnnnnnnnnnnnnnnnnnnnnnnnnnnnnnnnnnnnnnnnnnnnnnnnnnnnnnnnnnnnnnnnnnnnnnnnnnnnnnnnnnnnnnnnnnnnnnnnnnnnnnnnnnnnnnnnnnnnnnnnnnnnnnnnnnnnnnnnnnnnnnnnnnnnnnnnnnnnnnnnnnnnnnnnnnnnnnnnnnnnnnnnnnnnnnnnnnnnnnnnnnnnnnnnnnnnnnnnnnnnnnnnnnnnnnnnnnnnnnnnnnnnnnnnnnnnnnnnnnnnnnnnnnnnnnnnnnnnnnnnnnnnnnnnnnnnnnnnnnnnnnnnnnnnnnnnnnnnnnnnnnnnnnnnnnnnnnnnnnnnnnnnnnnnnnnnnnnnnnnnnnnnnnnnnnnnnnnnnnnnnnnnnnnnnnnnnnnnnnnnnnnnnnnnnnnnnnnnnnnnnnnnnnnnnnnnnnnnnnnnnnnnnnnnnnnnnnnnnnnnnnnnnnnnnnnnnnnnnnnnnnnnnnnnnnnnnnnnnnnnnnnnnnnnnnnnnnnnnnnnnnnnnnnnnnnnnnnnnnnnnnnnnnnnnnnnnnnnnnnnnnnnnnnnnnnnnnnnnnnnnnnnnnnnnnnnnnnnnnnnnnnnnnnnnnnnnnnnnnnnnnnnnnnnnnnnnnnnnnnnnnnnnnnnnnnnnnnnnnnnnnnnnnnnnnnnnnnnnnnnnnnnnnnnnnnnnnnnnnnnnnnnnnnnnnnnnnnnnnnnnnnnnnnnnnnnnnnnnnnnnnnnnnnnnnnnnnnnnnnnnnnnnnnnnnnnnnnnnnnnnnnnnnnnnnnnnnnnnnnnnnnnnnnnnnnnnnnnnnnnnnnnnnnnnnnnnnnnnnnnnnnnnnnnnnnnnnnnnnnnnnnnnnnnnnnnnnnnnnnnnnnnnnnnnnnnnnnnnnnnnnnnnnnnnnnnnnnnnnnnnnnnnnnnnnnnnnnnnnnnnnnnnnnnnnnnnnnnnnnnnnnnnnnnnnnnnnnnnnnnnnnnnnnnnnnnnnnnnnnnnnnnnnnnnnnnnnnnnnnnnnnnnnnnnnnnnnnnnnnnnnnnnnnnnnnnnnnnnnnnnnnnnnnnnnnnnnnnnnnnnnnnnnnnnnnnnnnnnnnnnnnnnnnnnnnnnnnnnnnnnnnnnnnnnnnnnnnnnnnnnnnnnnnnnnnnnnnnnnnnnnnnnnnnnnnnnnnnnnnnnnnnnnnnnnnnnnnnnnnnnnnnnnnnnnnnnnnnnnnnnnnnnnnnnnnnnnnnnnnnnnnnnnnnnnnnnnnnnnnnnnnnnnnnnnnnnnnnnnnnnnnnnnnnnnnnnnnnnnnnnnnnnnnnnnnnnnnnnnnnnnnnnnnnnnnnnnnnnnnnnnnnnnnnnnnnnnnnnnnnnnnnnnnnnnnnnnnnnnnnnnnnnnnnnnnnatctaccagatcctagaatctagtcgatcctagaatgctaccaaggagacttgaattttggtcctatcatcaaaaatgctctctgcatcaatcctatgccagtttcccctaaggaggggctaactggaatgttctaggatgtaccaatcctccaggaccctcttagagctcatggcatcagagacaggcctctacctcagggatcatccctggcttacatcanattcctcttctctgttcccaacacttcaaactgttctttggactcactgagttccctaaggtgacacnnnnnnnnnnnnnnnnnnnnnnnnnnnnnnnnnnnnnnnnnnnnnnnnnnnnnnnnnnnnnnnnnnnnnnnnnnnnnnnnnnnnnnnnnnnnnnnnnnnnnnnnnnnnnnnnnnnnnnnnnnnnnnnnnnnnnnnnnnnnnnnnnnnnnnnnnnnnnnnnnnnnnnnnnnnnnnnnnnnnnnnnnnnnnnnnnnnnnnnnnnnnnacagtctacagggccggagacaccaggcctggaagtgaccactggccaagagctgacataaaagccaacctccccaaacaggaagggcctgttcttcacaaagataaagaaaactgccacaatgttctgctggccttaggaagcctgcaaaattaaccaatacatcacgaatcaacttccttttattctgctgtacactgaatgccatcacgaagcaat

SEQ ID NO: 39922 - DNA, 419 bp, Macaca Mulatta
ccgggacccaacaagatctgctgaccctctgtccctactgattcctccttgggtgcagcctcagagtggcctgaggcccagagggtctggtctggtgagctcctgaggccacacagcaccataaagtctcgtgtctgcaagcttttgattacctcctgggatggggtgctcactatctaccccagaccaatgccacctgcagcctgtggagtcaactgcagaataaatcacaccctagccctggcttggaggatccccactttcacagatgctggacactgagagccaaatgtctttactccacaggcgccccagacgctccgctccctgcatgtgtaacaccccttcttgctgtctcctagtaaataaacgacctaaagcaccgggtaaaataaaaaataaagtaattaaaacttgtc

SEQ ID NO: 39923 - DNA, 633 bp, Macaca Mulatta
  misc_feature (1)...(633): n = A,T,C or G
agagtatgtatagaacgcatacactgggaagatgtgtgaccaggncattacagcagtagcccttgccccttgcctgtattttgtggtcagaatcaaataaattacttttaaagaaaaaagtctggtaaataaaggaaaagaatcagatatttatcttgcctctcctgtatgaactatatcaccggtaactaaatagtagataagcaaagtttctcttaaaattatacctgcttacaaatgaaagtgaaattataaaactagaaaatcacccatttttacaacccctgatgaattaatggatctgggccgtggtcaccaacagctgctcacttctcaaaaggagagcaaaccacatacatgcctcctgataacatatcacctacagtcttgccaaaggcttcaagtctccacatccagcttccaatttgtcataaatacagaaaaaagaacgtgccaaactccaccacacgtatgcagtcaggaacccatagaataagtctccaacagttcaaataacccaaatttgtccacataaattatnnnnnnnnnnnnnnnnnnnntgagacacctatgatttaaaataagaggcttcaaagtcatccttttttaacataatgatggctgtctgtagtg

SEQ ID NO: 39924 - DNA, 806 bp, Macaca Mulatta
  misc_feature (1)...(806): n = A,T,C or G
ggnnnnnnnnnnnnnnnnnnnnnnnnnnnnnnnnnnnnnnnnnnnnnnnnnnnnnnnnnnnnnnnnnnnnnnnnnnnnnnnnnnnnnnnnnnnnnnnnnnnnnnnnnnnnnnnnnnnnnnnnnnnnnnnnnnnnnnnnnnnnnnnnnnnnnnnnnnnnnnnnnnnnnnnnnnnnnnnnnnnnnnnnnnnnnnnnnnnnnnnnnnnnnnnnnnnnnnnnnnnnnnnnnnnnnnnnnnnnnnnnnnnnnnnnnnnnnnnnnnnnnnnnnnnnnnnnnnnnnnnnnnnnnnnnnnnnnnnnnnnnnnnnnnnnnnnnnnnnnnnnnnnnnnnnnnnnnnnnnnnnnnnnnnnnnnnnnnnnnnnnnnnnnnnnnnnnnnnnnnnnnnnnnnnnnnnnnnnnnnnnnnnnnnnnnnnnnnnnnnnnnnnnnnnnnnnnnnnnnnnnnnnnnnnnnnnnnnnnnnnnnnnnnnnnnnnnnnnnnnnnnnnnnnnnnnnnnnnnnnnnnnnnnnnnnnnnnnnnnnnnnnnnnnnnnnnnnnnnnnnnnnnnnnnnnnnaccgcctcggcccctcgaagaagctttcctagaccatttcgttttgggcgcgccggggccccagtaagggtaaagtggaaacatgggtccattagccttgtttttccctaaagggaaaattccttggggtccaatggacactaagttgcgctttggggaattctccccccaccccnnnnnnnnnnnnnnnnnnnnngccccccggggggccgtgggccaaaaaccccggaaagaccgggtttttctctttgaa

SEQ ID NO: 39925 - DNA, 299 bp, Macaca Mulatta
tggctcaggcacactctgaagttggtcccagcacatctgcacggagcatcaggagaaaggcggacgaatacttgagacccagcctggcctctaaatctgtgctgagcgttttactcagtagacagcttgggaatcatagaaacgatgtggatctgacagagtggctgtggacactgacacaaaccacaccagggtggacctggcctttgccaacacgccatacaatcaacccacctttgcaccctggggaggatagaaaatccaagaaaatggtgtggatcaataaatccttcccctga

SEQ ID NO: 39926 - DNA, 128 bp, Macaca Mulatta
tcagcattatccttcagttcacataacggcatatgaaaacgatgaacgtgtacctctgaaaggaattgtaagctatactgagaaactcaaggaagccatctcggagcatgctaaggacacaggtgaag

SEQ ID NO: 39927 - DNA, 397 bp, Macaca Mulatta
  misc_feature (1)...(397): n = A,T,C or G
gaaatttattgtccagcaccaccacaaattgacaatggaataattcaaggggaacgtgaacattatggatatagacagtctataacgtatttatgtaatagaggattcaccatgattggagagcactctatttattgtactgtgaatgacgatgaaggagagtggagtggcccaccacctgcatgtagaggnnnnnnnnnnnnnnnnnnnnnnnnnnnnnnnnnnnnnnnnnnnnnnnnnnnnnnnnnnnnnnnnnnnnnnnnnnnnnnnnnnnnnnnnnnnnnnnnnnnnnnnnnnnnnnnnnnnnnnnnnnnagcaacacggagtacacctgcttccaggacaaccaagcattttcataaaacaaccccagataaaggaagtggaaccagttcag

SEQ ID NO: 39928 - DNA, 438 bp, Macaca Mulatta
attataataccatgaacctaatctaacactagataggtccatttttaattctatccttagggatttgctaatagaagtaccagaaagaccattgtagaatgcttttctccatattatgattcagtgacatgaccttaagtgcaattatcatatctagacccaaattgagtaaattaggtgtttatttcctaggatatactgaagagatgactccacatttccaaaatctgttgaaccagattctcacttacaccactggaaattattccagaggaaataagggctttggagtctgcgttaactctttcaggacagataattatttaatattcaaaatcaggaatttagaaaattgaacttttgttaatcttaaagacttcacagaagcagtctgatttattttggtgaaatctaagtcctgaagtaagaagtagtgtt

SEQ ID NO: 39929 - DNA, 576 bp, Macaca Mulatta
  misc_feature (1)...(576): n = A,T,C or G
ggactgaggatcctggggtgtcccccaccactttcccctgccctgttccagggcaagtgaggaggggaaatccagaattgaggcctagcaggcctataggaaccctcagagatgtgtgagatttaagagatctnnnnnnnnnnnnnnnnnnnaaaaacgagnnnnnnnnnnnnnnnnnnnnccgaggggtttaaaagaaaagaatactacaaaataataattattaataataataattcaaatttatttcatataatcctagagagagaaagaaacaattactagttacttagtagacaatattcagatagcttaaagtttagtagcattgagggcccctgggtccagtagaatgtatacaagtcgtaaggaaaagataaatagaggagggaagtggctgagtccaccctgagttaccccatcttcagatatcagggttggagcaggttactagctgaagattgggagcttccagtctgctggggttgattctgagaatccttggatttttaaattgtaggacaaagaaatgaggggttcgtttcccagggtcttggaaaggatgcacactgatca

SEQ ID NO: 39930 - DNA, 622 bp, Macaca Mulatta
  misc_feature (1)...(622): n = A,T,C or G
gggcgttcatctgaggactttttccaccaactcgttaatgatggtggaagcaagtgtattatttgtttcctggagaatttggtgaagagcagtcttctgctgctgctctttactaagcaaaacctggagcagtttaaataggctaaatgggtttgattaaatcttgagctccgagttggaaggagaaaatgagaagttaaccccttgagccatgtggtctctttacaatcaagagactgtacatatgtgaaaaaatacaaattaaggaactgtgttcatagacaatctaaattgtgtttctgaagtttgtgcacatttttcttcactgtaatgttattttacagctgtttgttaaaatagtgaataatgatcctaaaagtaacaggttttgtgtgagtgtgcttgtatatgtgagaattgccttattttcaggttgttttaattaatgatggttccctggacagcattctggtggtcagcaaccaaatgggatattgtcattaatccctatcannnnnnnnnnnnnnnnnnnnnnnnnnncggccccctcgccctcaaaaatttttaaaccttcttttgcgcccggccccaaggtaatgaaaagggcatacttttcccagaa

SEQ ID NO: 39931 - DNA, 3925 bp, Macaca Mulatta
  misc_feature (1)...(3925): n = A,T,C or G
gcgctgtcatggagctagcgcgggaagcgcgggaactgagttgctgggcggccgaagagatgggggtgcccgtggcagcccgagcccgggaatcgacgctgcgcaggnnnnnnnnnnnnnnnnnnnnnnnnnnnnnnnnnnnnnnnnnnnnnnnnnnnnnnnnnnnnnnnnnnnnnnnnnnnnnnnnnnnnnnnnnnnnnnnnnnnnnnnnnnnnnnnnnnnnnnnnnnnnnnnnnnnnnnnnnnnnnnnnnnnnnnnnnnnnnnnnnnnnnnnnnnnnnnnnnnnnnnnnnnnnnnnnnnnnnnnnnnnnnnnnnnnnnnnnnnnnnnnnnnnnnnnnnnnnnnnnnnnnnnnnnnnnnnnnnnnnnnnnnnnnnnnnnnnnnnnnnnnnnnnnnnnnnnnnnnnnnnnnnnnnnnnnnnnnnnnnnnnnnnnnnnnnnnnnnnnnnnnnnnnnnnnnnnnnnnnnnnnnnnnnnnnnnnnnnnnnnnnnnggaaagccaatgtagatgtgacctttggatccctcacatcagcagctctgggcctggagcctgtggtcctgngcgtgatgttcgaacagcctgcaccctccgggcccagttcctgcagaacctcctgcttccccaggccaagagaggcagcctccnaacccctcatgaagaccactttggcacttcctaccagcagtggctgagctnnnnnnnnngctgctgacaaaccaccccccgggccacatcctggctgccttggagcacctggctgcagagcgggaggcagagattcggtccctgtgcagtggggatgggcttggcgatacagagatatccannnnnnnnnnnnnnnnnnnnnnnnnnnnnnnnnnnnnnnnnnnnnnnnnnnnnnnnnnnnnnnnnnnnnnnnnnnnnnnnnnnnnnnnnnnnnnnnnnnnnnnnnnnnnnnnnnnnnnnnnnnnnnnnnnnnnnnnnnnnnnnnnnnnnnnnnnnnnnnnnnnnnnnnnnnnnnnnnnnnnnnnnnnnnnnnnnnnnnnnnnnnnnnnnnnnnnnnnnnnnnnnnnnnnnnnnnnnnnnnnnnnnnnnnnnnnnnnnnnnnnnnnnnnnnnnnnnnnnnnnnnnnnnnnnnnnnnnnnnnnnnnnnnnnnnnnnnnnnnnnnnnnnnnnnnnnnnnnnnnnnnnnnnnnnnnnnnnnnnnnnnnnnnnnnnnnnnnnnnnnnnnnnnnnnnnnnnnnnnnnnnnnnnnnnnnnnnnnnnnnnnnnnnnnnnnnnnnnnnnnnnnnnnnnnnnnnnnnnnnnnnnnnnnnnnnnnnnnnnnnnnnnnnnnnnnnnnnnnnnnnnnnnnnnnnnnnnnnnnnnnnnnnnnnnnnnnnnnnnnnnnnnnnnnnnnnnnnnnnnnnnnnnnnnnnnnnnnnnnnnnnnnnnnnnnnnnnnnnnnnnnnnnnnnnnnnnnnnnnnnnnnnnnnnnnnnnnnnnnnnnnnnnnnnnnnnnnnnnnnnnnnnnnnnnnnnnnnnnnnnnnnnnnnnnnnnnnnnnnnnnnnnnnnnnnnnnnnnnnnnnnnnnnnnnnnnnnnnnnnnnnnnnnnnnnnnnnnnnnnnnnnnnnnnnnnnnnnnnnnnnnnnnnnnnnnnnnnnnnnnnnnnnnnnnnnnnnnnnnnnnnnnnnnnnnnnnnnnnnnnnnnnnnnnnnnnnnnnnnnnnnnnnnnnnnnnnnnnnnnnnnnnnnnnnnnnnnnnnnnnnnnnnnnnnnnnnnnnnnnnnnnnnnnnnnnnnnnnnnnnnnnnnnnnnnnnnnnnnnnnnnnnnnnnnnnnnnnnnnnnnnnnnnnnnnnnnnnnnnnnnnnnnnnnnnnnnnnnnnnnnnnnnnnnnnnnnnnnnnnnnnnnnnnnnnnnnnnnnnnnnnnnnnnnnnnnnnnnnnnnnnnnnnnnnnnnnnnnnnnnnnnnnnnnnnnnnnnnnnnnnnnnnnnnnnnnnnnnnnnnnnnnnnnnnnnnnnnnnnnnnnnnnnnnnnnnnnnnnnnnnnnnnnnnnnnnnnnnnnnnnnnnnnnnnnnnnnnnnnnnnnnnnnnnnnnnnnnnnnnnnnnnnnnnnnnnnnnnnnnnnnnnnnnnnnnnnnnnnnnnnnnnnnnnnnnnnnnnnnnnnnnnnnnnnnnnnnnnnnnnnnnnnnnnnnnnnnnnnnnnnnnnnnnnnnnnnnnnnnnnnnnnnnnnnnnnnnnnnnnnnnnnnnnnnnnnnnnnnnnnnnnnnnnnnnnnnnnnnnnnnnnnnnnnnnnnnnnnnnnnnnnnnnnnnnnnnnnnnnnnnnnnnnnnnnnnnnnnnnnnnnnnnnnnnnnnnnnnnnnnnnnnnnnnnnnnnnnnnnnnnnnnnnnnnnnnnnnnnnnnnnnnnnnnnnnnnnnnnnnnnnnnnnnnnnnnnnnnnnnnnnnnnnnnnnnnnnnnnnnnnnnnnnnnnnnnnnnnnnnnnnnnnnnnnnnnnnnnnnnnnnnnnnnnnnnnnnnnnnnnnnnnnnnnnnnnnnnnnnnnnnnnnnnnnnnnnnnnnnnnnnnnnnnnnnnnnnnnnnnnnnnnnnnnnnnnnnnnnnnnnnnnnnnnnnnnnnnnnnnnnnnnnnnnnnnnnnnnnnnnnnnnnnnnnnnnnnnnnnnnnnnnnnnnnnnnnnnnnnnnnnnnnnnnnnnnnnnnnnnnnnnnnnnnnnnnnnnnnnnnnnnnnnnnnnnnnnnnnnnnnnnnnnnnnnnnnnnnnnnnnnnnnnnnnnnnnnnnnnnnnnnnnnnnnnnnnnnnnnnnnnnnnnnnnnnnnnnnnnnnnnnnnnnnnnnnnnnnnnnnnnnnnnnnnnnnnnnnnnnnnnnnnnnnnnnnnnnnnnnnnnnnnnnnnnnnnnnnnnnnnnnnnnnnnnnnnnnnnnnnnnnnnnnnnnnnnnnnnnnnnnnnnnnnnnnnnnnnnnnnnnnnnnnnnnnnnnnnnnnnnnnnnnnnnnnnnnnnnnnnnnnnnnnnnnnnnnnnnnnnnnnnnnnnnnnnnnnnnnnnnnnnnnnnnnnnnnnnnnnnnnnnnnnnnnnnnnnnnnnnnnnnnnnnnnnnnnnnnnnnnnnnnnnnnnnnnnnnnnnnnnnnnnnncaacctccgcctccccatttaaagccattctcatgcctcggcctccccagtagctacttttacaggcgcgcaccaccatgcccagctcacttttgtacttttagtacggacagggtttcatcatgttggccagactggtcttgaactcctgacctctagtgatccgccagcctcagcctcccaaagtgctaggattacaggcgtgagtcaccacacccaaccacatggtcatatctgaaacggctggatgctcttaggtgctnnnnnnnnnnnnnnnnnnnnnnnnnnnnnagacagaatctggctctgttgcccaggctgaagtgcagtggcacgaactcagctcactgcaccctctgcctcctggattcaagcaattctcatgtctcagcctcctgaatagctggaattacaggcacctgccaccatgtctggctaatatttgtattttttgtagagtcggaactttaccatgttggccaggctgctctccaactcctggcctcaagtgattctgccgcctctgcctcccaaatcttcgcctactgggattacggtttcccctatctcggtaatttttttccccaaattaagtgaacattagatttaatttgcctgaccccagaagaaaaacaggcacagatggtagttttactggtgttgcagtaagttttcaaatttggaagtttggcagctttatgatcttaaaccttgctgtccatctctcacacaactcctctgttggcctccagagccccttcactctcccagctttcctcctgcccctggttgctatttcccagccttttcatgttggctttcccatg

SEQ ID NO: 39932 - DNA, 814 bp, Macaca Mulatta
  misc_feature (1)...(814): n = A,T,C or G
ggacaatatgctggctacaaaatgatcttactcttgaattttgcttttggttcatattttggttcttcatattctagtatgttttgttcctgctgaattttacagcctcagctaaacaataagttatcagtagtcactttttacttttcattatcaaaattaaatttccaagaacagcttgatatcattcaactgtccacaaaataataaaaaggacattcattaaatactgattttcttaatcttaaatgttatatttcatatttatttatataatgcaagtggaaatcaaaactgaaatagcctccctttagaatgtcacatttttcttcaaaaacatgttggaattggttagccttattgggaatggataatttagaaacnnnnnnnnnnnnnnnnnnnnnnngatatttgaagtgtttttataggagatgtatttttatcatcgtaaatgatcacaattttaaataattcatcttacaagtgaggtaaagcaaatacaatctaagattcccagattccatacattaggagtgcaaagacaggatcgtacacatgacttatacctctcatttaaatattttgtagtataaagtattttatggggaagtgtttgagaatagatggttttttggaaaagggcaaaatctgtcaagatgccatagttaatcatgtaatttaaattctagttatttgtgagtggttagcaaatccatttttgaaatttataaatttttgctattttaaaaagaaaatgtaattcttgttanaagaaaataatttaaaaaattgttaaaaggaaaatttttgggtt

SEQ ID NO: 39933 - DNA, 653 bp, Macaca Mulatta
  misc_feature (1)...(653): n = A,T,C or G
gtagcattgctttantttaatatctttgtagagaaggaaagttctaggggcttatacttggtgttttctgtattactggtccacagagaagagcagagagctgatttggggattgttttcagttgcctgttttatgcattcagggactggggaagtaactattatacaataatgatttacagtcccatagaactctctaagacagctttgggccaaaactttattaatcgcttgaccatcctacgtgccctctttcgtggaccacagtgatgttttaggtcagttcagtgctacttttttgtaatgcctgaaagatcttttcccccatgcacagtcactgtagtgaatgcccataggtctttttgagggaaggtttggagtatgatttacagtactgtatatagttggggtatcgtaggatcctttctcaaggggtgtcatcctccctttcaataaaaagctgtgatctgtgaacagattaattaggtctagaagttttcannnnnnnnnnnnnnnnnnnnnnnnnnnnnnnnnnnnnnngcaattcaagtcatgtttttggccacaagtttttccagtattgtatagatcagtaataatatactagtctgccttgagtgtactaaacaagagtagcaatcattcatgggtga

SEQ ID NO: 39934 - DNA, 795 bp, Macaca Mulatta
  misc_feature (1)...(795): n = A,T,C or G
ggnnnnnnnnnnnnnnnnnnnnnnnnnnnnnnnnnnnnnnnnnnnnnnnnnnnnnnnnnnnnnnnnnnnnnnnnnnnnnnnnnnnnnnnnnnnnnnnnnnnnnnnnnnnnnnnnnnnnnnnnnnnnnnnnnnnnnnnnnnnnnnnnnnnnnnnnnnnnnnnnnnnnnnnnnnnnnnnnnnnnnnnnnnnnnnnnnnnnnnnnnnnnnnnnnnnnnnnnnnnnnnnnnnnnnnnnnnnnnnnnnnnnnnnnnnnnnnnnnnnnnnnnnnnnnnnnnnnnnnnnnnnnnnnnnnnnnnnnnnnnnnnnnnnnnnnnnnnnnnnnnnnnnnnnnnnnnnnnnnnnnnnnnnnnnnnnnnnnnnnnnnnnnnnnnnnnnnnnnnnnnnnnnnnnnnnnnnnnnnnnnnnnnnnnnnnnnnnnnnnnnnnnnnnnnnnnnnnnnnnnnnnnnnnnnnnnnnnnnnnnnnnnnnnnnnnnnnnnnnnnnnnnnnnnnnnnnnnnnnnnnnnnnnnnnnnnnnnnnnnnnnnnnnnnnnnnnnnnnnnnnnnnnnnnnnnnnnnnnnnnnnnnnnnnnnnnnnnnnnnnnnnnnnnnnnnnnnnnnnnnnnnnnnnnnnnnnnnnnnnnnctgggactccatgtttatattcggaatcacattcctcctttatcggccttcttccgcccacttactacacccattttcaatcgaaaacattacctttcggctttcaaaggctgctgccttgaaattggaaactctcctaaaaagtttgtcctgaactactccccccataatt

SEQ ID NO: 39935 - DNA, 211 bp, Macaca Mulatta
  misc_feature (1)...(211): n = A,T,C or G
ccatgggacgcccccgacctcgtgcagccaagacgtggatgttcctgctcttgctgggggaagcctgggcagncagagaattttcctgacactctcaactgtgcagaagtaaaaatctttccccagaagaagtgtgaggatgcctacccagggcagattacagatggcatggtctgtgcaggcagcagcaaaggggctgacacgtgccagg

SEQ ID NO: 39936 - DNA, 742 bp, Macaca Mulatta
  misc_feature (1)...(742): n = A,T,C or G
gggtgacttcaggctcaagaataaaatgggggaagaaagaaatgtatttataacagtgaacaattggaagcttggaaacagaatccacttgaagagtatgagaatggttatattcatttcatactctgaaacctgattggagctccattgaagcagttctttgtttgctaaggtggcatagcaacagcagacacgtctgttttctcattgcaccatcacggacatggtccagcctgtgtgtgaccatcggagactagcgatcatcattcctgtcagtcgtcaccatgtctttcacgttcatcttcagtggctctttatcttcatgtctacatctccatgtagacatgctgcgtctagagatattggctaccaaggggtttaaggcatctctgtttctattttctgcatacccacagataaacaacaaagccaacgtggtaaccagccccaaagaaaatattcctaccccggcgctggtatacctggactcttttgtaacccttcttaagttctttacnnnnnnnnnnnnnnnnnnnnnnnnnnnnnnnatttctctcatttgctttncctatatagataccatatatataaatattttatttcgttgggagttggggnnnnnnnnnnnnnnnnnnnnnnnnnnnnnnnnnnnnnnttgctttccaccatatgaacaagnnnnnnnnnnnnnnnnnnnnnnnnnnnnnnnnnnnntaaaattaaattggtccaagcccagtga

SEQ ID NO: 39937 - DNA, 749 bp, Macaca Mulatta
  misc_feature (1)...(749): n = A,T,C or G
gnnnnnnnnnnnnnnnnnnnnnnnnnnnnnnnnnnaaataaaatacttgcacagagatgttattctcttagatgctcagcctttccttatgggtccaacatttgagctgtttccaatatttgttaatacaaaaagcatccaagcatttctgaccaggtcccttttttctttttggattatttcttagaagtggaagttttgagtcaaaagatggaaattgtttttaatctttgttactattgccagattgtttttcagaaacagtcaaactaatttaaaacactcattcccagccaggcannnnnnnnnnnnnnnnnnnnnnnnnagtgcccagccgagaactgcatactttcttttttcattatttgaagctatggttacagctgtttttttcttatcagatgtcatctggagcattttgttcttgcctttatcaggatggtggtttgtgnnnnnnnnnnnnnnnnnnnnnnnnnnnnnnnnntgtttgctctgtcacccatgctggagtgagtgatgccnnnnnnnnnnnnnnnnnnnnnnnnnnnnnnnnnnnnnnnnnnnnnnnnnnnnnnacattccaagcagctgggattacaggtgcacaccaccatacccagctaattttttttgtagtaannnnnnnnnnnnnnnnnnnnnnnnnnngnnnnnnnnnnnnnnnnnnnnnnnnnnnnnngcccannnnnnnnnnnnnnnnnnnnnnnnnnnnnnnnnnnnnnnnnnnnnnn

SEQ ID NO: 39938 - DNA, 808 bp, Macaca Mulatta
gctcacagcttctcgctctcgcctgcctgcctgctcccttgcttgctggggctttcgctcgccctctcctcgaggatcgaggggactctgaccacagcctgtggctgggaagggagacagaggcggcggcggctcaggggaaacgaggctgcagtggtggtagtaggaagatgtcgggcgaggacgagcagcaggagcaaactatcgccgaggacctggtcgtgaccaagtataagatggggggcgacatcgccaacagggtacttcggtccttggtggaagcatctagctcgggtgtgtcagtactgagcctgtgtgagaaaggtgatgccatgattatggaagaaacagggaaaatcttcaagaaagaaaaggaaatgaagaaaggtattgcttttcccaccagcatttcggtaaataactgtgtatgtcacttctcccctttgaagagcgaccaggattatattctcaaggaaggtgacttggtaaaaattgaccttggggtccatgtggatggcttcatcgctaatgtagcacatacttttgtggttggtgtagctcaggggaaccaagtaacaggggaggaaagcatatgttattaaaggcagctcacctttgtggctgaagctgccctacggcctgggtcacacctgggaaattccaacacccgagcggaccgaatcccctggaaccacagttgcccccctcctttctaactgggcccccacatagcaagggtatggctgccccaccgcggtcttggaggcgagccttgggccctccctatggggaacgaaagaagacccgt

SEQ ID NO: 39939 - DNA, 607 bp, Macaca Mulatta
  misc_feature (1)...(607): n = A,T,C or G
atcatttgcccatctttcatcgagttgtttgctaattgattcataggatcaattaactattttaatcctgacataggtggcaaataactttctctaaacttcatttatagtagctttcacagaacacagaagttttatatttttatgtggatgtatttgtcaatatgttgggattttnnnnnnnnnnnnnnnnnnnnnnnnnnnnnnnnttcgctcnnnnnnnnnnnnnnnnnnnnnnnnnntgcnnnnnnnnnnnnnnnnnnnnnnngnnnnnnnnnnnnnnnnnnnnnnngnnnnnnnnnnnnnnnnnnnnnnnnnnnnnnnnnnnnncaccaccacannnnnnnnnnnnnnnnnnnnnnnnnnnnnnnnnnnnnntccatgttggtcagtctggtcttgaactcccaacctcagctgatctgcccgctttggcctcacaaagtgccaggattacaggtgtaagccaccgcagctggcctcaatatatttttgaaaaactgtcatctccagaattttcaattgtcctatctgggaacatagtatatctctcctttttaagtgttatagcttattttaaaagtctattcccagactttaaaaagtc

SEQ ID NO: 39940 - DNA, 83 bp, Macaca Mulatta
acgctaatatttctggcaaaatcccatgcttgggtttttgtcactaacctgttaacgcttgcaagcccaataaagcattgaaa

SEQ ID NO: 39941 - DNA, 720 bp, Macaca Mulatta
  misc_feature (1)...(720): n = A,T,C or G
ggttaagattcttaaagctgattttgtttctacaattcttgctagggtggctaatcgactaatttgttcaattagtatattaatttctattgctttcttcctttcaaatgctgcccctcagcccgtctggcatgtttgattatgactttgagtaagtttgatttgaattagtatttgtgctgtgttgtttagtgtgtagacaccagtatgcctttttgagacctttctaacccatagtttatctgtttaattgtaggtatgtatattaggttaggctgggaagnnnnnnnnnnnnnnnnnnnnncgtgatggaggtaacattttatttaatcacttaagcaaaattaagtaaacttcacttttatgcattttaatttcttttaaaatagataacctttaactcatatttaaattgattttctggctttgcttcataaggagaataatagcttaagatctgatactttgctttggaaagatttaaaaattgaaattcatttaatttattttgcgtttcatgtccagaaatagaaactcctagtctctttcctgttgttaatcaccatgtgtctcagtaattttcagtgatatagttacagaactaacacattaacatagagcatgcccctcttaatttcaatctcttttaacatgtaagttcctggaaattgttttttaaacattataatgggcttttttgtaagcctgcctggtaaaaaa

SEQ ID NO: 39942 - DNA, 441 bp, Macaca Mulatta
agctgctgggaggagatgggcagcaatatgccagatccccccacagagggccttgcttgcctgatggagctgtggctctccgcttattgatcacagccctcttagtccgcgtgtgtctgccttccaggtgcatgtgctgggcagtcaggacggtgcctaaatggacctcagacatggctcagccataggacctgccacacaagcagccatggacacgccgcccactaccacctccccacatggaaatttaccctcaaaccgtgtaatcaataaagccttccgcagctcaggctctggttcctctctctccccccacagacggacacacaaatggggacattgagaacatactcagggacacagccacacacacagacccacagacagagggtcctgctcaaggagcacatgtgtgaaggtcctctacagaggggcacacag

SEQ ID NO: 39943 - DNA, 811 bp, Macaca Mulatta
  misc_feature (1)...(811): n = A,T,C or G
gggaggcattgaggcagccagcacaggggtttctgctgaagtggcaggcgcagcttgaggaacccgcagataagttttctctctttgaaagacagagattaatacaactacttaagaaatgtagtcagtagcttactaagattttgcttagcattaggttcttaacgtaatttgaataagattttaagagaaaatatgaagagttaaaagtgtagcgtgagnnnnnnnnnnnnnnnnnngtttctaaaacatgacggaggttgagacgaagcttcttcaagaagtaaaaaaatgtatttaaaagaaaattgagagaagggacgccagagccctgaattaataccagtagaagggcagtgcttttagattaaaatgaaggtgatttaaacagagcttaaacgttgtttgaaaagttgtaggtgattaaaataatttgaaggcgatcatttgaaatgagattaaatcgaaggtcattaaaagaccttgaactccatgacgcagggagagttgcgtcatttaaagcctagttaatcttaacgcgtttgctaaacgcagacgaaaaataggaaagattaattgggagtggtaggatgaaacaatctggagaagattagaagtttgaagtggaaaacgaagacagaagtacaggaannnnnnnnnnnnnnnnnnnnnnnnnnnnnnnnnncggccgcctcgcctcgagagctctaacatcgttgccgcgccatagtatgactgcaactgtccagaactgcagcatgctgatcacataaagccgngacgagttaatcagatagctcgttcagtcggc

SEQ ID NO: 39944 - DNA, 787 bp, Macaca Mulatta
  misc_feature (1)...(787): n = A,T,C or G
ggggccataatgagtatgttaagaatttcnggtgtagggcaaggttgccctttgtaacaagtggattaaaattgaaattattatctcagatgttctgtattgcacctgaaaccatgacctttatttttccttttcatttaataatttccattttgttctctactccttcccacaaaaaaattacttgacatctgacacatttcacagtctcactatcctgcatttattagccttttcttccttcgaaaatacacacaattatgacctttaaggagtattttgagatttcagacatcttcagaaggtatctagaccctcttgaaagctgttaatgcctttctgcagttctgatattctagtttgagaaagagagaactaattgagaagctgtagctaaagagtatatagcagctgattcataattgaaaaaaattatgttctgtttttgaagatcttttataaaacattaatgaggaaagacaagtgtttagacaaaattattttaattttataaattcagcacatatgtaacatttatttggtacatatgtctcgttttcttcacaattaaaatgattgctagcacccacacaactagaatttgaaaaattcagtataatgaaaagctttatatcccattaattccaactgcaaatgtatgccttgtttggtaggcattatttgtaaactcataatgctaaacaaaaaaagtgtctaggggctccaaaaaaattttggccacccttttacggcttttaagaaaacccttttaggccaaaattcctct

SEQ ID NO: 39945 - DNA, 607 bp, Macaca Mulatta
gggatttgctggcagagatatgagctaatcaccaattatccctgctttttttcctaaaagaagtctgtgtggctcacacgttagtaatattttttcgtagacaggttccttttttcgttttccaaagaagaattttactttgaactttttctttttttagaaaactttcaactaaccaagcatttttgggtctgttggaattttcctttttgtcgacatgcagtaatatctgacttcttgtctgtcacagatcccagattacaggaatgcagtaatcgtggcccagtctccagcatcggcgaagagtgctgatcccaaaaaaaagccccaatcacagtgtgggtgatgttggaggaaggattgcctccttctggaagacatcattgatgatgttgaagccttcttgcctcaccaaaaccctgaagaaaaaagggccataaaaactttttggatggcaactcagggttgttgttcttcgaccccccccggttaattaaaaacccccctttagaaggaagggccccaaaaaattcccaaaagcccaaaccccattccccaaataaaccggggattccgtatcttttaaggcacccggtacccagggggc

SEQ ID NO: 39946 - DNA, 1052 bp, Macaca Mulatta
  misc_feature (1)...(1052): n = A,T,C or G
nnnnnnnnnnnnnnnnnnnnnnnnnnnnnnnnnnnnnnnnnnnnnnnnnnnnnnnnnnnnnnnnnnnnnnnnnnnnnnnnnnnnnnnnnnnnnnnnnnnnnnnnnnnnnnnnnnnnnnnnnnnnnnnnnnnnnnnnnnnnnnnnnnnnnnnnnnnnnnnnnnnnnnnnnnnnnnnnnnnnnnnnnnnnnnnnnnnnnnnnnnnnnnnnnnnnnnnnnnnnnnnnnnnnnnnnnnnnnnnnnnnnnnnnnnnnnnnnnnnnnnnnnnnnnnnnnnnnnnnnnnnnnnnnnnnnnnnnnnnnnnnnnnnnnnnnnnnnnnnnnnnnnnnnnnnnnnnnnnnnnnnnnnnnnnnnnnnnnnnnnnnnnnnnnnnnnnnnnnnnnnnnnnnnnnnnnnnnnnnnnnnnnnnnnnnnnnnnnnnnnnnnnnnnnnnnnnnnnnnnnnnnnnnnnnnnnnnnnnnnnnnnnnnnnnnnnnnnnnnnnnnnnnnnnnnnnnnnnnnnnnnnnnnnnnnnnnnnnnnnnnnnnnnnnnnnnnnnnnnnnnnnnnnnnnnnnnnnnnnnnnnnnnnnnnnnnnnnnnnnnnnnnnnnnnnnnnnnnnnnnnnnnnnnnnnnnnnnnnnnnnnnnnnnnnnnnnnnnnnnnnnnnnnnnnnnnnnnnnnnnnnnnnnnnnnnnnnnnnnnnnnnnnnnnnnnnnnnnnnnnnnnnnnnnnnnnnnnnnnnnnnnnnnnnnnnctaccnnnnnnnnnnnnnnnnnnnnnnnnnnnnnnncgcgaggggcgcgcgacccacatccccaaaagagggcataacatacatgcgggggaaatcaggtgttagaacccgtcatctacgcacggagaagcacaacagaagtacgcgacaagcgcgaaatcagaaggaagtacacgaacaacaacaagcgcaatcatgaatacacgcacacactanacgtgcgccgaccacgccttctgagcaactacagaagaactaacaacacagaaaaacacagacacacacacgacagcaaaagaagaggagtgaaaggagngaga

SEQ ID NO: 39947 - DNA, 255 bp, Macaca Mulatta
aggaaaatggactcagacttcccacatgccttccagaaggaactcacctgtgtcatctgttcgaactacctggtagaccctgtcaccatctgctatgggcacagcttctgtaggccctgtctctgcctttcctgggaagaagttcgaagtcctaccaactgccctgcatgccgcgaaccatcacggaaacaggacttcaaaaccaatattcttctgaataatttagtgaccattgtgagaaaagccagtctctgg

SEQ ID NO: 39948 - DNA, 618 bp, Macaca Mulatta
  misc_feature (1)...(618): n = A,T,C or G
ctcggctcactgcagccatctttatgcctcagccccnnnnnnnnnnnnnnnnnnnnnntgcatgtcaccataccaggctaatttttggtgtgtttttgtagagactggattttgccatgttgaccaannnnnnnnnnnnnnnnnnnnnnnnnnnnnnntgcccaccttggccttnnnnnnnnnnnnnnnnnnnnacatgagccaccacacctggcaccaagcttgaattttcattctgccattgacttggcatttacctggggtaaaccataagcaagtcttaatttctggctccatccgagttgtttttgtgctcaacaatgccattgacgcgcatggtgtgttgccatgatttgaccctcaacttctagcagtatatcagatatgaactgagggtgaaatatatttccgaatagctaaatgaagaaatgggaaaaaatcttcaccacaatcagagcaattttattattttcatcgatctgatcataattatgattatcatctttaaaaagcaggaactcctgctttttctttatcagttaaataacccagagagtacgtctgctgtatctctaatagaatcttgtataatatgtcattgtagggaaactgctctca

SEQ ID NO: 39949 - DNA, 795 bp, Macaca Mulatta
  misc_feature (1)...(795): n = A,T,C or G
ggtgcggnnnnnnnnnnnnnnnnnnnnnnnactttggaaggccgagacgggcgnnnnnnnnnnnnnnnnnnnnannnnnnnnnnnnntaatacgnnnnnnnnnnnnnnnnnncnnnnnnnnnnnnnnnnaactagccgcgcgaagtggcgggcnnnnnnnnnnnnncnnnnnnnnnnnnnnnnnacaggagaaaggcgnnnnnnnnnnnnnngnnnnnnnnnnnnnnnnnggatccgnnnnnnnnnnnnnnnnnnnnnntnnnnnnnnnnnnnnggtctnnnnnnnnnnnnnnnnnnnnnnnnnatgtttaaaaattaggaatttactttgctctcaaatcaagactccaccataaatattagaggtttaagtagttaaaaatgcactgcaactcatctgattgcaaataatgtaaactgtgataaccaagtgctgacaagaatgtacagcaataagaactctaatttatcctgaaaggcagcaagataacctgaaacaaatctttggaacataatttcatactatgtagtaaaggttaacataatgtatactcagggcgnnnnnnnnnnnnnnnnnnncggtaatccaacacttttgggaggcccaaagcaagtggaatttacctgaagtcaggaatttcgaaaaccaaacctgaccaacacggtgggaaaccccattctcccacggaaccttccaaaataaagccggggcatggtggggcacatgccctggtaatccccagccttctttgggagggcttaagccaggaaaaataatctttggaaccccgggaa

SEQ ID NO: 39950 - DNA, 648 bp, Macaca Mulatta
  misc_feature (1)...(648): n = A,T,C or G
ggggtgcccttccctctcttgtcagcggcttaaccggttcacaaatttgacctacacattcacaggagaagaagttataagaaaagtccgtatttttaaaagatgttctgatgcacacacaaaacaaagacttcactgtagaaggcaggttcttctactggccaaattgagttctggccagtaaaaaggtaaatttatgttgaaggcctctctgttttacttgaggagcttactacagcaatttgcaccttactactttctatctcctaaaccattttgttgccccaactcttagatcaaaagcaaactattcattctttctggcattcagcaagcatttaactgcttttaaagttgtaaaaagccatctccaattttctcaacatgactttggggaaggttctgtttcctttacttttagacctagaacctaacaaacaggatcaatgtataatcgccagtcactggcaaaccaaatcgtcaaggaacgcanaaattacttaatatctttggggttagaatttctagagatgacatggatcatttcagatatacaaataaataaaatcatannnnnnnnnnnnnnnnnnnnnnnnnnntcgccgctcgctcaaactttaacatcttggcccgcccaagtatgactgn

SEQ ID NO: 39951 - DNA, 776 bp, Macaca Mulatta
  misc_feature (1)...(776): n = A,T,C or G
ggtctccctgcagatccaggatactcccgggggcgtccagatccaagacagtctcccccaggtcgtcgattccctgtccaaatgcgtgcagtgggccgagggctttttactggtctattccatcacagactacgacagctacctgtccatccgacccctttatcagcacatccggaaggtccaccctgactctaaagcccctgtcatcattgtgggcaacaagggggaccttttgcatgcccggcaggtgcagacacaggacggtattcagctagccaatgagctgggcagcctgttccttgaaatttccactagcgaaaactatgaagatgtctgtgatgtgtttcagcatctctgcaaagaagtaagcaagatgcacggcctcagtggggaaagaagaagagcctccatcatccctcggccccgctctcccaacatgcaggacctgaagagacgcttcaagcaggctctgtctcccaaagtcaaagcccccactgcacaggggtgaactatctcagacagatgcctctcctttttaatatgcatttgtgcagctaaaagactgggcttcttcctttttaatcacacattcagagtttattttttataaaagattgattttcaagtacatgtgtatttctgaaaattcagtgattgcctaaaagctggaataaaattttgtttttggtaaaagaacnnnnnnnnnnnnnnnnnnnnnnnnnnnnnnnnncggtaaaccctggccccatttttccatttaaagggcaaatgggcaa

SEQ ID NO: 39952 - DNA, 691 bp, Macaca Mulatta
  misc_feature (1)...(691): n = A,T,C or G
ttattataccctgccatccgtaatggattttgttttggtttgttgttgccattctagcaatgagcttagtccttgtatatctgcattaaggtgccgatgcagaaggcaaattggaagcacgcgccagcggcagtggggcttaaagccgacctccatgcatcattctctagagttgaaaggactgacatttctcagtaactacccggcaaaatatatattttcataatgctgaannnnnnnnnnnnnnnnnnncatgaaacacttgtaagatacttattttgaaattaattataaggcattcatatttttaggactgaattcaaagggaaatgcttatttgactttttttcattgttcggttgactttcagctttctggagtgactattaaagcagcagtgatgggtgctattcctggttctgcggtagtttactttgtctactaagtgatttactttcaaacctcattacagataatcttactaaaagacttaacatgcacactgctaaaaggtgttttactgttttccattaacgctgttgtatgaacaatatttggtgacatgtctttttgtcctgtagattgtcatatctgttatgtagttatcctattggcaagtcctnnnnnnnnnnnnnnnnnnntagaaaatcctcagactgtcaatcttccgtattctgaatattataatgct

SEQ ID NO: 39953 - DNA, 223 bp, Macaca Mulatta
ggcagacatggtttcagcaccggcggatgctgaccccagccttccactatgacaccctgaagccctacgtggggctcatggcagactccatgcaagtgatgctggtaagtccgtgtctttctcctctccacacacagtacagcacacactctcaccaattccactctcaatcctatgtcccacagacagccatagacacagccccatgcaataacactttcag

SEQ ID NO: 39954 - DNA, 805 bp, Macaca Mulatta
  misc_feature (1)...(805): n = A,T,C or G
ggcagtaaacaccatattaagtttgaaannnnnnnnnnnnnnnnnnnnnnnnnnnttctggcttacctaatgggcagcaaatatctaagacatggtgctgctgtaggattccatgagttaatagttagtgatgatattgaccagacttctatcaacaaacaaaacagttgtctagccaggattcttccttaatggaagactcatctttgttgaatgatttcattaaagccttattgtatacagaaaaatgagaatgaagctatccagaggagcttccactgaatctcagtccagatggagtttggcaaaaagaaggaaaaggcatctcagacagggaaaatagcatacacaaaggcacaaagaggtaacgggagtttgtgtgatttaagaaaagtctggactgatcaacaggtaaggtagtggatagaactggatttctgtccctcttgaggagtgtatgtgagcatcttcataannnnnnnnnnnnnnnnnnnnnnnnnnnnnnnnngnnnnnnnnnnnnnnttggagcgcagtgcagtcttggcttactgtaatctctgcctcctgggttcgggtgagtctcctgcctcaacctctcaagtggctgggactgtcagtgcccgccaccacaatccggctattttttgtacctttaatagagacagggttttcaaaacatcatggttcaggctggtgctcaaactccctgaatttccgggtgtattccggcccacctttagccccttccaaaagtattccggggatttcaagggccttgagacccattttgccgcccccaagatc

SEQ ID NO: 39955 - DNA, 486 bp, Macaca Mulatta
tacagagcggactgccagcaaatctaccggtggtatagcatcaggggagcaactggctacaaaagccgctcgcaggagtgcgccctctactggaggagtgaagaaacctcatcgttacagacctggtactgtggcactccgtgaaattagacgttatcagaagtcctctgaacttctaattcgcaaacttcccttccagcgtctggtgcgagaaattgctcaggactttaaaacagatttgtgcttccagagcgcagctatgggtactttgcaagaggcaagtgaggcctgtctggttggcctttttgaagacaccaacctgtgtgctatggatgccacacgtgtaacaattatgccaaaagacatccagctagcacgccgcatacgtggagaacgtgtttcacagtccactatgatgggaagcatttcattaacaaaaattttttaaaaatcgcttattcctgttattggtagttctgaacgtta

SEQ ID NO: 39956 - DNA, 790 bp, Macaca Mulatta
  misc_feature (1)...(790): n = A,T,C or G
gggaaatgcaaaggaaatactgagcagagaaattagtggccaaattctgcatattctaaacaaggtattttataacaaagaaacaaaaacacacagcaacagagaatcatagagggaaaaaataaaatcaaattttagaggtgctaaaatatattacaaaatttccagttctcaatgcaaatctatgagtcatgaaaagcagaaagaggaaataatgatctatacttgcatatgattgataggtagtctataagcactgcctatgcctggacacagatgttggatttagcagactcatatttcaaagaaaaccgttagctagtatttcaaagaatcagaaacatgtttgtagtacttgagaaaataaatccacaaaaagtgaatatcaataaagaaattaaatccattgaaaatagattctagaggttgagtatggaaagtaatattttaaagaaaacttttccccagggttcaggggataaatagccaatttggtagagctttcccaaaaaacagaaatttccgctgtccaaaccccggaaagctccaaacctggcctgaacttttgaggccccctgcaaaagggaaaaaagtgaaagtcttccggncaaaacctgttaaacctgccctccgaaaccatttgttttaagccccttttgggcccttnnnnnnnnnnnnnnnnnnnnnnngaggcgcttatttttttttttggaaacaaaaatttttgtttttccccccacaagttttctaaaaaggttcaannnnnnnnnnnnnnnnnnnnnncattggt

SEQ ID NO: 39957 - DNA, 799 bp, Macaca Mulatta
  misc_feature (1)...(799): n = A,T,C or G
ggcaattcatcaatcaataaatgcctgggattacaggcatgcgccactaagcctgannnnnnnnnnnnnnnnnnnnnnnnnnnnnnnnnnnnnncnnnnnnnnnnnnnnnnnnnnnngcctgacctcaggtgatccacccaccttggannnnnnnnnnnnnnnnnnnnnnnnnatgagccactgtgcccggcctacaacatgtatttcttaaataacgagacttgaaaatcaagattactccttgatctgtgaggtgcagaacagatgttgtgttagcaggcatgaaagcaacagcaatcaccttgcacactgccatcagaggtcttgggtgaccaggttgtcaacaagcagtagtattttcaaaggaannnnnnnnnnnnnnnnnnnnggaaggtaggtcttagcagtggacttaaaatattcagtaaaccgtgctgtaaacagatgggctgtcatgcaagatttgttgttccattgatagagcacagtcgggtagatttaatataattcttaagggccctaaaaattttggaatggtaaagaagcactggcttcatcttaacaccagctgcattaacccccaatgagaacctgtccttttaagttaggcattgacttctctctagccatgaaagttcctgcaatggggcctttctaccaatataaggttggttcattcagcattgaaaagttttggggaaaattttcctacataaaaattgccctaaaaaatccggaaaaacgtgcgtttttcaacaaaaccccccttgcgcttttaaatacagaaaagggccttcg

SEQ ID NO: 39958 - DNA, 826 bp, Macaca Mulatta
ggggatatcacaagagatggttttctgtgatccatggcacctccccctaccccacccccaccacctaaaggggctttaaattaagatttggaatggcaaattcacttaccagctccaaacacggtagacaaggaaacctggtgaggaaaatgcaagaaaatattcgcggtttctattcagaaatgcatggcttactttgaatgaggaagcgtgacttttcatcttcagatagaaccagggtctgatttgaagtagaccactggcctcaccagaccccatcaaagaagtctgcttccaccccgaggtagaaggtgccagtgggcatgtagttgctagtatgggatttctgttttgatttttaacaagcttgggcccaactcttagtattgtatcaagatgggtgaagacaaactggccaggaaaacacgtatcaagtcagcaatggctcacccctcagaggccatttttcccgcgtgctcctcttataccttcggtttgtttttggttttggattctttatgttcctcctactctttctttctctgttttgcttgggccttccttagaagagctctggtaatcatttcagacttccaaaattcaacccagtagcctcatgttacaggtggacccactgatatacaacagctcgatgtgacaaaccgtagactcagttaatcacttggagagcctgggatcaccctccaggatgacctgccttttccagccctcagtgggcgtcctctgttaatgacctgtaaatgtgcccactctaaaaacattccaggaaagccccttcctcttgggccttaactccaaaaactta

SEQ ID NO: 39959 - DNA, 2125 bp, Macaca Mulatta
  misc_feature (1)...(2125): n = A,T,C or G
gtcttttttcagaggaagtcttcagtgcctactctgctctgtggtggtctccaaacggcacttttttagcatatgcccaatttaacgacacagaagtcccacttattgaatactccttctactctgatgagtcactgcagtacccaaagactgtacaggttccatatccaaaggnnnnnnnnnnnnnnnnnnnnnnnnnnnnnnnnnnnnnnnnnnnnnnnnnnnnnnnnnnnnnnnnnnnnnnnnnnnnnnnnnnnnnnnnnnnnnnnnnnnnnnnnnnnnnnnggatcactacttgtgtgatgtgacctttgaaacacaagaaagaatttctttgcagtggctcaggacgtttcagaactattcggtcatggatatttgtgattatgatgagtccagtggaagatggaactgcttagtggnnnnnnnnnnnnnnnnnnnnnnnnnnnnnnnnnnnnnnnnnnnnnnnnnnnnnnnnnnnnnnnnnnnnnnnnnnnnnnnnnnnnnnnnnnnnnnnnnnnnnnnnnnnnnnnnnnnnnnnnnnnnnnnnnnnnnnnnnnnnnnnnnnnnnnnnnnnnnnnnnnnnnnnnnnnnnnnnnnnnnnnnnnnnnnnnnnnnnnnnnnnnnnnnnnnnnnnnnnnnnnnnnnnnnnnnnnnnnnnnnnnnnnnnnnnnnnnnnnnnnnnnnnnnnnnnnnnnnnnnnnnnnnnnnnnnnnnnnnnnnnnnnnnnnnnnnnnnnnnnnnnnnnnnnnnnnnnnnnnnnnnnnnnnnnnnnnnnnnnnnnnnnnnnnnnnnnnnnnnnnnnnnnnnnnnnnnnnnnnnnnnnnnnnnnnnnnnnnnnnnnnnnnnnnnnnnnnnnnnnnnnnnnnnnnnnnnnnnnnnnnnnnnnnnnnnnnnnnnnnnnnnnnnnnnnnnnnnnnnnnnnnnnnnnnnnnnnnnnnnnnnnnnnnnnnnnnnnnnnnnnnnnnnnnnnnnnnnnnnnnnnnnnnnnnnnnnnnnnnnnnnnnnnnnnnnnnnnnnnnnnnnnnnnnnnnnnnnnnnnnnnnnnnnnnnnnnnnnnnnnnnnnnnnnnnnnnnnnnnnnnnnnnnnnnnnnnnnnnnnnnnnnnnnnnnnnnnnnnnnnnnnnnnnnnnnnnnnnnnnnnnnnnnnnnnnnnnnnnnnnnnnnnnnnnnnnnnnnnnnnnnnnnnnnnnnnnnnnnnnnnnnnnnnnnnnnnnnnnnnnnnnnnnnnnnnnnnnnnnnnnnnnnnnnnnnnnnnnnnnnnnnnnnnnnnnnnnnnnnnnnnnnnnnnnnnnnnnnnnnnnnnnnnnnnnnnnnnnnnnnnnnnnnnnnnnnnnnnnnnnnnnnnnnnnnnnnnnnnnnnnnnnnnnnnnnnnnnnnnnnnnnnnnnnnnnnnnnnnnnnnnnnnnnnnnnnnnnnnnnnnnnnnnnnnnnnnnnnnnnnnnnnnnnnnnnnnnnnnnnnnnnnnnnnnnnnnnnnnnnnnnnnnnnnnnnnnnnnnnnnnnnnnnnnnnnnnnnnnnnnnnnnnnnnnnnnnnnnnnnnnnnnnnnnnnnnnnnnnnnnnnnnnnnnnnnnnnnnnnnnnnnnnnnnnnnnnnnnnnnnnnnnnnnnnnnnnnnnnnnnnnnnnnnnnnnnnnnnnnnnnnnnnnnnnnnnnnnnnnnnnnnnnnnnnnnnnnnnnnnnnnnnnnnnnnnnnnnnnnnnnnnnnnnnnnnnnnnnnnnnnnnnnnnnnnnnnnnnnnnnnnnnnnnnnnnnnnnnnnnnnnnnnnnnnnnnnnnnnnnnnnnnnnnnnnnnnnnnnnnnnnnnnnnnnnnnnnnnnnnnnnnnnnnntttcttcccaaatttcatacctatcatcttaagtagggacttctgtcttcacaacagattattaccttacagaagtttgaattatccggtcgagttttattgtttaaaatcatttccgcatcagctgctgaaacaacaaataggaattgtttttatggaagctttgcatagattccctgagcaggattttaatctttttctaactggactggttcaaatgttgttctcttctttaaaaggatggcaagatgtgggcagtgatgtcactagggcagggacaggataagagggatt

SEQ ID NO: 39960 - DNA, 813 bp, Macaca Mulatta
  misc_feature (1)...(813): n = A,T,C or G
gggcatttacatttttaagaggagcgtataaatccaaatatctctgttgatacatatacctatcatttacttaaatacctgagtacctactaagtataaaataccctgttattttatgtttagcacagtgaggctgtaacagtttacactcctattatgtagctgagaccagttggtctcttttagagaagggagtatcagttagttacagaaggactcatttgaatcatgagataatttgtgagaatgcatacccaagtaatatgctttaataaaatcagaaggcagcatgcttttgttgagaaatggaggtaggaaggtaccaacataaaataaccttctttgtattggttcaatgtaccccataaactgtcatctcttttgtttgtttgttttgagggtacaaattatttcgttttctgatattctctttcctaaagtgttgttggactgaaacttaacaaattcttccccccccnnnnnnnnnnnnnnnnnnnnnnnnnnnnntatacacacttatatggattccttccacaaacacacagcaatagtatgtgcaagtcaaaatttatttttaagatgaatcttttaaagcatgggtgaatctggggcccatcacacacagggcagtctggccatatcttttggctccctgccttggaattgcgttggcaatggttccctaatgtactaaggggagggaaattccctttttacttgtaacaaaaacaaatccgggctttaaataaaagatggtcccaaggggttggaatttacacaaacggcaacgttgcaacgcttttaaggggtaaa

SEQ ID NO: 39961 - DNA, 853 bp, Macaca Mulatta
gggctttttcgcaacgggtttgccgccagaacacaggtgtcgtgaaaactacccctaaaagccaaaatgggaaaggaaaagactcatatcaacattgtcgtcattggacacgtagattcgggcaagtccaccactactggccatctgatctacaaatgcggtggcatcgacaaaagaaccattgaaaaatttgagaaggaggctgctgagatgggaaagggctccttcaagtatgcctgggtcttggataaactgaaagctgagcgggaacgtggtatcaccattgatatctccttgtggaaatttgagaccagcaagtattatgtgactatcattgatgccccaggacacagagacttcatcaaaaacatgattacagggacatctcaggctgactgtgctgtcctgattgttgctgctggtgttggtgaatttgaagctggtatctccaagaatgggcagacccgagagcatgctcttctgggttacacactgggtgtgaaacaacacatagttggtgttaataaacaggattccattgagccgcactaccgccagaagacataagaggaaattgtaggagaattcgttacggaattcagacatttgctattacgcgacatttggcataagagccccttacacgatggaacgattctgcgcgcaatatcccgggctagcgaactggttgcacagatgtgacgtggcacgccagagttgcctcactgtggcctttgcgtttcatgggggattggaaagggtacggcacggtgcccccccgggaaagggtcatgggtaaaaccccacggtgaacacttcacggtctattttagatggaaatcgtaatttttgc

SEQ ID NO: 39962 - DNA, 371 bp, Macaca Mulatta
cccccaccacccgagcatggccctcacgccgacagccctgtgctcatggcctatggcttggatcaatctaagatgaactgtgaccaagtgttcagtgttttctgcttgtatagcaatgcggagaaggtgaaattcatgaaaagcaagccggggggcgccgtcgtggagatggctacgctgtggaccgggccactacctacctcaacaacaatttcatgtttggacagaagctgaatgtctgtctccaagcagccaggcatcatgcccggtcagtcatgcgggttggaagtcaggtctggcagttacagagacttcagtgaatcccgaacaatcggtaccgcaccccggagcgggcacaagaaccgcatcca

SEQ ID NO: 39963 - DNA, 160 bp, Macaca Mulatta
tcaaactctgtatttttgtttgcaaactgaggattgttctacgtatctaacgaggtaggaataccgttgaagcgttgacacaagtggagtccctatgtaacagacactcagaaaatgctttctatatatgattactttctacatactatttctctttata

SEQ ID NO: 39964 - DNA, 601 bp, Macaca Mulatta
  misc_feature (1)...(601): n = A,T,C or G
gctggtaccggtccggtttccgggatggatttactctttttctctgtgactgccttctaattttggcctccatcatttcagatcaccnnnnnnnnnnnnnnnnnncgtgagcccctgcacctggtccttatttcacttttctaagcctcattttctcatctctatttttaagataaaaagaaaaaactgcccatgtatgactattataaggattgaatgaaaaaatgatcttaaggacagaccacaaaacaaaaatgagatattctcttcctgcttttactatatgtacatatatcnnnnnnnnnnnnnnnnnnnnnnnnnnnnnnntcctttaccatctctatatttcactatgcaaaccatggtgatcgatgtgataaagcagtacctgcaagaagttcctaggaatctatggttacatatgtagcaaaggaggactacacataattagaatatcaaggtacaaaactgtcgactgaagatcagtggttgtcagcctgctttcagccaggacacacctgaggaatggtgattcacaaggacacactcccctgttaagcccggtttctggtgtgtcaacacctgccctgttattcttact

SEQ ID NO: 39965 - DNA, 132 bp, Macaca Mulatta
acaggaaatcacatgacgatgagtatcctgaggaaaatcttcgtgaaagatcttgacatatgtcccctacacaaactccagaagacagaatgcggcagccacacgaaagaggaaaccaagactgcctgcttg

SEQ ID NO: 39966 - DNA, 744 bp, Macaca Mulatta
  misc_feature (1)...(744): n = A,T,C or G
ctttcccaaaaataaaaaagtgttggttttcccccccccgcggggggggggnnnnnnnnnnnnnnnnnnnnnnnnnnnnnnnnnnnnnnnnnnnnacnnnnnnnnnnnnnnnnnnnnnnnnccacccccgtggggggttttgtggaaagccgcgcggtgaacctcgaaaaaggggggcnnnnnnnnnnnnnncccggggtgggcggcgttttacaaaaaaccaggggttttttttccgggaggggcccaccttttttttttcccaggtttagggggggataaaaattatgttctttaaagggcccattttttttggcgaaaaaagtttttnnnnnnnnnnnnnnnnnnnnntaaccccccccccgttcttttttggttccacccacgccaacactgggtttttgtcaaaggaagttttccaaagaaacccttctctccccttcgttattttcgttttcccaaaccttgcgaatttaagcggggcttgaggtacttccctcttggtacacgggcccttttctgcaaatagcacggcgggattcggggaataccctgccaattccctctgaccaaggacaggggttgcggctgcaatggggcttccccttcttgggcttcttagccttgaggttaccctttttcaccttgccaccagcatcagccttcttggcttcgggtttcttctctttagtatctggcttctcaactttttcacccgccatcttgcaagatgggaaagagccc

SEQ ID NO: 39967 - DNA, 592 bp, Macaca Mulatta
  misc_feature (1)...(592): n = A,T,C or G
tgtgtgcagagtccccgcgcctggcgctccagagtctcctggacgtatcccacagcagcctcatctgcattccgccctctgtccacgtgcagccgctggagctcacagccaacctgggtgaggacctgcgggttgcctgccaagcctctggctacccgcagccattggtgacctggagaaaggtgccccagcctcgcgagggccggccgcaagcccaggcccagctagaaggcggggcgccgggcctgggcggacactcggcatccgacacgggcagcggcatgctcttcctcagcaacatcacgctggcccatgccggcaagtacgagtgcgaggcctccaatgctggtggcgctgcccgcgtgcccttccggctcctggtcaacgcgtcccggcagccgctgcagcagcccgcgcaaccncatggccttccgcgccctgggcctggccacgcagacggccattgcggcggccatcgcgctgctggcgctcacggcgctgctcctggtcgccatgatctgtcgccggcgccgcangcgaaaaaaggcgcgggggccaccgggggagggcgcgctgttcgtcaacgactact

SEQ ID NO: 39968 - DNA, 708 bp, Macaca Mulatta
  misc_feature (1)...(708): n = A,T,C or G
attatttgaaaaccttttacatctgacatttgtttcctagcctaagatgtggtctgtctttgtgaatgttccatgtgcactagtgaagaatgtgcattctgcttctgatgtgtggagtattctgtaaatgctagttattcatttaatagcactgctcctatctcctgtgtttttactaacttttttctcttatttgtagtaaaagagtatttgaagcatccctaattaaagatttgtctatttctgtttttaatcaggttttgcttcatgtttcgaagcttttgttattgagtgtatatgcatgtagcattgttttatgtatatttttatatagcatcatatatgtttttatatattatatgtgtattatatatcatatatatgaattatatatttcttaaatgtatatatgtcatatatatatataaacagagacaaggtcttgctccacctgccaggctagtgagctgtgattgtgcgactacactccagcctgggtgagagtgagaccctgtctttctcttaaaacaaacaaacaccggcccccccaancccaaaccaaaaaaaatcccagctagattactgcctcaaacataatgtgcatacaaggcatctagaaagcttgttgaaatgcaaattctgattttgtaggtctgaagtagggcctaagattctggctttctgttaagctctgtggtaatgctgata

SEQ ID NO: 39969 - DNA, 753 bp, Macaca Mulatta
  misc_feature (1)...(753): n = A,T,C or G
ggnnnnnnnnnnnnnnnnnnnnnnnnnnnnnnnnnnnnnnnnnnnnnnnnnnnnnnnnnnnnnnnnnnnnnnnnnnnnnnnnnnnnnnnnnnnnnnnnnnnnnnnnnnnnnnnnnnnnnnnnnnnnnnnnnnnnnnnnnnnnnnnnnnnnnnnnnnnnnnnnnnnnnnnnnnnnnnnnnnnnnnnnnnnnnnnnnnnnnnnnnnnnnnnnnnnnnnnnnnnnnnnnnnnnnnnnnnnnnnnnnnnnnnnnnnnnnnnnnnnnnnnnnnnnnnnnnnnnnnnnnnnnnnnnnnnnnnnnnnnnnnnnnnnnnnnnnnnnnnnnnnnnnnnnnnnnnnnnnnnnnnnnnnnnnnnnnnnnnnnnnnnnnnnnnnnnnnnnnnnnnnnnnnnnnnnnnnnnnnnnnnnnnnnnnnnnnnnnnnnnnnnnnnnnnnnnnnnnnnnnnnnnnnnnnnnnnnnnnnnnnnnnnnnnnnnnnnnnnnnnnnnnnnnnnnnnnnnnnnnnnnnnnnnnnnnnnnnnnnnnnnnnnnnnnnnnnnnnnnnnnnnnnnnnnnnnnnnnnnnnnnnnnnnnnnnnnnnnnnnnnnnnnnnnnnnnnnnnnnnnnnnnnnnnnnnnnnnnnnnnnnnnnnnnnnnnnnnnatagggctcccttcatcctcccctaggtaagcaacaagttttttaataaatcctacatggaatcctggagaaaaccccttttggcctttccaaaaccgtgtaaagggaccctaac

SEQ ID NO: 39970 - DNA, 649 bp, Macaca Mulatta
  misc_feature (1)...(649): n = A,T,C or G
gctgaagatgaatccccagcaacaacgcatggccgctatagggaccgacaaggagctgagcgatctgctggacttcagtgcgatgttttccccacctgttaatagtgggaaaactagaccaactacactgggaagcagtcaattcagtggatcaggtatggatgaaagaggaggtacaacatcttggggaacaagtggtcaaccaagtccttcctatgattcatctagaggttttacagacagccctcattacagtgatcacttgaacgacagtcgattaggagcccatgaaggcttgtccccaacacctttcatgaactcaaatctgatgggaaaaacatcagagagaggctcattttccctgtacagcagagatactggattaccaggctgtcaatctagtctcctgagacaagatctggggcttgggagcccagcacagctatcttcttcaggaaaacctgggacagcatactattcattctctgctacaagttccaggaggagaccactccatgactctgcagcacttgatcccttgcaagcaaaaaaagtcagaaaggtgcctcctggtttgccttcttctgtatatgcaccatccncaaattcagatgatttcaaccgtgaatctcctagttatccatctcct

SEQ ID NO: 39971 - DNA, 773 bp, Macaca Mulatta
  misc_feature (1)...(773): n = A,T,C or G
gggcttgtccttatgtttgtagttttggttaaatattttctacagattgcttcacttcccctttcccccaataacaagttcatattcttgtaatgtttactttggtcaacgtggtaacttttggaagaaaatgccaaaatgtaagcttctcacaagcagcaaaggaatgtaactaactgcctgtagctaccacatcaagggaaagaagaggcttccgtactttgggttggtctcaccgtacaaaaaaagtgtacccctattgggagaaataagggatacttgaaggtttctcattttgttacacttggttcatgtgcaaggttgaaccatatgaaactgccagtgttcaaccattgctgatctgcaaaagcgacaatatcatatgcctcaacctaatacttacttttaaatgtgggttaaaatctctgtgaggcaaagggataatgttctctaggaactcacttttgagagtatttttctctaactcatgtggatctaaattttaaaaataggaatgaatctcttaattgcagcttgtggagagtgtaaaacattttgagcacaacatgcagcacataacttttcagattgtgtttgcatagaaaaggctaaaatcaattctttcagttactgtattgttcatttattgtgaaggtcttcctacatttgagactagaccctttaacataggctgcctttagtaacaaatanaacagatgtctcataagattaactgttctaaaagaacatgtgtcttggcaaatgccatggaa

SEQ ID NO: 39972 - DNA, 639 bp, Macaca Mulatta
tctagctatcataatagattctagacaatcagctgttattcagtgagtcggtgatctgggggataatctcttgtgtaaaaaacacaaattctcactttaataagtgacttttgtaaaccaagagctttccttgtccaaattttcattataggttaatgatgaaatggcaggtaattcacacttttggacagagcacaccgcccccgtggaatcaccctacagaagaggccagctataaaggatgtctcacacctttaagatcagtgtttctcaatgtgtggaccatggatacctgtattagaatacacaaaggatttgtttaaaattcaggctgagcccctcccaagacctaatagagctaaaagctttgggagtaggtggaggaaacctgcatctttacccagcaatccaggtaatttatatgcatactacattttgagacccactgatgaaagaattctaattttctatagagttactctagcaaggaaccttctcatttcttatatattaggttatttctacatgggacatttgccagtagaccatattatttatggtatcttactaggtggaagccaaaagaaccattaaataatctgctggtgttaggagggtaagtttgcactatttcttaca

SEQ ID NO: 39973 - DNA, 349 bp, Macaca Mulatta
tcactttctatttttaaaagactactctgaaaaacactccttgggaaataaatgtattatgtatatacttatatactgacagttcatacaagcacatgtgtaatatttctattataaggacaaatattgacccttgcatttgataatttttaaagatatttaagctaacattttctcagccacatttttatataaaaccaaattttatgtaaaaactaggcttcaataagttaaactttttaaattgtaagacaaacttttttatgtaaaagaattcttatatcccatcaaacctaataattttccacaactaaaaatgagtataaatacataattttaagtgtatcct

SEQ ID NO: 39974 - DNA, 644 bp, Macaca Mulatta
gtggtagttactttataccttcagatgtaatttgcatttcagtcacttatagtaaatacagtatagtaaatatttgttggactaaacatctcaataataggacacagataaattatgcaacagcctgcttttatgaaagctggtgcattatgtaagctgccacagttaatactttgtattaacattgcttacttccccatttgcttcacctatcttgactacagttgctggaaccattctttttgtggtgcttcctccaagtgaaataacttattaaaacctactggattaattttatcaaataccagacttactgatctgttggcagagatttattggtgtctcagtgtgatcacaatacaagttgtagcaaccattttataaaactcttagagaattatgtagatcaaatggaaattacataatcctaaaacatttttgagggctaattgataatttcagcaattttatcaagaacccaataaattaatccctaatttgtatgtttttttgttcaacttaccatgtctacaaccattatcaacactattttattacatatagacttaactgattctcagcaattactacagtgtgtcttacagcgttataaaaaacaaacagcaatctctgtgtctgccaga

SEQ ID NO: 39975 - DNA, 647 bp, Macaca Mulatta
  misc_feature (1)...(647): n = A,T,C or G
agaaatagataccagcctgagcaacatagcgaaatcccatctctnnnnnnnnnnnnnnnnnnntggttgggcatggtggcacacnnnnnnnnnnnnnnnnggnnnnnnnnnnnnnnnnnaaggatcgcctgggcccagggaggtcaaggctgcagtgagccacggtctnnnnnnnnnnnnnnnnnnnncatgacagagtgaggcnnnnnnnnnnnnnnnnnnnnnnnnnntagataatctgaatagccctatatctatagaaacttaatagtgctgggaaatataggtattattatcctcattttacagatgtgaaaattgaggcttggagatgtaaagtctattgctcaaggtcatgtggctagaatatggctgagccaggattcaaatccaggtcttctgattcttattccagtgtcctttctagcataccatattgcctctaaagattgcagctcctcatttactagaaatttgttcctgcccaatctacatctccacctcaccccatcttttcttaagcactatgtttatgttttcatcagtattatattcattgtctttggaatacatgttcttgtncgtgtctggaaaaaaatctcttttaccagctttgcactcggaccaacttggaaaacacaaacaaa

SEQ ID NO: 39976 - DNA, 914 bp, Macaca Mulatta
cacacggaaacgtgtcccggcagatggcagtcaggcggacggggtcggacgacgtgagtgtgacccggcgggaccggtgcggccgacgggcgcgcgtaaggtcggcaaggccagacgcgtccggtgacacgggggcgcccgtggagccggattacaccacaacacggcggacgggcgcagcaagcaaggggtcgggtacgatattagcgcccgctcgcacgagctgccccgtgtcgcccccgaaagggcgctgatacccagaccggggccagcccgtccgcagagcgctgcgacacggtcacgccgtgcatgcgaagcaccggcttttcctccgctccgtttgcttggtcgccggtccagccgcgactcgttaccccgcaccccagagggagagtgcacgcgactttcctcgaattactgctggccctaggagacagggacccagcggtgagtagggcgtgagggagcccagggccagaaccagagcgcatatcgtttgtgggttgtgttcactgtgcgatgccagcggcgccaggttttggttgggccaaacattcggcctccacgacacatgtttccaaaagcaccctggccagagcggtgagtcccaccacctcgaactctgggaattcgagccacagctctgccagtaccccaagactcagcactggtctgatgacctgctaattcactgacagcgtagggctgtctgttgtttttgcgcaggttggtgtgaacaaagttcacaatatctggtcgaataggagccttgaatacagcaggcaaagtgacatttttgccagatgactcccccttttcggagtacaccgatatcagtgggcgagcacaagccatggcggagagaggagaaaaccacgttcctctcaccccggatgctgctacaggaaaagccc

SEQ ID NO: 39977 - DNA, 773 bp, Macaca Mulatta
  misc_feature (1)...(773): n = A,T,C or G
gggggcaaaatgagtaaatgcaccaagacctagattcaagagaaaacttgcctggcttctactctcatggagattcttggtgctggaatagaaaatatagagataaagctagaggagtgattatatcatgaagactcttttatgttttgctataaaatgtatacttaatcataaacagcatatgaaaccacaatgaagaatattaagcaaggaagcttataaacaatgaacaagcaaacggaataatataatttaatagcatatgttcaaaagagtacctcgacatgtaataaacataaatataccaatgatatagcttacattatttttattgttatgtgtttggaatttgatatgtattttagacatgttacacatataaatttggattaggtacatttcaagtgttcattaactggacatagtgagtggctacctcgttagacagtgcaattctaattcttacctagcaaacctctaagtctgaaagaatctacctcagtctaatcctttctgaaactgggtagataattttgcctaattctggaatttagagaactggcacatatgggctcacaccaaaccacatctgcaaattaaatgataaatgattataatcaaataatattaaatgatgaataatgttatttattcaatgattattttttattaaatgataatatcatttgatatttagcttcattttaatatattatttaacaaataatacattttatcatcaaatgctatttattaaaactatttagntgatc

SEQ ID NO: 39978 - DNA, 642 bp, Macaca Mulatta
aattttggtttttcttttattcctgagggtggcatgaatccaccaataaatgctaatgcttctttcattccacaggttactcagcctagtgccactcgaactccagccctcatcccggtagatccgcaaaatactctgccctccttctatcctccatactctcctgctcatcctacactgtccaatgatatttcaatcccctattttcctaatcagatgttctcaaatcccagcacagagaaggtaaacagtggaagtttaaataaccgatttggatcaattttatctcctcccagacctgttgggtttgctcaaccaagttttcctcttctcccagatatgccaccaatgcacatgaccaactctcatttatccaattttaatatgacatctttgtttccagaaatagctacagcgcttcctgatggctcagcaatgtcacctttgcttacgatagcaaattcctctgcctctgactcttccaagcagtcctcaaacagacctgcccataacataagccatattctaggtcatgattgcagttcagctgtttaaatactgataagcgaaatgtagaggtaatgagattacaaatgtatttgtgtgtgcgtgtgcagagacatgtacatgaagagaaggatt

SEQ ID NO: 39979 - DNA, 800 bp, Macaca Mulatta
  misc_feature (1)...(800): n = A,T,C or G
gggtctcccaactccacagtatctctgttgtgggaaacacctgggtttttgcactacatgggagaaagacccggaaactatttgggttgttttcaacttttcatttggatgtttagcgttgcacacacacatccacaggtggaagagacgcctggcgaaaacacctgtctgctttctaagccagtgaggttgaggtgagaggtttgccagagtttgtctacctctgggtatccctttatctgggataaaaaaatcaaaccagaaggcgggatggaatggatgcaccgcaaataatgcattttctgagttttcttgtttnnnnnnnnnnnnnnnnnnnnnnnnnnnnnnnnnnnnnnnaataacatggccaatttgttacataaaatgactttctgtgtataaattattcctaaaaaaaacctgtttatataaaaaatcagtagatgaaaaaaatttcaaaatgtttttgtatattctgttgtaagaatttattcctgttattccgatatactctggattctttacattatggaaaanagaaactgtctattttgaatggctgaagctaaggcaacgttagtttctcttactctgcttttttctagtaaagtactacatggttttaagnnttaataaaagatttctgtatgcnnnnnnnnnnnnnnnnnnnnnnnnnnnnnnnnnnnnnnnnnnnnnnnnnnnnnnnnnnnnnnnnnnnnnnnnnnnnnnccnannaaaannnnnnnnnnnnnnnnnnnnnnnnnnnntttttcgggccgccccttggccccctccaaaag

SEQ ID NO: 39980 - DNA, 757 bp, Macaca Mulatta
  misc_feature (1)...(757): n = A,T,C or G
ggggcatcgtggacttttttctactcaattccagccaatnnnnnnnnnnnnnnnnnnnnnnnnnnntctaatcagttgtacacatactgaaacttatagccatggccagattttatgctaaaaatggtagtttgtcaaagacaaaattctcttagaatctaatccaacttgccagccctgaaaaaatccctttaaggccacggaaagctgaatgctagcagccaggcctgtggtacttccatgaaaaactataggagacaatgccctcccaagtactgaaatcacactggaatcctccatgttgggttcatttgattgtttaacacaggacgtgttgtgtcattctgaagtttttatttggggcagaagtctttatggagatgtaaatgacagcatttctgggttatgcataacttctcactggttggagagacaccggtgcgttaagcatggatattgcattgcaagacttgaatctataaacattagaatcacacagtcagtactacaagcaaaacagagaacctgaaagaaggttcacagactgtaagaaaaaaccccagtttgtgatatttcagtgatttccaaagaacattctaggttnnnnnnnnnnnnnnnnnnnnnnnngnnnnnnnnnnnnnnnnnnnntgcaaaaaattggggggaattttcatattcataatggttcccaatccattttcagtaccccacatttttatnnnnnnnnnnnnnnnnnnnnaccaatggcgggaaggaa

SEQ ID NO: 39981 - DNA, 798 bp, Macaca Mulatta
gggctttttcgcaacgggtttgccgccagaacacaggtgtcgtgaaaactacccctaaaagccaaaatgggaaaggaaaagactcatatcaacattgtcgtcattggacacgtagattcgggcaagtccaccactactggccatctgatctacaaatgcggtggcatcgacaaaagaaccattgaaaaatttgagaaggaggctgctgagatgggaaagggctccttcaagtatgcctgggtcttggataaactgaaagctgagcgggaacgtggtatcaccattgatatctccttgtggaaatttgagaccagcaagtattatgtgactatcattgatgccccaggacacagagacttcatcaaaaacatgattacagggacatctcaggctgactgtgctgtcctgattgttgctgctggtgttggtgaatttgaaagctggtatctccaagaatgggcagaccccgagagcatgctcttctggcttacacactgggtgtgaaacaactaattgttggtgttaaccaaatggattcaactgagccaccctaccagccggaagagataccaggaaaattgttaaggaaatcagcacttacatttctggttggaatggtgaacaacatgctgggaaccaaatgctaaacatggccttgggttcaagggatgggaaagtccaccccttaaggatgggcaatgcccagtgggaaaacacgccggccttgaggcctctgggactggcatcctaaccacccaaattccgtccaaattgaaaaagccctttgcgccctggcct

SEQ ID NO: 39982 - DNA, 703 bp, Macaca Mulatta
gccagtgacttgattgtaaaaacttttctgagcggaatcatatgctggtctccaagagtttaaagcagccattgaagatttaaatgcagttctttttcaacttccagattggcctgaggtctacttcaggaaaggaaaagtgctctacgatgctggttttttaggtgatgccttacaactctttcttcagtgcttagcccttgatgaagattttgcacctgcaaagctgcaagtacaaaagattttatgtgatttattattacctgaaaacttaaaagaaggcctgaagggatcttcctggagttcattaccatgtactaaaaacagaccttttgattttccttcagtgatggaagagtctcagtctcccagtgaacctagcccaaagcagagtgaagaaataccagaggtcacttcagagcccgtcaaaggaagcttaaaccgtgctcagtcagcacagtctataaattcaacagaaacgcctgccagagaggactgtttaaaaagagtgtcctcagaacctgttctgtctgttcaagaaaaaggtgttctgctgaaaagaaagttgtctcttttagaacaggatgtgattgtaaatgaagatggaagaaataagcttaaaaaacaaggagaaactcccaatgaagtctgtatgttttccttagcttatggtgatattccagaggaattatcgatgtctcag

SEQ ID NO: 39983 - DNA, 788 bp, Macaca Mulatta
  misc_feature (1)...(788): n = A,T,C or G
gggggtaaagaagtcatatatataattatactatatagtgtatatatatattatatagtgtatatattataatatatatagtataataatttattgaaatactattcagccattaaaaagaatgaaattctgtcattcttgacaacatggatgaaccaggacgacattatactaagagaaataagccaaacatctaaagaaaaatgccacatcatctcatttgtatgtggaatctaaaaaagttaaattcataggaatgactagtacgatggtggtttccaggagcttggttggggttagggaggacagggaatggggagacagtggccaaagagtatgaagtttcgattagacagtatgaataagttatgaataagttctggagctctattgtacagcatggtgactatagttaatgtatgcttgagaattactaagagagtagatcttaaatattcttaccacaaaaaataaggatgtgaggtgatatgttaattagtttgagttaatcatttcacattatacacatatgtcaaaacatcacattgtacacagcaaatatataaaaattttatttgtcaattacacctttataaaactggnnggaagaataaganagagagtatgggggaaaatgtgaaaatcaaggctcactaagggggtatcctctgtgtttggaaatgggtccctagagaactacancaactaggaaaaaagtggactgaaaaatagaccaattagactgggcttattacaagggnctcctaagccccccctttaaaaaattc

SEQ ID NO: 39984 - DNA, 613 bp, Macaca Mulatta
  misc_feature (1)...(613): n = A,T,C or G
gggtaaattaggtgggttataaaggaagaggtcagtttgagagtttgtttaaactagataagagttgaggcttgattagaaggaaacaaagagtttctaaaattaaaataaagaaaaactacatctgtttaaaggcaaaattttaagtctgttgcattaatctgcttaggctgccatgacaaaaatctcacagactgagtggctgaaacaagagactattttctcacacttctggaggctaggagtccaagatcaaggttctggcaaattcgggttctagtaagggctcccttcctggcttatggatggctggcttctcactgtgtcctcatatggcctttcctttatgcacacatagtggggagagggtgggagttgggtggagttgttgggggagctnnncngncnnnncctcctctctctcggtccccttttcttgtgtgtctcgccccccctcttgtgctttccctttttgtttgtttcttgtgcgttttttcttcccgtgcccctcgcgcgttgtcctcctttttcttcttctccccttcttcttttttttcgtttttctctctttctcctgtttttttttctctccttttttctcttcgtctttctn

SEQ ID NO: 39985 - DNA, 835 bp, Macaca Mulatta
  misc_feature (1)...(835): n = A,T,C or G
ggnnnnnnnnnnnnnnnnnnnnnnnnnnnnnnnnnnnnnnnnnnnnnnnnnnnnnnnnnnnnnnnnnnnnnnnnnnnnnnnnnnnnnnnnnnnnnnnnnnnnnnnnnnnnnnnnnnnnnnnnnnnnnnnnnnnnnnnnnnnnnnnnnnnnnnnnnnnnnnnnnnnnnnnnnnnnnnnnnnnnnnnnnnnnnnnnnnnnnnnnnnnnnnnnnnnnnnnnnnnnnnnnnnnnnnnnnnnnnnnnnnnnnnnnnnnnnnnnnnnnnnnnnnnnnnnnnnnnnnnnnnnnnnnnnnnnnnnnnnnnnnnnnnnnnnnnnnnnnnnnnnnnnnnnnnnnnnnnnnnnnnnnnnnnnnnnnnnnnnnnnnnnnnnnnnnnnnnnnnnnnnnnnnnnnnnnnnnnnnnnnnnnnnnnnnnnnnnnnnnnnnnnnnnnnnnnnnnnnnnnnnnnnnnnnnnnnnnnnnnnnnnnnnnnnnnnnnnnnnnnnnnnnnnnnnnnnnnnnnnnnnnnnnnnnnnnnnnnnnnnnncctttatataccataggcctttccatggggagctcgagcgttaattaaatggaatcaaaaattcccttcattagatcaggcctcaatgtcgtctaaattactaacgacaaactttaaactatagtaaaccaatccaagttcggtgttttaaaaaacccccactcacaattgtaatatttgaaccaaccttccgaagcaaaaggtataattcaatagaagtaacacgccttccatatataatttaccgagatgcccacatatgagaagtaaaaaaggaattcctcctgatgagaagaatgcataagttatcn

SEQ ID NO: 39986 - DNA, 178 bp, Macaca Mulatta
gggcagtgctccaggcctgcttggtgtggacatggtggtgagccgtgtcaaggaccagaatggatcacagatgatcgttggccaacaggtggcagaagaggaattcctgccttcctcaagaggaacacctaccccttggctaatgctggggtcggattttgatttatatttatctttt

SEQ ID NO: 39987 - DNA, 243 bp, Macaca Mulatta
  misc_feature (1)...(243): n = A,T,C or G
ggacagaaggtctcacggatggccccgctgccaggggcagaactggttcagaggccactgcagctctaccgatacttgctgcgctgttgccggcagctgccgaccaagggcatccagcagcattacaagcatgctgtcaggcagnnngcagagttttcgggttcattcagatgaagacaaccctgagagaatccagcagattattaaaagggccattgaagatgctgactggatcatgaacaa

SEQ ID NO: 39988 - DNA, 102 bp, Macaca Mulatta
gacatgaagcagacagtggctgttgggaccatcaagattggagaaaaaagcagctactggcagcagggtcaccagggcagccagcaaggcagccaggaagtg

SEQ ID NO: 39989 - DNA, 821 bp, Macaca Mulatta
ggggagctgacttccggcggcttgtgggagtgctgcttctatcgtccttacgggtgaggagatggttgtcttggttactggtcctaacggtcccctgtcctgaaatcccttgttgagggcctgcaaccttgagcttccgactggagacgcctttggtccctcgaagtatctgcactggccgctggtcaagcgttcagtgtggagtaattgactctttcgagaatactaaaatcgaattagagaagaaaactgatccataataataaaaatgtctcgaaaaatttcaaaggagtcaaaaaaagtgaacatctctagttctctagaatctgaagatattagtttagaaacaacagttcctacggacgatatttcctcatcagaagagcgagagggtaaagtcaaaatcaccaggcagctaattgaacgaaaagaactacttcataatattcagttactaaaaattgagctatcccagaaaactatgatgatcgacaatttgaaagtggattatcttacaaagattgaagagttggaggagaaacttaatgacgcacttcaccagaagcagctactaacattgagattagacaaccaattggcttttcaaccagaaagatgccggcaaatattcaggaattaatgaaaacaagaaatggaaaaccatttttgtttggagacagaaaacaacctgggaacgagaacaaatcctttcagcttaaagagaaacaaggctgggaagaatgtttcggtcgcaaaacctcgcgtggacctcttggaagtttgacgtggacaatatattaaattatattccttttcctgag

SEQ ID NO: 39990 - DNA, 648 bp, Macaca Mulatta
gtgggtgcaggacaggaaaggatccgagacaccccactaccaccactcggaaagccccgagtccagatcgactagggaaaggcttagacactttattgtatttaaagagcatttcagttaacattttcaactatttttaaagtttgtgaatggaggttattttggacattcttaaatatgaattctccaaaggcatttagccttgacttaatattgaatcctaaggattttatgtaaggtttttttgcaacctatttaatttttttatatgcctaacttctgaggtgcataagcccgtggtttgtgtactggaacgaaagtggaactcactgattcatattggatccccaggtatacctcctgctggtagcatatggctggaaaaggccgtttgcctcacacattgtaacctgccttggctagcaaatgctttaaatgtctcaactctctcttttctgtgtcatgaaatctttaagattggcggacggaacaggtattttagtgagacatttcttgagtacttgctttttccttttacttctaaccaactaaaagataaggaggtcctcatgttggtattttgcttggttttattttactgattttaaaaggtatgtagacaaatgtaggcctttaaaaagaaacagc

SEQ ID NO: 39991 - DNA, 690 bp, Macaca Mulatta
ccctctccaggctacagggttgtacctgctgagtcctcaagctgtttggcctctctggtccgtcttgggcattagattctccagcagagctctggccagctgcctcctctttaactgggaacacgggctctcacaagatcagaacccccactcacccctgagatcttatctagcaagcctgtagtattccgtttctgttgtaggaagagcgcgaggcatccctgaattccatgcatctgctggaaatgagccgtgtcagatcgcacacccccgcgcccccatgcccctctgagtcacacgggacagaggaggcagagcttccgcccactgttatcttcaatttctttgtccagtcttttgtttttaataagcagtgcccctccccactcttctttttaatgatttttgtagttgatttgtctgaactgtggctactgtgcattccttgaataatcacttgtaaaaattgtcagtgcttgaagctgtttcctttactcacattgaagggactttgttggttttttggagtcttggttttgactccaagaacagagtcaggaagaccccaagcatagacttgggtaccgtgaaaatggctgcagtccagttttatgattccgcttttatgtgtcccttgataacagtgacttaacaatatacattcctcataaataagaaagaaccaagaat

SEQ ID NO: 39992 - DNA, 782 bp, Macaca Mulatta
gggactgtacggtgagtcttttagcctcacctgcagcttcgcctccctgcacctgcatctgtgctgttctcccagcactgcggactcgactcgagggtgacgcttgcttcgctcgtcatggcctacccgggatacggaggcgggtttggaaattttagcattcaggtgccaggaatacagatgggagagccagtgccagaaacaggtccagccgtactcctcgatgaatactgtgggttcccagcattttcagacgcttattcctcagctggtgactccgtgtatacttacttcagtgctgttgctggacaggatggtgaactggatgctgaagaacttcagagatgtttgacacagtctggaattagtggaacttactctcccttcagtttggaaacctgcagaattatgattgccatgttggatagagattacacaggaaaactgggatttagtgaattcaaagagctatgggcagctcttaatgcctggaagcaaaacttcatgactgttgatcaagatggaagtggcacagtagaacatcatgagttgcgtcaagccatcggtcttatgggttataggttgagtcctcaaacaataactactactattggttaaacgttacagcaagaatggcagaatttttctttgaagaatatgtttgcttgctgtgtgagctcgacatgacgattctttagaaagaacactgcacaaggctggattcagtagagatttttgaggacttgcaatgaagtcgaatcaacgaagacggatctgctgaa

SEQ ID NO: 39993 - DNA, 774 bp, Macaca Mulatta
  misc_feature (1)...(774): n = A,T,C or G
gggagccctggcctccaggctccttgtgtggacagactcatggcagctcttcctgccctccctctcccggagacccctccagtctgggcctctcgggtcagagctgactgccgtcccccagctggtacatgtgcttgcggctctggtggctgggtttggttattaacaatgaattattaaaggaatgtgaatagggagggaggtttgtctctcacacactcgcgcacacacacagccacttctcgaagcagctcttaaagttgcttctgctgccgctgctgtacctttgcttacctcagatcttagaactgtttccagtagtttttgagtgaattcccagctctcccctttccaccttaagactctctagatagctccttcctcccctctcacctggtcccaaacctctttcctctggctccatgtgccagttcttgactttctctgagaccggttttcccctctgaagtcctcgttcagtggaggggtagctagaggcccaccaggtacccagtcttggtagtgtcacatgccacagcatgacagtaacatgaggaacatnctccttccttgtcaccactcttttggggctggaagtccactttgagccatgaaaagttcaaggaggcccaaagcccgccctcttcaaacctctgggaacgcaacaagggggccttaaatttcccccaaatcaagcctttaaggttgggttcccaaaggaaattttggaaaaaaagtgttgccccgtggggtaacaataaaaaaggattccct

SEQ ID NO: 39994 - DNA, 615 bp, Macaca Mulatta
cacaagtctccagaaccgctgcgtgagcatcaaaccctatgtcagcactttaatgggtgtccttgggaggaccatgggagtgatgttcacacctctgacagtgatatatgcatactattgacactgaacacattgaagttgacctgattatgaagacctgttttaaccccaactaaggtatcggactctcaagtgagttgcagcaagtaggaggggcatcagcttgcatccaggatgccctaagcacagtgttgcaatatgtagaggatgtactgtctggaaagatgtcagctgacaatactgtgggccacttcttaacgagccttgttaagcaagtacccaaaatagttcccaatgatttcgagaccatgctcatcagcaacatcaatgacctgctgatggtgacctacctggtcaatgtcacacagtcacagactgccctcaatgagaaacttgtaaacctgtgaatgggccccaagcagttcacctgccggtataggtctcaaccccaggactcagaatgaaatgagggagaaatgggttttttgtggtcttgagtcacactgagacagtgaactgcttgtgactctaataaacatagcctaccttttgtaa

SEQ ID NO: 39995 - DNA, 420 bp, Macaca Mulatta
atggcctccctgctcctcttctgtgtgaccttttgtctcctgggaacagggtccatggatgctgatgttacccagaccccaaggaataagatcgcaaagacaggaaagaggattatgctggaatgttctcagactaagggtcatgatcaaatgtactggtatcgacaagacccaggactggggctacggttgatctattactcctttgatgtccaagatataaacaaaggagagatctccaatggatacagtgtctctcgacaggaacaggctaaattctccctgtccctagagtctgccacccccaaccagacagctctttacttctgtgccaccagtgacctcaggacagggaaggacaatcagccccagtattttggagatggcactcgactctccgtcctagaggacctgaaaaag

SEQ ID NO: 39996 - DNA, 632 bp, Macaca Mulatta
ttttgggtgaagggtgatttctgttgacaaatctgtgcttcagtcatagatgttaatagaggaagcaattttcctgctgcagatccctgaagagagttgctgaaacagtctagttccagactcaggggaggtcgaaggccagtctgtagaaaggctgaggcaacggggaaagacttgacagctagttacatatgctctgacatggtacccccatgatggcttccagtgacacatgtgctgatagaattctaaacctctggaatttccctgctggttaattctgtggcccttgactgtacagggtgacctgatgccagatgctgtgggcgtgatgagaactagagaacttgcagtgtggaggaagctgtgtgaggcaccagaccctgtgcttctgcaggccatttcctgaaaacccctgttagaaaggttgggtttagtgtgacttgcttgagcaagagtccttgggagagattttgaggtttaatttaacagtatctccagagctaacagtgactccattcagctagttccgcaagtcagatgtaaacttagagtctcctttgtgaagggtttgggtctgagctgtatagtacgtcagtgggtaagcccaggccttcatcctctgatagata

SEQ ID NO: 39997 - DNA, 1831 bp, Macaca Mulatta
  misc_feature (1)...(1831): n = A,T,C or G
tcttcagagataccttgtctgtcaccagcctccaccctcatattccttccacaagcaactgtgcacctaacccaagttaaaaatgaaagggctgccaatcactcggactccagaagaggcctgccctgcgaaaagctggcatgttacctcccacatacatttcctgtcatgctctccaaatctgggagattttgctctggagtattttcaagaaagcgcattgtgttttaatgaagtatttttcagggttcaaatgttattttttataaatgcagcattttaatggcaaattcaatatgaaggacatgtcttcctgggctctatatttgcttttggaaggcagcatactctaggannnnnnnnnnnnnnnnnnnnnnnnnnnnnnnnnnnnnnnnnnnnnnnnnnnnnnnnnnnnnnnnnnnnnnnnnnnnnnnnnnnnnnnnnnnnnnnnnnnnnnnnnnnnnnnnnnnnnnnnnnnnnnnnnnnnnnnnnnnnnnnnnnnnnnnnnnnnnnnnnnnnnnnnnnnnnnnnnnnnnnnnnnnnnnnnnnnnnnnnnnnnnnnnnnnnnnnnnnnnnnnnnnnnnnnnnnnnnnnnnnnnnnnnnnnnnnnnnnnnnnnnnnnnnnnnnnnnnnnnnnnnnnnnnnnnnnnnnnnnnnnnnnnnnnnnnnnnnnnnnnnnnnnnnnnnnnnnnnnnnnnnnnnnnnnnnnnnnnnnnnnnnnnnnnnnnnnnnnnnnnnnnnnnnnnnnnnnnnnnnnnnnnnnnnnnnnnnnnnnnnnnnnnnnnnnnnnnnnnnnnnnnnnnnnnnnnnnnnnnnnnnnnnnnnnnnnnnnnnnnnnnnnnnnnnnnnnnnnnnnnnnnnnnnnnnnnnnnnnnnnnnnnnnnnnnnnnnnnnnnnnnnnnnnnnnnnnnnnnnnnnnnnnnnnnnnnnnnnnnnnnnnnnnnnnnnnnnnnnnnnnnnnnnnnnnnnnnnnnnnnnnnnnnnnnnnnnnnnnnnnnnnnnnnnnnnnnnnnnnnnnnnnnnnnnnnnnnnnnnnnnnnnnnnnnnnnnnnnnnnnnnnnnnnnnnnnnnnnnnnnnnnnnnnnnnnnnnatctgggctgctaggaaggggcaatcaccccatcctagtacctttctagcccttcctcatgacattaccgtcctcccggtgaaggcttatgaagcaagaatggagagtccaagtttgttatcatcaaacccatcttgtaaatcaggaaacacattaaccttccatcagtcagagaaatgctgtggctgtgtgtttccttcatgctctccctcctgagggaggagaagaccctgcttaactttgctgcccaccctgcagtgacccctgaatgccacgccatgggaggactcattcattggcttcgtagtggcaaatattcctctagttctataactcaactagacattttgtagtaaagaattcttgaaattctctaataaaaagcaattcttactgtaatatttttagtttggggacacaatttcctaaggggggattaatgaacatttttatgcattagcccaatttatgaatttcatgtttattatatggtagcactgatgaaaagtacctttctatctgtatctttgcagtttcttcgttactcatacgtaagcttcatggtgagcagtgctctagtgactgcttctctgtacaaatctcatcgttctacttacctgtcaaagcacattctacatgtactgtaaacaaatacactttagtaagatttagtcttaaggatttttccacttttgtcagtaacagatatttatggattaaaaaataaagccgtttcaaca

SEQ ID NO: 39998 - DNA, 6723 bp, Macaca Mulatta
  misc_feature (1)...(6723): n = A,T,C or G
cagagtgcacatttggccatgatagataccctcatgatggcttatactgtagaaatggtcagtaatagaaaaaagtaattgcgtgtgctcagcagtattcagcttttttccaagccacggatctgccttatgatatcgaggacgctgtcatgtactggataaataaggtantaaggtaaatgaacatttgaaagacataatggaacaagaacaaaaactgaaagaacatcacacagttgaagctccaggaggtcaaaagnnnnnnnnnnnnnnnnnnnnnnnnnnnnnnnnnnnnnnnnnnnnnnnnnnnnnnnnnnnnnnnnnnnnnnnnnnnnnnnnnnnnnnnnnnnnnnnnnnnnnnnnnnnnnnnnnnnnnnnnnnnnnnnnnnnnnnnnnnnnnnnnnnnnnnnnnnnnnnnnnnnnnnnnnnnnnnnnnnnnnnnnnnnnnnnnnnnnnnnnnnnnnnnnnnnnnnnnnnnnnnnnnnnnnnnnnnnnnnnnnnnnnnnnnnnnnnnnnnnnnnnnnnnnnnnnnnnnnnnnnnnnnnnnnnnnnnnnnnnnnnnnnnnnnnnnnnnnnnnnnnnnnnnnnnnnnnnnnnnnnnnnnnnnnnnnnnnnnnnnnnnnnnnnnnnnnnnnnnnnnnnnnnnnnnnnnnnnnnnnnnnnnnnnnnnnnnnnnnnnnnnnnnnnnnnnnnnnnnnnnnnnnnnnnnnnnnnnnnnnnnnnnnnnnnnnnnnnnnnnnnnnnnnnnnnnnnnnnnnnnnnnnnnnnnnnnnnnnnnnnnnnnnnnnnnnnnnnnnnnnnnnnnnnnnnnnnnnnnnnnnnnnnnnnnnnnnnnnnnnnnnnnnnnnnnnnnnnnnnnnnnnnnnnnnnnnnnnnnnnnnnnnnnnnnnnnnnnnnnnnnnnnnnnnnnnnnnnnnnnnnnnnnnnnnnnnnnnnnnnnnnnnnnnnnnnnnnnnnnnnnnnnnnnnnnnnnnnnnnnnnnnnnnnnnnnnnnnnnnnnnnnnnnnnnnnnnnnnnnnnnnnnnnnnnnnnnnnnnnnnnnnnnnnnnnnnnnnnnnnnnnnnnnnnnnnnnnnnnnnnnnnnnnnnnnnnnnnnnnnnnnnnnnnnnnnnnnnnnnnnnnnnnnnnnnnnnnnnnnnnnnnnnnnnnnnnnnnnnnnnnnnnnnnnnnnnnnnnnnnnnnnnnnnnnnnnnnnnnnnnnnnnnnnnnnnnnnnnnnnnnnnnnnnnnnnnnnnnnnnnnnnnnnnnnnnnnnnnnnnnnnnnnnnnnnnnnnnnnnnnnnnnnnnnnnnnnnnnnnnnnnnnnnnnnnnnnnnnnnnnnnnnnnnnnnnnnnnnnnnnnnnnnnnnnnnnnnnnnnnnnnnnnnnnnnnnnnnnnnnnnnnnnnnnnnnnnnnnnnnnnnnnnnnnnnnnnnnnnnnnnnnnnnnnnnnnnnnnnnnnnnnnnnnnnnnnnnnnnnnnnnnnnnnnnnnnnnnnnnnnnnnnnnnnnnnnnnnnnnnnnnnnnnnnnnnnnnnnnnnnnnnnnnnnnnnnnnnnnnnnnnnnnnnnnnnnnnnnnnnnnnnnnnnnnnnnnnnnnnnnnnnnnnnnnnnnnnnnnnnnnnnnnnnnnnnnnnnnnnnnnnnnnnnnnnnnnnnnnnnnnnnnnnnnnnnnnnnnnnnnnnnnnnnnnnnnnnnnnnnnnnnnnnnnnnnnnnnnnnnnnnnnnnnnnnnnnnnnnnnnnnnnnnnnnnnnnnnnnnnnnnnnnnnnnnnnnnnnnnnnnnnnnnnnnnnnnnnnnnnnnnnnnnnnnnnnnnnnnnnnnnnnnnnnnnnnnnnnnnnnnnnnnnnnnnnnnnnnnnnnnnnnnnnnnnnnnnnnnnnnnnnnnnnnnnnnnnnnnnnnnnnnnnnnnnnnnnnnnnnnnnnnnnnnnnnnnnnnnnnnnnnnnnnnnnnnnnnnnnnnnnnnnnnnnnnnnnnnnnnnnnnnnnnnnnnnnnnnnnnnnnnnnnnnnnnnnnnnnnnnnnnnnnnnnnnnnnnnnnnnnnnnnnnnnnnnnnnnnnnnnnnnnnnnnnnnnnnnnnnnnnnnnnnnnnnnnnnnnnnnnnnnnnnnnnnnnnnnnnnnnnnnnnnnnnnnnnnnnnnnnnnnnnnnnnnnnnnnnnnnnnnnnnnnnnnnnnnnnnnnnnnnnnnnnnnnnnnnnnnnnnnnnnnnnnnnnnnnnnnnnnnnnnnnnnnnnnnnnnnnnnnnnnnnnnnnnnnnnnnnnnnnnnnnnnnnnnnnnnnnnnnnnnnnnnnnnnnnnnnnnnnnnnnnnnnnnnnnnnnnnnnnnnnnnnnnnnnnnnnnnnnnnnnnnnnnnnnnnnnnnnnnnnnnnnnnnnnnnnnnnnnnnnnnnnnnnnnnnnnnnnnnnnnnnnnnnnnnnnnnnnnnnnnnnnnnnnnnnnnnnnnnnnnnnnnnnnnnnnnnnnnnnnnnnnnnnnnnnnnnnnnnnnnnnnnnnnnnnnnnnnnnnnnnnnnnnnnnnnnnnnnnnnnnnnnnnnnnnnnnnnnnnnnnnnnnnnnnnnnnnnnnnnnnnnnnnnnnnnnnnnnnnnnnnnnnnnnnnnnnnnnnnnnnnnnnnnnnnnnnnnnnnnnnnnnnnnnnnnnnnnnnnnnnnnnnnnnnnnnnnnnnnnnnnnnnnnnnnnnnnnnnnnnnnnnnnnnnnnnnnnnnnnnnnnnnnnnnnnnnnnnnnnnnnnnnnnnnnnnnnnnnnnnnnnnnnnnnnnnnnnnnnnnnnnnnnnnnnnnnnnnnnnnnnnnnnnnnnnnnnnnnnnnnnnnnnnnnnnnnnnnnnnnnnnnnnnnnnnnnnnnnnnnnnnnnnnnnnnnnnnnnnnnnnnnnnnnnnnnnnnnnnnnnnnnnnnnnnnnnnnnnnnnnnnnnnnnnnnnnnnnnnnnnnnnnnnnnnnnnnnnnnnnnnnnnnnnnnnnnnnnnnnnnnnnnnnnnnnnnnnnnnnnnnnnnnnnnnnnnnnnnnnnnnnnnnnnnnnnnnnnnnnnnnnnnnnnnnnnnnnnnnnnnnnnnnnnnnnnnnnnnnnnnnnnnnnnnnnnnnnnnnnnnnnnnnnnnnnnnnnnnnnnnnnnnnnnnnnnnnnnnnnnnnnnnnnnnnnnnnnnnnnnnnnnnnnnnnnnnnnnnnnnnnnnnnnnnnnnnnnnnnnnnnnnnnnnnnnnnnnnnnnnnnnnnnnnnnnnnnnnnnnnnnnnnnnnnnnnnnnnnnnnnnnnnnnnnnnnnnnnnnnnaggcgtaaaactgaggaggaacgtcagaagaaagaagatgagagagcacgcagagaatttattaggcaagaatatatgaggcggaaacaactgaaactaatggaagatatggatacagtaattaaaccccgtcctcaagtagtaaaacaaaaaaaacagcgaccaaaatctattcacagagatcatattgaatcccccaaaacaccaataaagggtcctccagnnnnnnnnnnnnnnnnnnnnnnnnnnnnnnnnnnnnnnnnnnnnnnnnnnnnnnnnnnnnnnnnnnnnnnnnnnnnnnnnnnnnnnnnnnnnnnnnnnnnnnnnnnnnnnnnnnnnnnnnnnnnnnnnnnnnnnnnnnnnnnnnnnnnnnnnnnnnnnnnnnnnnnnnnnnnnnnnnnnnnnnnnnnnnnnnnnnnnnnnnnnnnnnnnnnnnnnnnnnnnnnnnnnnnnnnnnnnnnnnnnnnnnnnnnnnnnnnnnnnnnnnnnnnnnnnnnnnnnnnnnnnnnnnnnnnnnnnnnnnnnnnnnnnnnnnnnnnnnnnnnnnnnnnnnnnnnnnnnnnnnnnnnnnnnnnnnnntcaggatgccagttcagatctttgtaacttattgcccagaaaccgaagaaatcaataaactgactgggataggccctaaatctatcactaaaaaaatgattgaaggactttacaaatataattctgacaggaaacagtttagccacatacccgctaaaactttatctgccagtgtcgatgcaattaccattcatagccatttatggcagaccaaaagaccagtaacacccaaaaaactgttacccactaaggcatagaagttgggaaatgcttgcttcagaacattcatggtaaatttgcacttcatctttcctgcctatagaaaatctttctaattgccaacaagacttttattaattaaaactggatattaagctctgttgtcatgaacaactggaatgtaaaccacagtgttttggagtgcagaagattctcacttaggtgataagtccaagtgatgaaggaaatgttttaattcacaaatggagatttgtatgtgttatcaggttcacctgcttgatattagatacattaaagcactgaattttcatggatattagttggatttgtcattgaaatatggttaagattacaaattatgtgttttatttgttgcnnnnnnnnaaccttttaatgtatattcttgtcttcagatggtttattttgctatttttctctcctgggggtttattctaagatacctttgtattttgtttcatgtggagatcatgaaagtaggaaatataccttcagaagtaactcgcacctttcttatgatgttaagagaaaaactagtgtttagttttacagtaaccctcatattttagtggtgttaccgcatttgcaaaaattattctgctaagtatttacaactctatttattattcactcaagtattaacattctctattaaatagaggaggtgttgtaaagagctgctagtaggttcgcctttaaccacatgagcttaaccaagannnnnnnnnnnnnnnnnnnnnnnnnnnnnnnnnnnnnnnnnnnnnnnnnnnnnnnnnnnnnnnnnnnnnnnnnnnnnnnnnnnnnnnnnnnnnnnnnnnnnnnnnnnnnnnnnnnnnnnnnnnnnnnnnnnnnnnnnnnnnnnnnnnnnnnnnnnnnnnnnnnnnnnnnnnnnnnnnnnnnnnnnnnnnnnnnnnnnnnnnnnnnnnnnnnnnnnnnnnnnnnnnnnnnnnnnnnnnnnnnnnnnnnnnnnnnnnnnnnnnnnnnnnnnnnnnnnnnnnnnnnnnnnnnnnnnnnnnnnnnnnnnnnnnnnnnnnnnnnnnnnnnnnnnnnnnnnnnnnnnnnnnnnnnnnnnnnnnnnnnnnnnnnnnnnnnnnnnnnnnnnnnnnnnnnnnnnnnnnnnnnnnnnnnnnnnnnnnnnnnnnnnnnnnnnnnnnnnnnnnnnnnnnnnnnnnnnnnnnnnnnnnnnnnnnnnnnnnnnnnnnnnnnnnnnnnnnnnnnnnnnnnnnnnnnnnnnnnnnnnnnnnnnnnnnnnnnnnnnnnnnnnnnnnnnnnnnnnnnnnnnnnnnnnnnnnnnnnnnnnnnnnnnnnnnnnnnnnnnnnnnnnnnnnnnnnnnnnnnnnnnnnnnnnnnnnnnnnnnnnnnnnnnnnnnnnnnnnnnnnnnnnnnnnnnnnnnnnnnnnnnnnnnnnnnnnnnnnnnnnnnnnnnnnnnnnnnnnnnnnnnnnnnnnnnnnnnnnnnnnnnnnnnnnnnnnnnnnnnnnnnnnnnnnnnnnnnnnnnnnnnnnnnnnnnnnnnnnnnnnnnnnnnnnnnnnnnnnnnnnnnnnnnnnnnnnnnnnnnnnnnnnnnnnnnnnnnnnnnnnntgtgtagctcaaaaattattgtgaatctactgtttgcatgtaagagaccaggataggtaactcttattttttaagtgtatacatattgtgtatataacatatggatattaaaaatggggaaattgcacattttaccttttagacaatattttctatcacagttagaaggaagtgattgtcaaatacacatttagattaaaactaaaaaattataaatgaatctaatcaaaatgtgaatagtagtcaaaaggataatttaataagcattttacattactaaatttgttcatttcaatattaactaaatttccctcatcaaagcaatctttgtgatattacttagctattatataaagaaaattggatgcaagacaatggagaaactacttaaaactaaacaggaccaccctttattcttaaatttgtgtgtgtccaacagttgaattgaatgtctataaggtctaaaggtagaatgtgagtattgccacagagttcattgctctcagtataagattttactttattaatgcagaaggaatatggatatatttctttaagtctgcagannnnnnnnnnnnnnnnnnnnnnnnnnnnaattatgtttttaaaattatacagttgaaaaatatgccatttcataaagtctggggattttcatcaaccttactgaaacacattggtgctttcatcatcagaggtcaaattattatgataactattccattaagtttgccaaacatttgttgtgattaccagtgcagcctgtcaaattctgctatttgacacagctttggaaagcttttagttcttcttggtttttccattttgtattagagtgactgttacagttttatttggctgtttaaagccaaattcagctatttaattatggtttcatagacactgttgagcaatgtacagtgtatggtgtgcttacctgtccactctagagcatagcttacaggnnnnnnnnnnnnnnagatgctgtgctgtaaaaaacggtcatatttgctatttcctggtacagtgtagttttcccctttcattgaataaaagca

SEQ ID NO: 39999 - DNA, 152 bp, Macaca Mulatta
aggaatgtgaagaatgggtggccaccaccagaagctaggggagacgccggcacagattctccctgagagcctccagaagaaaccaaccctgcaacacctggatttcagacttctgaccttcagaagtgtgagccaataaaacaactgcagtg

SEQ ID NO: 40000 - DNA, 768 bp, Macaca Mulatta
  misc_feature (1)...(768): n = A,T,C or G
gggaagggacgggcactgattaaggaagaatgggatgtgagcattggcaggtggatattttggtaaatttggatgaacttaagccaagatgctcactccttaggaatttccacttgccagcagaggcagcccatcttcctctacccaaaacatcagcctatccttgcttaaaggtcagctaaaaaccccgactgaagcagtaaccttgcataggtggactgatgtcttttaacacccaccttcaccactcccaattgcctacagggctcagggaaatgggtattttacataatgaaagaattgcaaggtctagctaattcaaacgataaaaaaaataaaagaggagtatgtgtggcaatagatttcaggagtgccagatcagagcaaaagaaacactgtgtagaatcgggtcaaatgtattgatatgagtgcacttaatgaagattatagatttggtgtgttagttagaacagctgagaagtgcccttacagtgtgcttggaaggttgattgcagcttgaaatcagtgaactacagtgaatgatgaagccacatttctttggtataatgcagaggaagaaatccaacctctgcaaagacgtgngcaaactggagtggatgtgttgtatgtgagacccactcattctcactctaatatcttccctggagggctcaaaggacactttcttcacccaaaagcaaaccaataaataaaaccccaatacccaccaataaaacaaaaccaaaccaacccccctgggaaaataga

SEQ ID NO: 40001 - DNA, 1706 bp, Macaca Mulatta
  misc_feature (1)...(1706): n = A,T,C or G
ggccgggcctagtagcgactctcaatcgggcagcggcggcgagnnnnnnnnnnnnnnnnnnnnnnnnnnnnnnnnnnnnnnnnnnnnnnnnnnnnnnnnnnnnnnnnnnnnnnnnnnnnnnnnnnnnnnnnnnnnnnnnnnnnnnnnnnnnnnnnnnnnnnnnnnnnnnnnnnnnnnnnnnnnnnnnnnnnnnnnnnnnnnnnnnnnnnnnnnnnnnnnnnnnnnnnnnnnnnnnnnnnnnnnnnnnnnnnnnnnnnnnnnnnnnnnnnnnnnnnnnnnnnnnnnnnnnnnnnnnnnnnnnnnnnnnnnnnnnnnnnnnnnnnnnnnnnnnnnnnnnnnnnnnnnnnnnnnnnnnnnnnnnnnnnnnnnnnnnnnnnnnnnnnnnnnnnnnnnnnnnnnnnnnnnnnnnnnnnnnnnnnnnnnnnnnnnnnnnnnnnnnnnnnnnnnnnnnnnnnnnnnnnnnnnnnnnnnnnnnnnnnnnnnnnnnnnnnnnnnnnnnnnnnnnnnnnnnnnnnnnnnnnnnnnnnnnnnnnnnnnnnnnnnnnnnnnnnnnnnnnnnnnnnnnnnnnnnnnnnnnnnnnnnnnnnnnnnnnnnnnnnnnnnnnnnnnnnnnnnnnnnnnnnnnnnnnnnnnnnnnnnnnnnnnnnnnnnnnnnnnnnnnnnnnnnnnnnnnnnnnnnnnnnnnnnnnnnnnnnnnnnnnnnnnnnnnnnnnnnnnnnnnnnnnnnnnnnnnnnnnnnnnnnnnnnnnnnnnnnnnnnnnnnnnnnnnnnnnnnnnnnnnnnnnnnnnnnnnnnnnnnnnnnnnnnnnnnnnnnnnnnnnnnnnnnnnnnnnnnnnnnnnnnnnnnnnnnnnnnnnnnnnnnnnnnnnnnnnnnnnnnnnnnnnnnnnnnnnnnnnnnnnnnnnnnnnnnnnnnnnnnnnnnnnnnnnnnnnnnnnnnnnnnnnnnnnnnnnnnnnnnnnnnnnnnnnnnnnnnnnnnnnnnnnnnnnnnnnnnnnnnnnnnnnnnnnnnnnnnnnnnnnnnnnnnnnnnnnnnnnnnnnnnnnnnnnnnnnnnnnnnnnnnnnnnnnnnnnnnnnnnnnnnnnnnnnnnnnnnnnnnnnnnnnnnnnnnnnnnnnnnnnnnnnnnnnnnnnnnnnnnnnnnnnnnnnnnnnnnnnnnnnnnnnnnnnnnnnnnnnnnnnnnnnnnnnnnnnnnnnnnnnnnnnnnnnnnnnnnnnnnnnnnnnnnnnnnnnnnnnnnnnnnnnnnnnnnnnnnnnnnnnnnnnnnnnnnnnnnnnnnnnnnnnnnnnnnnnnnnnnnnnnnnnnnnnnnnnnnnnnnnnnnnnnnnnnnnnnnnnnnnnnnnnnnnnnnnnnnnnnnnnnnnnnnnnnnnnnnnnnnnnnnnnnnnnnnnnnnnnnnnnnnnnnnnnnnnnnnnnnnnnnnnnnnnnnnnnnnnnnnnnnnnnnnnnnnnnnnnnnnnnnnnnnnnnnnnnnnnnnnnnnnnnnnnnnnnnnnnnnnnnnnnnnnnnnnnnnnnnnnnnnnnnnnnnnnnnnnnnnnnnnnnnnnnncaggaggcatctccatgctgcggtgccagagccagacttggaggaggagccagtgcctgacctgctgggcagtatcctatcgggccagagcctcctgatgctgggcagcagtgacatcatcatccaccgtgatggctccctcagcgccaagagggcg

SEQ ID NO: 40002 - DNA, 1100 bp, Macaca Mulatta
  misc_feature (1)...(1100): n = A,T,C or G
gggcctttctgcctcatttgctttcaatgaaagccgcaaagcagccgaaaccaggctctcccccttcctggagtttgaatatccagaatcttttgtacttcttgttcattaaattgtttatttttgtagaaaaaataaaaattagttagtaaaatgatgtttcacagnnnnnnnnnnnnnnnnnnnnnnnnnnnnnnnnnnnnnnnnnnnnnnnnnnnnnnnnnnnnnnnnnnnnnnntaaaaaacatggtcgcccgccgtccggccgcgcgaaaaaatttaccaaaaacaagtctgttgggccacgcggggccccnnnnnnnnnnnnnnnnnnnnnnnnnnnnnnnncagaaatgccgcagagggaaaatgccggggagcacaaaagaaaaaaggggacatgggaaagtctccccccnnnnnnnnnnnnnnnnnnnngccgaagaaagggaaaaggaaaaaacgaggtggaccgaatgaaaangcccccanaaaagggaagngtgtccagacaggaataatatgacgcgcgggaaaatgcagagtgcagacacaggaagaccgccacgaaaggcagaangcccccgaaataagaaaaaagaaagttaggaggcacacccagaacgcggcggaccacgacataacacaaaccaaagagaaagaagggagaataacagagagacaaccacacgtaggaaaagctgagntcacccgcgcggcaggaaanaggaaagcgaaaagcactcgcaccaacgacagaacacgcagaagaggaagacaaaagcactggcanaagacacccgcggaagaagggaaanatgagaagcacacgccatgagacggccncagccngacgcacaatgagagagaaatagcgcgccccgcgaggaggaagagagacccgagagaacaacgaaaacaaagaggtaccncnagaacgagacggacgcnnnnnnnnnnnnnnnnnnnnncgaacggagagaaagangacacaccacacacagcaaagtgagcaaggacaananggagaanacacaaatgattcacggaagagacaaaaaccccanatgagaagaagggagggaccacaacaagaagga

SEQ ID NO: 40003 - DNA, 95 bp, Macaca Mulatta
aagtcttcaccaactaagaaagctctgttattctggcctgggtgcttgctccagactcaggaacatctggtcaatgcaagcatcactgggctggg

SEQ ID NO: 40004 - DNA, 637 bp, Macaca Mulatta
  misc_feature (1)...(637): n = A,T,C or G
gggggaggctttggatgacctaccactagctcaggagctgggagagctacttgagggccaagtgaaagcctcattttgtgattcaggcaccagccaaatatagtttcatgaggaaaactcagttgcctgtggctttgtttttgtttttgagtgctttgaaaatcttgctgcctctcccgcttctgatttgcaagacactggagaggaaatcaacttggttatctgagcatcctctagtgcctctcagctctgcgtgaagactgctttcctcagaggagtccaaactttatcaaaaagagaaatatttccttttctcttcacaatgaaattggacttggaggtcagcgaaccaatagactttggttctggagatcatcaacatctgattcggaaagcagcagataaaagcatccagtccgaatctggtgagcgctacacaccttcatcttcagctgggccacaagaaactcgggagaagccacggccaaagggcaccgagcagttgaatacctatgtggtagaaatttcagatgacatcacncccagtgatagcaatgncactttaggcaatcctttctcagatgcatctgtccgcagagctttcattatcaaagtggtccctcctcctgtcagctca

SEQ ID NO: 40005 - DNA, 728 bp, Macaca Mulatta
  misc_feature (1)...(728): n = A,T,C or G
gggaggagaacatggatatgaatataatgtccttcccttttgttttctttgcacaaatttcagtggaaacatgttgccaagtcagattgccattctacttgcgtgaatatgggatttgtccagttttccaaatgcagagctttttgtgggctgatggactgaatagaaagaggaacaaccatacacccttccacagatgaaggcaagattttatgaaagcgacttcattcattcacctctgcctggtgttccttctttgtaaaccaggaccagggagctttgaatgtagcaatatattatataatttggtttcattaaatattatacctgcccttagtgtttatattccactatattgacaaccctggttctctctgtacgtgtgattgtctgtgttgagactattacagagattacagagacctaaaaattaatataaaaataataattttacagaaatacatatttgcattggaatatttaagaaagtcgagtttggatgctacaagattataggagtaataggaagctgggcacagtggctcacacttgtaatctcagcactttgggaggttgaggcagtgaggcaataggattgttggagnnnnnnnnnnnnnnnnnnnnnnnnnnnnnnntggaggatcctgtctctacataaaataaatttaaaaaagaattagctggttggtgctttttgacatgtttggtgcattactggtgttactaca

SEQ ID NO: 40006 - DNA, 827 bp, Macaca Mulatta
  misc_feature (1)...(827): n = A,T,C or G
gggtaattataaatattgaaaatttaagacccagaagtgaccagagagggctaatttagacttaaggaataaggaaagttttctgaagtcccatataactgatatgtggtagaggttgagggataaaagactacaaatagggtgcagtgtatattgctcgggtgatgggtgcaccaaaatctcacaaatcaccactaaataacttactccactaaataacttactcatgtaaccaaacaccacctgtaccccaataacttatnnnnnnnnnnnnnnnnnnnnnnnnnnnnnnnnnnnnnnnnngtttaaaaaagtaggagaggcgggtatttctaaagagagaaatacgtgtgtgagggcttcagttaggatagcactttggttttttttgagaactggaagaagaacactgttacatgaacacagttggaagaatggcaagcaacagagcccaagaggtgggcagggccctgagtgagcagcatcttgtaggtcgtgatgggtaaatgctccatgcaaaccatggcagtgtgacagtagttgcctcaacattgattgtgaagttaggcataacgatgtttgtattcaacagtacaaagaaaagggcccttgattcaaggagttttatataggtttagtttnnnnnnnnnnnnnnnnnnnnnnnnnnnnnnngcnnnnnnnnnnnnnnnnnnnnngctctattgcccaagttgaantgtggtggtgtgatcttagctcactgcaaactttcacctcctgggttcagcaaatcctctggctcaccctacagagtaacttgggaataacagtgcaagtcaccatgcccc

SEQ ID NO: 40007 - DNA, 160 bp, Macaca Mulatta
  misc_feature (1)...(160): n = A,T,C or G
nagcgccaagaagagggagggagagctcacggtggcccagggccgtgtgaaggacctggagtccctgttccaccggagcgaggtggagctggcagctgccctcagcgacaagcgcggcctggagagtgacgtggccgagctgcgggcccagctggccaag

SEQ ID NO: 40008 - DNA, 279 bp, Macaca Mulatta
ttaaaacaggctgcataacaccaaggagaagaaaaacactacaaatctgtgagaggaataaagataatttacaaaaatgaaagtaaagttttcaaaccttgtgtagagccaaaaatcagagaaataaatgttaaaggagctgagagaaatcatcattaaagttagaaatgcctgcttacattgcaatatttttaacacaaatgagtaaattaaaatattaaaaaaaaaacccactggtttggttttcaataggattctcttaaaagcatacctcataat

SEQ ID NO: 40009 - DNA, 730 bp, Macaca Mulatta
  misc_feature (1)...(730): n = A,T,C or G
agatgccccaaagaagaatcccaggtgaccacacagcatcagagaaacttcaggaggtgaggaattttgcaaagcaattcatcttgtagtcaataaaacaccgggctcactcccgagatgggcatgcatggatgtgaccctcgatggcatagactatgagagctaggtgatgggatcaacctccaccgaggtgtcagagtgacctgcatacccaaaccccatgaggctttaaagactgannnnnnnnnnnnnnnnnnnnnnnnnnnnnnnnnnnnnnnnnnnnnnnnnnnnnnnnnnnnnnnnnnnnnnnnnnnnnnnnnnnnnnnnnnnnnnnnnnnnnnnnnnnnnnnnnnnnnnnnnnnnnnnnnnnnnnnnnnnnnnnatccaaaattacttctacaaaagatcaggaaaatctcaatgagcaaggaaaactgcaaccagtaggtgccagtgctgnnnnnnnnnnnnnnnnnnnnnnaacatctttaaagtaattatcataagaatgctctagcaagtaatggcaaacactcttgagataaatggaaagataagaaggctcagggagaaagtggaatgtatgaagaatggccaagtgggaattgcaccactggaaacataatcaccaggataaagcagtctctggctgggccaacagcagactggaaatgaaaagggaaagagtcagtatggcagtcgtgcaatttgaacaacacaaaagacactg

SEQ ID NO: 40010 - DNA, 789 bp, Macaca Mulatta
  misc_feature (1)...(789): n = A,T,C or G
ggggcttctcattgctttcccaaatctcgctggggagaccaggtagggcgcatgcacggccgctgaaatgggtttaacttcgaccttccctcctttccagtttttcagcaagtatgggtgatactagctaccctctgttaaggggcgaagactgtgcaacgaggggaatctgtttggttcaggatgttagagcagcaaccatcatcctgatcagtcagcagacatcaacaccgaggcaagaccttccaccagcaaaaagattatgattttccaaaggcccagatggttgttagcattttcagcaataaagtattttaaataagcactcaagaaccagccagacagcaaaagccaaaattgacaaatgggatctaattaaactaaagagcttctgcacagcaaaagaaactaccatcagagtgaacaggcaacctacagaatgggagaaaatttttgcaatctactcatctgacaaagggctaatatccagaacctacaaagaactcaaaacaaatttacaagaaaaaaacaaccctatcaaaaagtgggcaaaggatatgaacagacatttctcaaaagaagacattcatacagccaacagacacatgaaaaaatgctcatcatcactgggcaatcagagaaatgcaaattcaaaaccacaattgagatacctattctcacacccaagtttagaatggccaatcatttaaaaagttcaagaaaacacacancttgtcttggaaaaagaatgttgggaaaaaataaaaaaacacctttttacaactggta

SEQ ID NO: 40011 - DNA, 806 bp, Macaca Mulatta
  misc_feature (1)...(806): n = A,T,C or G
gggaagtgaactgtgacttgcttgtatattacagggttcagtctagattgtcattaaattgaagactctacattcagaacataaaagcactaggtatgtaagtttgaaatatgatttaagcacagtatggggtttaaatagttctctaatttttgaaaaatcatgccaaacaataagatttatgtatatttgtttaataataacctgtttcaagtctgagttttgaaaatgtacatttcccaagtattgcattattggggtatttaagattattttagagaaaaatatttctcatttgatgtaatttttctcagtttcatgtatgtgaaaaaaggaagatatttcccataaacgggaactttgcccactgtctcaagaaatatatatttcagtgacaattcagtcgtcttttttagagatatattccaaaaatttcctcatatttttaggttatgcaactaataaaaactatcttacttaaataggttatagttttctacacattggtgatatagggataagctaattgattaggaaaggtttttaaagtccaagggtaattctccttgaattcccaataaaatgaatttttcttcccaannnnnaaannannnanatnannnaaaaaaanaataatattttttggggccgcccttctgggccccttcgaaaaaaccttttttctagaaaccaatttcgttttttgggccgcccccggggcgcccccctttaagggtaaaagtggagaacattgggggtcaacaaagcctggtttttccccaagggagaaaaaatccctgggttcc

SEQ ID NO: 40012 - DNA, 677 bp, Macaca Mulatta
  misc_feature (1)...(677): n = A,T,C or G
tctgtatataacttnacatcgtagtattttgtattctgggcttggtttgcaattctaaagtgaacggagagccanactatttgtcatagaaaaggaaaaagatgctactaaaatcaacttcaactgctttagcaccaaagagagtagcattacttattcttagactgatacctttttatttaaataaaatatgttgatagagaactgttggtgcaatgtttgagtgctcaagagactgggttggagagaaacaaagaacctaagtgatagcttatgtcctctgcaggagaaatgaagaggggtaaggaggagaaaaagtgagaatgagactggctttctggaagtctgaggagacacgctagccagtgaggatttcctgttagtggtggtgacagaaagaaatgaaaaagaggaggaatgtctaacatttaattttaaattgtttcttcatggtgttactatttaatttccttcatctctctaggcctttggcgaagatgaatttccttcatctctctagggctttcaatggaaagaggccatgttccctgtccgagtagacaaggggccagtgaaaagagaacagaaagagcttctgtatcagctgagaaggcctccatttgagccaacactattcccaatcagccttgtctgatcccagaatggctcttctgaga

SEQ ID NO: 40013 - DNA, 2718 bp, Macaca Mulatta
  misc_feature (1)...(2718): n = A,T,C or G
cttcctgtcagctggccggcccaacctcccctacatcggccgcatcgagagcatgtgggagtctnggggcagcaacatggtggtcaaggtcaagtggttctaccaccccgaggagaccaagctgggcaagaggcagtgcgacggcaannnnnnnnnnnnnnnnnnnnnnnnnnnnnnnnnnnnnnnnnnnnnnnnnnnnnnnnnnnnnnnnnnnnnnnnnnnnnnnnnnnnnnnnnnnnnnnnnnnnnnnnnnnnnnnnnnnnnnnnnnnnnnnnnnnnnnnnnnnnnnnnnnnnnnnnnnnnnnnnnnnnnnnnnnnnnnnnnnnnnnnnnnnnnnnnnnnnnnnnnnnnnnnnnnnnnnnnnnnnnnnnnnnnnnnnnnnnnnnnnnnnnnnnnnnnnnnnnnnnnnnnnnnnnnnnnnnnnnnnnnnnnnnnnnnnnnnnnnnnnnnnnnnnnnnnnnnnnnnnnnnnnnnnnnnnnnnnnnnnnnnnnnnnnnnnnnnnnnnnnnnnnnnnnnnnnnnnnnnnnnnnnnnnnnnnnnnnnnnnnnnnnnnnnnnnnnnnnnnnnnnnnnnnnnnnnnnnnnnnnnnnnnnnnnnnnnnnnnnnnnnnnnnnnnnnnnnnnnnnnnnnnnnnnnnnnnnnnnnnnnnnnnnnnnnnnnnnnnnnnnnnnnnnnnnnnnnnnnnnnnnnnnnnnnnnnnnnnnnnnnnnnnnnnnnnnnnnnnnnnnnnnnnnnnnnnnnnnnnnnnnnnnnnnnnnnnnnnnnnnnnnnnnnnnnnnnnnnnnnnnnnnnnnnnnnnnnnnnnnnnnnnnnnnnnnnnnnnnnnnnnnnnnnnnnnnnnnnnnnnnnnnnnnnnnnnnnnnnnnnnnnnnnnnnnnnnnnnnnnnnnnnnnnnnnnnnnnnnnnnnnnnnnnnnnnnnnnnnnnnnnnnnnnnnnnnnnnnnnnnnnnnnnnnnnnnnnnnnnnnnnnnnnnnnnnnnnnnnnnnnnnnnnnnnnnnnnnnnnnnnnnnnnnnnnnnnnnnnnnnnnnnnnnnnnnnnnnnnnnnnnnnnnnnnnnnnnnnnnnnnnnnnnnnnnnnnnnnnnnnnnnnnnnnnnnnnnnnnnnnnnnnnnnnnnnnnnnnnnnnnnnnnnnnnnnnnnnnnnnnnnnnnnnnnnnnnnnnnnnnnnnnnnnnnnnnnnnnnnnnnnnnnnnnnnnnnnnnnnnnnnnnnnnnnnnnnnnnnnnnnnnnnnnnnnnnnnnnnnnnnnnnnnnnnnnnnnnnnnnnnnnnnnnnnnnnnnnnnnnnnnnnnnnnnnnnnnnnnnnnnnnnnnnnnnnnnnnnnnnnnnnnnnnnnnnnnnnnnnnnnnnnnnnnnnnnnnnnnnnnnnnnnnnnnnnnnnnnnnnnnnnnnnnnnnnnnnnnnnnnnnnnnnnnnnnnnnnnnnnnnnnnnnnnnnnnnnnnnnnnnnnnnnnnnnnnnnnnnnnnnnnnnnnnnnnnnnnnnnnnnnnnnnnnnnnnnnnnnnnnnnnnnnnnnnnnnnnnnnnnnnnnnnnnnnnnnnnnnnnnnnnnnnnnnnnnnnnnnnnnnnnnnnnnnnnnnnnnnnnnnnnnnnnnnnnnnnnnnnnnnnnnnnnnnnnnnnnnnnnnnnnnnnnnnnnnnnnnnnnnnnnnnnnnnnnnnnnnnnnnnnnnnnnnnnnnnnnnnnnnnnnnnnnnnnnnnnnnnnnnnnnnnnnnnnnnnnnnnnnnnnnnnnnnnnnnnnnnnnnnnnnnnnnnnnnnnnnnnnnnnnnnnnnnnnnnnnnnnnnnnnnnnnnnnnnnnnnnnnnnnnnnnnnnnnnnnnnnnnnnnnnnnnnnnnnnnnnnnnnnnnnnnnnnnnnnnnnnnnnnnnnnnnnnnnnnnnnnnnnnnnnnnnnnnnnnnnnnnnnnnnnnnnnnnnnnnnnnnnnnnnnnnnnnnnnnnnnnnnnnnnnnnnnnnnnnnnnnnnnnnnnnnnnnnnnnnnnnnnnnnnnnnnnnnnnnnnnnnnnnnnnnnnnnnnnnnnnnnnnnnnnnnnnnnnnnnnnnnnnnnnnnnnnnnnnnnnnnnnnnnnnnnnnnnnnnnnnnnnnnnnnnnnnnnnnnnnnnnnnnnnnnnnnnnnnnnnnnnnnnnnnnnnnnnnnnnnnnnnnnnnnnnnnnnnnnnnnnnnnnnnnnnnnnnnnnnnnnnnnnnnnnnnnnnnnnnnnnnnnnnnnnnnnnnnnnnnnnnnnnnnnnnnnnnnnnnnnnnnnnnnnnnnnnnnnnnnnnnnnnnnnnnnnnnnnnnnnnnnnnnnnnnnnnnnnnnnnnnnnnnnnnnnnnnnnnnnnnnnnnnnnnnnnnncagccccccgctcccacccccgagcctagcctttgtctcacatgagtgcaatatttcattcccggtggttgtctggggaggtggttgtacgaggtcctgctcgaggctcggggatcagaacaatgtcaagtgaagagaaacacactgggggtacgccgagccactggagttccagggaaggctgaggaggnnnnnnnnnnnnnnnnnnnnnnnnnnnnnnnnnncctcatcctcgtcccgcttctgctgggttccgctttgtcccnnnnnnnnnnnnnnnntttctgtgtgcgtgcgattggtgtggcccctcccctctcgccgtgcttaacgtgatgaaagcacgattcctgtaaatgtgtaaactaaggggatggttgg

SEQ ID NO: 40014 - DNA, 861 bp, Macaca Mulatta
  misc_feature (1)...(861): n = A,T,C or G
gggcgctccttctctttgggtggggagnnnnnnnnnnnnnnnnnnnnnnnnnnnnnnnnnnnnnnnnnnnnnnnnnnnnnnnnnnnnnnnnnnnccacaaaaagacccgggggtggtggtggggtgttattataaaacaactctatgtgggcgccccccacaaaaagaggtgttctctcccccccttgtgggggggaaaaacaaacacaccgccggggggggggtgattataaaaannnnnnnnnnnnnnnnnnnnnnnnnnnnnnnnnnnnnnnnnnctcaaaaaatatgtgtgtggtggnnnnnnnnnnnnnnnnnnattccgccccgcgaaaaaaaagggcgcgccccaccnnnnnnnnnnnnnnnnnnnnnnnnnnnnnncttgttgcccccccctggaagaaaaaatgtgggggatttttttcgggggccccccttttttggtggggccccaaaaaaagggggggagaacggnnnnnnnnnnnnnnnnnnnnncnnnnnnnnnnnnnnnnnggagggaaagttgtttttttttttatgggaaagtttaggggaattttttccattagggttaccggagggttgtgccatggggggttgggattgtgtttccatggaaaagggacatagtacttaagtatcatttcgtttccattaccaatggatttgaagcaattttatttttatcttgggcttatttgtccaaggagcagttacagacagggttgacagtgcttaattaaaaaaatataccaaggacatcccctcccctcaaagtattgtgcaggtttcctctttctgagccttctccccgttctgtaccttctctttgatttctttcctttgtttctgtgatcc

SEQ ID NO: 40015 - DNA, 828 bp, Macaca Mulatta
  misc_feature (1)...(828): n = A,T,C or G
ggattgatgagacacttaagtatcttcacatctatatgccagtattaaatttctcatcatccctgatccccacccctctgcacagattggtatccccagcacattagggaatgcagttgttagcttgttagggtccattcagtagatttcccatgccataaatctagaagcccttcttacacattctgctttcttcttcagtcagtcaccaagttctatcaagtcagcctcctcatctccagaatccatcccttcctcattgaatttctagattttatttttgcattgtctcctgcttctgacccatccttcatttcgcataatggtcagctttctaaagtgtaaattggatcatatctctgcagtgaatcccagttgtcttcacatgctgatacccacattcctcacccccttactccctccgctgttccgcaaccatccccctaatctcaaatccctcacaccaaaccttcagtttccctactcacagttttctgacttttaataccttttgcttatgccctcccctgtatgagaaggtgccttttctttcctagccattccggcttaactactaaaacccttagggcctgggtttgagcatcaccattttctctcacctgccctttcctgttttttcccctctcttttccataaaagagttatggtgggccccatttctggggttctgaaattccctggtggggtcnnnnnnnnnnnnnnnnnnnctttaagggggcaaaggagattttatctttaccctactttttttatttggcccaggccacctaattaatgttttgcctgaaataagtaaaatactggaac

SEQ ID NO: 40016 - DNA, 769 bp, Macaca Mulatta
gggagagagtctgagcctaaaataaaagagagtggaagtgaggaagaaaagctactggggctgaaggtggaggccaggataaggaagtaaagaggagtggctggttcagagggagtgggaacatatggaggagaaagagaacgtgttggtaacgtgttgacagaggaaacttgggtattgggagaaaagctgactgggagctcatagggaaatgtttgagaaaaggatggaagatgggctagaaggattttgtctgacacatgatggggtgtatgagatgggggataattgcagcaggataaagggtagattttgagggttgtggaagaaggtgcaggctgaagtgtgcaaaatttctgaaagaggagcctgaagaatgaaggggtcgcaagtgacaaaagcaggagaggagataagaaagaagtgagaaaaaacataagaagccacatgccataatggtgattgtttgttgatctctgccatcctgagatcatcactcctcgcctcctctggaaactctctgagagccagagaatcgtctctttttgtaagaggcctgcacaggcacaaggtcatacttgggcactttttggctttgtgaaaatctctcagattgcactgcacagtatacaaatgataaaccagacaaccacattcgttctttggattacattttctcctgagatatcagacgcatttcaccaggggccacggaaagagaaatgaagaccaagataccgaggacaatgccaacaacctgatggagttt

SEQ ID NO: 40017 - DNA, 576 bp, Macaca Mulatta
  misc_feature (1)...(576): n = A,T,C or G
ctttattgagatacgggacacagcgaagggtggagagacggaacagccccccagcctcagccctctccacggggnccggatgccagagatgggagaagaagagattcagtctctcgcccgggaaactcagtcccgcagagggtgccggcaagggtgggacgcgacccgggtgacgcggtgcagggagtctttaaatagaggaggggctggagcggggaagggcgcccgggccctagcgcaccatgtattccttgcgcttattgagccgaacttggcagaaagagaagcctccgaggaggaggtaaaggcccgcggcgatgaaacagttgtagctgacttgctcgtaaaggttgtatatgttctggggcccattctcaaaatctttctccgtgaagggaacgtcctcaatcaacacagcggaatggacattgaaaaatattccgagcattatcaacatgatcactccccaggcgctaaggacgatgccgcaggcggccagcttcggcccacagcacaggagcgacgcncatgaagaagggagtcggggatcgccgaggtgcaagcgggcgaggaaag

SEQ ID NO: 40018 - DNA, 903 bp, Macaca Mulatta
gggtttggatttatttctgggttctttcttctatcccactgttctatgtatgtgtttttatgccagtaccatactgtcttgattactatagctttgtaatataatttataattaggaaatgtgatgtctccaactttttttcctcagtattgttttgcctattcaggtcttttatggttacatatgaattttaggattttttttctatttgtgtaaataatgccattggaattttgataggattgcgttgattctgaattgctttgggtagtgtgaccattttaacaatattattctgatccatgagcacgggatatctttccatttatttgtgtctttctttcatcagtgtttcatagttttcagtgtacaattcttttactgccttggtgttccatttattcccacgaattttgtttatgctaccctacatggcctcctgatttctcccgctcgatacctcccgaccgtatcacaatgctacccgctgttctttatgcgcctcatttcgaccttctgccacttctcacggaacctccttttcgagttcttgaccttattgtctctgtgctcgcttccctggggggtcttcttccctcgtgccatcgccgtctgcgggttcccccacaaatgtcttattcagcgcgctcggccgctgacctggcaactttcttggcacctcccctgcgtgactccccccctacctcctgccccttacccttctcccatgccgcgtccgcccggttccggggttgtcgcaccgccgtttcgacgccggtccctgtcgtcgtacacccctctcgccaggtcctcctccgtctggcgccccgccgatccatgtcactcgttccacgcttcctccccttcccaccgtttgtcgatacacaggccggtacccctgtt

SEQ ID NO: 40019 - DNA, 676 bp, Macaca Mulatta
  misc_feature (1)...(676): n = A,T,C or G
tttgcatctgcattaatgatgtgagtcaatgaaaagtttgattagcaatagttgtagatgtgctaagttttcaaatgactaatatcaagcggagattatttttacttgtaaaggtattgcttttgtgatagcataaataatggttttccttttttgtaatgtaaattgctggaaacttttgtattcccatagactgaggaagcttaattgcctttataagtacttatgtacaactttgtatcaaattttctgtaataatttatgttttattactatatatgtactaataattttatctgacttctgtttatatcatttgtacaattacatggttgtaaaataaacttttaaacctcnnnnnnnnnnnnnnnnnnnnnnnnnnnnnnnnnnnnnnnnnnnnnnnnnnnnnnnnnnnnnnnnnnnnnnnnnnnnnnnnnnnnnnnnnnnnnnnnnnnnnnnnnnnnnnnnnnnnnnnnnnnnnnnnnnnnnnnnnnnnnnnnnnnnnnnnnnnnnnnnnnnnnnnnnnnnnnnnnnnnnnnnnnnnnnnnnnnnnnnnnnnnnnnnnnnnnnnnnnnnnnnnnnnnnnnnnnnnnnnnnnnnnnnnnnnnnnnnnnnnnnnnnnnnnnnnnnnnnnnnnnnnnnnnnnnnnnnnnnnnnnnnnnnnnnnnnnnnnnnc

SEQ ID NO: 40020 - DNA, 2238 bp, Macaca Mulatta
  misc_feature (1)...(2238): n = A,T,C or G
cctaatagactctatagaactctccccccaaatcaacagaatatacattcttctcagcaccacatcgcacttattccaaaattgaccacataattaggaagaaaagcactcctcagcaaatgtacaagaacagaaatgataacaaactgtctctcagaccacagtgcaatcaaactagaactcaggactaaaaaactcgatcaaaactgcccaactacatggaaactgaagaacctgctcctgaatgactactgggtacataacgaaatgaaggcagaaataaagatgttcttggaaaccaatgagaacaaagatacaacataccagaatctctgggacacatttaaagcagtgtgtagagggaaatttatagcactaaatgcccacaagagaaagcaggaaagatctaaaattgacactctaacatcacaattaaaagaactagagaagcaagagcaaacacattcaaaagctagcagaaggcgagaaataactaagatcagagcagaactgaaggagatagagacacaaaaaaccctccaaaaaatcaatgaatccaggagttggttttttgaaaagatcaacaaaattgacagaacgctagcaagacaaataaagaagaaaagagagaagaatcaaatagacgcaataaaaaatgataaaggggatatcaccaccgaccccacagaaatacaaactaccatcagagaatactataaacacctctatgcaaataaactagaaaatctagnnnnnnnnnnnnnnnnnnnnnnnnnnnnnnnnnnnnnnnnnnnnnnnnnnnnnnnnnnnnnnnnnnnnnnnnnnnnnnnnnnnnnnnnnnnnnnnnnnnnnnnnnnnnnnnnnnnnnnnnnnnnnnnnnnnnnnnnnnnnnnnnnnnnnnnnnnnnnnnnnnnnnnnnnnnnnnnnnnnnnnnnnnnnnnnnnnnnnnnnnnnnnnnnnnnnnnnnnnnnnnnnnnnnnnnnnnnnnnnnnnnnnnnnnnnnnnnnnnnnnnnnnnnnnnnnnnnnnnnnnnnnnnnnnnnnnnnnnnnnnnnnnnnnnnnnnnnnnnnnnnnnnnnnnnnnnnnnnnnnnnnnnnnnnnnnnnnnnnnnnnnnnnnnnnnnnnnnnnnnnnnnnnnnnnnnnnnnnnnnnnnnnnnnnnnnnnnnnnnnnnnnnnnnnnnnnnnnnnnnnnnnnnnnnnnnnnnnnnnnnnnnnnnnnnnnnnnnnnnnnnnnnnnnnnnnnnnnnnnnnnnnnnnnnnnnnnnnnnnnnnnnnnnnnnnnnnnnnnnnnnnnnnnnnnnnnnnnnnnnnnnnnnnnnnnnnnnnnnnnnnnnnnnnnnnnnntcaacagcccttcatgctaaaaacgctcaataaattcggtattgatggaacgtacctcacaataataagagctattttatgacaaacccacagcgaatatcatactgaatgggcaaaaactggaagcattccctttgacaactggcacaagacaggaatgccgtctctcatcagtcctattcaacaaagtgtttgaatttctggctaaggtaatcaggcaagagaaagaaataaagggtattcagttaggaaaagaagaagtcaaattgtccctctttgcagatgacatgattatatatttagaaaaccccattgtctcagcccaaaatctccttaagctgataagcaacttcagcaacgtctcaggatacaaaatcaatgtgtaaaaatcacaagcattctaatacaccggtaacggacaaacagagagccaaatcatgaatgaactcccattcacaatagcttcaaagagaataaaatacctaggaatccaacttacaagggatgtaaaggacctcttcaaggagtactacaaaccactgctcagtgaaaaagaagaggacacaaacaaatggaagaacataccatgctcatggataggaagaatcaatattgtgaaaatggccatactgcccaaggtcatttatagattctatgccatccccattaagctaccaatgactttctatacagcattggaaaaaactgctgtaaagttcatatggaaccaaaaaagaccccgcattgccaagacaatcctaagcccaaagaacaaagctagaggcatcacgctacctgacttcaaactatactacaaggctacagtaaccaaaacagcatggttctggtaccaaaacagagatatagaccaatggaacagaacagagtcctca

SEQ ID NO: 40021 - DNA, 615 bp, Macaca Mulatta
aagatggcggaggtgcaggtcctggtgctccatggtcgaggccatctcctgggccccctggcagtcatcgtgactaaacaggtactgctgggccggaaggtggtggtcgtacactgcgaaggcatcaacatttctggcaatttctacagaaacaagttgaagtacctggttttcctccgcaagtgaatgaacaccaacccttcccgaggcccttaccacttctgggcccccagccgcatcttctggcagacggtgtgaggcatgctgcctcacaagaccaagcgaggccaggctgccctggaccgcctcaaggtgtttgatggcatcccgctgccctacgacaagaaaaagcggatggtggttcctgctgccctcaaggtcgtgcgtctgaagcctacaagaaagtttgcctatctggggcgcctggcttacgaggttggctggaagtaccaggcagtgacagccaccctggaggagaagaggaaagagaaagccaagatccactaccagaggaagaaacagctcaggaggctacggaaacaggctgagaagaacgtggagaagaaaattgacaaatacacacaggtcgtcaagacccacggacccctggtctga

SEQ ID NO: 40022 - DNA, 796 bp, Macaca Mulatta
  misc_feature (1)...(796): n = A,T,C or G
atgaaatgtttctctgtgctcctgaatctaaccagttaacccgctgcatatggtaacgtcagtggttgctaggcagtgtttcactgatgaaagccgtgtgcggtaggagggctcctaagcttaggtttctgacacaagcaaaggaaaacctaagcagcccaactagggggttgtagtgtcctctctagaccagtgggagggagccaatgggactacgcggaggatataaatcgcacagcaaaggttttcttggaagattatctgcaaagggaggcgggaagtaacctgcgcctatcttccgagttttcctcctttttgcctttgagaccagtaaccgctcccgccagctcaagatcagctcctcttccagcctctttctgtcaattctgcccgtgcccccttctttgcattcgtatcccctcccccaagtccgctccaatccaatccggagactcgactctgcccccggactccagactaaatccgttcctcggctcggcaaagcagctctgcacgtcccttcccacttgctcagccaatcgctggcctcggccccgcccctttgggctgggcccctctcatgccaccaatccgcgccttttgtcccgccctctgcccgcgagtccaccaatcccgcccttcggaaagcgtggtctggtatccagctgctggagcgggtcgcgctggaggggggcggaagcggaagtggcggtgccgggcccggggagtaggaagaaccggggctgtanccggagtggagcggctgccanccgaggagcangcgcggctgcggcgn

SEQ ID NO: 40023 - DNA, 755 bp, Macaca Mulatta
gggagattcctttctgtttttgcagtctcttagtgagttacttggaatgtgcatcatgctctggtttaatgctgactcaataataaaacgttctttctctactaccattgtggagaggaattctgggttaggagaagattttgtgtttaattatatttccccaacaattttgttgatgagaacatggaaatatatggtagctcctgacatgagcagacaactgacagtctgtaaccataaaacaatcaggtaggagacctggaattataaaaagtcttctttctagtgttctcttttttgggattactacctagacaatccaacctgtccaaattcaatatgttactattaaataaacatgggtaatgtagactctaaaattcaatcagggtcatcatatggttgaaaaatatgggaagacaggaatattgccttcaagtctctctcttaaatagttaatatctctctgtcacatttgtgatggttatgcacatgagaatccagttatgtagtggtgggaggatgtttcttttgatttggatagattaacacatccttggaggggtttcatcctgaacgaatgagttcctggtatttatgggataaatattgttctaagagtagtgttaaaaatgatttagggctggtcaaagtacagtgctgtttacaactaattgatcacaactgattatagatttcttggtgtcttctcaactcccactgggtttacttgactagcccttaaaaaagattcg

SEQ ID NO: 40024 - DNA, 353 bp, Macaca Mulatta
  misc_feature (1)...(353): n = A,T,C or G
ggggtcagaaagaaagtacctaactccaccaccaacacccaaagctggcattctaatttaaactactttctgcattcttatattgcataagcttcataaataactctagcaccaatccacccataatactactnnnnnnnnnnnnnnnnnnnnnnnnnnnnnnnnnnnnnnnnnnnnnnnnnnnnnnnnnnnnnnnnnnnnnnnnnnnnnnnnnnnnnnnnnnnnnnncgccccccccgcccctcaaaaacttttcaaaacctttctttgggccccgggccccataaggaaaggaaacagggccaaacctgttcccaagaaaatccgggccagaacaagggctggaattcccc

SEQ ID NO: 40025 - DNA, 836 bp, Macaca Mulatta
  misc_feature (1)...(836): n = A,T,C or G
aggaaggacagcaaggaaagatgaaaataaagctagatgggatgaatgtcccaaaaggccaaactgggacctctagccgtggaccaggagacggagggaacaaagaccactggaaggagtcagataggaaagatggcaaaaaggatcaagactccagatctgcacctgagccaaagaaacctgaggaaaatccagcttcgaagttcagttctgcaagcaagtatgctgctctctctgttgatggtgaagatgaaaacgagggagaagattatgccgaatagacctctacatcctgtgctttctcctagtttctctccaccctggaacattcgagagcaaatcaaaacctctatccagacaagacaaaataaaactcaccatctcctgaagacctttcttannnnnnnnnnnnnnnnnnnnnnnnnnnnattttgcatgctgctgcagcctttaaagtattaaagtaactggagaatcgccaatatagccagagagaaagggactacagctttttagaggaagagttgtggtgtgttaggtcaccacacagttgccagtgtgattagtgcctaggggcctccatttagcagaaatggtaatgacagtgatataacgtctggaacctggttgggcagtaggggagggaggtagaaggaaaattgtgagatttctaccttttagtttttatcctattgtggcatatatgaattctcaaaacattatctgaatacattttccactcttggaaaggtagatttaggctcaagtagtataagtctccaggaggctgccagtccctcctcttatttaattctgagttttcggggccagcctaa

SEQ ID NO: 40026 - DNA, 222 bp, Macaca Mulatta
gcagccatggtttcttggggacaagatcgcccttgtggatttcattgcttatgatgtccttgagagaaaccaagtatttgagcccaagtgcttggatgctttcccaaacctgaaggacttcatctcccgatttgagggcttggagatctctgcctacacgaaatccagccgcttcctcccaagacctgtgttcacaaagatggctgtctggggcaacaagta

SEQ ID NO: 40027 - DNA, 657 bp, Macaca Mulatta
  misc_feature (1)...(657): n = A,T,C or G
actgaaggatatagatgtcatattatatggtgtgttttagaatcagctctcacttctcacaccaccatggggtaatgtgtacaaagggtgccctttccattttagtgtcattaaagtgttggatttttagaggttagatgtgacatattgttgtctcccccaacccatcccgagttggtgcttatgctttcatgtgacagtaataaccctgtactttaaaacatctgatttacaatacaaagtcttgctttaaaaacttttgattctaaaggtattgtgaatggttctcattatagtgctataggattttcagtaaataaaatttaagaatagccaggtgtggtgacatgagcttgaggcaagaggatcccttgagccaaggagtttgaggccagcctgggcaacatagtgagaccttgtctcttaaatatgtctcnnnnnnnnnnnnnnnnnnnnactacttcctttttgtctttagtactttccaagtgacctgtcttttagtttctcctttctgatagattaacttaagcttgtgggctgtgccccctaccaccattaaaggctaatattcctttttcagggtatgttggagcccaccaaggaaccattgaaaccactttctgctgcagaaaaaatagcttacatcggtcagac

SEQ ID NO: 40028 - DNA, 703 bp, Macaca Mulatta
cccctccgcggctccccgggcgctgcagcaccactaggacgcatgcgctttcctttccccgcggtcttctctctgcctcccacacccaaggtttagtcccctccctctttaacctcccgtgaacgcgcgtatacacacccctggggacgcgcttgccggaggccacgccccttcgaaattccctgaaaagagggcggaggcggggcggggaaaggagcgcctcagcaagaccggaaagagaagaggcctgcaggaaggaaagaagcccaattagttgggacgtgactgggcatgcgcgcggggtacctggcctagcggccttaacaatgaagcgcggcgggaggccgcttacagctcccaacatgcaccaggcccaagctgccggatggcacccagtggcctcctgggagtcgtagtttcttggagcctccgcccccttgtcctggaatgacctatcgcccacttatctgggctgtgggcctggggagctcagcggcctccagggcctttggccaagtcaggacctggacttgcctctatgggaactgaggagcagcccccagctgagcaggacgtcaccactcctaggatcaggctgatgctcggaatagtggcacggaagggacatggaaaggagagaatctttcatacagatatcttcaagggagctcagagatcatctgtggtgtctatcgcctcgttt

SEQ ID NO: 40029 - DNA, 830 bp, Macaca Mulatta
  misc_feature (1)...(830): n = A,T,C or G
nnnnnnnnnnnnnnnnnnnnnnnnnnnnnnnnnnnnnnnnnnnnnnnnnnnnnnnnnnnnnnnnnnnnnnnnnnnnnnnnnnnnnnnnnnnnnnnnnnnnnnnnnnnnnnnnnnnnnnnnnnnnnnnnnnnnnnnnnnnnnnnnnnnnnnnnnnnnnnnnnnnnnnnnnnnnnnnnnnnnnnnnnnnnnnnnnnnnnnnnnnnnnnnnnnnnnnnnnnnnnnnnnnnnnnnnnnnnnnnnnnnnnnnnnnnnnnnnnnnnnnnnnnnnnnnnnnnnnnnnnnnnnnnnnnnnnnnnnnnnnnnnnnnnnnnnnnnnnnnnnnnnnnnnnnnnnnnnnnnnnnnnnnnnnnnnnnnnnnnnnnnnnnnnnnnnnnnnnnnnnnnnnnnnnnnnnnnnnnnnnnnnnnnnnnnnnnnnnnnnnnnnnnnnnnnnnnnnnnnnnnnnnnnnnnnnnnnnnnnnnnnnnnnnnnnnnnnnnnnnnnnnnnnnnnnnnnnnnnnnnnnnnnnnnnnnnnnnnnnnnnnnnnnnnnnnnnnnnnnnnnnnnnnnnnnnnnnnnnnnnnnnnnnnnnnnnnnnnnnnnnnnnnnnnnacccctttcattctataggcctcctttcatcttcccttagttagcagttaattttaaagtaaatcttaccatgaatctggaaaaagcccttttgcctctcaaaaacgtaaaagtacctaactaattcccaaaccaaccccccttaacttaaccatagaatttgtacctaaatggggtctgccccccccacctctttctaccaactatttctaaaaaaacccccccctccatttaaaactg

SEQ ID NO: 40030 - DNA, 415 bp, Macaca Mulatta
  misc_feature (1)...(415): n = A,T,C or G
ttgaagatgaagtatggagcatgtacctcaaagcctaagtgtggaaaaagctaangaagtgatgaacctntgatgacncncaagttcntacttgaaaagcctgatgaacctgacgttcttgacgatctttatggaccaattgcctttaaggatttcattctaagcaagggctacgaaatacctggaatccttgaaaagctgtttgccaggaagggatggacttatgactctgttaagactcctattcaacatgcaatgcgactttacaagtacaaagaagacgtcacagatgcagtggaaaaagattagacggttttcaacttactacgttattggctatttcttgctctcattttaaacatcagtcagaatttgggatgaatgaccccgtggaggtacaactttggcagcatct

SEQ ID NO: 40031 - DNA, 657 bp, Macaca Mulatta
  misc_feature (1)...(657): n = A,T,C or G
gggggaatcctggaaggctggccagtaggctagagcagacaagatgagcagagagtggcctcatgtcttgctgggacctgaggtagaagggggctgtgtgggacacatgggtctgcccatgcttccaaactcagaaccaggcctgcttgtgcagagattctcacaaatctcttgaagtgaccagagccctcctggagtgtcacagcctaggctgctgtcactggggcttcacaggcagtcgctacggcacccacggcttcgactcctcctccacctccctcagcaaaggggccttcaattgaccagaggaatcttcaactcacctagagctaaaggttcagaagatgaaagggttttcacctcagcaaagtggaactgatattgtgggagcattattgagtaatggaccctcatcctcacatcaaacatccctaaactttcaaaacaccagcctctcccagacagctcatnnnnnnnnnnnnnnnnnnnnnaattcggcctatgaacccggttatcccctcccggggggggatgggcaatctgggtgagggcccacggacccaaggacccttttttttccccctcaaaaccctgggttggttccccttttgcccccaggggatccggctaatgtcaaggggaaaaatgctctaaaaa

SEQ ID NO: 40032 - DNA, 1258 bp, Macaca Mulatta
  misc_feature (1)...(1258): n = A,T,C or G
ngagattcagtcgactgcagtagttcatcattctagataagttgattggcttcagtgtgaaatgcctattcggaagtcatagacaaggaaaaggacattggactaggtaactcacgaagcattagtaaactcagagcagtttctgtacaatggggactaaagtaaaaaatcaaagggttcagaagtagagagaggaaatggcattagcaggggaagaatgtgtactgatttggtggtgatgcagagagagatgagagaagggaaaaagtggagaagagggagaaagggcaaagaggaaagggcagacaaagaaggagaaataagccaggcatggtgctcatgccttgtagtagacacacacacacacacacacacacacacacaaaaattagctaggtatggtggcatgcacctgtggtcctagctacttgggaggctgaggcgaacggatcatgaggtcaggagttcaagatcagtctggccaatatagtgaaaccccgtctctactaaaaatataaaaattagccaggtgtagtggcaggcgcctgtaattccagctactcgggaggctgaggcaggagaatcgcttgagcccagganagggaggttgcagggagcctagaccacaccattgcactccagcttgngagacagagttagattgtctccaaaannnnnnnnnnnnnnnnnnnaggttttctgtcagtttcaatcttacaaacatgggggatagatgcctgtcagagngacacgaaaaatgtttgcaacacactatgtagaaaatgtgatagggaataatgagaggaaattacggactactaggcaggtgagctgaagacatagtcataggacacttacatacagcagacaccatcagaaacattctatgactttctgtagctcatttgatagcttaggaccccgtagggttatctggtgctggaactctccaattaagatggggtaggaacaacttttgatgcgtaacgacattaatttcaagtatttttaggattaacggtcaatctctaatggaatctatctgtctcccctttgcaactggctttcaaagggaatctaacttggtcggcccataatggtttccctttttaaaaaaaaaaaaaggaacggggcccgcccacttttcacatttttgaggttctttgcgcgcctgttcggctattacaattaaattctaatctcaccctttgagaaaactttcctttttcgcattggccccaggttattttccggctcc

SEQ ID NO: 40033 - DNA, 184 bp, Macaca Mulatta
ttgtcataattctcacttaaaaataatgcataaacatatctagcaagtaatatgataaagaaagagcttttggggataaagtttgacttggttatgatatacccaagactttcttgggaattttatccatttagatgactccatttcttgcatatatgtctataattaagtatttcagagtgtg

SEQ ID NO: 40034 - DNA, 297 bp, Macaca Mulatta
  misc_feature (1)...(297): n = A,T,C or G
gaactgctctacatttggcctgtgccagtggccatgagaaagtggtaactctcctgatcaacagaaagtgccagattgatatctgtgacaaagaaaacagaacacccttgatacaggnacaggctatccattgccaggaagaggcttgtgccgttattttgctgaaacatggtgccaatccaaaccttaaggatatctacggcaacactgctctccattatgctgtgtacagtgagagcacctcactggcagaaaaactactttcccatggtgcaaatattgaagcactggacaagg

SEQ ID NO: 40035 - DNA, 214 bp, Macaca Mulatta
agaaaagaaatgcactaagtaaagaacattctctcatagaacaatgatctgttttacaggaaacaaaccttgccttgaaatttatacagtgagactgtacataattgcatgaaagtagctattttttctaagacatttttcattcatgagtattttcaagttgttcatactgtacacatttcttaaaacacatgataccggcaacaagtgaaaa

SEQ ID NO: 40036 - DNA, 746 bp, Macaca Mulatta
  misc_feature (1)...(746): n = A,T,C or G
ggcaaaaagcnnnnnnnnnnnnnnnnnnnnnnnnnnnnnggcttaatcgatcnnnnnnnnnnnnnnnnnnnnnnnnnnnnnnnnnnnnnnnnnnnnaaccacacctggcctcagattttattttaaatctgatctgaggtacagtgaatgaagtgtggcaataaatccgagatttttgttagagaaaactgtgggctggaagcttgtggatggaaagagaagacagaaagggaatgtgggctgcactgtggggtcagcttccggctcactgcaagaacacaatatatttgttctttactttttaagaacagaagatttcaaagtgtgaagatttttcagtctttaggtcccctgcttttcttcctttccagcttctcacaaaccacctgctagacctcagatctgcctcttttttccctccagaatatcgcttctcatctaattccttaataattgattccttgctgtgacaaatctttgacctagaatcttcctcaagatctttgtgagtctaagattatcctcacaatggtttccagttgatttatttatactaacacactgtgttctaccacatcaccatctcccaacatatctgtgaagtagaattaaaatgccagtcaaccctgtttaacagttgtatcttaccacttgttaaaaattataataatactcctttggagcaattatcagaaaacaaagccctccactgttgctctcacaaagtatttttaaacttgtntttt

SEQ ID NO: 40037 - DNA, 985 bp, Macaca Mulatta
  misc_feature (1)...(985): n = A,T,C or G
gggttgcctataagatctctctgcttttcagccctgtccccagttcccaaactgctgctcagtcagaaaagcccgtgcctgtggcagtctttctccctgcctgcttgggtccaagaaaatgaaattgaaatgaaagtagctcatctaggaacgggttatgcctctctggaatttaggtcatttagtcaagtgctgtctgatagaagtataatgtgaaccacctacgttatttttaaactttctagtaggcacaannnnnnnnnnnnnnnnnngccccaacacagggggcctcattgccctgtatacccacaccctttttggcttgccccaagccaatgggattacccctgaagggccaggaatttcaaaaactgggctcggtccaacaatgggggaaaacccttttttccttccggaaaaacacaaaaggttaacccccctttttgtgggccccccccccccgttaannnnnnnnnnnnnnnnnnnaagggtgggggcacggaaaaaaaactcttttgcccccggggggggcaaaaatttttcttattcgccccccaaaaaggtgttccccctttctttttttaaccaggggggggagacacccctataaaaacccgccttcctaaaaaaaatataaaaatattaaaactttnnnnnnnnnnnnnnnnnnnnnnnnnnnaccccccctttttaatcacccccctttttttttatgaagccaccaccgaggcggggggtatataccaaaggtcgcggggaaaatatattataaacacttttttcgtgtataaaataggggagaagacacctccccttcttctctctaccgaaaaaaagatccaataaacacacttttctttctgtcgacgctctgtgtgtggagagcgcgccccccctattattattctaaacaacattttttgtgtggggcgttgatgttatcgtgcagtcaaaacacatattgctttacgacctcagtgtgcgg

SEQ ID NO: 40038 - DNA, 650 bp, Macaca Mulatta
  misc_feature (1)...(650): n = A,T,C or G
ggggttgcacatgtgtggcgtacagtgatttccatgtagtaacagggctgagcaaggcaggctctccgtcagacttaaagcattcagcctctgcccccaggccaccactgacgtgttcactgtcgctgccacagctggccacctgtgtgttcagtctccatgaaggattcaccctctgctctgacatctccttggctacacaaatgtgcaggtgtctcttgtcaaagctaatttttcttttctaaataaacatcctttannnnnnnnnnnnnnnnnnnnnnnnnnnnnnnnnnnnnnnnnnnnnnnnnnnnnnnnnnnnnnnnnnnnnnnnnnnnnnnnnnnnnnnnnnnnnnnnnnnnnnnnnnnnnnnnnngtcnnnnnnnnnnnnnnnnnnnnnnnnnnnnnnnnnnnnnnnnnggggccgggccccaaaaggaaagagaaaagggcacaacctttttcaaaaaaaaccgggcaaaaaaaggctggaattcccccaaaaaaaaccgcggggggacccgaggttttaaaaaactccaaaggggtttctaggtctttggggtttttcacagggttccaggagacccatttaaatttccccccccccgccaccaacaaaactttttaattataaacttcgccaaggaaac

SEQ ID NO: 40039 - DNA, 857 bp, Macaca Mulatta
  misc_feature (1)...(857): n = A,T,C or G
ggatgccccagttagacacatcgacatgattcaccactattatggcgatgctccctacactatatcttattatacagctaaagctactaaacacgaaccactaccaaccacctcttacaaaaaaccccacccttcaattccacaacatccgnnnnnnnnnnnnnnnnnnnnnnnnnnnnnnnnnnnnnnnnnnnnnnnnnnnnntttaaatcaacccgctacaatccccattatcctattccctaccctactaatcttaacccccaagcaccccattaataatcgactagctaccatccaacaggacctaactcgattcaccctaaaacaaataataataactcacaacgctaaaggacaaacctgatccttaatactaacatcccctatcaccttttattgctataacaaaccctcctaggaattaatgcctttactcgtttcaccccaactacccaactttttcataaaaccctaacctaatgccaattcccctctttgaaacccccccccactttattagtgggggggtttccnnnnnnnnnnnnnnnnnnnnnnnnnnnnctaaagccccccccttttcggggcccaaaaggggtggaaaatccccttacctttttttttattttccctgtgtgtttaattacacaacttcttaaaaatattttctgcgccctcaatttttttttttccaccacacaatgatcctcttaccggccgctgagaaatatattaatacccccagaaaaatatttttttagctgcggctcgcacgtatctattaataaaaacaacccccttatacatttaaaagaacacactctctttatctacataagccgaaatcatactaaatg

SEQ ID NO: 40040 - DNA, 590 bp, Macaca Mulatta
gcctcctgttagagtcaagaagacttcaaagattcaatggcttctaagcctttttatatcagcaaagtcctgcaaagcctgcaaatgaaggctgccttgacgctcttcattctaaggacagagaaggcaaattctctggccactttctgcagagcagcaactgggctccttctttttacttccgtggggaggacaagacattcctttgctttctattgctgagaatgccaccaaaacaaattttacttttagctgcaacctttcaaaagcgtcttaagaataaagcaccaaaaaatccccaagctaatgtaggcattctagttttatttgtggttggtggattttttctaattgtgccagtttcagctgaaacatgcttccattgtttccatttcccactgttcatacagcactggattcttggggagcaaaagtgcgagggcagattgggaaaccccagttcatcagaagtttgttgttgtggtggtggttgtttcagtaaaagagaggaaatcggtaaatagctctgatgtcgaaggcagcaggaggtcaggacattgagcaacttgcagcttggggttgtggactca

SEQ ID NO: 40041 - DNA, 1046 bp, Macaca Mulatta
  misc_feature (1)...(1046): n = A,T,C or G
cgaggaatatgatcgtactgatttgaatatattatatttttataacttccttgccaaagtcctgatgtagtacattagagaacctgtgtttcctctctcattgaccattcatctgtcttccatacagtcatttgggctttttactcaaagagaatcaagaaataataaggtataacaagcctggcaaagtgttnnnnnnnnnnnnnnnnnngttaatctctagcagtttggtaatttagcagcatcatttatttgggattcttttatctgatttcaacagtgaaaagcatccctgtgataaagcctaatgacccatttcacaaaagatggagtttccccttcctagaaaatatgacagagaaaagtctgactcaaagaaagtgggtctgaattttataaggggtagtaacaattggacaattcctttgcatatctgaacttggcaggtaccattctaaatttgaaacagggtcatagctcaaagttgccattcatccagaatagagatcctttagaatgtagtgttttaagtgagtgtttcattaatacacctacaccctttctttgaaagtttgcaacctaattgcatctaaaactttgagtaagttctgtggtaaaatcttaaactatggaaaattataaaaatgaatattttcttccctgaaatcagagcttacatgtgtgtttcttccataaatttcagattaatgtttccactgtgatacaggatttacatcactcttttctttcgcatgttaccattaaacctgtcctttattcctgctttatagaaacggaagtttncaggccctcgggaaaacatttgttctcctgttgaacagggtaaaacagctttggtgtcgccttgatccccctcccccgccatcgacacacaccacacacaccgcgtgacaaagacaacaacgacgaaacacaaccacgagccaaacaaacacaaaagaaaacacagacaaacaacaacaaaagagaccaccacacaacagcacaagaaacaacaacacagacacagacaagacaaaaaaaaa

SEQ ID NO: 40042 - DNA, 604 bp, Macaca Mulatta
aaccgactccggcacagtaacaccgcttacccgtcatgggctgtattccagcactggaggaccccctgccagggcgctctctggactacccctgctccattgcgtcctgccctacagcacagcaggacagccgtcccccggcgcactggactgaggcacagcaggactggggcctcgtgtgtggcgaactataggacgaggtgacccccgcccctccgcacctcggactatggcacaggaggaccgccactcgcgcatgccctgcaccacctcaggacaggtcccccactccgccacgcccggaatacagcactggaggaccccaatcccgttgctccacggactccaccaccgaagaccgtcgcccccctgcgccctggacaaaggcacgggaggacccagcctcaccgccccgagggctatcgcataggaaaacccccagccccaccgtgccagagactctgacaagagaggactcctgccccctgctcccccgactacagcaaggcaggaaccacactcctcggaggtcctcactgtggcaactgtggacccccgccctggtatgccctgaactaagtcaggcaatgaccccgaccccacc

SEQ ID NO: 40043 - DNA, 147 bp, Macaca Mulatta
cagcaatttcatatataattattgaggactacaaaccagttgaaaataaactgccattactgtgatgtttgtgaatactaccaaacagccttacatgtctgcaatcatcaagagatgtatttagtaaattgcaaacattaaaatggt

SEQ ID NO: 40044 - DNA, 628 bp, Macaca Mulatta
  misc_feature (1)...(628): n = A,T,C or G
gggcatacagttttgatttatttacaatatatgctgtgccattttgatttttatattgtttggttgctttaataaatttgcgacactcaaacacttgaggtgatagttgttaaaaaaataccagtatttgatccagtttcatctcaactgtgttatacctggacattttagatgtttatcaaaggtcttttatggggaagaaagtaaatgtatgaaataataaatgtgtgacatttatgggtaatgttggctctgaacaaacttttgaaaacttggttgacaaaattttggaatcacttgaaaaagcatgacttttgaaactctgaaggccttggtttcagtatatcaatccttattgatttatttcttatnnnnnnnnnnnnnnnnnnnnnnnnnnnnnnngaccgaattatgaaattttttaagggggaaaaaagggaattccccttgtttgtttccccccacctagacgggatttttgcccactccctttaaaacccaaatccccggcggggaagacccaaaaccccccttttcccttgaaaaacagttaaaaaaagtttttcccccctctttcacaaataaaaggatttttccccccggttttagaggggttataaacccaaaa

SEQ ID NO: 40045 - DNA, 822 bp, Macaca Mulatta
ggtggtgggactcaccgctctggccagggagcttttggaaacatgtgttgtggaggccgaatgtttgcaccaactaaaacctggcaccgttggcattgtagagtgaacacaacccaaaaatgatatgccatctgttctgtcctggctgcctcagccctaccagcttctgctcatgtctaaaggtcatcgtgttgaggaagttcctgaacttcctttggtagtcgaagataaagctgaaggctacaagaagaccaaataagctgttttgctccctaagaaacttaaagcctggaatgatatcaaaaaggtctatgcctctcagtgaatgagggctggcaaaggcaaaatgagaaatcattgccgtatccagcgcagggggccatgcatcatctataatgaggataatggcatcatcaaggccttcagaaacatccctgaaattactctgcttaatgtaagcaaactgaacattttgaagcttgctcctggtgggcatgtgggacgtttctgcatctggactgagagtgctttctggaagttagatgaattgtatggcacttggtgtaaagtcgcttccctcaagagtaactacaatcttcccatgcacaagatgattaatacagatcttagcagaatcttgaaaaaagcccagagatccaaagagcccttcgagcaccacgcaagaagattcatcgcagagtcctaaagaagaacccactgaaaaacctgagaatcatgttgaagctaaacccatatgcaaagaccgtgcactggaataccattcttcgccaggccaggaatcacaagctccaggtggataag

SEQ ID NO: 40046 - DNA, 782 bp, Macaca Mulatta
ggatttcatggacttctacaaaataatgttgtattaatcactttttctagttcaaggaatttcaattccagggtacaaaccattgatttaaaaattacgtttccattatttttagtacaagtttaaagtaaatgcttaccatcagccagttgctgtcactgggaagaaggcaacttgaagtatttactgataaatagcctttattcccaagtgtgacttttcttcagtgtctacatattatgtcacacgttctatttgcactgctgcaatatagatcaaagatcttgtggcataggggtaagggagtgttactatctcccttgtcccatttgttctgttactgcttcattggactgatctaccctcatgaacttgcaatcacctaaatggagtcttgaatgtgtcaccttttgcttggttatttcaaccatgctgctatatataatcaggtgtggcacagtttgtcagtttgattctaggtgtgagtggagagaaatcattacactgtgctgttaacgatccttgtctgcttgctgttacctactttttacaggcatcataataaaagctagactatttctttgggggggaaagagacttatttaatgtaattaaaaaacttttcccatagaaaatgaaatattattgaaaatatatctattttttagccttcagcaaattgaggtgcctttgatgtggtgtctgctgggaaatctactgccattaatagggaacttggcctgtttagccttctcctagatctctattctaaaccaatctgt

SEQ ID NO: 40047 - DNA, 744 bp, Macaca Mulatta
gggtttaaatgtctccatttctttaaaactctcattcactcctggatacacagaattattaatatttatccccaaaactcaattgaaattgtcctggtgaggccacttgtgactgcattctaaatctagtggactcttctgagcctttctttttgtagacctagttagatctgctgtctctcttttcaatagttccttcttggtcttcctcaagacagcacttgttcaaccattacctgttgtgtttcccagggcttcatctttgacccaagttgttatttttctccatactgctttgggatgagtcttaacttctccctagtctcaacctctcctgagctgcaagcaaatactttacagattgttagaaatatgaattagatgcctcatgggcaattcagccttaagctgtacacaatagaatgtatcacttatctttcactctttcagtctttccaacaacatatttctccccagtcccttctcctttatcaaaaaatggcaccactactctgctgggtgccaatgccagcatatacctaagctagaaagcaggattcagggcagacccctcctttcctagtcggacagttggtgcggtcaacactagtgcattgagtggagactgtgtgtcaagtaatgggacgtcaggtcctgtcaatttttctcctgcatattcctcaaatcattcttgcttttttcccacctctactaatattgcccctaagaataatttattcctac

SEQ ID NO: 40048 - DNA, 196 bp, Macaca Mulatta
gaagaagatgggacagagattctcgacaacatttacacacattattcaggaacctgttttgatatattataggcaggaagtgtttttgctaccatgaaacctttacctagatcagccatcagcctgtcaactcagttaacaagttaaggaccaaagtgtttcaagtggatatcagtaaaggatctttggagccagg

SEQ ID NO: 40049 - DNA, 743 bp, Macaca Mulatta
  misc_feature (1)...(743): n = A,T,C or G
gggaatctgatacgtgctctactgttaaaactgtttcttaccatagtacatattagacttattaagccgaaaccacttttagctttaacattggttgtaaatttatatgattcaattttaataaccaatgcttaacaactgcaggcaaaattctaaaatgtaaccattggctcttgggagccagtaggggctgtatccagcacaccactgccccatcctttttttcttaactattagtgttgaataaacttctcatagttatgtacttgctgaactcaggaaattcctatcactgaccctggcaagggctttaaagggtaggaaaagcattaatgtcagtcctacacagcgaacttttgattttgaagaatgtgatagaaagaaaatgtttactgaaatacatgggaagcttgcatatttctaaagtcagctttatactttcatttctcaaagctaagtaaactgtggtataggcatctctaagatgttagcatttaaaacatcaattgtttaggtatttgtagaccttatttgatcccactgaaaattttaaatattaaaatatcttgcacagtctaccaaatgagttaaatcgttgtagttgtgtctacctcttatttttctatctgtatttaggctgctgttttggtgagattctaaatttctttttcccctggnaacacttttctgtgggaagacaagggaacagactgggggacagaagcctgaaaaaccaaattgga

SEQ ID NO: 40050 - DNA, 717 bp, Macaca Mulatta
  misc_feature (1)...(717): n = A,T,C or G
gggctttttgtccgacatcttagcaagcctgcggtgtctgctgctgctccccgagcttcgcaatgccgcccaaggacgacaagaagaagaaggacgccggaaagtcggccaagaaagacaaagacccagtgaacaaatctgggggcaaggccaaaaagaagaagtggtccaaaggcaaagttcgggacaagctcaataacttagtcttgtttgacaaagctacctacgacaaactctgtaaggaagttcccaactataaacttataaccccagctgtagtctctgagagactgaagattcgaggctccctggcccaggggcagccccttcagggagctccctttagtaaaggggactttatcaaacctgggttttccaaagcacagaagccttcaaagttaaatttttacaccccgaaaaattacccaagggggccggaaaaaatgccttcccaacctgtgctggggtggaaaaaaatgccctttggaaattaaggggtcccaaaacccaaatttgggggacccannnnnnnnnnnnnnnnnnnnnnncccttttaaattaaaaatccccgccggcaccgcatcccatggccccctacgggaggaccgcaaagaggaacggttgcattgttcaccaacatcacctggacctggcctgcccccgagtccgatcccccccccggcctaccgtacccgccccccccgttacaaaaaaaaa

SEQ ID NO: 40051 - DNA, 837 bp, Macaca Mulatta
  misc_feature (1)...(837): n = A,T,C or G
gggggagggatggaggaatgaataggcccagtgctcagactgtggttctctttgggagctgactgggagtaactccaaagttgaggggcagaacaaaggttttttattattatgtagataaagcccctcaggtaatctcttgaagttgccctcagaaaaatagatgaaaattctgtctggacatgatgcagacccctggtctcttttactctctggtggttgatctttcctggttatttcgtgagattttctagggagggagtcttaaaacaatttcctttcttttggaaagatgctttcttcatcagataaggaaattcccgagagattccctcctggtggcttggaaaagaggattagagagaccagggggcggggaaaagtcagagagcgattttggttctgagacctattctgatgacatgcatacgaggcaaggaaatactggatagaagacggcagccccagcgagggcccccacctccagcctggaacttctgcccaaagtgagaacatgcattcttgttttccccactttaatgttgcttttttggcctgcccgcccccatctttgggcgcataaaaaacctcggctcctttgggcagaataaccccagcgggaatatgccgaacagggagatcacctaacaagaacccccctggaacccttgacagaggaacccaactttgactttctcgcagggggctactttggacccgcctgggacttcttgcaacaaaaaacttctcaccccgggccgatggggaaacctagtcctggccgccgaaactcgccccccggggtaaaaaattacccttgtaacncggcgccggagn

SEQ ID NO: 40052 - DNA, 119 bp, Macaca Mulatta
gtgcaggaggagaggacaaaagaagaggacaaagccctggcttgtagccccatccaaataacggcggagaggaggcggagcctgtggtacgcaacccattaccccaccgatgagagaaa

SEQ ID NO: 40053 - DNA, 803 bp, Macaca Mulatta
ttttcttttgccttttttagaaaggtttttttggtttaaatagggtccccttcttgttcaatttttatttttgggtggtaattgcttttggagtatttaggtcataagttcttgcccaagatcaagttccaggaagggtatttttcaagattttcttctaaagttcccccccttacaacccatctgatcttggacaaagttgaggaaaataagcaatggggaaaggactcccttttcaatagatggtactgggataattggctagtcatatgcaaaagaacaaagctggacatttacctatcaccatataaaaaaattaactcaagatggattaaagacttaaatgtaagatataaaactataaaaatcagacagcaagttaaaagaggccatgggatgctgggagaccaatgaggaggctattgtataataatagtccaaaagagaggtgattataataacaatttaaagaggatacttttaggtagtaaaatagaagacaggtgataaagagtgaaaggcatccaaaatacccctaaagtatctgaattacaccactaaaatgtgaacattggaagaagatcaagttgtaaatcacctgttcagtttctcacttcaagtttccttggtaatactcaaaagcagaagtcaataggcagtatgactctggggaacgtctagacagatgtaaacacatgggccttctgagtttaggtggagatggaggctcttaggcataactgagcaaaccttgggagagaataagggagaagaaagcttgttaatcttgtatactgctagcc

SEQ ID NO: 40054 - DNA, 318 bp, Macaca Mulatta
cccgaagacctctgcgagtgctggcaccttaagcatccccacctggtgagacacagaaccccctctgcttcacccacccattcctgacctcaagcctccccatctgtctgtaactccactggctcctccccctgctccaggccctgcagcggccagcagggctcccctctccccttggactgtctctggccccaacaattcatctccctccggggtctcttgttgcctgactccatccaagcccagtgccccagctaggcactcacagtctgggcttggggatcaggaatactattatagaaaagtctacaagttgga

SEQ ID NO: 40055 - DNA, 1942 bp, Macaca Mulatta
  misc_feature (1)...(1942): n = A,T,C or G
aggggaaaaatggaaagaccaagatgttgaagatgaccccaaaaaccaaggaagaaannnnnnnnnnnnnnnnnnnnnnnnnnnnnnnnnnnnnnnnnnnnnnnnnnnnnnnnnnnnnnnnnnnnnnnnnnnnnnnnnnnnnnnnnnnnnnnnnnnnnnnnnnnnnnnnnnnnnnnnnnnnnnnnnnnnnnnnnnnnnnnnnnnnnnnnnnnnnnnnnnnnnnnnnnnnnnnnnnnnnnnnnnnnnnnnnnnnnnnnnnnnnnnnnnnnnnnnnnnnnnnnnnnnnnnnnnnnnnnnnnnnnnnnnnnnnnnnnnnnnnnnnnnnnnnnnnnnnnnnnnnnnnnnnnnnnnnnnnnnnnnnnnnnnnnnnnnnnnnnnnnnnnnnnnnnnnnnnnnnnnnnnnnnnnnnnnnnnnnnnnnnnnnnnnnnnnnnnnnnnnnnnnnnnnnnnnnnnnnnnnnnnnnnnnnnnnnnnnnnnnnnnnnnnnnnnnnnnnnnnnnnnnnnnnnnnnnnnnnnnnnnnnnnnnnnnnnnnnnnnnnnnnnnnnnnnnnnnnnnnnnnnnnnnnnnnnnnnnnnnnnnnnnnnnnnnnnnnnnnnnnnnnnnnnnnnnnnnnnnnnnnnnnnnnnnnnnnnnnnnnnnnnnnnnnnnnnnnnnnnnnnnnnnnnnnnnnnnnnnnnnnnnnnnnnnnnnnnnnnnnnnnnnnnnnnnnnnnnnnnnnnnnnnnnnnnnnnnnnnnnnnnnnnnnnnnnnnnnnnnnnnnnnnnnnnnnnnnnnnnnnnnnnnnnnnnnnnnnnnnnnnnnnnnnnnnnnnnnnnnnnnnnnnnnnnnnnnnnnnnnnnnnnnnnnnnnnnnnnnnnnnnnnnnnnnnnnnnnnnnnnnnnnnnnnnnnnnnnnnnnnnnnnnnnnnnnnnnnnnnnnnnnnnnnnnnnnnnnnnnnnnnnnnnnnnnnnnnnnnnnnnnnnnnnnnnnnnnnnnnnnnnnnnnnnnnnnnnnnnnnnnnnnnnnnnnnnnnnnnnnnnnnnnnnnnnnnnnnnnnnnnnnnnnnnnnnnnnnnnnnnnnnnnnnnnnnnnnnnnnnnnnnnnnnnnnnnnnnnnnnnnnnnnnnnnnnnnnnnnnnnnnnnnnnnnnnnnnnnnnnnnnnnnnnnnnnnnnnnnnnnnnnnnnnnnnnnnnnnnnnnnnnnnnnnnnnnnnnnnnnnnnnnnnnnnnnnnnnnnnnnnnnnnnnnnnnnnnnnnnnnnnnnnnnnnnnnnnnnnnnnnnnnnnnnnnnnnnnnnnnnnnnnnnnnnnnnnnnnnnnnnnnnnnnnnnnagtgtggcaatgatgtcagctgtattagttccttttggatatatgagagtacttatgctggagagaaattcaaggaatgtaaacggtgtgattaagccttcagttgtcctaattcactttgaagacatgactcatgcggcaattaaatatatgacaaatatgggaggcacttccactctcctgtaggactgcaaatatgcgaatggactcnnnnnnnnnnnnnnnnnnnnnnnnnnnnnnnnnnnnnnnnnnnnnnnnnnnnnnnnnnnnnnnnnnnnnnnnnnnnnnnnnnnnnnnnnnnnnnnnnnnnnnnnnnnnnnnnnnnnnnnnnnnnnnnnnnnnnnnnnnnnnnnnnnnnnnnnnnnnnnnnnnnnnnnnnnnnnnnnnnnnnnnnnnnnnngagtgcaatggtgtgatctcagctcaccgtgacgtccgcctcctgggttaaagtgattctcctgccttagcctcccaagtagctgggattacaggcatgtaccaccacaccccgctaattttgtatttttttttaagtagagacagggtttctccatgttggtcaggctggtcttgaactcctgacctcaggtgttccacccgcctcggcctcccaaagtgctgggattac

SEQ ID NO: 40056 - DNA, 119 bp, Macaca Mulatta
accacaaaccaaacaacaacaaaaggatattatacataccacctctttattgttattttcatggcagtgtttatagatttaaacctttcttttcagtggctgcatgaaatttcattcca

SEQ ID NO: 40057 - DNA, 546 bp, Macaca Mulatta
ttttacagtacatgagacttaaggggcaggatattccaaagtattttcgtcttgaacagttgcaagatgaatttaactttgtttctgaagaggaaatggcaaagagtaaacgtttccagctattgcaacttagaaatgcaggtcaattagataatttccttctacagcatatgcccctccatgacacagagattccagatttactcttccaggtatttggtttctatttgaatatggcttattgtatgataaagttaacagtttgctgctttaaccctatcttaatttatttctttttttttaagctaataatctgtagacagatttcctcccttctctataggcattaaaaatgtacgtatctcccaaattccagaaattcttcagcttgactttacaatttagtgttgtctagtctattcagtatttagcagccaaaatcctttaggcatattctaaatttatgtaactattgtatttttgttattgtaaaatgtatcacagatttaaaagcggctttgggagtaagggggagagatactaccg

SEQ ID NO: 40058 - DNA, 857 bp, Macaca Mulatta
  misc_feature (1)...(857): n = A,T,C or G
aggggaggcagggacacaggcatttataatcatacagagagaccacggtgaatattctctttgtgttcataactgaagctttaaataagttgcagcttactcatttcagacacatttgattgcagtggaggaaggaggaggagcaagtgaagacaatgaagcttgcctatctttaccaagagcttgatgatttgaaccgcttactgattgccctgtacttggaggatgtgaggaagcagaattgagccactgaagagaagaggaagacggaaccacagaactgagtgggatgtcccctgagcacttctttgtggagcaaaagtcttgcaagtctctagtgggctgggcaggctgagggtgttcggccgagaacacagctctgtaaataaatcagcaaggatgcatacatacagttttcctcaatgccccctcagacccttggaggctgggcctactccaaactctgctttctgccacaaaaaggaattaagtcctgtggagttctaaatacacattcccctcctgctttataccccactccctcaactttcattatattcttggaacccctggaaacaaaagagattttttaataaaactttcttccaaggcccaagaaaggaaaaccctgcaaccctcccatgggaaaaatagggaaagttgccaccagggaaaacccctttggaactgggtttccaaataagccatgggtgggttctcatggccggctttttcctgccaaaaacttttttcccccggccttcccctctttggaggaaagccaataacccaaactggaattctcggcaaaaattggatctcgtacaataattttcctataggtcacgagaaaaccn

SEQ ID NO: 40059 - DNA, 672 bp, Macaca Mulatta
  misc_feature (1)...(672): n = A,T,C or G
aaactttggtcttattgcccccattttcctattaaagtcatttataattttttccctattgatttgtaggagttcctttgtattttgtgggcactgtcttttcactctttaagatgtattttgatgattgagtcttaactctaatgtcaaattaatcagtcttctctcttatggttattgcnnnnnnnnnnnnnnnnnnnncatcctaatgctgatgtcattaagatattcttctatattcggtcatgtgaccattatagttttgctttccataattaggtcttcaatcctctggaatgacaaggatggatttttggtgtatgatgtgaggtaattaaggatccaacttaatgttttccgagtgtgggtatccagctgttcctgaacatttgattgaaaagtccatcctcttcccaggatgtgaaggccacctctgatacacagcaagcttccatattgtgtgggctatttcccaatgctcaatcctgtcccattggcctatttgtttctctctgtgtcaataccacattgccctaatgatcactgccttggaagaagtactgatgtttggtacagcaagttctcccaccttgttcttcaagaatattgccaattcttggctttttgcacttccaaatcgctgttagaatcagcttgccaaagttctcaccc

SEQ ID NO: 40060 - DNA, 76 bp, Macaca Mulatta
gtctgtaatgaagctgcgttgattgtggaggattcaattccattaaatcagaaacactttgaacaggcaattgagc

SEQ ID NO: 40061 - DNA, 817 bp, Macaca Mulatta
  misc_feature (1)...(817): n = A,T,C or G
ggctcttggtttcacagccccacaagccctctttgaagtgacctatccagtagggctagacctttctctcccctaccttctcccctcccctaatttttctggtctcctgnnnnnnnnnnnnnnnnnnnttagaatcagcatgcttaattctacacacagacacaaaaatcctattgttattttattgggattacatcagatgtatagattatctaaggaagaattgacatctttgtgaattgattgtcttcctatccaagaatgtggaatgtttttccatttcttcaatcttttgtgttacttgggagcattttaaagttttcttcgtttattttaaagcagtaaaaannnnnnnnnnnnnnnnnncacatgactaatcaattctaccaggaccatctattaaataatctgtcctaattaaaggtcctggggtttttctctatacaaaattgcagcaactattgtacttaagtttgcttctgaactcaattctgttctctggatctgcatgggccaatactattctatttttataactaaggatttaatacctacttaaatgagccccttctcgttactcttctttcaaacattcagtatattaaaagctattataacacttcttactctgttttagaggtggacatagacattacacacatacaaaaagaaaactaccagccaacctcactttaaagtattagttatcttaaaataattagcagattcagtagttttgtaaaacacacccacacaccatagccaaatggcatttattctagaaaaacaagggtcattttaatcttagggaaatcat

SEQ ID NO: 40062 - DNA, 648 bp, Macaca Mulatta
  misc_feature (1)...(648): n = A,T,C or G
gtgctctcggactctaggagttgagtcctcataaactggaaggctgaatcgtgggatattgctgtacctttgtgtccttaagatctggctctgccctgatagcaaaacaagatttcttccttttctctctttctatgagtcctctacaaatccctgggaatctcaatttggcacagcctcatatttagtttaaagtcatctacagctagccactaatctttgcctagccagagatttataattcagtcacagagttctggttcatcaacttgttttcattactttattgaactcaactatttttaatacaggctgagccccctaatctgaaaattcaaagtctgaaatgctccaaaattcaaaactttttggctactaatgtgacactcaaaggaaatgttctttgaaacatttcacatttcagagtaggaacgctcaaccgtaagtctaatgcaggtattcaaaaatccaaaaacatttgaaatctgaaacacctctggttccaagcatttctggtaacggctattcaacctgtatagaagacaaacagaaatagattattttccatatatggaagtttaaaccaataagacagtgcttctaatatatttaaaagactgttatacctcaanagtaccaaattttaat

SEQ ID NO: 40063 - DNA, 772 bp, Macaca Mulatta
  misc_feature (1)...(772): n = A,T,C or G
ttaggcttgccgaaaaagaaggtttaattggcaattttaaaattttccccctttcattttttccccttttcctttactatactaaagaaattctcttgggagtaaatctcaatccaaaaatttaaaattttcttcggcaaaaaggatttttcaatttgccagaagtttatcctgcagtccagtaggttttcagtgctatttactttcaataactaaattcactaaatattaacttaatcaataaaggatatattggacataagacattctgcctgggacttgatatataatgaatgacttccctcctttaaaagcttaaactcgaggagaaagagacacaaatcaaattaaccataaattacagattataaattatagaaaccataatttataaaaatcaaattaaccattagttagaaaactttgtttttttagaacctcattctgttgcccagtctggaacgcagtggcacgatcttgggccactaacctccgcctcctgggttcgagtgattctcctgcctcagtctcctgagtagttgggattacaggcatgcaccaccatgnnnnnnnnnnnnnnnnnnnnnnnnnnnnnnnnnnnntcgaggttttaccatgttnnnnnnnnnnnnnnnnnnnnnnnnnnnnnnnnnnnnnactggnnnnnnnnnnnnnnnnnnnnnnnnnnnnnnaaaccagacaaattatattttgcattttcttatgtaaatatatgattttaccctctatgtaaagctacaacaaataagcc

SEQ ID NO: 40064 - DNA, 612 bp, Macaca Mulatta
gccacgagcacttctgcggctgcccagagaagcaaaggtcgccggtccgaagtcgtccccctctccgccccccaggaggggcgagagggagcagcagctgatgtcagaaatacactttcgggaaatggcctctaaatcctggctgaattttttaaccttcctctgtggatcagcaataggatttcttttatgttcccagctatttagtattttgttgggagaacagggtgacatccagcctaatgttcttcataatgatcctcatgcgaggcattcagatgataatggacagaatcatctagaaggagaaatgaacttcaatgcagattctagccaacataaagatgagaacacagacatcgctgaaaacctctatcagaaagttaaaattctttgctgggttatgaccggccctcaaaacctagagaaaaaggccaaacatgtcaaagctacatgggcccagcgttgtaacaaagtgtcgtttatgagttcagaagaaaataaagacttccctgcttgtgggattgaaaaccaaagaaggcagagatcaactatactggaaaacaattaaagcttttcagtatgtccatgaacattatttagaagatgctg

SEQ ID NO: 40065 - DNA, 644 bp, Macaca Mulatta
  misc_feature (1)...(644): n = A,T,C or G
ggggagtcgtcttgtcctctcccctcgtccagtaagtaaatagtaaccgtgtctgttttcagctcttcactgggggaaagtcagtcagaaacctctactctttgctctaatacctgcaattggaggcttttcattttaccactgatgtagaagtcaagtccaattttgaagcctgtttttaaaattaaaaggtcacctgagatgcctgacattcagtagtacttcagagaagatgtattctcatgaggctgtctgaggcctgtgaagactgtcaaacaacagtagggtcaaccaaatagtataccatggtgttgcaagcaagagtattccaatcaaggaaatggatcagaaatacatatagtttaactgttttcacctaattattcatgtattttcatctaccttcttattgtaattcaatgacagtccaattaagcccgttttttcctttagaaaaatctagaatttcattttcctggttaccctttggtccgtaaaaaattttccagaaaatgatttttttcccagggtccaccaccctttagtttggtgccggcctttcaaaaaatggactttctagagggtcctttataaaaatttaaaattttctgnnnnnnnnnnnnnnnnnntgaggggattttggg

SEQ ID NO: 40066 - DNA, 764 bp, Macaca Mulatta
  misc_feature (1)...(764): n = A,T,C or G
ggattgaccagtgttttgaaaaagtcagtttaagtaggcagtcataaaaacacatacaggtcttagtcactttgttttgacttcaaacacaaaatacacattcaggcacaaatttttctttgggtatcttgactcaaatccccctttgactttcttgcataaatcacacccacaatcctataatttgtcacctattatttccaatttatttaaacttaaagacacttgtgaagcaatctgatatagcacacgtctagatttttaggattttcccttaatagtttatctttcacacctaattcaacatgtcagcaaatctctttgtgtattacttccaaagcacttaacgtagtttgcaaggaaacaattctttatgcactcatatttcatcagtttatataatatttaattcaattatatgattacaatgacgaatacacctggcataaacaggctagggacacatccaaccaacagacaactcaacccagaggtagttgagttcttgcttttctagaccaggagtcagcaaactatagctctgtgggcctgtttttgtacattctatgggttaaaatgccttttaggggccaggtgtggtggctcacacccgtaatccccgcgctttgagaggccaggggcggcggatcgcttgaggctgggagttggagaccagcccnnnnnnnnnnnnnnnnnnnnnnnnnnnnnnngaaataccaaggttaacccgggcgtggttggcatgtgccttgtaatccccagct

SEQ ID NO: 40067 - DNA, 764 bp, Macaca Mulatta
  misc_feature (1)...(764): n = A,T,C or G
ggatttggtccaggttgttgttgaattaatgagttctggttttaaaggtctcatgcagtgtttgagagcagaaatctaatgctactaacctttaagatgaggcttaaattcatttagtttgagggaaaaactgctcaaagaatgtagtccaagaatactgctttaaaataaaattaattcaggtccagagtaccacgcaccctgacttataaaaaggctgctgcaacttgcaatcaccagaaaaactaatgatataaaggccatcgtggatggccagtttgcctactcagtcaacaccttgttggtgatagatgtcaatggatgttactggaatctaataaaaatcacatactggggcgaggtgacatgccagttttctctatcaggacttccaattggaggacttgttcatcacagataaaaatatatttcagggcagcactcttatcctgagcttcagaccctctgacttttttaggtctggatacagagttctcaggtgctcatcattagctctccaggtgagacctgtgatgggttttgaaggggagggccaactctctgttgggcctaggtcctgatgtgtgactagcacacagcatgtctcaatgccgtgccagactgccacattgctacaaagagatgatgcttcctcatgccatcttatctgctttaatgcagaggggttcttgcacctcttagaaatggggaggttgaccgggnagcagtgactcacgccctgttatctcagcactttgggaagg

SEQ ID NO: 40068 - DNA, 653 bp, Macaca Mulatta
ggggacagaagtactagtcaaagggaggctcagcagctcagcgcctctgttaggcagtgctacgtggggtcagagctgggaaaggtgtcaccagcagtggtggccacctcctcctccactgagttggcctccagtgccaactctggagacagctatgcagtggaaggtgcccctgcttgtggggctcatcgtgctgagaacccatgtctgcagctgcaaatttgtagacattgataagaactcgaaggatttcgccagtgctgtggagtatgctgtgtttcagttcaatgaggaccaggaagacgagtttgcctacaagtttctgcaggtacgccggagccagcacaagagatggacgttgatatatttaatggacttggagatggggcgtacagtttgtaagaaacatgatgaagacattgacaattgcccattgcaagaaggcacagaagagaaaatggtgcgctgcacttttatagtagatgttcgatcttggttttcccagttcaccctcctgaacagcacctgtgtggagagaaggtggtgacagagcccatggttttttgcagcagaagtccccttttcctcccagagtgtgacagtctgtagtcctagatctgtgcagcctcggcagaattaagcgcatttcaagc

SEQ ID NO: 40069 - DNA, 516 bp, Macaca Mulatta
gaatgtttgacacgggataagacttattaaaaattggagagtcttcttaaagtatgtaactaagagcgacagcttaagagttcagtgtcgattgagaccactaatctggcacatggcttttatttgtccttttctatcgataatgaatactaggaatatggatggattcattagagaaataaaaatgggcaagatatgtgatacagcatattaaaagttaagaatccataaatagccacttaaaaatattgtcaaagcatcatggtatatgtagtgttgcttaaaaaagaagcagcagcagctcttctaagccaagcgctgcttcaaaacaaaaccttatatttaataaaatggagaaattaggggatgtcactagcgtaataatgccttctactgacattatttaaagtcagcttaaatatcattagggaagactaagactgttactattttctatgacctctagtcactaatttaactaatttaaggttaataacctctttcagagttggccaa

SEQ ID NO: 40070 - DNA, 540 bp, Macaca Mulatta
  misc_feature (1)...(540): n = A,T,C or G
aaatctcctatagtcttgttttggaatcatagaactgtctcgataaagcatgattcgatatgtatacttgacggactaaatgtaaataatctatgttacatgtttctaagcacactgctttaagcacatggactagtttacttgttttcgtaacatcacattataactgtactggcagagtgatgacaagaacttcagacgtggatcaacctggagaaggcagtttcctcctcgggaagtacatggaatcagcatgatgcctgggtcctcagaaacattaccagctggatttaggttaaccacaacatctgggcagtcaagaaaaatgacaacagatggtacagtagttttgtgttgctgcttataaagcanaaagcttgtttcgccaaagcttgtataattctctgaccttgctttctggaactattttcttgagttggtttgctctgcttgaaattactttgctctcatcacaaaccagactcctttttacactgctattgcatgaactcatggcactttgttcacattttcaaaata

SEQ ID NO: 40071 - DNA, 1367 bp, Macaca Mulatta
  misc_feature (1)...(1367): n = A,T,C or G
atgtagcttccagtaagtacttcagaaagttaaacaaggatgatttcctgtttcactgcattatcctggaacattctgcacagaatatcttctttaatcaggacatatctgattaaatgttttatctgataggtgtatactgaagcatggaaaatacagaaatatagactttatttccctacttttgaaactccacagctcctgagttaactgtagcaatggaaaccacataggtgatgtaaaccattgcatttttaagcacttccttggattttaattgaggatcatgagttatattcttgttcttcaacgaagaccatgtgtgtaatgatacccgacacctctggctcttgatttttagattaaacataccaaaaagaatagatattggtcggaactaacaaagagactgannnnnnnnnnnnnnnnnnnnnatcacgccatggcactttgctattagggtttgtcaagtgctccctgaatgtccccaattcttgccagtctgtgcagacaaataatgtcatagtaatgttaatactgttcttttttagatgacacctgtcactcttcnacctgcctcattaccttatgaaggggcagtagagacagaaggagagccgtatcatcccttccattgttttcaactcccccctctctccctcaggtacccatgaaacaactttgtcccttctccttcagcagaaaaaacaaaagcctttatagatatcaacttaggcagatctatcccttgtgagtcaccagctccatcttccctgtcttatttaggctcagccaggcccacgctgctacccatttatgaagctgcctggttttgctgagctgataaccataagggaactgggatgccatcacagcctagtggagattgggatcatcagctacggtagctgatcagcatgagcactacccccagtaaagggatcacagtagcaggtagaggaatggctcttaaggaccttattaacacattccagcaagatcacctgttggaggagatggaactcaaaatacatgaggtgagttggccaagaagacactcccgcatgtagttgaaaggaatgtattcatttctgtgaccttcaatacacaatggagtttaatcttagaccttcagattttctagggcaagacagggcagggagacatggaatccggatggaagcaaaggcacactatcctcttcactgggacttcagaggaagtaggatgacagaaaacatgggcggtgatgtagtttttgtatagaatgtgtcatgttttaatgaccaggatcctctgtgctaggtatcagcagcaaggcactgtttgtttatgacctctgccactcctgactttctacttgaaat

SEQ ID NO: 40072 - DNA, 589 bp, Macaca Mulatta
tctaacacatgtacccctctcctcccatggccattttcatggtattttagaaggtagaggctgtagatgtgtgtgctcagaagacaaaaaaacacaaggagaaatggcattgcttttcctgtatttttgaagtattttttggttcaccatatttgcagagaccaaatataaaatattatgctttctatgatcacttctcaatatgaatgaaaggtagtttaacttattgttctttcaggtaagtagaattattacaggttccagatggagaaactgaggcattgagcatttcgatgttggtctggtggcctgggatagggttgaacatattgactgcacaaaggaactttttttctttcttttatcattgctgcaagagggttttgattctattgcttagtaacataagagatgtttcagtcttttattccgggcgttttactttgttccaaaaggttaatgatgctgacctacctctccagtggtattatgaaacttaatgcttggaaagggctttgagatttgggaatgaaaagcacaggttttagtctagagtaattatcttatacatgtgagcttaaagagatag

SEQ ID NO: 40073 - DNA, 768 bp, Macaca Mulatta
  misc_feature (1)...(768): n = A,T,C or G
gggaaactttaagaagctctaccattactggactcatctgtaaaaaaatatttcagcaccttcaattggtttaaatttagttattctagggagaatccaattttaaaaatagaaattttgttttcagaaagtgattatcaagaacacctatgaaatcagctaaatgggtttgccaagtaagactatttataaaggcctgttgtatttgtgcctttgtaagagagacaataatttttccagggtcatatccatgtaattgagcaatttgagttctcccatttcctgtcagagtaggaatttgatccaaataaggagttagagtccgtgaattagtatgtggaagaaaaagccaatctaccaagtcctgctgttggacagtaacaccagtaggtgaatgttgagtcagaaaaattagcaaatctagaatcttctctggatcnnnnnnnnnnnnnnnnnnnnnnnaggccaaaagttttattatactttaagttctagggtacatgtgcataacgtccaggtttgaaggtacaagtttggaagaggaagaggatcaaatgactgtctgtcagatactacgtttattacctgggtaacaaaacaacttctacaccaaacccccatgacacacattttattgattttacaaaactgcacgtgtatccctgaaacctaaaatactagtttaaaagaaaatcttctatgcctctttcatggcctatgtgactatgggatatttaatttaaattatttgtggattccatttttccc

SEQ ID NO: 40074 - DNA, 1194 bp, Macaca Mulatta
  misc_feature (1)...(1194): n = A,T,C or G
tagctcccgttcctctttcctcacacggagccccagggcccctgggcttgtcgagatgtctgaggcggcaggaaatctcaacagcctccgcatggcgaatgtggccctgcgcgaagaattaaatgcccttcgcggggagaatgccaatttgggcctccagctcgggagagccctggccgaggttaattccttgcggggcaatgtctccagctacatccgttggccagtacccatagtgcctgtccttgcggaggagaacttggagttcgcgctcagtgagatcgaagccattcccgggggagaactgcccttcttgtgccggcctcccccacgcgcggagcccgactgtatctcggatgatcttttgattaacgtgatccaggatcgcagcacccccgacgggcccgctgatccccctctgctgcccatcccgcccccgccggcgctgcctccgcctgcgtcaaaggagccgcccccgcagccccctctgccaccgctggagtggcctgagatagagcccttttcaggcgacccagtctacctggctgaattcctgatgcagctagagaccttcatagccgaccatgaggatcattttcccgggggcgccgaacgggtggcctttctgatctcctttttcactggcgaagccaaggactgggccatctcggtcacccaggaaagaagccccttgcatgccaactntccgcgcttcctggatgaaatccgtaaggaattctgtggccccattcccccccgtgtggctaaaaagccattcgcaagctcaagcagggccactgtaccctcggcagctatgcagatgcttttcagttcctggcccaatcntgtctttggatgactgccacctcccaaaccagttcttcaagggcttgtcgannnnnnnnnnnnncaaaggcctgtcggaattcttccgcatagagctcttacggtcaacagaaatggccgacctagatgatttgattctcgaatgtgtggagatagaaagaaaagtgcgcgttcccaagcctatcccgctccctggggttcgaaatatcctcttcccttttgctcccaatgaggaagaaagtgaagatgaagagtactacagtgaagatgaagaccaggaggcacgcaggcacaggcttcaccccaaagaccagaggaatcgcatgagggcttttcagcaagagatga

SEQ ID NO: 40075 - DNA, 778 bp, Macaca Mulatta
  misc_feature (1)...(778): n = A,T,C or G
gggccttctctcgccaggcgtcctcgtggaagtgacatcgtctttaaaccctgcgtggcaatccctgacgcaccgccgtgatgcccagggaagacagggcgacctggaagtccaactacttccttaagatcatccaactattggatgattatccgaaatgtttcatcgtgggagcggacaatgtgggctccaagcagatgcagcagatccgcatgtcccttcgagggaaggccgtggtgctgatgggcaagaacaccatgatgcgcaaggccatccgagggcaccctggaaaacaacccagcttctggagaaactgcctgcctcctatcccgggggaaatggggggcctttggtgttcccccaaggaggaatctcccctgaaaatcatggggggcacatttttcccgggcccaaaaaaggtggcccaccctggccggcccccttggcctggggtgcccaatttggcttcccagggtggaaaagtccacctggtggccccggccccccgaaaaacaacgtggaaaattccgggggnnnnnnnnnnnnnnnnnnnnnntcctcttttttttcccacgggcctttttaagggggtaattcannnnnnnnnnnnnnnnnnnatcccccccannnnnnnnnnnnnnnnnnnnnnnnnnnnnnnnnnnngtttaaaattattaaattctggcccaaccctttgtttatttccctaataacctagggtgacaacaacataaattttttgtgggggggaaaatctcacacaagcgaaacaaaaccc

SEQ ID NO: 40076 - DNA, 2034 bp, Macaca Mulatta
  misc_feature (1)...(2034): n = A,T,C or G
gacagtggctgtgactatataccccacgcctccagctcccatgcctgggccaactacggggcttgtgacaggacctgatgggaagggcatgaatcctccttcgtattttacccaggcagcgcccatccccaataacaatccaattaccgtgcagacggtctatgtgcagcaccccatctcctttctggaccgccctgttcaaatgtgttgtccctcctgcaacaagatgatcgtgagtcagctgtcctataatgccggtgccctgacctggctgtcctgcgggagcctgtgcctgctggggtgcgtagcgggctgctgcttcatccccttctgcgtggacgccctgcaggacgtggaccattactgtcccaaatgcagagctctcctgggcacctacaagcgtattgtaggactcagacagacgtggagggagccgggtgccgcaggaagtcctttccacctctcatcaagcttcacacctgtggaggttctgccctggtggtctcacctctccagggggcccaccttcatgtcttcttctggggggaaatgtcgcaaaactaacaaacctccaaaccccaaaaattgctgcttggagtcgtgcataggacttgcaaagacattccccttgagtgtcagttcaacggtttcctgcctccctgtgaccctgagtcctcccatctaactgtgatcattgccctctccgagtatcttccagtgatctgccatcagtggctcttttttcctgcctccgtgggcctttctggtggcagtctcaaactgagaagccacagttgccttatttttgaggctgttctgctcagagctcagctgaaccagcctttagtgcctaccattatcttatccatctgttcccatccctgatgataaagatcttgccttatagactttacaggcttggcttttagaatctgtaacttcagacttcattagcacacagattcactttaatttcctaattttacctttttaagtaaaaagaggggctattaacacgcagtacagacatatccatgaggtcataaatgcatcctagaataccagggctggattttatcactgccctgtgtccccttgtttctctgtgccagatcatcagtgcccctttccatacagggatttttttctcatagggtaattatatgaacagtttttatgacctccttttggtctgaaatgcttttgaacagaatttctttcttttaaataaaacaaaaagnnnnnngagacggggtcttactgnnnnnnnnnnnnnnnnnnnnnctcctgggctcaagaagatccttctgctttggcctcccgaagtgctgggattgcaggcatgagctaccgtgtggggcctgaacataatttcaagaggaggatttataaaaccattttctctaatcatatgatcggtgtcattttcccatttgccagtgtagtctcacnnnnnnnnnnnnnnnnnnnnnnnnnggataatttcatccgctgcctttacttggggttcatgtggttcttaaacaccttcatcatggaactcccaaagtggggtcccttttgggttcctggtggtgggttttggaagataagggaaagcacattttgagcatgtctgggtaccatgggtgcggaacactttgggaaccagagctggtttcagaggaaatctgaagtcctgattttagttttcagagaacatggctttgttgtaaaacatcagaagaacaatggatttccaggaactcaagcagcaaagccaaggattcctaggttgggctgcctttgttcttctttttaagattcaagaaaaagtcctgggcctcgaccttcaagagtcctcgatttgacaataattcagcttagggaactcatgtgaatactactatgtaaaaataaaacctagaccttgagcgaacatctgtatattggttgaaaatgatagtggtaaccatggatcccccttacttcattcgatgtttggaaaattccagtaattatcattttggcatgatacggatacacctagtactt

SEQ ID NO: 40077 - DNA, 634 bp, Macaca Mulatta
  misc_feature (1)...(634): n = A,T,C or G
agagagctccctgcattttaccttgaaacagaaaaggcctgcaaaatcttaagtttcctggcctgcatttccaggtaggggcaaatgactccaagctggtctctaagccaatacccttgtaaaccagagtccaggaaagatagctcaagtgtgtaattctctggagctcaattctatgcagttgtgctatttcattaagtcactgtgtgtttttaagtgttgatacattaaaagtcgctttatggaagatgagtacattttttaaatacttggaaattttatttccttattaacttctacagatcagggcatgcaaccaaaagcagcttaaatgaaannnnnnnnnnnnnnnnnnnncaggaagctatttttagatttcttctggcttatgtttctattttaggaccctcatttttctcttattaaaaaaaattatttcctgtacatctcatggactgcagggtaaattatttgggcataaataatttaaatagttttctttcattttgactatctccagtaacaacaatttttattagccagcatattggcttattgcacaaatcttaaaatgtacattgactactttttgagaagaaagtggtatcagtactcgcgatgaaaaggttctact

SEQ ID NO: 40078 - DNA, 1202 bp, Macaca Mulatta
  misc_feature (1)...(1202): n = A,T,C or G
ggctacctgaacgtgctggtgaaccagggctggaaggaacgctggtgccgcctgaagtgcaacactctgtatttccacaaggaccacacggacctgcgaacccacgtaaacgccatcgtcctgcaaggctgtgaggtggccccgggctttgggccccgacacccgtttgccttcaggatcctgcgcaaccggcaggaggtggccatcttggagnnnnnnnnnnnnnnnnnnnnnnnnnnnnnnnnnnnnnnnnnnnnnnnnnnnnnnnnnnnnnnnnnnnnnnnnnnnnnnnnnnnnnnnnnnnnnnnnnnnnnnnnnnnnnnnnnnnnnnnnnnnnnnnnnnnnnnnnnnnnnnnnnnnnnnnnnnnnnnnnnnnnnnnnnnnnnnnnnnnnnnnnnnnnnnnnnnnnnnnnnnnnnnnnnnnnnnnnnnnnnnnnnnnnnnnnnnnnnnnnnnnnnnnnnnnnnnnnnnnnnnnnnnnnnnnnnnnnnnnnnnnnnnnnnnnnnnnnnnnnnnnnnnnnnnnnnnnnnnnnnnnnnnnnnnnnnnnnnnnnnnnnnnnnnnnnnnnnnnnnnnnnnnnnnnnnnnnnnnnnnnnnnnnnnnnnnnnnnnnnnnnnnnnnnnnnnnnnnnnnnnnnnnnnnnnnnnnnnnnnnnnnnnnnnnnnnnnnnnnnnnnnnnnnnnnnnnnnnnnnnnnnnnnnnnnnnnnnnnnnnnnnnnnnnnnnnnnnnnnnnnnntggctaccctgtaagctcagtacgagaaaaggaggagcgccggattgacctggagctgaagctggtggccgttaaggagcgcttgcagcagtccctggcaggagggccggccctggggctctccatgagcagcaagcccaagagtggggnnnnnnnnnnnnnnnnnnnnnnnnnnnnnnnnnnnnnnnnnnnnnnnnnnnnnnnnnnnnnnnnnnnnnnnnnnnnnnnnnnnnnnnnnnnnnnnnnnnnnnnnnnnnnnnnnnnnnnnnnnnnnnaggaatgggaaatgaagaagacctaggaagagaatgaggatttcattccaaaggaaatatcagcttgtccacctgaggaagaaatgcttttttcacaaggagacaccaagagaagactaggaagtagccctcgttctccagggcacccaaaagaccagcctttattgtcagcatgattttaggggatatg

SEQ ID NO: 40079 - DNA, 162 bp, Macaca Mulatta
tggaggggagaaccagaagaaacatctagaagagtacaaaatggctgcctcttcggggaggacccagggtgggcaaagcaaggcaagggactgccttttatcattgtaagccttatagttctatttgtctgttaaaaatatgtacctgttattaattttatt

SEQ ID NO: 40080 - DNA, 707 bp, Macaca Mulatta
ccaggttctgctccgctgttgtatttttgggtgagggtgaacaagtccccattgtggtctgtttccttcacatggaagatggggcagtgtttcctgtctcacctggccccataaggctcagtgttcttagcacctgaaagactgtccttgctcccagtggctctcggcgggacagactgaggcctcgctgtctcagcgtgcggaggatggcaagactgagctttctttgatgcggttctccctggcgcatccgctctggcgccccccagggcacagctctaagtttcttgggcacctctggggccgagtacaacaagatgcagctgcctggggtgccacctcggctcgcagcccccccaccccgggggtgctcagcaattgcacctcacccctggtgagtgaaagcctggcctccccttctgccctcacctccacaactcctctccaaacccttcccctctagcctcaccttaggtagtaacctgcctcactggcccccacccccagcctgctctcctgccttctttaggcctccccttcctccccactccctttctgtcctctcttctgactccctctttggctttccctctcctctcacacctagcctgaggccttcctggccaacctcttcatgcaccctctcctgcctccgagggatctgagcccgacagccccctgtccagctgcagccacagccagcctcc

SEQ ID NO: 40081 - DNA, 323 bp, Macaca Mulatta
  misc_feature (1)...(323): n = A,T,C or G
gggagaagttgtagggtggggggggggtgctaaacagacactgtacagagggaaaagagacgtaatttagctgtcttgctagcatgattctatttttaaaggaggggagggggagagtctggagctctaactgtttttagttgcatatggaaatatctaaaaaatatttagcatttttactaagtgcgttgaggcctctccagtgtcttcctggctgtggctgctttgtcattctctttgactagccagccatctaccttactcaggcctggaataaaagaagaacnnnnnnnnnnnnnnnnnnnnnnnnnnnnnnnnnnnnn

SEQ ID NO: 40082 - DNA, 694 bp, Macaca Mulatta
  misc_feature (1)...(694): n = A,T,C or G
aatcacacgattttcaaaagacacggcagatcctgtgnnnnnnnnnnnnnnnnnnnnaccttgttaaatagtggttgaggtctatcccgatggggcttttcctgtagcctgcacgtcgttggaaacgcctcatagagtaactctgtggttttactttactcacaggactattgttaggtctgtgggaaggaactacaagacagttgctaaaagttttaacgttatgaaaaaccagataatttacttttttaccttaggtattggcaaaaaccacacatctgtaccattcttgagtgatcgcttaggtaagttttaattggtgacagtataatcttttgggaaatatgattacagttcagatgatgaatttaactgttcaactgctgaatgataagggcatgaactaaaacttaattctgacagagctggatgtggctatataaaactggatcttaaatttatacttgggtattagttttaataactggaaatatatcctttctaaatctttaattggtactttctataggaatgaatgtgatttgaactcattcatgttgagaggtaagtaaaatatttaacttttaataatcaaggactcaaaagatgaaaaatagaaattaagtacaccatcccagtatttcaggtataacacagaattagtaagatactggcaaaaatgttactatatatt

SEQ ID NO: 40083 - DNA, 857 bp, Macaca Mulatta
  misc_feature (1)...(857): n = A,T,C or G
gggttatagtggctgcttttatttttacnnnnnnnnnnnnnnnnnnnnnnnngagtctcgccctgttnnnnnnnnnnnnnnnnnnnnttgcaatcttggctaagtgtaacctccatctcccgggttcaagcannnnnnnnnnnnnnnnnnntctnnnnnnnnnnnnnnnnnnnnnntgccaccacacccatnnnnnnnnnnnnnnnnnnnnnnnnnnnnnnnnnnnnnnnnnnnnnnnnnnnnnnnnggaactcttgacaggtcgtccgcccacctcaannnnnnnnnnnnnnnnnnnnnnnnnnnnnnnnnnnnaccctcggcgtaataagctgctttaaaatgctttattttataataccatcatctggatccatcttaaccatttacatttttttatttttccttttcccattgagaaatgggaaatattttcctaagttatttaaaatgttaacataagtgggtgggaactgttatttctggggaccctttcttggggagaaattcccctggcctttgaaaaaatttgtcccaaaaaaaataattgtggggggttttccaacatattggattgggttttaggaaagcaaaaaaaccctgggaacggtttcgaaatggttaggttggcttcaaaattttaactaggggcaaaatggaaaacaaggggctctcttttgtttttcaaaaatttttaagaacaccctaattagggggcaccttccttttcaacggagaacctttccaaaaaggtgcaaaaatttttgtaatcttttggcaagtaaaattttgggtagaattgaaagatttaaatttttcttggggaagtttttttatccgcttctacaatatttttg

SEQ ID NO: 40084 - DNA, 229 bp, Macaca Mulatta
gaaagttgtaaagatctttggaggttaatcatttgctttggcccctttaaaaatggatttaagttgtcggtttgctgttatttatacatttgatgtttagctttgtcatttttcctgagtaaggtttaacttctctgagtttttcttctataaaaaaataggggaattatcctatctcatatataattgttacaaagaataagtgagagaataatcagcccagtacctg

SEQ ID NO: 40085 - DNA, 253 bp, Macaca Mulatta
tgtagaagctgaggcacacagacgcgatgtggctgcccctgtctggtaactggtggccaggattggagcctgggtccaagctgcctgttttttctttcctaggccgtgcacctttctcctgggatagctggaggtgatttcatggaacctggaggctgggcttcaggttggcaggagaggctcccggctgggcctttgccgtggctctgctccgggatctccttgcttgagcggtgggggccctgcgtcctct

SEQ ID NO: 40086 - DNA, 684 bp, Macaca Mulatta
  misc_feature (1)...(684): n = A,T,C or G
aagtgttccctgnncctcattcctgggaagcagcatccacacaggttctaacccangcctgggaccctgtgtgccagcacttactctcttgtgtagcacatgtgacagtgaaggaggatgtatcaccttgatgattatggtattgggtcctgattccagcattcgtgagtcaagggaaggtccctactaaggacagaccttgggagggcagtttgtccaggacacacagctgctttcctcctgttccctgatcctgccctgggtctgtagtcatagttctggaaatttctcttgggtccaagactaggaggttcctctaagatcttatggccttgcttcctcccagcccgctcacaggacattttcttcccacaggtggaaaaggagggagctactttcaggctgcgtccaaggacagtccccagggctctgatgagtctctcatggcttgaaaagcctgagacaactgtcttgtgtggaactgagaagcaggatttcttcaggcctcccttttgaagagactctggcatctctttctgcaaaggcatctgaatgtatctgtgtccctgttagcatcatgtgaggaggtggagggacagcccacccccgtgtccaccgtgacccctgttcccacgctgaccagtgtttcctccccagtcatctttcctgttccagagaggtggg

SEQ ID NO: 40087 - DNA, 206 bp, Macaca Mulatta
tctcaagagacctgggttctttctgcaataaagggaaaagggaagaaccttcaaagaataaaatggaatcttaccttcctgggtttgattccccaagtttgataatttagcagtttttagttgggttaccctgagctaggccaaagactggagaaagaacaagaataatttctcacactgtataaatgccaaaggtagaagtgagt

SEQ ID NO: 40088 - DNA, 385 bp, Macaca Mulatta
catttaaagaaacacttggtcccatttcctcttctccactgtctcataattttaagaggaagacctggttgtgttttatactactactcccaatctttacaaagtacatactcttaagacctcagtgtatttaataggtattttataagcatagcccattggctcatgttagtgaaaccataatcctctttgcttagaacattaattaaagtcctaagaagtactacaaagcccaacactctttttagatgtattgtacgactaatataaacagttcaaaaatgtggaacattgtcatgtcacgtctgtgcaaattatttaacgtggcatattatggcagattaaaatttagatacttggcttttcttgggcaagcccactaaag

SEQ ID NO: 40089 - DNA, 615 bp, Macaca Mulatta
agcattaactcgtgccgtgcctcccgcggccgccgccagccacgggcttgcagccggacgtccggactcggagacacgatccgctgactgcccgcaataaaaaagaaaacccaccccacgctgctgtccacctcaacgaggtccggaatgggaggcggggtgcggttctcgtccaagttctaccccatttgctttgtggctgcatccgaaacggacgtgccccgggaaggcgtctacgctccgaggcaaggttgcctccgtgcagtttctacagcctgagtttaaactagtcctttgcattctacccagccctctgcaatgcggatgtattttaattcttaaattctttatggaacagcattctaagttgggcttgattatttaaccttgcatttctttcatagttcaagttgacgtgtctagataaggatcagctctcttgaagaagcattcagcttttccattaaatatatttttacaaaaccagtgccccgaaggtcatctctcattacacacaccacaatgatcaaaaagggaaaatattaacaccaatttgtctacccaacttaaataaaactttcctcttacgttgcattatcggaaaggtatgttcat

SEQ ID NO: 40090 - DNA, 161 bp, Macaca Mulatta
tcaggggaatgaattggaagtaaccattatgatggtggtagaagcactatgtgaacttcattgtcctgaagctatacagggaattgctgtctggtcatcatctattgttggaaaaaatcttctgtggattaactcagtggctcaacaggctgaagggaggt

SEQ ID NO: 40091 - DNA, 4034 bp, Macaca Mulatta
  misc_feature (1)...(4034): n = A,T,C or G
ccgcccgcccaagtaggtttgcgcttccctgcctttaataactatccccaccgcagaggagcggaagctagaaacacaccggccttggcatttcaggcaagtcgagggtggattatcagggcatgtagaagaaggggaagggaagaaaaagagcgctggagacggggagaccacacagggagacagtgcacagagctgccgcagccatctgccgcgacttcacatgccgccccggaaactgacagacactgcttcagcaaggcccagcccgtcagatgagtcaatcaatcaaaaaaattcttatgaaacttaatcatagagggtcatgttagggagtggggaacagattaaattaccacagtattagatacgggaaatgatttctgtcaaaaccatctttactgcaattataatatgttaattatgtatttcattaagtaagtggattagagtctgcacagatgaaatcatgtggaggctttgaatcattcgccgagcacggtgggaggacttctgtgaatggatctcgtttaatttggaaaacttttgcatgcaaaatgtgatttttccccccttcttttgtgagcctggccctcggcctcagtggagaaaatgcccaggttgctgagaggagaatccgctgattgcctcctccatactctgaagtcagcctgtgaggtccgtgtgctgggaaccagtcccgagctctttccatcttgcttcttcctgcttgcggtgggcaaagcgatgctgatggcctgcaagggggatggacacctctgagtgcttgctcatcttctagcacagttaggcaaagtcttcgtgaggttcacaaccaatggacaaccagtgcatcagaagactgccagggtaccatatcctggtgcatccacgtgtcttctggccacatcgcatgacatgcgtctgcttttctcatttggcctttggggataccctgcccacagggaagacagttttgagaagctccagtggagtcccttgcaagggagatggttgccccgctacgggcaggatggcccacagctcacggggcagatacaatcggattgttttgcagcacatatctcaggccagctcttcaatcctctctcccattgggccctgctgtttggtaaaagggctatttagccacttggtttccaggtatcnnnnnnngtagttctgaagcaaggaatgggtgtcgggcaccccggtaccaccgaagtccccttgggccaccatggtgtggtctgtccctccatagatggacccttgtatcttgtccctactcaacctcagaatctaagctgaacataaggagcctgcccatctcagcttcagttcaaggcaacagaggccaccaaggagcagactttccatatctctgcaactcttccattcttcttggcttccgaagatcttctgggatgtaagggacagttgagtcataaaggacataagaggtaatagttattcttcagaaagaggaggtatccagtgcacatacatttcctgggtccctgagtattccattatcagtaataaccacagggaagttctgacgaagaggagaaaggagaggaggcaggcggacggggcctgcctggagagacatagcagtgtaagnnnnnnnnnnnnnnnnnnnnnnnnnnnnnnnnnnnnnnnnnnnnnnnnnnnnnnnnnnnnnnnnnnnnnnnnnnnnnnnnnnnnnnnnnnnnnnnnnnnnnnnnnnnnnnnnnnnnnnnnnnnnnnnnnnnnnnnnnnnnnnnnnnnnnnnnnnnnnnnnnnnnnnnnnnnnnnnnnnnnnnnnnnnnnnnnnnnnnnnnnnnnnnnnnnnnnnnnnnnnnnnnnnnnnnnnnnnnnnnnnnnnnnnnnnnnnnnnnnnnnnnnnnnnnnnnnnnnnnnnnnnnnnnnnnnnnnnnnnnnnnnnnnnnnnnnnnnnnnnnnnnnnnnnnnnnnnnnnnnnnnnnnnnnnnnnnnnnnnnnnnnnnnnnnnnnnnnnnnnnnnnnnnnnnnnnnnnnnnnnnnnnnnnnnnnnnnnnnnnnnnnnnnnnnnnnnnnnnnnnnnnnnnnnnnnnnnnnnnnnnnnnnnnnnnnnnnnnnnnnnnnnnnnnnnnnnnnnnnnnnnnnnnnnnnnnnnnnnnnnnnnnnnnnnnnnnnnnnnnnnnnnnnnnnnnnnnnnnnnnnnnnnnnnnnnnnnnnnnnnnnnnnnnnnnnnnnnnnnnnnnnnnnnnnnnnnnnnnnnnnnnnnnnnnnnnnnnnnnnnnnnnnnnnnnnnnnnnnnnnnnnnnnnnnnnnnnnnnnnnnnnnnnnnnnnnnnnnnnnnnnnnnnnnnnnnnnnnnnnnnnnnnnnnnnnnnnnnnnnnnnnnnnnnnnnnnnnnnnnnnnnnnnnnnnnnnnnnnnnnnnnnnnnnnnnnnnnnnnnnnnnnnnnnnnnnnnnnnnnnnnnnnnnnnnnnnnnnnnnnnnnnnnnnnnnnnnnnnnnnnnnnnnnnnnnnnnnnnnnnnnnnnnnnnnnnnnnnnnnnnnnnnnnnnnnnnnnnnnnnnnnnnnnnnnnnnnnnnnnnnnnnnnnnnnnnnnnnnnnnnnnnnnnnnnnnnnnnnnnnnnnnnnnnnnnnnnnnnnnnnnnnnnnnnnnnnnnnnnnnnnnnnnnnnnnnnnnnnnnnnnnnnnnnnnnnnnnnnnnnnnnnnnnnnnnnnnnnnnnnnnnnnnnnnnnnnnnnnnnnnnnnnnnnnnnnnnnnnnnnnnnnnnnnnnnnnnnnnnnnnnnnnnnnnnnnnnnnnnnnnnnnnnnnnnnnnnnnnnnnnnnnnnnnnnnnnnnnnnnnnnnnnnnnnnnnnnnnnnnnnnnnnnnnnnnnnnnnnnnnnnnnnnnnnnnnnnnnnnnnnnnnnnnnnnnnnnnnnnnnnnnnnnnnnnnnnnnnnnnnnnnnnnnnnnnnnnnnnnnnnnnnnnnnnnnnnnnnnnnnnnnnnnnnnnnnnnnnnnnnnnnnnnnnnnnnnnnnnnnnnnnnnnnnnnnnnnnnnnnnnnnnnnnnnnnnnnnnnnnnnnnnnnnnnnnnnnnnnnnnnnnnnnnnnnnnnnnnnnnnnnnnnnnnnnnnnnnnnnnnnnnnnnnnnnnnnnnnnnnnnnnnnnnnnnnnnnnnnnnnnnnnnnnnnnnnnnnnnnnnnnnnnnnnnnnnnnnnnnnnnnnnnnnnnnnnnnnnnnnnnnnnnnnnnnnnnnnnnnnnnnnnnnnnnnnnnnnnnnnnnnnnnnnnnnnnnnnnnnnnnnnnnnnnnnnnnnnnnnnnnnnnnnnnnnnnnnnnnnnnnnnnnnnnnnnnnnnnnnnnnnnnnnnnnnnnnnnnnnnnnnnnnnnnnnnnnnnnnnnnnnnnnnnnnnnnnnnnnnnnnnnnnnnnnnnnnnnnnnnnnnnnnnnnnnnnnnnnnnnnnnnnnnnnnnnnnnnnnnnnnnnnnnnnnnnnnnnnnnnnnnnnnnnnnnnnnnnnnnnnnnnnnnnnnnnnnnnnnnnnnnnnnnnnnnnnnnnnnnnnnnnnnnnnnnnnnnnnnnnnnnnnnnnnnnnnnnnnnnnnnnnnnnnnnnnnnnnnnnnnnnnnnnnnnnnnnnnnnnnnnnnnnnnnncataagatattgctgtacaaaggctagtttcctaccatgattgctgttcataaaaaagatgtttaggaaaaaatataacatggcgctccagattcctactaaaaaatgtacattctagactataagccttctaaaatctggtgaaccatgctacaaaagagaaagaccatgtgtaaaattaattccctttccttcatcttacttgtagaggaaggagtggaagtacagtcatttaagttgagaataaaatgccattgcagttttgggagaataagaaactctacgatcatcagacagtgatgtctgattggcacttgataaatatcacccatagtttgttgaacagacacgttctcactatttaaaggtactccacacatcaggcagttgctatcacttgacttcttgttttattttgt

SEQ ID NO: 40092 - DNA, 820 bp, Macaca Mulatta
  misc_feature (1)...(820): n = A,T,C or G
ggcaannnnnnnnnnnnnnnnnnnnnnnnnnnnnnnnnnnnnnnnnnnnnnnnnnnnnnnnnnnnnnnnnnnnnnnnnnnnnnnnnnnnnnnnnnnnnnnnnnnnnnnnnnnnnnnnnnnnnnnnnnnnnnnnnnnnnnnnnnnnnnnnnnnnnnnnnnnnnnnnnnnnnnnnnnnnnnnnnnnnnnnnnnnnnnnnnnnnnnnnnnnnnnnnnnnnnnnnnnnnnnnnnnnnnnnnnnnnnnnnnnnnnnnnnnnnnnnnnnnnnnnnnnnnnnnnnnnnnnnnnnnnnnnnnnnnnnnnnnnnnnnnnnnnnnnnnnnnnnnnnnnnnnnnnnnnnnnnnnnnnnnnnnnnnnnnnnnnnnnnnnnnnnnnnnnnnnnnnnnnnnnnnnnnnnnnnnnnnnnnnnnnnnnnnnnnnnnnnnnnnnnnnnnnnnnnnnnnnnnnnnnnnnnnnnnnnnnnnnnnnnnnnnnnnnnnnnnnnnnnnnnnnnnnnnnnnnnnnnnnnnnnnnnnnnnnnnnnnnnnnnnnnnnnnnnnnnnnnnnnnnnnnnnnnnnnnnnnnnnnnnnnnnnnnnnnnnnnnnnnnnnnnnnnnnnnnnnactaacactttataaattgaatccaataaacttgattcaacgggaaccagtttacccctaggggaatacaagcgccaattcttatttccagaagtccattaccgaacaaataaaaactttaccacccctccaatgtttggaataaggaacatccctaaaggggtgccagcaccctatacaagggggtttggttttgtttccaaacaatatataaggtccc

SEQ ID NO: 40093 - DNA, 661 bp, Macaca Mulatta
ttttgtttctgcgtagtgatgtttgacttcctattaatcaggaagaattaaggagaaatcatgtttgttaatatttgtaaaataatttgaaagggaaagattccatgccaattattgggttcctcaggaccagttagttaaaaaatacaactctgggtcagatgagaggacagaggcaaatagcatgcaattgttcatgttgtcaaatcacaagtatttggaatttcaatctgttttcattttctgtcatctccctttctcttccatctcacttctaactactaccatgagtgctgatttctctctatctttcctatactggtcccgtcaagatttcaaaaagtcgctgaatgtttgagatgaaagtgatcttagagatcatctggcccagcactacccactagaaatatagcaaaccacataatgtatttcctaaattttctaatacctgcactgaaaatgtaaaaataaacaggtgaagttaatatttaacaatataactcatttaacccaacatatcaacagatcctttcagtatgtattcaatattgaacatattaataagataatttacatatttttatttttactgagtctttcaaatctgatatgtataccacagcacatctcagcgaagactagccacatttcaagtgctcag

SEQ ID NO: 40094 - DNA, 832 bp, Macaca Mulatta
atgaatgtaacgagtgtgggaaagctttctttctgagttcataccttattcgacaccagaagatccacactggagagagagtgtatgaatgtaaggaatgcgggaaagcgtttctccagaaagcccatctcactgagcaccagaagatccactctggggacaggcccttcgaatgtaaagactgtgggaaagccttcatccagagctccaagctgcttctgcaccagatcattcacactggagaaaagccctatgcctgcagttactgtgggaaaggctttattcagaggtcaaacttccttcagcaccagaagattcatactgaagagaagctctatgaatgtagtcagtatgggagagattttaactcaactacaaactttaaaaataatcaaagtgttcaccaagagggactctccttgagtaaggcccccatacatttgggcgagaggtctgtcgatcaggggcaacacatagataacttataaaataattattctcccgcccaatgagtgatgtttggaaatgcgtggaattaggattcatgtggtttctaagatttggacatgtcagaattttgtgaatcatggatggagctgcttttggagtggatgccacctgccactgtgcagcactagcaggctcacccttctcctcagctgtgagcactgtcctcgggagagtcacagggcttgacacctgactctgagctggaacagtaggggcagggaggagacaggtctcaagaaaaggttttttaaaaattttatccacagtaacagtccatccttgagttaaatcccttttagagcagaacattgtatctaatctt

SEQ ID NO: 40095 - DNA, 641 bp, Macaca Mulatta
tttaggactgatgtatctgtgacaagcatgccagaagtggccggggccatcagggctaaccacttcaacacccaccatcctcccatggggatccaagacctgagacaaagcaacagcccgcccagatccctctgttcatcctatcccttccaaggttggtccatgccaacataacctctgagcatcagacatcagcaggtctgcatacctcagccctgttaaggggaaggtttctctttcgccctcttcctgcacctggaagcaaaggcactaccagtagagaagggccatccagccctgccccagcctggacgcctggggctcagatagaggtgctgagcccctatgtcaaagttgttaaatgtttttgttttgttccattgtagctcttttttctcccctttcctggtgattgattttataaaagaaagtgagctgcttagaaggccctggaagggaagtgaggaggagggacaaggaagatgactagttacggagggtgagggttgttttttgccaaaaaagcctggatagagtgatctgaattatctggcaccctcctgaatggaacccaagagtacctcctgtgtggaagggtccctggattttctctaacacccaccctctcccccgtcagccat

SEQ ID NO: 40096 - DNA, 782 bp, Macaca Mulatta
  misc_feature (1)...(782): n = A,T,C or G
ggccagtttattttttcttattattaatggattatatggttattatatatgtctttttccactacaagaaatttttgccttccccaaggtctgaaagatatttttctctatattttcttctagagtcattgcaattttaacttttcttatgtctatgatgattttgatttaatttttgagcatagtataaggtaggggtcaaggttcgcttatttcccttatccagttgttccaatcctatttttaaaaaagaattttctttcccctgaatagccttggtaccattattaaaaatctgttgaccatatatatgtggatctatttcaggattctctattctataccactatctatttgttgatttgtatgtaaatattacactgaaatcaggcgaactctccaacatgtttttcttctttgtcaaattaaagggaaattatatgttttangtcctctgcattttatttcattttagaaccaacatctcagtttctatcacagcctactgggattttgattgggattatgttgaatctatagagccatttggggagaatagtattttaataatattgaatcttccatccatgaatatggtatatctctctatttaggttttctttaatttctcttacatgcatttcataatttttaacgtagcgatcttatacaatttttgttaaatttatttctgaagattttctttaattttgatgctaattataaatgtttttataaatttaaattttccagtttattttgctgcctagatatttttttta

SEQ ID NO: 40097 - DNA, 725 bp, Macaca Mulatta
gggttttttgaagtcaaatattgcatgatgtaaagaaaaaacttaaatgagtaggttgtcctgaattacactggtaactctacttctttattaaagaagttatagtaagatgcctttgttacctgatttcagtgtatattgtttttatgtggttttctgataatgtcctatcagaattgtattggtttaggccaaaggccatagcaaaaacagagaacaaatacagatacaatatgatcttaaaaatagattgtaacattttaaacaattatgtaatttgggaaatactggatgcgtaatactttaacagaagtcacacatctgtaggtttatcttttgattattctcctgggtcattagataatttttctattataagtgacagattgattcacttaatataaataatacaagtagcatacactaaaagcttactgtgtgccagatactgtgctggacacttacatagataagctattgaatccacaaagcagccctgtgagaaataaataaaatctgcataaagtgttgaaataggaatacgcatttcattatgaaaaatgagtaattatgccaatctgaatcaatatagcattcaaataagtgatgactttaatcatatatcatagtttacactccttaaaaaaaggtacataaaattcagtgaggttttttttcctttaacatatagaaaatacctaaaataatgccttgccaacattaat

SEQ ID NO: 40098 - DNA, 495 bp, Macaca Mulatta
  misc_feature (1)...(495): n = A,T,C or G
aggcaatcctggagaacaacctcccttctgaaatggctagcaagatcaaccttgtggacctagcaggcannnnnnnnnnnnnnnnnnnnnnnnnnnnnnnnnnnnnnnnnnnnnnnnnnnnnnnnnnnnnnnnnnnnnnnnnnnnnnnnnnnnnnnnnnnnnnnnnnnnnnnnnnnnnnnnnnnnnnnnnnnnnnnnnnnnnnnnnnnnnnnnnnnnnnnnnnnnnnnnnnnnnnnnnnnnnnnnnnnnnnnnnnnnnnnnnnnnnnnnnnnnnnnnnnnnnnnnnnnnnnnnnnnnnnnnnnnnnnnnnnnnnnnnnnnnnnnnnnnnnnnnnnnnnnnnnnnnnnnnnnnnnnnnnnnnnnnnnnnnnnnnnnnnnnnnnnnnnnnnnnnnnnnnnnnnnnnnnnnnnnnnnnnnnnnnnnnnnnnnnnnaacgtaaagctgattagagaactcatagaagagattgaaagactgaaagccctgctgctgagc

SEQ ID NO: 40099 - DNA, 815 bp, Macaca Mulatta
  misc_feature (1)...(815): n = A,T,C or G
ggtaatgnnnnnnnnnnnnnnnnnnnntgtgactttttggaagtcatttttgcttnnnnnnnnnnnnnnnnnnnnnagtaattacttcttccactaacaaagaaatgcatacccatgataaaagttccagcactttaattaaagtttaagcacagaataatataatatgaaaagaaaaaatttatatcctccccaatttcttaatcaaattatctacggtaaccattaacagtatttttatataaaaagctgtttgtttcagtggaaatagtcctcgccaacctcagttaagcttcacaactacagttgtgcctttactttcctcacccaacatagacaatgtgaatttttttattgcatgtcattgagatttttatcacaatgacctttatatgaaccaaagcaccaagtagacttggtctctacgctattgcctcaggatagggatgtaattttaacatcagttttcgatcatattagaaatatctatctcaacaaggcaaatgacacttatttcgttcaaatgtttaaacaattcccattatgagtaagatattggaattggggacctagatattcaaaatttctgttttgaaatgttagcatgggttagactttgaacataaatttattttaacctactttttgtcctttctatttctaaacaaatgaacaaaagttttattttccatgccaaaaagaacattaacaattttcccaatggaatttccccttaaattaaacttttaaaaaatttggatttttaacccaaatttttacccattacacaattttcctcttttttgggtgggtta

SEQ ID NO: 40100 - DNA, 268 bp, Macaca Mulatta
  misc_feature (1)...(268): n = A,T,C or G
ttcaaattcatttaggtgttacgagatggagaaaaggctaaaaacaccagatcttttcaaattccctttctttgaagccatatgttggttcgtagccaaaaacttgctggaaaccctgaaaggtaattaataatttacatatttgtatatgatatgatgcatattgtttgtcagtttgctcatagccaccttacagaaagagtcccttttctagtanagtatggatgtcactcctattttgttttttaaatatatggttttcccccat

SEQ ID NO: 40101 - DNA, 843 bp, Macaca Mulatta
  misc_feature (1)...(843): n = A,T,C or G
gggttttatgaatgtcagatagagttagaaatctgttacaaaataaattttaaaagttttacacgtggccaggcacagtgaccnnnnnnnnnnnnnnnnnnactttgtgaagtcgaggcannnnnnnnnnnnnnnnnnnnnnnnnnnnnntnnnnnnnnnnnnnnnagtgagactgtctctacaaaaattttacaaattggttgggtctgctggcatgcacctgtggttctagctgnnnnnnnnnnnnnnnnnnnnnggtcacttaagcccaggaggtcaagggtgcagtgagccacaatggcaccatttcagnnnnnnnnnnnnnnnnnnntgagatcnnnnnnnnnnnnnnnnnnnnnnnnacacccatcagaattgctaaaatgaatagtgacagcctcaaatcttggtgacagagaaactgaatcactcatattgctgggcagaatgtaaagtagttttaccttctttcaaaatgaaaaatgcaactctgcagttacacttttgggtaannnnnnnnnnnnnnnnnnnnnncctcccataaaaaccccagccccaaatttttaacagccacctttattttgggggaaccccaaatctgcaatttaaccccaatgtacctttcaagggaaatgggttaaaacccaggtgttgagggggctttgttaccatgggaaaaaacccctgggcaggtacaagggaaagggaacttgtttgcccaaaaaactaacaaacctgttatgtccgaaatggttaaaaatgcccaaaaggggttcaaaccaagttaatggcgtttccacttttatttgaagaaatattaatattgtggaatttttttaaaa

SEQ ID NO: 40102 - DNA, 785 bp, Macaca Mulatta
  misc_feature (1)...(785): n = A,T,C or G
gggtctcaattctttctcttgtagcatgaatcaaatgtatttattaatagcacttacgactatagaataaatgaataatacatatgattcatattacatatgtattattcannnnnnnnnnnnnnnnnnnnntttaattataaacttaatgagttttttttaacaaatgagattatagctattaatgcaaattttctggtaggtatctcttttattgctatgacgattccaacttaccagagacctcccatttgccttttcatcatggtaaaagctttgtcctcatctactaaagtacaaaggaattatttggaagcagattattttagtcttatgctagaggatgaatttgttcattttaatgggtgatcttttttccctatcaggtgtaattgctttcctttcctttataatgtggaagttttctcacctttgactaacagtaaagttcatttatatgtccataccaagaagacttcagtgcaaatactttgagagcacctgggtctacaggacataattggcctccaaatcctcttttcttgttaatagtagggaaatagatgtagtattggaataccctgattcctttttgggtcctaattacctcatttcttgttccttttttcttactttcctttttgaattcctaaggtggctgggtgttttaaagggaattttaaggtttaaacgagtcgccagacccaagcgaaatgagcaatttgggaaataagaattttggagtacgcgggacccaaaaccctgaaacgaaggcatattttaat

SEQ ID NO: 40103 - DNA, 778 bp, Macaca Mulatta
  misc_feature (1)...(778): n = A,T,C or G
ggggtcctgcgttccgtttgcctcagaaatgtgtgttagagaaggcgggttgtcacgtttctacaagcctttcagtcagaagggaaaccttgcctaagtcctcgtagttgagaaatctctaagaggtggaagcaagtactgcacatgcatgttggtcctgtgagggacatcagccagtggagagggagaggttgaaggaacagaaaaaggagaagattactcactggtgaagctgaacccagatctacacatacatctaatcttatcaaaatgtgtgaaagtaaagcaatctgaaggaaattcagtaccatgcagtgtactgactgaaatacatcacattgctcataccaagaataagagtggagaacgaccatttttttcctgctaaaatggtggaggcagaagagcaacagccatggaagacggacttctattctgaattgccaaaagtggaacttcatgcccacttgaatggatccattagttctcataccatgaagaaattaatagcccagaagccagatcttaaaatccacgatcagatgactgtgattgacaaaggaaagaaaagaactttagaagaatgtttccagatgtttcaaactattcatcaacttactagtagccctgaagatattctaatggtcacaaaagatgtcataaaagaatttgcagatgatggtgtncagtacctggaactaaggagcacaccccagagaagaaatgcctaccggaatgactaaaaaagactttatgtgggaatctataccttgaaagc

SEQ ID NO: 40104 - DNA, 658 bp, Macaca Mulatta
gtaatgacgccttatatcgtagtaactttcctggctctgaagttcctttgcctcagatatgaatatagttacttcagttggattagtgtttacatggtatatcattttcaatccttttacttttaacctttctatataatatttaaagtggatttcttgtagataacaaatagatgggtcttgtcccacactgagaatgtcttttagtcggtatgtttaactatatacgtttactataattactgttatgtttggatttgctttactgcttaagattcataaaaatagacttgaaaatgtgtttttagcaaacattgtaaagtatttggaagtgataccaagaaattagtcttaagaggtgacaaaggattcaggcaaatgtttgagtactacttctgtccttggtcaagccatttaacaacctctgtgaaatggaagtactatacaattttgttcttcatttggttccaaagctaacaggacaggaaaatttgcttatattcaaaattaaactaattttagactcacattcaaaataactcttactttaagagaagcatgtgggatctggtttgtactgagggagtaggagaaatgcatctcctctcctcaggtcaccctaggtcataagctcatgagtagagtgactagatgcagt

SEQ ID NO: 40105 - DNA, 856 bp, Macaca Mulatta
aaatttctttctattttgtcgctcattcaccaacagctcttggactccagcccttgttacccctttcaatgacacaactgccaataagtcatacctaattcttttttcagggatagacttgattaaggatataagttcatcatttattatgtataaaataccattgaaaagatattgctgttaattttttatttaacacctaaagcatttccaacatcactttgctgcccaggtatgtatctatagttggcctgcaagacacttttattgattcttcaattttggtaaaacttatgtttacaagaagaaaacaaatcaaaacattttttgtattgtctggaaatagttcactctagtgtgtatctgttaatttatttgtcatcaaaagagcactttgcctaaaagaaaggactgacaagtgtgcaaaatgtttacagtcttttgtgaaattgtagtttatcattagtttgtacctgtaagttattgttataaatattacctgtattttttgttacatacaactttatactttgaagcttgtatctgtgaattcgcaactgaaatttattttgccaatgttttctgaatgaactgaataaagcttctgttgtagcatgccatgcaaacacattattgtgtttgtggttgatgaattatggctgtaaataacactatagtttaataagcccgccattctgagtttattaaacattttccattctcatgaaaatttcaaccaatttgtcctttttgtgtgttttcagcaataagttgactttagtctctttaaaatctaacaactaataattttaaaaagtgttgtgttttgagctgtgttgtatgaatacatttgagg

SEQ ID NO: 40106 - DNA, 659 bp, Macaca Mulatta
  misc_feature (1)...(659): n = A,T,C or G
gggggtttgccttttttcttctttggatgccaccaaagcctcccatttgctatagttttatttcgtgcactggaaactgagatttatcatagagtaccgccaagctttcactccagtgctgtttggcaatgcaattttttttttaacaattagtttttaatttggggcgggaggggaagaacaccaatgtcctagctgtattatgattctgcagtgaagacattgcatgttgttttcactactgtacacttgacctgcacatgcgagaaaaaggtggaatgtttaaaacaccataatcagctcagggtatttgccaatctgaaataaaagtgggatggggaagtgtgtccttcagatcaagggtactaaagtccctttcgctgcagtgagtgagaggtatgttgtgtgtgaatgtatggatgtgtgtttgcgtgcatgtttgtgcatgtgtgactgtgcatgttatgtttctccatgtgggaagagatttgaaatgtaagcttttatttattattttagaatgtgacataatgagcagccacactcgggggaaggggaaaggtggtaggtaagctgtaacagattgctccagttgccttaaactatgcacatagctaagtgaccaaacttcttgttttgatttgaaaaagtgcattgtn

SEQ ID NO: 40107 - DNA, 768 bp, Macaca Mulatta
  misc_feature (1)...(768): n = A,T,C or G
ggcacttattctctcacagtccaacttttgtttttattaattatgcaatcattttttcctaaggggcagtagcaatggaataagttcaaaatatcttcaggggattatagttttcactggccaatgaagtgtaataagtactcggatggtagctaaatatgtccaaaaacctcttcacttgctcaatgatttttactcccctgagcttggtagctgtctagtgtgtaaccactcacttattataaattagataatttatctcacctcctgttttatttattcagtcaatgtaactactttgctcacttggtttcttgattgtttcactagaacaaaaactttactgctcaacccagcgtccttagctctaggtatctttccaccttcataatccaagcagctggcccatgtcatctttcatacaactcagcgtgtctaatgcctttgctctaacacaacacttggtaaaattaatggttttcaattctggctgtccgttaagaatctcgttgagggaccgctttggacaccaaaactataccccagatgaattgaatgagaatctctggatgtgaggcttagcatcggtctttgaaaattgtgcaaatgatattcatgtgtagccaagtgttgagaaccactgggctaaatgctcctactgccttatcccaccaactttcattggaaacgcttgtatggngaaacccaccaggaatgggcaccagaagttcatcacctttctttggggtactggtaaatttgggacta

SEQ ID NO: 40108 - DNA, 482 bp, Macaca Mulatta
ctgattatatctccagattatacctatagtgccactgggcaccgaggcatcatcccaccccatgccactctcgtcttcgatgcggagcttctaaaactggaatggcaggaatagcctcctcccttagctccctgttcttggatctgccatagagggatctggtgcctccagacgtgtgcacatgaatccacatggagcttatcctgatgttccactccactctgtatagacatctgccctgactgaatgtgttctgtcactcagctttgcttctgacacctccatttcctcttcccctttctcctcatatgtgtgtttacctaaaccatatgccataaacctcaagttattcattttattttgttttcattttgggatgaagattcagtttcagtctttggatataggtttccagttaagtacatggtcaggtattaacagcacaagtgataggttaacgttagaataggaattggtgttgg

SEQ ID NO: 40109 - DNA, 374 bp, Macaca Mulatta
  misc_feature (1)...(374): n = A,T,C or G
ccccagggccttccgagccctctcccagcgaccacctcgtgtcccgganagttgcagcaagagatgtgagaaggtgtcaccctgaagaggaagtggtggaccagccctgcctgatgtggacagcaggggacacatgtctgcctgtctatgtgaaatgagggaaaaaatgctgaaagccaaaggagggtttaatgtggccttttccaccttctaattccatagaacctcagctctgggacttgcttcctgacctagggtccaggggccaaatttgtttaggaacaaccccattcgcaattcccctcatgaactttcagaaaggacccttgcgtcttagatcctgagaagtcacaaataaacagagctgaattgtc

SEQ ID NO: 40110 - DNA, 2055 bp, Macaca Mulatta
  misc_feature (1)...(2055): n = A,T,C or G
acagatgcaggcacacttgaggtgccactgaagctatgtgaagagcctgctacccttcaaacagaccaggcccaagcaaggtgccaagccacgtgagagtgcccagtccactgtgtaaatgtgacgacctctgatggtagtgtttgaaaagatacttagtagaaagttgcagagacccaggagtagccgtgtaacaaaagaaggnnnnnnnnnnnnnnnnnnnnnnnnnnnnnnnnnnnnnnnnnnnnnnnnnnnnnnnnnnnnnnnnnnnnnnnnnnnnnnnnnnnnnnnnnnnnnnnnnnnnnnnnnnnnnnnnnnnnnnnnnnnnnnnnnnnnnnnnnnnnnnnnnnnnnnnnnnnnnnnnnnnnnnnnnnnnnnnnnnnnnnnnnnnnnnnnnnnnnnnnnnnnnnnnnnnnnnnnnnnnnnnnnnnnnnnnnnnnnnnnnnnnnnnnnnnnnnnnnnnnnnnnnnnnnnnnnnnnnnnnnnnnnnnnnnnnnnnnnnnnnnnnnnnnnnnnnnnnnnnnnnnnnnnnnnnnnnnnnnnnnnnnnnnnnnnnnnnnnnnnnnnnnnnnnnnnnnnnnnnnnnnnnnnnnnnnnnnnnnnnnnnnnnnnnnnnnnnnnnnnnnnnnnnnnnnnnnnnnnnnnnnnnnnnnnnnnnnnnnnnnnnnnnnnnnnnnnnnnnnnnnnnnnnnnnnnnnnnnnnnnnnnnnnnnnnnnnnnnnnnnnnnnnnnnnnnnnnnnnnnnnnnnnnnnnnnnnnnnnnnnnnnnnnnnnnnnnnnnnnnnnnnnnnnnnnnnnnnnnnnnnnnnnnnnnnnnnnnnnnnnnnnnnnnnnnnnnnnnnnnnnnnnnnnnnnnnnnnnnnnnnnnnnnnnnnnnnnnnnnnnnnnnnnnnnnnnnnnnnnnnnnnnnnnnnnnnnnnnnnnnnnnnnnnnnnnnnnnnnnnnnnnnnnnnnnnnnnnnnnnnnnnnnnnnnnnnnnnnnnnnnnnnnnnnnnnnnnnnnnnnnnnnnnnnnnnnnnnnnnnnnnnnnnnnnnnnnnnnnnnnnnnnnnnnnnnnnnnnnnnnnnnnnnnnnnnnnnnnnnnnnnnnnnnnnnnnnnnnnnnnnnnnnnnnnnnnnnnnnnnnnnnnnnnnnnnnnnnnnnnnnnnnnnnnnnnnnnnnnnnnnnnnnnnnnnnnnnnnnnnnnnnnnnnnnnnnnnnnnnnnnnnnnnnnnnnnnnnnnnnnnnnnnnnnnnnnnnnnnnnnnnnnnnnnnnnnnnnnnnnnnnnnnnnnnnnnnnnnnnnnnnnnnnnnnnnnnnnnnnnnnnnnnnnnnactaaagtattcccagtaaagtgggttgaggtgagggctgtggtcctgaaagggacgcctttgacatcgtggctgcccagttgggccgtgagctgtggcacccaggactagcgctggcccctcagaaggatctaggagaggggcttgggagctcccttttaatttctcacccccattttacaaagagtgcttagattctcacaaattgtgtttgttgtaagttatccatttggctttatcctaactagtcttaccaaacttagagggaaacctgtgctctattaccacacatgggcaaatcagcattgtaagctttctcaggttattattagagaggttggaaacattggtaaactctgttaactgagaaggaaaagaaaaatcccattgaactactgcaacaaatcagaaatccacataagagtgctctcctgcctgggcagcagcaaccaagaacaaagcccggggactgttttccttttaataaagccacaggcgggcatcgcagctccacagcccgaggggacacaggatggaaaccccagggtgagaagggagcggggagagttccagaaaggggatgaaatagtattaaaaagctgcgttggtaagcttttcgtggaaccaagatttgacgaaaccatctcttatccttgtttttaaattacgtgctgggagcaaggcctggtatgagcggcctgggtctattgttggtgttttgcttttctgtaaggattaagc

SEQ ID NO: 40111 - DNA, 781 bp, Macaca Mulatta
  misc_feature (1)...(781): n = A,T,C or G
gactcaaacaggctttcccaggatgtgaaaaacaggaagggttcatcttaaattaggtttttaatattatggcctcattgtttcatcattttgctagaaggaaattccctgaatatcagatacacccctattcaaataaaatcacaaaaccgcctactaaagctaaacagtttttcaaaaccattctgaattatgcagtaatacttccttctgtaagaatatgctctgttctgtaaactgaatattgagagaatagagaataaaaccacttctcagatagcatgaagaggaaatgaggtaatgaaagtattttggaagttagagaagtcattaatgcaaaatatttttacctcaaatttcagttttgaagcacaaataatttcacatgtcatataagtgagaacagaaaatagaagacaaaagatgtgggttgagtgaagtttccctgaataaaaggaatgcgttgttcactttaattattgtatagattagaataaggnnnnnnnnnnnnnnnnnnnnnnnnaaacagctcttcattattgtgattctagagtagctaataggtctactaacgatccaaagaactcagtaaatataaagacaaaattgtaacatagtatggcatttttagctattctccccacacacacttcccccatatggaattttgtgtattctccatggaggtaaaagtataaaatcatgcttttttggtgtacaaggatgttcactgtagcattttttgttgttattgttatagaaaaattttctacagcttacc

SEQ ID NO: 40112 - DNA, 746 bp, Macaca Mulatta
ggggaaggagagggagaggaagtagataaacttgtgatattaccatgagataatcctcaagtaagtcctctcacctccagggcctttgtttcaccttgtctgtaataatacaacagactgggttcaagatgccgttaatatcctatcttttgattccattaacaatgataacggattatgtaagctcgtttgaatgggatacgtgacagctctccaaaagaatatttgacatgttccaaataaacctattagaaatgcttgccaactagacggtattatttagagcctcgtacccctgttagaaacaagcatatgtaattggtatatagtttgtaaattaataagatgtactactctttcagttttctaattgaagcataaagacaaaattaagcaacatatcaagggttcatgtaagttacagttattagatttaatagtcttaatattttgcaccctacatcttattgcatcttccagaataaatctgggattcataaaccaaaccaggagagggaaagcagatggaatgagtgggcagaaatctgacaactcctaggtttcttctatttgtgttaatgctgagacttttaaaaatcatttttagatggaggggtttattatgaatagttataattaagtctgataaattagttgtattaaacactggttatttgcgctaatatttactggggtataaataaaaatgaatatttaatgggggaagaaatgtttctccaaaggta

SEQ ID NO: 40113 - DNA, 735 bp, Macaca Mulatta
gatcccagctaaggcagcgactaagggaacccgaggagaacgagagggcgacgtccggagcggcggcagcgctacgggacgctgtgtgaggctggcaaggcggtgttcacctagttctttcgggctccgccgccgccggtggagaacacgaggccagcattgcgacccccaaatctcctcctcaggatctgacctcagtctcctaaccccgcaacttccatcccggccttggaaaatcccgcgagaacgggctgccgaattgtcactgggatctcgcgagaacgaaatcttcctttccgtgggcggagccatcttcccgatgtctcgcccctaggaggcctgtagcaggaagggccgcgggagttgcgaatgtcgcgaggtttgaggtcgctgggtgggccgggcgctgagcgacgctggtcacaactggggggcttgggaaggcagtggctgtgaagggccactgaggcggtggaggcctggcagagggcgtcccggcggtcgcggctctcggcttctcggtggagcttggttcgtccgtggtggtgccgcaccccaggaacttccaggagccagtccctccttggagagctccccgggacacccacaggtgccaagtgaaactagcgcgttttcttggatcctacactttgtagtgaatcataaatactttaaatacaaagccaacaacatttgctgggaataaacgtaaaaatactgttaaagtgtaaagtt

SEQ ID NO: 40114 - DNA, 1022 bp, Macaca Mulatta
aagctttccccagtggcttgacctcacatttctagtttccagagctgtgagcaaataaatttctttcgtcaaagccacccagttgcagtgttttgctgtggtggccagagcaaacagataaagtagtaagtccctccagcaccctaggaggttctgcttgttgccattctccaaagaccatcctggctatgacgagggcaggcgtggttgtttgggaggagaccactgtggaacaaagagaaggaaggcttgcttgatgcagcagggagtagactacagattcaagaagggctctagaaaggtccagcgattgagcttgtcagggaaactcgagctgtatgtagttcttgctctcctgtgccctgcaggatggcttgaccgatttctgttctcatgccatacgctaagggccgtgtcatctgggccacagatccaggcctaatgggcctgatggagtgacctgtgggctattcttatgccttcacaaaacccaccttcaccacctggctgttgtgactggcatccctgaggctctgtttctttgtgtgtaaaatcaaataaggacacgtcatgtgctagcagtccaccagtatagggcgaaggctcagcaaagaggagttctctcctcctctgctcgtttaggtcaggagcaaatgcagatcggggtggagacaaggtaaacacataacttgggtggagatctgattgattaataactcataaatcatctgaaaccatactttccttttactagtcaaccctctgtaaacactcaatgtgttcttaccttgttattcccaatgatgttgaatgcgtggttgccctctccagtataaaagtttgatgcagcttttcctggatgtacctgtctataaggagtcctgtttgtcacaatggtaggtaactggttttatatataaaggttagaaaagcaaaagagaatatgtattccttattttaatatgctgtgatgtgtgattctaccacatagcattgaatggtaaatgtgacctagttaggaa

SEQ ID NO: 40115 - DNA, 782 bp, Macaca Mulatta
ggctctgtggtctctatagttaaaaactccagacaaaatatattttaaaagttacttaaaggctttgaagagcaacgagaaacaggcagaaatttaaagacagaatttaagaggatttaaacatagaattaatagaatcacattcagtgatattagtgtctatacagcttttctcgggggtatccctcagtctttgttaggtggtacaggtagaactcagacttaagccacagtcgtattggctggagtttgattcttccatactggctggaaaataggaattcagaaaggaggaagccaaagctgagcagctccaaattctgcacatctctagcttgctccagaattattaaacataggcattttgagagcaagcatgaactagaatgctgaaaaagctgtacagagatttcagctgctgtctatcacagagagcatacaatttgcagttttagtcctgctcagagataaaaatcttggcttttccattggaattccaaatggcccatacattgagagtaaaggctacatcctaatgaagattcacttgagaaataagggaaaaatcaaaatagacttttctaataaattacaaaagcctctaagttcagggtgatctaccaataatttccctatctgctaacaaataacacctccaagagattaaatcagagtgatacacgtctctcacatgtacgtgacgcagcagtgccagcataccacctggagtagcgcatctatcgatcaaactgtaaggaactctcaaataatacgctgggctg

SEQ ID NO: 40116 - DNA, 786 bp, Macaca Mulatta
  misc_feature (1)...(786): n = A,T,C or G
ggggttcagggttggtagcagggtacccagtgcctgcagggctgggcctgttctgcctcttggccctacgccctcatccaggcactgggcaagggaagagtttgcctgtacccttatctgggtgccttaaggagagagattgtgttcctcctctctcaggggtgataactcaggaagcctctgggttgggaaggccatcagttcttttgtcttaggtttcttttcctgtccctcttcccatccccgagatatgatcccataaaaatatttcctgagttggccagacgcgannnnnnnnnnnnnnnnnnnnnnnnnnnnnnnnnnnnnnnnnnnncagatcacgaagtcaggagttcgaaaccagcctgaccaacatggtaannnnnnnnnnnnnnnnnnnnnnnnnnnnnnnnnncgggtgtagtggcgnnnnnnnnnnnnnnnnnnnnnnnnnngggctaaggcaggagattcgnnnnnnnnnnnnnnnnnnnnnnnnnnnnnnnnnatgattgcgccgttgtactccaannnnnnnnnnnnnnnnnnnnnncattcccgnnancccattggaannagnanacaaaccctgttggccgccctccggccctcaagaaacctttcaaaaccattccttttggccgcccggggccccgtaaggtaagttaaaatgggtcaatacctggtttcctaaggaaaatcctggtccatacaaggtgcctggaaatcctcccccaataaaaaaacccccctggcgggcaacccaaaccgtttttaaaaaaaaat

SEQ ID NO: 40117 - DNA, 771 bp, Macaca Mulatta
  misc_feature (1)...(771): n = A,T,C or G
gggattttcacatctgtaggtattagggggaagaatagggataataaaattctcctttttagaaacttttatttaataagaatatatattcctctcttgtctgtaggcttaccctccttaaagaagccaaacgtccctaacttagcaaaaagtggtttctaaaaatgtctttttaaattagtaatataataccccattcttctgtaatgcagctaacttgcccagtgtgctggaacacaaaggtgcttgctagtctgcaaactctcttaacatagtaagttcagaattatattgggttgaccttccattcccacactgaatgtttgcttgccttgtgcccttctcttggaatgttattttcagatccagacggtatgttgatgttggaggaataccagttaagtattgggtatgtttaccagaatttagctacacttgtctatagtgggaagtagatattattgttgttggcagtagttggagcaaagcttataaaaatttttatcagacttaattagaattaattccttgagtttgaaattcttagaatcaagagatacttgaatagtattttaatgaagtaatatataaatgtataagtaagtgtagtacagtagacccatgaacagtgcaggggttggggcactgatggttgaaaatctgtgtataacttttgactcccttaaaaacttaactgcgaatagcccttcttttgacccgaaatccttaatgaantaacataggttggatttaacaccataatttttgtat

SEQ ID NO: 40118 - DNA, 491 bp, Macaca Mulatta
gtaccagcttcaaagcattgtatgctggataaattaattggtgtgtttgctcctcatccatccaccggtccccacaagttgagaaagtacctccctgtcatcattttcctaaggaacagacttaagtatgccttgacaggagatgaagtaaaaaagatttgcatgcagtggtttattaagatcaatggcaaggtccaaactgatgtaatctaccctgcttggattcatggatgtcatcagcattgacaagactggagagaatttcctctgatctatgacaccaaggctcactctgctgttcatcgtattaatctgaggaggctaaatacaagttgtgccaagtgaaaaaaatctttgtgggtaacaaaaggaattcctccatctggtgaatcatgaatgttcccacccatccactgccctggtcccccccatcaaggtgaaaaaaaaattcaaattggtttggaaactggcaagattcctgaattttatca

SEQ ID NO: 40119 - DNA, 667 bp, Macaca Mulatta
  misc_feature (1)...(667): n = A,T,C or G
cgaggcggcggcgcggcctccgncaagccgtctttctctagagttgtatatatagagcatcctggagtccaccatgaacggacagttggatctgagcgggaagctaatcatcaaagctcaacttggggaggatattcggcgaattcctattcataatgaagatattacttatgatgaattagtgctaatgatgcaacgagttttcagaggaaaactactgagtaatgatgaagtaacaataaagtataaagatgaagatggagatcttataacaatttttgatagttctgacctttcccttgcaattcagtgtagtaggatactgaaactgacattatttgttaatggccagccaagaccccttgaatcaagtcaggtgaaatatctccgtcgagaactgatagaacttcgaaataaagtgaatcgtttattggatagcttggaaccacctggagaacctggaccttccaccaatattcctgaaaatgatactgtggatggtagggaagaaaagcctgcttctgattcttctggaaaacagtctactcaggttatggcagcaagtatgtctgcttttgatcctttaaaaaaccaagatgaaatcaataaaaatgttatgtcagcgtttggcttaacagatgatcacgtttccggggcacccagtgct

SEQ ID NO: 40120 - DNA, 747 bp, Macaca Mulatta
gaggacaaagatactcagagagaaaaagtaaaagaccgaagaaggaggctggagagaccaggatccttcttccagctgaacaaagtcagccacaaagcagactagccagccggctacaattggagtcagagtcccaaagacatgggcttgttagagtgctgtgcaagatgtctggtaggggccccctttgcttccctggtggccactggattgtgtttctttggggtggcactattctgtggctgtggacatgaagccctcactggcacagaaaagctaattgagacctatttctccaaaaactaccaggactatgagtatctcatcaatgtgatccatgccttccagtatgtcatctatggaactgcctctttcttcttcctttatggggccctcctgctggctgagggcttctacaccaccggcgcagtcaggcagatctttggcgactacaagaccaccatctgcggcaagggcctgagcgcaacggtaacagggggccagaaggggaggggttccagaggccaacatcaagctcattctttggagcgggtgtgtcattgtttgggaaaatggctaggacatcccgacaagtttgtgggcatcacctatgccctgaccgttgtgtggctcctggtgtttgcctgctctgctgtgcctgtgtacatttacttcaacacctggaccacctgccagtctattgccttccccagcaagacctctgccagtataggcagtctctgtgct

SEQ ID NO: 40121 - DNA, 110 bp, Macaca Mulatta
gaatggccataagatatgagaagaagtcccctggacagcctccaaaagagaactgtgagaaaaggttcttcaatcctaaaaatgatgaaggaaaaagtccctcttcctca

SEQ ID NO: 40122 - DNA, 819 bp, Macaca Mulatta
  misc_feature (1)...(819): n = A,T,C or G
tgaatgtcctggctgatattctcaggagcatccactatgctaaaaagagagacaaacaccagngttcttatcaactcttgctccaagtcatcgtccagtttctcactgtgatgacgaagcatggttccacgggcgaatctgaaatcattgatgatcacagagttggaaagattgttgtgaaccttgcaggcaggctaaacaagtgtggagtgatcagccccaggtttcatgtgcaactcaaagatctaaaaaaatggcagcataatctgcttccatctgaccagtttggtttcattgtactgacaacctcagctggcattgtggaccacaaagaagcaagacgaaaacacacaggagggaaaatcctgggattctttttctagggatgtaatacatacttacaaataaaatgcatcaaggggaaacaaaaaagaaatttgttttggattgaacttgtacaaaaaaaggaattaagaaatttataagttatgaggtataatttttgtgtgttttagatattttcaagacttctgttctttggtttctttgccagatgacgtataaatcaattaaaattacttatgcttaaatttgcatgttagattatttctaaattactaaatttgatttattttccatcatacctatcactagttgaatttacggcatatatttgtatattcgcttgtttactgcttgtctctttctgccaatagaaaaaattctaaaaggaaggggaccatttccaggttttattcacagatatgttagaagcaattatgagttttaatgganagaaaacttcttaatgggcagtga

SEQ ID NO: 40123 - DNA, 812 bp, Macaca Mulatta
  misc_feature (1)...(812): n = A,T,C or G
ggagaggtagaaaagtaataaataaagataataatggtcaaatgttaccaagacaacaacagaagtcacagtgtccgtatccaaaatgaaagtcaaagcaaagagcattaaaagaaagaaaaaatagcgtgttctagggaaaaagagtatacagtttaatccccgttttgggggggaaatatatacatgtnnnnnnnnnnnnnnnnnnnnnnnnnttattttcttgtttctgctgaactctttagtgcaagtcatccttttggaatcagaggcatcttaggcgttgaaggaatattagtggcgctgtccccatatctctgggatctgtcattaagaagatagctgcagctcctggtacatgtccctgcagctgtacccacaagggaacaaaaggaaatgacagnnnnnnnnnnnnnnnnnnnnnnnnnnnngagtggatttttcttttctttatcttccaaattactgttataatcagataaaaccagtaactctttctttccctttgatcagaacacccatgggctgggagccttcccctactttnnnnnnnnnnnnnnnnnnnaaataagaaaattaacttccgacatgatagaaagctctgtacacaaaacagagacgcctcactgcttttggtaaattatgacagccaaaacacccatcttcacccaaaccaccaaccggccagcaaggtccagtggtggggaaaaagggcaggccagtggggaatggcatttcaaaccttttcaaaaaatactgaaacccaagcctgggtggggggctccagccctggtaatccccagcactttggg

SEQ ID NO: 40124 - DNA, 776 bp, Macaca Mulatta
  misc_feature (1)...(776): n = A,T,C or G
agaaggttattttctaacatttttgaattcatggtgggggggttttatgaggtgttancacatgccaaaaaattcaaatgagcctttaacagttaaggatctctattttttaggggggtacaagtatatcttggttaaaagtttcagagtcaggggaaaggtgtgtgcttctgaaatgttgacaaaattgttttccattgagactgcaataatttatatttgaaccagcaaagggtaagtgtgtctgttcatttaacctcttaaaaactaagcgttatcatatgttttaattttttgccatgttgatgagtgggaaactttgtcagagtagtttcaattaacatttttattaaaaatgaggttgaaaatatctttgtatgcttaaaatctatttgcgcttcctttttgtatgaattgtctgtccatattcttcacctatttttctatagggtctttgattcatttcttattgatggaagaagtcctttatatgttagggaaattagccttttggaataagagttgcaagtatacgtttcaaatggtgcttttggcaatgcagatttctttgtttacatttcaagtatttaagtttaccagtcttttcttttatggcttctggatcttgggccatatttagaaaggttttcctttctctgagattacaaagaagtaacctttttactaggcctttcactacataaatgacctagtcttaatttagcaaaataccgccacgattccagtaagccccgccacagctccgctacaccccc

SEQ ID NO: 40125 - DNA, 678 bp, Macaca Mulatta
gtccgcttcggcgtcacgtagtggcttttaccctggccgggcggggtgggctcagccgggctgggccgggctgggctgggctgggctacgcggcttgagcctggctctgtccagagcgagaccctgatggctgcggtgtttctggtaacgctttatgaatactcgccgcttttctacatcgcggtggtctttacctgtttcgtcgtgaccaccggtctggtattgggatggtttggttgggatgttccagtaattctgagaaattcagaagagacccagttcagcacaagagtttttaaaaagcaaatgagacaagtcaagaatccttttggcttagagattactaatccatcttcagcttcaattacaactggcttaaccttgacaacagattgccttgaagatagtctccttaaatgctaatggggggtgcagtgtttaaaaattttttgaagtttttcagaagcattttttctgctttagaataagcacttcccaagcgttagaagatgctctgtatagtgaatatctctatcaggaacagtttttttttaaaaaggatatcaaagaagatctatattggctgttaccaagagatactaaaattgaagattttggcacagtgcccatttctcgctatccattggtagcgctattgtcctcgaaaaatcgctatat

SEQ ID NO: 40126 - DNA, 646 bp, Macaca Mulatta
  misc_feature (1)...(646): n = A,T,C or G
gggattctagaggccgaggcggctgccaagnnnnnnnnnnnnnnnnnnnnnnnnnnnnntctcaaacggctttcaaattaatggctttacaaatgacaagagttcgatggcagccaataacctaggcctaggagtcatcccttttgatgtaaatttaagtttgctagactagactaacaattaattagtgtgagttaattaaaggattaatagtctaaacgaaaaagaactgaataaatgtttataagagttaggctctcagaccaaacaggtcaaaatcttggactcagagcataatataaggtatcccagtccaacataaaaattgctttctctgcaggaattttagtgcaagaaaccctaaaaacctgctacagtgcttccttgcccatgttgactagtcaagcaaagcaaactgacaaacaaaagatagatctatttagatagatgtatttactaacgctacttggatattttggttttcttatataattcaaccactcctacctaaaatgtaaacattgaaaatttaaccctaaattcatctgaaactgaaagaaaaaggagagaaaagtgaaagaggtttttgttgttgttgttcccgttttttgagaccaggcttgctctgttgccaaggtagaatgca

SEQ ID NO: 40127 - DNA, 585 bp, Macaca Mulatta
gttgccaactgagatcgatcagttcatctaatcacagatcatcaaacagtactgttcccacctacgagtgttagaagttgtgtttgtatttcaagcagaaaaactgagctccaagtgaactcagttttggaaactgtattatttaatgtagcccagcttgttttcaaattttaaaagtttaaaaataaaatactttgtgttctaagttgccaatgaaatagaccttcaagttattttaatgctgttttctcactaataggaacttgcaattccagcagtaatttaaaggctttcagagggaccctgagtcttctcttcaggttcacagaacccgccgccttttcgggtagttttctacttagctggagagatctccataagaggatctgtaggcctgagttgtgaagcacaatccctgcaaaacgcttttgccgtaatagttggcgcaaacgcagggtaaatggggtgtgcgtaagaaacagccctggctgtaaacgctgctcgaggctcctgactcctaacagagctataccaaagtcacactcttgcaggggtagactttccttatttggtttgttctctaga

SEQ ID NO: 40128 - DNA, 741 bp, Macaca Mulatta
  misc_feature (1)...(741): n = A,T,C or G
gggaggcgggggggcgagaaaggaaaacccacacacccattcccggcatgtgcacggggaagctggcttcagaaatgagcacactagacagtggaggacctggaaactgacacctccaggactatgcaggccttagaaagtctccatgaccccagattaaaactgcagattagccgnnnnnnnnnnnnnnnnnnnnnnnnnnnnnnnnnnnnnnnnnnnnnnntaggcgnnnnnnnnnnnnnnnnnnnnnnnnnnnnnnnnnntaacaaggtgacaccctgtccatactaaaactacaaaaattagccgggcgtggtggcgggtnnnnnnnnnnnnnnnnnnnnnnannnnnnnnnnnnnnnnnnnnnnnnnnnnggggaggannnnnnnnnnnnnnnnnnnnnnnannnnnnnnnnnnnnnnnttgggtgacagcnnnnnnnnnnnnnnnnnnnnnnnnnnnnnnnnnnnnnnnnnnnnnnnnnnnngccatggctgctgcaaggcttcctgactaacttgttcctcaaccagagcaaacagtgctgaggccagagcaagagcgggcggaccacagctctgcaccacctgtgaccgtgtcttcctcaaagagcaaaaacttgcttttgggttagtggtttgcataaacatgagttttttccgggtcctttttactttttttccccaattcccttaaaggttgttaagggtttatttttccctaagaaaagtggggaattt

SEQ ID NO: 40129 - DNA, 342 bp, Macaca Mulatta
tcgtttctgtggcatggcacaggttgcctggttgctcgagctttccccatgttggcatgcttgccttcactctgtctacagcttagcaccccattctggagggcactttctggtgcttggaaggagagaagaaagcaaaagccacatacttggcatggccaagccagagacagatccgcctgtcaggggaaggaagaagtaaaaggggcatgcagggctttggggggccagattggctcagaaacatggtcaaaagaacagagggggcccagtctataggcttcacagggagccatggcctgtatttggggcactggggagcagcaagcatctgaactggtc

SEQ ID NO: 40130 - DNA, 779 bp, Macaca Mulatta
tttaaaaagaattaattctggaaatggcaattaaagggcccagtagttataaagatttacaaaccgatttcactctccactatcaaatcctccctctttttccataactgcccacgtctttagcagcactgactttttagtttcgggcaatgcatccctcaacagtattttttcactatcaaaaatatgtgctttgagccctacttgcaggcagacaggatattccaatttaatagttgaacagttgaaacccacagtatttgagtaacttgctaaaggttgtcagacaatttaaatagttaagacaggaccaaaatctgcccctgcctctttgtgcagaactctactttaccagtctttcctaaatatctacttctctctctcctgtggtgcagaccaggaaagggagcttccctgggagttaaaagatctgtgttggaggaaccctatctacagtgggcctcagatgatctttcctatacaaggaagggattcggcaggataatctaaattcctttctagtgctgtgccttaatcatagcataaatggtttttcatgttgtaccaaacgtttctccacattcccagagtattcataatgacaagttttaattacaaagtactgtcattttatataacataatctacctgattccttattgtttctacttgttcattattacagataatgctgcaaaaaaaagtcatgcatgcactttttccttcagctaaattatttccgtaagaaaaattgctagaaatgggatcaatgagtcccc

SEQ ID NO: 40131 - DNA, 823 bp, Macaca Mulatta
  misc_feature (1)...(823): n = A,T,C or G
nnnnnnnnnnnnnnnnnnnnnnnnnnnnnnnnnnnnnnnnnnnnnnnnnnnnnnnnnnnnnnnnnnnnnnnnnnnnnnnnnnnnnnnnnnnnnnnnnnnnnnnnnnnnnnnnnnnnnnnnnnnnnnnnnnnnnnnnnnnnnnnnnnnnnnnnnnnnnnnnnnnnnnnnnnnnnnnnnnnnnnnnnnnnnnnnnnnnnnnnnnnnnnnnnnnnnnnnnnnnnnnnnnnnnnnnnnnnnnnnnnnnnnnnnnnnnnnnnnnnnnnnnnnnnnnnnnnnnnnnnnnnnnnnnnnnnnnnnnnnnnnnnnnnnnnnnnnnnnnnnnnnnnnnnnnnnnnnnnnnnnnnnnnnnnnnnnnnnnnnnnnnnnnnnnnnnnnnnnnnnnnnnnnnnnnnnnnnnnnnnnnnnnnnnnnnnnnnnnnnnnnnnnnnnnnnnnnnnnnnnnnnnnnnnnnnnnnnnnnnnnnnnnnnnnnnnnnnnnnnnnnnnnnnnnnnnnnnnnnnnnnnnnnnnnnnnnnnnnnnnnnnnnnnnnnnnnnnnnnnnnnnnnnnnnnnnnnnnnnnnnnnnnnnnnnnnnnnnngccctgttccggaataacccccgaacgcctaactcctggaatttatcccgtattgcccttacaacctacactggaaaaataacccctattccattcctaataagggccttccccattctatttctttaaaaaatagtagagacacaggtgacaatctttttacacatacaatctctcgtaccacttgaaatttcattggggaaaaaaaagacccattctatgcgccatactcccccaaaataccg

SEQ ID NO: 40132 - DNA, 1072 bp, Macaca Mulatta
  misc_feature (1)...(1072): n = A,T,C or G
gtaaggacaaggtggggtgagtggtctaatacttgggctgagcagaatggctcagaaaaggctctggctgaaaaatctccctcctttaccaacttccccttggtgtctgaagcccttccgtcatgattcatttctttgagtagtgtttgctaaattcatacctttgaatcaagcatttgcttttagggacctctcttcattaatatccactagaaaggagacactcattatgtgtgagtttaaataagtttatccaattcctttgttctcaactgaaaggagggaaacggacaagtgaagaaggtaggggcccaggagtgaaggaacaagggtgggaatagtaataatgttgtactttgaaaatctgtgaaaatgatgaacttagactgctgggagaggcttatagaaaatcgggcagtgagcttgataataggcaaaggactatcaggccacggggtcaaattaaagcagcacattcattaaaataatagtaataataagcatttgggccaggtgtggnnnnnnnnnnnnnnnnnnnnnnnnnnnnnnnnnnnnnnnnnnnnnnnnnnnnnnnnnnnnnnnnnnnnnnnnnnnnnnnntctaacagggcgaaaccccgtttctactaaaaatacaaacaaatttgctgggcatggtggcacacgcctgtaatagcagctaccnnnnnnnnnnnnnnnnnnnnnnnttttgaatccaggcnnnnnnnnnnnnnnnnnnnnnnnnnngcnnnnnnnnnnnnnnnnnnnnnnnnnnnnnnnnnnnnnnnnnnnnnnnnnnnnnnnnnnnnnnnnngcatttgaccatcacagaccaggttcaggaagcgtggggtacgcagacttcaaccctcttggcctttgtttccttgtctataaaatatggttaactggtatcagcttgagagcttggaaggaagatgtgacttgcccatctagctctaagtgacaaggctgagactctccagccctaggattctcatccaaaagccctcaaggctcagacctttggagcaggagtgtggttctcaccaaccaccctctctggcccccag

SEQ ID NO: 40133 - DNA, 304 bp, Macaca Mulatta
gtagacttttgttttcattagaattcttaaggtttaactagacactttatggatattatgaacccgcacaaaagaataggcagcacaaataagcggttcatgtggactatggcactcgtaggtaatgaccaactaaacataattagttttttataatacatacatttagaaatggtatcaagccattgtttcaaaaacactgaagcacaaattgcccagacctaacaaaagtagcaatgtcaggtaaagattcaaacaaacatggagcaaaaccatagtactcttctgtaagctgtcacactaa

SEQ ID NO: 40134 - DNA, 6034 bp, Macaca Mulatta
  misc_feature (1)...(6034): n = A,T,C or G
cagagcatcagagcagaggtgggcctgctgggctgcagctgggattctgagcagcctttcctggaggnnnnnnnnnnnnnnnnnnnnnnnnnnnnnnnnnnnnnnnnnnnnnnnnnnnnnnnnnnnnnnnnnnnnnnnnnnnnnnnnnnnnnnnnnnnnnnnnnnnnnnnnnnnnnnnnnnnnnnnnnnnnnnnnnnnnnnnnnnnnnnnnnnnnnnnnnnnnnnnnnnnnnnnnnnnnnnnnnnnnnnnnnnnnnnnnnnnnnnnnnnnnnnnnnnnnnnnnnnnnnnnnnnnnnnnnnnnnnnnnnnnnnnnnnnnnnnnnnnnnnnnnnnnnnnnnnnnnnnnnnnnnnnnnnnnnnnnnnnnnnnnnnnnnnnnnnnnnnnnnnnnnnnnnnnnnnnnnnnnnnnnnnnnnnnnnnnnnnnnnnnnnnnnnnnnnnnnnnnnnnnnnnnnnnnnnnnnnnnnnnnnnnnnnnnnnnnnnnnnnnnnnnnnnnnnnnnnnnnnnnnnnnnnnnnnnnnnnnnnnnnnnnnnnnnnnnnnnnnnnnnnnnnnnnnnnnnnnnnnnnnnnnnnnnnnnnnnnnnnnnnnnnnnnnnnnnnnnnnnnnnnnnnnnnnnnnnnnnnnnnnnnnnnnnnnnnnnnnnnnnnnnnnnnnnnnnnnnnnnnnnnnnnnnnnnnnnnnnnnnnnnnnnnnnnnnnnnnnnnnnnnnnnnnnnnnnnnnnnnnnnnnnnnnnnnnnnnnnnnnnnnnnnnnnnnnnnnnnnnnnnnnnnnnnnnnnnnnnnnnnnnnnnnnnnnnnnnnnnnnnnnnnnnnnnnnnnnnnnnnnnnnnnnnnnnnnnnnnnnnnnnnnnnnnnnnnnnnnnnnnnnnnnnnnnnnnnnnnnnnnnnnnnnnnnnnnnnnnnnnnnnnnnnnnnnnnnnnnnnnnnnnnnnnnnnnnnnnnnnnnnnnnnnnnnnnnnnnnnnnnnnnnnnnnnnnnnnnnnnnnnnnnnnnnnnnnnnnnnnnnnnnnnnnnnnnnnnnnnnnnnnnnnnnnnnnnnnnnnnnnnnnnnnnnnnnnnnnnnnnnnnnnnnnnnnnnnnnnnnnnnnnnnnnnnnnnnnnnnnnnnnnnnnnnnnnnnnnnnnnnnnnnnnnnnnnnnnnnnnnnnnnnnnnnnnnnnnnnnnnnnnnnnnnnnnnnnnnnnnnnnnnnnnnnnnnnnnnnnnnnnnnnnnnnnnnnnnnnnnnnnnnnnnnnnnnnnnnnnnnnnnnnnnnnnnnnnnnnnnnnnnnnnnnnnnnnnnnnnnnnnnnnnnnnnnnnnnnnnnnnnnnnnnnnnnnnnnnnnnnnnnnnnnnnnnnnnnnnnnnnnnnnnnnnnnnnnnnnnnnnnnnnnnnnnnnnnnnnnnnnnnnnnnnnnnnnnnnnnnnnnnnnnnnnnnnnnnnnnnnnnnnnnnnnnnnnnnnnnnnnnnnnnnnnnnnnnnnnnnnnnnnnnnnnnnnnnnnnnnnnnnnnnnnnnnnnnnnnnnnnnnnnnnnnnnnnnnnnnnnnnnnnnnnnnnnnnnnnnnnnnnnnnnnnnnnnnnnnnnnnnnnnnnnnnnnnnnnnnnnnnnnnnnnnnnnnnnnnnnnnnnnnnnnnnnnnnnnnnnnnnnnnnnnnnnnnnnnnnnnnnnnnnnnnnnnnnnnnnnnnnnnnnnnnnnnnnnnnnnnnnnnnnnnnnnnnnnnnnnnnnnnnnnnnnnnnnnnnnnnnnnnnnnnnnnnnnnnnnnnnnnnnnnnnnnnnnnnnnnnnnnnnnnnnnnnnnnnnnnnnnnnnnnnnnnnnnnnnnnnnnnnnnnnnnnnnnnnnnnnnnnnnnnnnnnnnnnnnnnnnnnnnnnnnnnnnnnnnnnnnnnnnnnnnnnnnnnnnnnnnnnnnnnnnnnnnnnnnnnnnnnnnnnnnnnnnnnnnnnnnnnnnnnnnnnnnnnnnnnnnnnnnnnnnnnnnnnnnnnnnnnnnnnnnnnnnnnnnnnnnnnnnnnnnnnnnnnnnnnnnnnnnnnnnnnnnnnnnnnnnnnnnnnnnnnnnnnnnnnnnnnnnnnnnnnnnnnnnnnnnnnnnnnnnnnnnnnnnnnnnnnnnnnnnnnnnnnnnnnnnnnnnnnnnnnnnnnnnnnnnnnnnnnnnnnnnnnnnnnnnnnnnnnnnnnnnnnnnnnnnnnnnnnnnnnnnnnnnnnnnnnnnnnnnnnnnnnnnnnnnnnnnnnnnnnnnnnnnnnnnnnnnnnnnnnnnnnnnnnnnnnnnnnnnnnnnnnnnnnnnnnnnnnnnnnnnnnnnnnnnnnnnnnnnnnnnnnnnnnnnnnnnnnnnnnnnnnnnnnnnnnnnnnnnnnnnnnnnnnnnnnnnnnnnnnnnnnnnnnnnnnnnnnnnnnnnnnnnnnnnnnnnnnnnnnnnnnnnnnnnnnnnnnnnnnnnnnnnnnnnnnnnnnnnnnnnnnnnnnnnnnnnnnnnnnnnnnnnnnnnnnnnnnnnnnnnnnnnnnnnnnnnnnnnnnnnnnnnnnnnnnnnnnnnnnnnnnnnnnnnnnnnnnnnnnnnnnnnnnnnnnnnnnnnnnnnnnnnnnnnnnnnnnnnnnnnnnnnnnnnnnnnnnnnnnnnnnnnnnnnnnnnnnnnnnnnnnnnnnnnnnnnnnnnnnnnnnnnnnnnnnnnnnnnnnnnnnnnnnnnnnnnnnnnnnnnnnnnnnnnnnnnnnnnnnnnnnnnnnnnnnnnnnnnnnnnnnnnnnnnnnnnnnnnnnnnnnnnnnnnnnnnnnnnnnnnnnnnnnnnnnnnnnnnnnnnnnnnnnnnnnnnnnnnnnnnnnnnnnnnnnnnnnnnnnnnnnnnnnnnnnnnnnnnnnnnnnnnnnnnnnnnnnnnnnnnnnnnnnnnnnnnnnnnnnnnnnnnnnnnnnnnnnnnnnnnnnnnnnnnnnnnnnnnnnnnnnnnnnnnnnnnnnnnnnnnnnnnnnnnnnnnnnnnnnnnnnnnnnnnnnnnnnnnnnnnnnnnnnnnnnnnnnnnnnnnnnnnnnnnnnnnnnnnnnnnnnnnnnnnnnnnnnnnnnnnnnnnnnnnnnnnnnnnnnnnnnnnnnnnnnnnnnnnnnnnnnnnnnnnnnnnnnnnnnnnnnnnnnnnnnnnnnnnnnnnnnnnnnnnnnnnnnnnnnnnnnnnnnnnnnnnnnnnnnnnnnnnnnnnnnnnnnnnnnnnnnnnnnnnnnnnnnnnnnnnnnnnnnnnnnnnnnnnnnnnnnnnnnnnnnnnnnnnnnnnnnnnnnnnnnnnnnnnnnnnnnnnnnnnnnnnnnnnnnnnnnnnnnnnnnnnnnnnnnnnnnnnnnnnnnnnnnnnnnnnnnnnnnnnnnnnnnnnnnnnnnnnnnnnnnnnnnnnnnnnnnnnnnnnnnnnnnnnnnnnnnnnnnnnnnnnnnnnnnnnnnnnnnnnnnnnnnnnnnnnnnnnnnnnnnnnnnnnnnnnnnnnnnnnnnnnnnnnnnnnnnnnnnnnnnnnnnnnnnnnnnnnnnnnnnnnnnnnnnnnnnnnnnnnnnnnnnnnnnnnnnnnnnnnnnnnnnnnnnnnnnnnnnnnnnnnnnnnnnnnnnnnnnnnnnnnnnnnnnnnnnnnnnnnnnnnnnnnnnnnnnnnnnnnnnnnnnnnnnnnnnnnnnnnnnnnnnnnnnnnnnnnnnnnnnnnnnnnnnnnnnnnnnnnnnnnnnnnnnnnnnnnnnnnnnnnnnnnnnnnnnnnnnnnnnnnnnnnnnnnnnnnnnnnnnnnnnnnnnnnnnnnnnnnnnnnnnnnnnnnnnnnnnnnnnnnnnnnnnnnnnnnnnnnnnnnnnnnnnnnnnnnnnnnnnnnnnnnnnnnnnnnnnnnnnnnnnnnnnnnnnnnnnnnnnnnnnnnnnnnnnnnnnnnnnnnnnnnnnnnnnnnnnnnnnnnnnnnnnnnnnnnnnnnnnnnnnnnnnnnnnnnnnnnnnnnnnnnnnnnnnnnnnnnnnnnnnnnnnnnnnnnnnnnnnnnnnnnnnnnnnnnnnnnnnnnnnnnnnnnnnnnnnnnnnnnnnnnnnnnnnnnnnnnnnnnnnnnnnnnnnnnnnnnnnnnnnnnnnnnnnnnnnnnnnnnnnnnnnnnnnnnnnnnnnnnnnnnnnnnnnnnnnnnnnnnnnnnnnnnnnnnnnnnnnnnnnnnnnnnnnnnnnnnnnnnnnnnnnnnnnnnnnnnnnnnnnnnnnnnnnnnnnnnnnnnnnnnnnnnnnnnnnnnnnnnnnnnnnnnnnnnnnnnnnnnnnnnnnnnnnnnnnnnnnnnnnnnnnnnnnnnnnnnnnnnnnnnnnnnnnnnnnnnnnnnnnnnnnnnnnnnnnnnnnnnnnnnnnnnnnnnnnnnnnnnnnnnnnnnnnnnnnnnnnnnnnnnnnnnnnnnnnnnnnnnnnnnnnnnnnnnnnnnnnnnnnnnnnnnnnnnnnnnnnnnnnnnnnnnnnnnnnnnnnnnnnnnnnnnnnnnnnnnnnnnnnnnnnnnnnnnnnnnnnnnnnnnnnnnnnnnnnnnnnnnnnnnnnnnnnnnnnnnnnnnnnnnnnnnnnnnnnnnnnnnnnnnnnnnnnnnnnnnnnnnnnnnnnnnnnnnnnnnnnnnnnnnnnnnnnnnnnnnnnnnnnnnnnnnnnnnnnnnnnnnnnnnnnnnnnnnnnnnnnnnnnnnnnnnnnnnnnnnnnnnnnnnnnnnnnnnnnnnnnnnnnnnnnnnnnnnnnnnnnnnnnnnnnnnnnnnnnnnnnnnnnnnnnnnnnnnnnnnnnnnnnnnnnnnnnnnnnnnnnnnnnnnnnnnnnnnnnnnnnnnnnnnnnnnnnnnnnnnnnnnnnnnnnnnnnnnnnnnnnnnnnnnnnnnnnnnnnnnnnnnnnnnnnnnnnnnnnnnnnnnnnnnnnnnnnnnnnnnnnnnnnnnnnnnnnnnnnnnnnnnnnnnnnnnnnnnnnnnnnnnnnnnnnnnnnnnnnnnnnnnnnnnnnnnnnnnnnnnnnnnnnnnnnnnnnnnnnnnnnnnnnnnnnnnnnnnnnnnnnnnnnnnnnnnnnnnnnnnnnnnnnnnnnnnnnnnnnnnnnnnnnnnnnnnnnnnnnnnnnnnnnnnnnnnnnnnnnnnnnnnnnnnnnnnnnnnnnnnnnnnnnnnnnnnnnnnnnnnnnnnnnnnnnnnnnnnnnnnnnnnnnnnnnnnnnnnnnnnnnnnnnnnnnnnnnnnnnnnnnnnnnnnnnnnnnnnnnnnnnnnnnnnnnnnnnnnnnnnnnnnnnnnnnnnnnnnnnnnnnnnnnnnnnnnnnnnnnnnnnnnnnnnnnnnnnnnnnnnnnnnnnnnnnnnnnnnnnnnnnnnnnnnnnnnnnnnnnnnnnnnnnnnnnnnnnnnnnnnnnnnnnnnnnnnnnnnnnnnnnnnnnnnnnnnnnnnnnnnnnnnnnnnnnnnnnnnnnnnnnnnnnnnnnnnnnnnnnnnnnnnnnnnnnnnnnnnnnnnnnnnnnnccccttgcccttctcctagctcatggcttcaggagagagaagagttcaaaaaataaagcaatcataaacttgaactctctccgttctcttcttcccatttacaggagaatctcttcctttaaaccatttttgtctcctgtgaatacagccttatctccacctgttccttagatcccatctctcctggcttcttttttccattcattaccctctttgcttgctttacttctcaacctgtgctatacacatgctgttatctctgttgagattgccttatttccatttaacattctctctcctgctattctgatttgtcattcacaactgagttcaagagtcatgtctaccaggaggtcttccaagaccaccatcattcctgactgattagagggcttcctcatggtaatatgtgttctcaagttttcagtgtcaaggaatgccattccagacactcattctcagatgcacaacagccagaagagtctcaagcggcattcaatagcttggaatttaagagctgtacattgcctataaagtgaaacataggctaatatagattaaattgaatattgaaataacaaatatgtttacttatccac

SEQ ID NO: 40135 - DNA, 680 bp, Macaca Mulatta
gggcagaacaccggctacactcagatgtgcagatgtatcatctaaggttatttacaagagctaaagaaggtcctcctttggtgagaggactccagagttattcaatacgtcatcatcagtagtgaaagaacagcgtactttaagggtgaagaactcatacagatggtttcaggtatcgatgcagatagatgttaagagcttttacttttagaaaaagactgctagaaaggaaattttcaggacaaaatggaaaaccaggcaaggatcaccaacttggaagaaaatacacaacatggaaaaagaagaccagaattaacagaaaaaatgtctccagaggaaacaaataattaagtgaacagattaaaactagaaaagaacatgcagcatcttcagtgagatttagggaatatttaatccacaaaacaaaaatgggatcccataaaaaagaaatagcagagaacaacaaaaagagttcaacaaataaaactgggattgtccacatggggaaaaaattagtataagacctgaaaaatgcaatcaagaaattctaaacaggccaagtgtggtggctcacaccctgtgatcccagcacctttggggaggctgaaagcaggcgggatcaccctgagagtcagggaactcaaaggtccaccctggttcattcatggttgaaaacccgc

SEQ ID NO: 40136 - DNA, 809 bp, Macaca Mulatta
  misc_feature (1)...(809): n = A,T,C or G
ggaactttagtgttaatcttggctaaatttttcctgcaattattaatcctttcatgactttcacagaccatctatgatatgcttaaactttctgacttgtcctatacatcactatctttaaacaaccatttaatttttttagggcaagaatttaccatacaagatcctttcttacacacaatttcttttctttataaccttccttgcatagctgagaagcaacatattatcaaacccaataaaaagtcctaacagactcagtgatagtaaaattttaacacttcctttttattggtaattattacccctgctaaaagaataataattaagcaaatactacagcaatggaaactctgcccaatatttcagttagaaggggctaccatgcatagctttacttcaaatcatagagtatagcaattcctgcaaaagtgatgtaatagattattttcatccaaaattttacttgccaagatatagaattttcatttggaggtctatgcagttccttggttttattttcccaaacaatgaaacctccaagttatgggctccctactcactttcatcacctgacagcaattgcaggataattgcccagaactagcatattgattcagatttttactttaaccatcccagtttgtttcttctgagctgcangagatcattacttgattcacaggaaataagcaagttcagtctaaattgtaggcaaaagaatttaaaaacaacaaatgaaactagaatttaatgacaaatttataataagctttggagccatattatttttccagtcctcatttttt

SEQ ID NO: 40137 - DNA, 797 bp, Macaca Mulatta
ggacctaggggaagtagcttaacttaatcaggttgacctgccccttccttcaggagcttttctggaagctccacccaactaccttctcttacatctcaacagcaacagaatttatgaaatgtactcctttacaaaggcaaattgcttcctgggatattaataggttctaccctaagacatcactttgcacccactatgacgacctaagtcaaaaagacagacaataacaagtgttgacaaggatgcagagaaattggaatccccacatgttgctgttgggattgtgaaatggggcagccaccttggaaaatagtttggcagttcctcagaatgttaaatattgagtgaccacatgacctaggagtccctctcatggggagaactgaaaacacatgttcaccccaaaactcacacacaaatgttcatagcagcattattcataaaaaccaaaaggttgaaccaatccacatatccaccaactgatgaatgtatagacaagaggttctatatccatgcagtagaataccattcaccataaaaagaaatgaagtactggattcatactggcatatgggacttacactgggatacatttattctaaagtgaaaggaacaagtggagagaagcacatgggttattgattccatttgatgtaaaaatattgtagagggttaaaaaattaagggcttaaccaaaaaaccttggcggggaaagggggaaagatggaaggaaaggacctggcctaagaggggggaaaggggggttttcccctaattgtttgccgcatgaaagaaat

SEQ ID NO: 40138 - DNA, 125 bp, Macaca Mulatta
acatcggcgtcagacctgggagtactttgtgccaaatcattgccacttgctacatgagtgtaaatgatggcggatgccaagtatgtcctctgccgatgggaaaagcggttatggcctgcaaaggt

SEQ ID NO: 40139 - DNA, 455 bp, Macaca Mulatta
  misc_feature (1)...(455): n = A,T,C or G
cccaagccccattgatgatgggtgagagggaggaggacgacgacactgaggaagcctggctgcagctgcggcccatggaacccctgccctcccagtgctgtggcagtggctgctcaccctgtgtgtttgacctctatcaccgagacctggcaaggtgggaggcagcccgagccagcaaggacaggagcctgctgcgtgggccagagtcacagncagagctgcccctccaagctgaacccagagaccttcgtggccttctgcatcagtgccgtggacagactcactaaggacacataccgtgtccggtttgctctacccgggaacagccagcttggcctgcagcctggccagcacctcatcctacgngagggatagtagatgacttagaaattcagagagcctatacgcccatcagccctgccaatgcagaaggatactttgaagtgttaattaag

SEQ ID NO: 40140 - DNA, 780 bp, Macaca Mulatta
  misc_feature (1)...(780): n = A,T,C or G
catttcagagggtgggggaaataactgggatttataaaagaaaaatggctgtttggggggattcccaaggactttacccttaatngtccaatactacgtgctctgtannnnnnnnnnnnnnnnnnnnntaggagctatccacctttccatgtgggtcaaactaaaattagaaatgtcccctcactgcagatcaaatgtaaagcttccagttaaggagctaaatgaggtcttcagctgaacgaggaaccctgtacatttccttgaacagccctattctaaatcgcctaaactatgctgatagctgtttaggttcttgagtagttctgctcttaaatgtagggaggccctgagaactaatttttgccccaaaataaaaatagaaagaaattatgagattattccctcctgtcactttggttaacccagtccttcacctgccctgtgtcagtgtttcctgagggcaactgcgttgctcaaatcactaacacagaggttccttaacttggggccttagaaaccattgtgggccttggagtccatgaaccccatgaaattatttgtagacttgtgttatatgtacatttttctggggagttcaagagattcgtaagattgtcaaactccttgaaggttcagaacccctgcagggaagggggaagaaaaccctcccattaggaagcatgcttttgcagttaaatggcggtgattgaggtgatagggacttcaagagtaaaatgcaccttgtgatgcataagaagcatacacaaatcaataaatccc

SEQ ID NO: 40141 - DNA, 722 bp, Macaca Mulatta
gatctgaaataagaagtcttcgatgatatcaataagagttaaccagagaagcagagcaagtagattatatatgattgttatgtattaagagatttattacaaggaattggcttacatgattgtgagggctggctaagcaagtctgaaatctgtacggcaggcagttagtgggagaagattgtgggcaaggtggaatccatgggcttaggctgaagctgttctccataggcagtcaggaagggaagatacagcgaagagagaacaattgtagattcagctgctatttggagtctcatatgcttggaagaacctgatctcttttaagagctcacctgactaggtcagactcactgaggatgatcaccctagcttaaagtcagttgattaggaacttcaattacatctgcaaaatctcctcacagaagtacctagattagcatttgactgaatcattgagagaaggcatttgtgctacaaaatgtctgctgtcctctcttcttgctaagaaaccgtcacaggtggaaaagcaacactctcaacttgatctttgctactacctgactgagaacccttgaactcacaaagttatttcctggtatttagagcacagaagcagctgccttttccaccctgagaggccccaaattactggactcttgtaggtcggagtttgccactgagaaagcttctttttagtagcactgtgtccgcgtctgtctgtg

SEQ ID NO: 40142 - DNA, 787 bp, Macaca Mulatta
  misc_feature (1)...(787): n = A,T,C or G
gtaatggggtttcccccaaattttttatcccaggcatctaatggaaagatacttttttctataatgggcaatccatcatttttatccatgtggttttgggttacttttttcttttaggaattaaatttagctttttctagaatctgggggaatatattaaatccccaaaatccaaattgcaatggagagattccaatactacttaaatgcatcattttctgaaatactttctatggattgtaagtcccagtaagatattacattaaaaaaccactatttccatgttttctgaactcagactgagatttttttcttctgtcatctattaaaatcccatgaaatagattttgatgggaacctgnnnnnnnnnnnnnnnnnnnnggaaagatgtattatgaataaaagtgtttaaaaaatgattgggttagaaaatgaaaagatcttgaggttatttaagcaatacttaacaggcttctatagagggaagcgagagttaggtcacagcgtatgggacttaaaagaagattgctaaaaattagagtccttttttcatataaacctgtgttgatagcttagtagtaggaatgggaaggtgttgggtactgtgagaatttaaagaagtatgtgatacgatctctctcctcaagaatcatttatttgggcagacaatactgaaacaaagaaaacagttaagactcagataatgagataagaagttgagagaaaaggtagatcaatacgggccaggcatggtagctcacttnnnnnnnnnnnnnnnnnnnnnncc

SEQ ID NO: 40143 - DNA, 864 bp, Macaca Mulatta
gagaaggaaaaacaaagcaggcaaagactgacgaaatggaatcataccatcgtagactgaatgctgctctacgtgatcatgatcaaagtcactcaacagaaagagaccaagagcttgatttccagggcacggtagagaaattgtgtcatttacaggaaaatctgaattctcatgttctgattctcaacaactttctaaagctaagagtaagttcaggggcctcaaaactgagctccattacacgagaggctctgaaagaaaaggctttggtttttgaacacatacaaagagagctaaaccaaacagtgtcaaatgaaggacattgaaaaaatgtacacaaatggccaagataaagtagaaaaatgcacagaaaagcaagtaagattatgtcaactacaaagacaaactatgttgcttcaacagcaactggatgatgttcacaacaaagctgacaatcaagaaaaaacagtaattgatattcaagccaaatgtgatgctacagtacaaaatcttcaggctgagtgcataaagcacagtcttttgcaagaagagtaagaggatgatcaataaagttaatcatttgaaagaaaaacaatgtcaatatgaaagagagaaagcagaaagagaagtagttgtgagacaacttcaacaaaaacagggtgatgtcctaaacaatcaacaaaagcttcgctggatgcttcattgagacactgcatccgttgaggaagtgagatgcaagattcaaggaagaaattaggccagacgagaattcaatttcaagaaaaacagtatcaacttacagcaactatgagatgtactaaggagacgcaaggccacatacaaaagctccaaacagaaaattcc

SEQ ID NO: 40144 - DNA, 106 bp, Macaca Mulatta
atggataaaaatgagctggttcagaaggtcaaactggccaagcaggctgagcaatatgatgacatgacagcctgcatgaaatcggtaactgagcaaggagttgaat

SEQ ID NO: 40145 - DNA, 791 bp, Macaca Mulatta
  misc_feature (1)...(791): n = A,T,C or G
gggggaggattgtggcatatccctggacccagcacctaggtgatgtgattcacccatatttcctgcgcctcacatattttgagtattgtaaaatattactaggcctaccacctatgggattgcatgctcctgcctgggctctgcccacagggaccttgtgacatatatctgcatccatgacataaaagatgtgacactttttacctgcaccctgccctgcacaggaaagattgtgacatatccctggaaccagacaccaggtgatgtggctcttctgcctctgtcttgcccccagggagcattgtcacatagtgctgagctcagcacccaggtgatgtgactctgttgcccgtgctgtgctttcaggagagaattgtaacatatccctgattgagcacctaggtgatgtgacactcctgcttggttccttccctcagggaagagtgtgagatatccttggctgaaatcccaggtgatgtgactctcctgcttactccctacctacaggtgaaatggagacatatactacagtcagcttacaagtgcaatgatgactctcatacctcaagtcagctattagaagaaatagtgtctctcatagcatgcctttagatgagtcacatccttggtcgtcttctctttttatgaaggcccataaagattgccacacttcccacatatcatataatggccctcaagtggttaacaaagagtgttaatccccangggcacaagcacaaaaagtggagattggttttcttaatattgcacacccttcacccaacccatta

SEQ ID NO: 40146 - DNA, 333 bp, Macaca Mulatta
gcaggttctgaagttcactcttggttgcacccaccccgtagaagatggaatcgtggatgctgccaattttgagcagtttttgcaaggaaggatcaaagtgaactgaaaagctgggaaccttggtggaggggtggtgaccgtcgaaacaagagcaagatcaccgtgatatccgaggtgcctttttccaaaagatatttgaaatatctcaccaaaacatatttgaagaagaataatcttcatgattggttgtgcacagttgctaacagcaaaaagagttacaaattacgttgcttccaaattaaccaggacgaagaagaggagaaagacgaggat

SEQ ID NO: 40147 - DNA, 720 bp, Macaca Mulatta
  misc_feature (1)...(720): n = A,T,C or G
acaatctaagaaagaatataagaatgtgttcagcaaaggggaacagcatgttcaaggtacctgagaaagataggagcttgngcaatacaaaaataaaccaggatgataacagttttgtgagttcaggtcaggagattaggctggagctggatgaagaccagctcatgcctgccttgtaccatatgtttagttctaagagcagtaagaaacccatgacagatttaacaaagtgagtgatgtgtgatcacatatgtgttcttaaaagattgttatacatgtttcatgtagaatagattagggaagatcagggaagatacagggagacaatatactcctgctatagtagtcaagccggaaatcctgattgcctggatccagggttgtggcagtagaaaaatagatcaaaagtagataaaatttgcagtagtaattaactatacagaagcgtttgaaaaaggatgnnnnnnnnnnnnnnnnnnnncnnnnnnnnnnnnnnnnnnnntatggagaaaccccaactttactaaaaacagaaaattagtctggcctggtggcacatgcctgtcnnnnnnnnnnnnnnnnnnnnnnnnnnnntnnnnnnnnnnnnnnatgagagacggaggttgaagtgagccgagattgtgcccnnnnnnnnnnnnnnnnnnnnngagagcgaaactctgttctcaaattaattaaaactagaatctcatgcttcta

SEQ ID NO: 40148 - DNA, 297 bp, Macaca Mulatta
gcattagaaaatatctcaatttacttttgcttttaatctaatctaaagtatgagttgagtttctgtcatgtgcaacaccattattaaagaaaataaacttctttgaggaaggtgtgttgagttgttttacagttgatgtgaattaacagagagattcacattccccctctttgttttccaagtgcttccaaaccaaatcttctagagttctgcagtttgcactcgaaaagccaagaggaggttgaattcgttgctaaggaccttggataagcacaaataataattttatttgtctat

SEQ ID NO: 40149 - DNA, 615 bp, Macaca Mulatta
  misc_feature (1)...(615): n = A,T,C or G
ggcggcggcggctgcntcctctngttaagggggaaatcttgggctgagagcaggaataatgcggtaggaaggcgggctgctggctcccccggctccggcagcagcggcggcagcccgagcagcggcagcagcagcggcagcaccccaggcgctgacagccccgccggccggctcccttgctgaccgccgactgtcaatggagctggaaaacatcgtggccaacacggtcttgctgaaagccagggaagttcctggtccagaactttacacagcaaaaggtgctcaaaggatatttgttcaatgaatgtggtatgctgacatttaaacaggacaaaacttgggaaggagcaggaaaagcttgatacacaatttaagacaagtgccaccataggctactgttggcaaacaagagctccaccaaactattgtttaacgtgaagaagcagcagtctgaggcatttctctcaaccagtggcagaagggggagacctccgccagcaacatggaatcttcattgggatgcagctgacccactctcctgacttctcaggccttttccaccaatggtcacgctttacgttcagatgtattcagcactagataaccatatttatt

SEQ ID NO: 40150 - DNA, 2421 bp, Macaca Mulatta
  misc_feature (1)...(2421): n = A,T,C or G
gcatcgactgctctcctcgtgcccatgctgacattccccggagatcgacatcctgtaaaaagcctgaagattgcttnnnnnnnnnngtcttatttggaaaaacttaagatttgatcatagatctattttaaacagtgccaagttaactgacattgatgccatcgtatctggggtccctaggaaatccagaaggggacagtgaatggtaggaagactcggactcgggtctgtctgtaacactcggagcctgcaaggcaacacagttaactgagttgtattaaaatgacttggtgtggctataaaccaaaccacacccctctagctgacacgaagagcttcctgtacaagccgtggggtgggagggcctcccctgtctcctctgcgggcaggcagacagggatgacacccaggtgtgaattcagcctgcacctcctacagatgagctgttgaaggcgatggccacagcaagtccgcacccaagtgctctttaaacngagtgtttctttaaacaaagaaccttcccggcattgcctccctaggtatgattaatgcggcccgggcacctccttcttcactcagcgatcacttctctgcagcttgttcccagacgcaggnnnnnnnnnnnnnnnnnnnnnnnnnnnnnnnnnnnnnnnnnnnnnnnnnnnnnnnnnnnnnnnnnnnnnnnnnnnnnnnnnnnnnnnnnnnnnnnnnnnnnnnnnnnnnnnnnnnnnnnnnnnnnnnnnnnnnnnnnnnnnnnnnnnnnnnnnnnnnnnnnnnnnnnnnnnnnnnnnnnnnnnnnnnnnnnnnnnnnnnnnnnnnnnnnnnnnnnnnnnnnnnnnnnnnnnnnnnnnnnnnnnnnnnnnnnnnnnnnnnnnnnnnnnnnnnnnnnnnnnnnnnnnnnnnnnnnnnnnnnnnnnnnnnnnnnnnnnnnnnnnnnnnnnnnnnnnnnnnnnnnnnnnnnnnnnnnnnnnnnnnnnnnnnnnnnnnnnnnnnnnnnnnnnnnnnnnnnnnnnnnnnnnnnnnnnnnnnnnnnnnnnnnnnnnnnnnnnnnnnnnnnnnnnnnnnnnnnnnnnnnnnnnnnnnnnnnnnnnnnnnnnnnnnnnnnnnnnnnnnnnnnnnnntcctccaggccagcaccggcctcgagaagggcaaagggcagnnnnnnnnnnnnnnnnncggccacggcgcggtgtcacagttcagaggccttctcagctgaacctgaagttactctaagctcgggccccagagtgaggactcggggccaggcatccgattccccatgagctcctttacctaaagctgtgcagagaatccgaggctatgagtgggggtgggggaaagatgtacagggatgctttggtttcactcctgagatacgagaatgtcctctgaacacacatgcagatagctggacttctacacagtcgaaatccagatcgtttctttcctcccagcataaggaaaccatccagtaagagctggtgttcatcgatgctacgtgtccagaatggggctgagcacccgcctcactgcatcctaacatctgtctaatgaggcagagaatgtcactgtcacactctgcagacgaggaagccaagctgtcagcaagtccacatcttgccacaaaaccagtaacctgtggcgctgagatcgcacatcggtcgtccactgccacgtccatggcctccttctctggggtttgcctgcctcctgatggccgccatgcctctgtccccttgcaggggctggctcttccggtggtcagtactttttggctgcaagcagcagagattccctcgagggcttgttgaaagcactcacatcaacggggcctcagaaagggagctgaggctgtgcacggcactgcagtttctcctcacgctttgcatccctggcttgactctccctcaagatgtcctgctatctccacaaggtggccagcccagccctgtcttcctcaccttccaggcccagctaagcagccctccccgcatcatctccagctgctgcccaggctgcacggagcaggtgtccagcgcccatccaaccactgtctagagggcagagagacctgctgggactgtgacaaaacctggccctgcccacatgccctgcagtaatgcactgaggagtgcatggcagcacatatgtgcctcatgtgtcctgctgtgatgcaccgagtgacacacagcattattgtgtcaatcatgtgtcttgatgtgatgcactggttcagacaatatcacggaggcagtgtttctttaatactgtcaaatttgaggaaacaatctaacaaaagccacttgatgaacattctgtaaaggtgacatagatacttcaaaagcatctctgacatagaaannnnnnnnnnnnnnggagctagtccagattttaaaaataaaagatatagaaact

SEQ ID NO: 40151 - DNA, 775 bp, Macaca Mulatta
ggagtagaaagaaaccatagtctgctgttttgtgaagagtagtgtgccttggcttgggggtacaggagtaagaggaatgcagaggagtgaggatcatgggaaaatgttgaacttttctgttggagtttcttagccactctgaaggaaaacattttcccgttaaaatagaaatactagtatcatatacataacatttttggaatttaatccaaaacttcatctgttccattgaaacatacataaagaaaaggagtaataaaataggttaggaccaataagcagcagattatgttactaagatttttcttactgtagttagtcagctctggctgattatggcttttaagagcaaagaataggatgaggaaaatgctgctgttttattatcactaacagagatgtggtgacaatcctcttagatgttaaaacaaaactgacccaggaagagagccctcatcagtaccagaccatgctggcatccagatctcaagactttcagcttctagaactgtgagaaaataaacatgttatttaaacctaaatacataactaaacctttatctacttctgccattctctttatacacttgggatccaggatacacaaattgaagttacttgtttaatgattttataactatgtcagaatttaagttaaaagtgagttattcggtatgtagaaaggctgaaaatagtacaactgcagtaattctgccagctataagggacatgtggactgagagggtagtcttaatagattgtgatcaactatgtc

SEQ ID NO: 40152 - DNA, 640 bp, Macaca Mulatta
  misc_feature (1)...(640): n = A,T,C or G
attcccgtgctccatctgaaaatatttngatacaaaagataccaaattatggttttaattgtatttccctggttcagatgcgctagagcatattttcatgtttataattgcagtatttgtttcctcttctgtgaaatgcctgtccttgacttttgttcatttaaatgatgtttgactttttcttactgattatagagttcttttattttggatactactcctttgtcaatggtatgtgttgcaaatatggtataaactcacattcttaattttattgtagataaatttgtcaatccatttctttttactccttgtgtcttgttttaaacttcttttctcccgtaaaggatttcgatttgttcgagacaggttctccctctgtcatccaggctggaatgcagtggcttannnnnnnnnnnnnnnnnnnnnnnnnnnnnaggctcctgtgatcctcccacttcagcctccaaagtagcttggactacatgtgcaagccaccatgccttnnnnnnnnnnnnnnnnnnnnnnnnnnnnnnnnnnnnnnnnnnannnnnnnnnnnnnnnnnnnnnnnnngctcaaatgattcacccacctcagtctcccaaagtcctggtattacaggtaagatccactgtgccc

SEQ ID NO: 40153 - DNA, 523 bp, Macaca Mulatta
  misc_feature (1)...(523): n = A,T,C or G
gggacacactccggtagaaaccatcacgttagcatacactctctggcagagcccgccgccctcacgtaaaccccaagaaactggagggccaaggttgtggattaaacctaactctacatttcctctctgaaaacggcctattcaagtcaaaggaatgttttaagtcatgttgcctgcctttccctgaagccgactgccttggccacccatggctttgtgatgtgcatgttccgtgaggaggatgtcaccttcctgcccttgtcttgaccccctcgtctgtgaaaggagacctgtcacaggccggcggaagctggtgaatgctcgtccagtcccgaagcagggccacgtgctcagacccgtcataagagaatctgttgccgtggctgtttacggcagctcgctgtgtgtgcctgcagctgctttgagcgttttccttacatcaaaacctacttcattgaaaaataaaataataatcactgtgaggtcgaanaanannnnnnnnnnnnnnnnnnnnnnnnnnnnn

SEQ ID NO: 40154 - DNA, 640 bp, Macaca Mulatta
  misc_feature (1)...(640): n = A,T,C or G
gggaaagaacttattcataaaaccaaacaccgcctgccctcaaaaacctattgnnnnnnnnnnnnnnnnnnnaacttgttttctccaagtaccaaaactttcatggagtaagcaacaaagtgaaaaacagacacttggattcaaatagtacaaaggtctcatgctccaaataatgcaaaatacctacacagaaaccacaggaacctgcatgtctgactcggctttgtcaaaacatccttacctacgacagatggtttaaggtagtggttttcaaaaatttacgtgactgtgacccacaattagaaatcaagaaatgaatttcacattgcaaccatttatgtttggtgcgtgagtctgcctgggtatgtataaagctgaaancaaaatgtcacaaacaatacctacctttatgacattggatgcactctgatattttccattttattccattccctccaaaagtccattaatttaaaagccagttatggccaagaaattgttttacaacccactgaatctgacttgcggttaaaaggcaattggtttccaccctaacctctcaaaattcccgggaatctagaaaaacaatccactttttgcttcccctttttcaaggtggattaaaaaaatctctaaaatg

SEQ ID NO: 40155 - DNA, 2522 bp, Macaca Mulatta
  misc_feature (1)...(2522): n = A,T,C or G
atgatgtaaaagattatattcaggattacttgaccctgttaaaaaagaaagcattcataattgaagataaaactgaactgtacatgctcttcatcaactgcctggagnnnnnnnnnnnnnnnnnnnnnnnnnnnnnnnnnnnnnnnnnnnnnnnnnnnnnnnnnnnnnnnnnnnnnnnnnnnnnnnnnnnnnnnnnnnnnnnnnnnnnnnnnnnnnnnnnnnnnnnnnnnnnnnnnnnnnnnnnnnnnnnnnnnnnnnnnnnnnnnnnnnnnnnnnnnnnnnnnnnnnnnnnnnnnnnnnnnnnnnnnnnnnnnnnnnnnnnnnnnnnnnnnnnnnnnnnnnnnnnnnnnnnnnnnnnnnnnnnnnnnnnnnnnnnnnnnnnnnnnnnnnnnnnnnnnnnnnnnnnnnnnnnnnnnnnnnnnnnnnnnnnnnnnnnnnnnnnnnnnnnnnnnnnnnnnnnnnnnnnnnnnnnnnnnnnnnnnnnnnnnnnnnnnnnnnnnnnnnnnnnnnnnnnnnnnnnnnnnnnnnnnnnnnnnnnnnnnnnnnnnnnnnnnnnnnnnnnnnnnnnnnnnnnnnnnnnnnnnnnnnnnnnnnnnnnnnnnnnnnnnnnnnnnnnnnnnnnnnnnnnnnnnnnnnnnnnnnnnnnnnnnnnnnnnnnnnnnnnnnnnnnnnnnnnnnnnnnnnnnnnnnnnnnnnnnnnnnnnnnnnnnnnnnnnnnnnnnnnnnnnnnnnnnnnnnnnnnnnnnnnnnnnnnnnnnnnnnnnnnnnnnnnnnnnnnnnnnnnnnnnnnnnnnnnnnnnnnnnnnnnnnnnnnnnnnnnnnnnnnnnnnnnnnnnnnnnnnnnnnnnnnnnnnnnnnnnnnnnnnnnnnnnnnnnnnnnnnnnnnnnnnnnnnnnnnnnnnnnnnnnnnnnnnnnnnnnnnnnnnnnnnnnnnnnnnnnnnnnnnnnnnnnnnnnnnnnnnnnnnnnnnnnnnnnnnnnnnnnnnnnnnnnnnnnnnnnnnnnnnnnnnnnnnnnnnnnnnnnnnnnnnnnnnnnnnnnnnnnnnnnnnnnnnnnnnnnnnnnnnnnnnnnnnnnnnnnnnnnnnnnnnnnnnnnnnnnnnnnnnnnnnnnnnnnnnnnnnnnnnnnnnnnnnnnnnnnnnnnnnnnnnnnnnnnnnnnnnnnnnnnnnnnnnnnnnnnnnnnnnnnnnnnnnnnnnnnnnnnnnnnnnnnnnnnnnnnnnnnnnnnnnnnnnnnnnnnnnnnnnnnnnnnnnnnnnnnnnnnnnnnnnnnnnnnnnnnnnnnnnnnnnnnnnnnnnnnnnnnnnnnnnnnnnnnnnnnnnnnnnnnnnnnnnnnnnnnnnnnnnnnnnnnnnnnnnnnnnnnnnnnnnnnnnnnnnnnnnnnnnnnnnnnnnnnnnnnnnnnnnnnnnnnnnnnnnnnnnnnnnnnnnnnnnnnnnnnnnnnnnnnnnnnnnnnnnnnnnnnnnnnnnnnnnnnnnnnnnnnnnnnnnnnnnnnnnnnnnnnnnnnnnnnnnnnnnnnnnnnnnnnnnnnnnnnnnnnnnnnnnnnnnnnnnnnnnnnnnnnnnnnnnnnnnnnnnnnnnnnnnnnnnnnnnnnnnnnnnnnnnnnnnnnnnnnnnnnnnnnnnnnnnnnnnnnnnnnnnnnnnnnnnnnnnnnnnnnnnnnnnnnnnnnnnnnnnnnnnnnnnnnnnnnnnnnnnnnnnnnnnnnnnnnnnnnnnnnnnnnnnnnnnnnnnnnnnnnnnnnnnnnnnnnnnnnnnnnnnnnnnnnnnnnnnnnnnnnnnnnnnnnnnnnnnnnnnnnnnnnnnnnnnnnnnnnnnnnnnnnnnnnnnnnnnnnnnnnnnnnnnnnnnnnnnnnnnnnnnnnnnnnnnnnnnnnnnnnnnnnnnnnnnnnnnnnnnnnnnnnnnnnnnnnnnnnnnnnnnnnnnnnnnnnnnnnnnnnnnnnnnnnnnnnnnnnnnnnnnnnnnnnnnnnnnnnnnnnnnnnnnnnnnnnnnnnnnnnnnnnnnnnnnnnnnnnnnnnnnnnnnnnnnnnnnnnnnnnnnnnnnnnnnnnnnnnnnnnnnnnnnnnnnnnnnnnnnnnnnnnnnnnnnnnnnnnnnnnnnnnnnnnnnnnnnnnnnnnnnnnnnnnnnnnnnnnnnnnnnnnnnnnnnnnnnnnnnnnnnnnnnnnnnnnnnnnnnnnnnnnnnnnnnnnnnnngagatcctcttgccacgccgacggggcctgggcctctgtgctaccgctcttgtcagctacttgattctcctacacaatgaaattgtctacgcggtggaaaaactctccgagggaaacaancagctattccgtggatgccgccgatgtcactgacctgcatgtcatcagttacgaagtagagcgggacctgactccactgattctctccaactgccagtaccaggtggagcagggcagagagaccctgcaggagttcgacctggagaagattcagcggcagatcgtcagccgcttcctccagggcaagccccggctgagcctcaagg

SEQ ID NO: 40156 - DNA, 262 bp, Macaca Mulatta
acatatgatggtcgcttcaacctgaaaagtattgaggagcagctgggaacagaaattaaacctattccaagcaacattgacaagagcctatgtgtggcagaataccacagtgagcctgtggaagatgagaaaccttaacaagcatgctttgacaaactacagaaggctcgtttggatctgtgatgcatcgttttgaggagaatgctcttctctttgtgggtttttcatgttttattttggaactatgaagacttaaaagagc

SEQ ID NO: 40157 - DNA, 325 bp, Macaca Mulatta
taaagaggtgttgattgtttttcccatttcacaaatgaggaggcattagcgtgatttgtcgggaggatccacagctagtaagaggctgtaagaaccagagttttgtccattctctgaatagttagctcatcatcatcagtttccatcactaaattcctaaccgtggtttccttaaatctccatcctccaccccatattcccacccccagacttccttagtgaaaggaaattacttaaaattaacattgcagctctcccagaaataaaattaaaactttttctgtgtttgcacggaaatctttttctcagaatcctccaaaacctt

SEQ ID NO: 40158 - DNA, 656 bp, Macaca Mulatta
  misc_feature (1)...(656): n = A,T,C or G
gccccactgggatctaatggtgagagtccaaaccactccactggcctcctggcagaagccgagtgtgctggggtctccgaagagggtccctcctttgtttgtgggggaaggtcagcctggcccctccaaaggtctgatgtctccacttccacccacaggccttaccgctctgtttacagtgactcccccagactctccccaagagggactggggtttctggggtctactctctgagtcaatggttatttgaaaatttgattttgattttattttttctctgtaaacttctaacctggcttttcccatttcaattcctgtgatttatgccaataaagtttgcccatgannnnnnnnnnnnnnnnnnnnnnnnnnnnnnnnnnnnnnnnnnnnnnnnnnnnnnnnnnnnnnnnnnnnnnnnnnnnnnnnnnnnnnnnnnnnnnnnnnnnnnnnnnnnnnnnnnnnnnnnnnnnnnnnnnnnnnnnnnnnnnnnnnnnnnnnnnnnnnnnnnnnnnnnnnnnnnnnnnnnnnnnnnnnnnnnnnnnnnnnnnnnnnnnnnnnnnnnnnnnnnnnnnnnnnnnnnnnnnnnnnnnnnnnnnnnnnnnnnnnnnnnnnnnnnnnnnnnnnnnnnnnnnnnnnnnnnnnnnnnnnnnnnnnn

SEQ ID NO: 40159 - DNA, 638 bp, Macaca Mulatta
acatgaaacccagattgtccacagagacataaaggtacttgcttttaaagctgatgagcttacctatgctcgtatcagatcacgagagctgtcggtgttatctgctgagtgactggctgacaggggtatgatttagcacaaccatccccaaaatgcaaagtctagtttccctagagtcttgtgacggtttcccaaggtccagatctgtttcctacgagttcgtgtcagccagtcttttaagcactttatgttgttcttttccaaagggcgataatgttctggtgaacacctacagtggagtggtgaaaatctccgattttgggacctcaaaacgtcttgcgggtgtgaacccctgcacagagacttttactggtaagcggaccagagcttggcgtggggtgcccatcccgcagttacgctttctgcacaagctgtggttgttcaaccgttattcagtgagcaccttctcggagcagagtgagcaatttacttgaagtggacggtgtattgtcgcccaacttctaaattgttttaactttgtcatagtgatgcacttagccagctacttgtggcaacaagcttgccctctgttcttatttgtcatccagaagttgggtagatggagtgctctgctgagg

SEQ ID NO: 40160 - DNA, 484 bp, Macaca Mulatta
tccattgggggcctgacgttctcacagagcacagagaaggagacccttggcccctgggaccatcagggctatgatctagaagtcaagcaaatgttctagcccttcagggtcttaaaggcgagtcacttggggtgaaccaaacatttctcatgcacacaatggctctctcataatcatgacgttgcattctgtttgcaaagtctgcctttctttgctctgtgttactgaagatcctcttcctaccagggatgagagagtgaagggaacaaaaggttggctgagaggacaagtccatttgtccacctcatactcccactgtgattgcacgtgccgccctcatctctatcctcacttttttcccagtcaacttgtacccaactgttctagggagattacaagggaagaaggctgaggtagagagcggggcctctatacatttaagctcatagagatacagagcatatgaagatatgggaattcagag

SEQ ID NO: 40161 - DNA, 441 bp, Macaca Mulatta
  misc_feature (1)...(441): n = A,T,C or G
gccgccatcttggcgcggccccttcccggcggcacgnnnnnnnnnnnnnnnnnnnnnnnnnnnnnnnnnnnnnnnnnnnnnggggacgcgcgcccaggactgcaggtgccgggagcccctcggcgggaggcgggcgctggaagctcgggagccaaagcgggacttcgaggcacgcaaacgagcgacattggcgtgcccagccggcaggtcagaggatagcacagacgtagggaggtcagctgagtagggggcgacaggatggtctgcggagccagcctggnnnnnnnnnnnnnncatttctgactcaactgcttaccaggtgtcagcccttggagacgtttctctgtgcctcagtttcttcatctgtaaagtggaatgataataggacctgcttcatggggctgtcctggaacaagcgagtgcttggtagtaagtgcaaag

SEQ ID NO: 40162 - DNA, 851 bp, Macaca Mulatta
gggagtcgtggagggcgtgtcctgcggtacgatggccgtagtgttgccgggagtcgtggaggagctcctgagcgagatggccgcggcggtgcaagagagcgcgcgaattcctgatgaatatctgttatcgctgaagtttctctttggctcatcagccacgcaggccttggacctagttgatcgacagtccatcaccttaatctcatcacgcagtggagggcatgtttaccaggtgcttggaagttcgggtaaaacatacacgtgtctggcttcgtgtcattactgttgatgtcctgcagttgccttctcggtgctacggaagagtgacaggatcctgtgcaagcgtcgcttgggagtttaccttgagtcaggttgtgagcgcgtgtcaacgagctaagtgggtccgacaaggaagttggctggacatattagttggtggaggggaagacaacggggccccgagggggaaaacgaggggggcgatggatggggagcaaaataggagagccggggacaggaaaaaggggcgtattgaaagaggcacacggagcggccccaagaaaagcaagggggagcacagagacaagcgtgcgagaagggaaggggaacggaggaaaagaaccccgatgccacgcccaaacgaggagagggccagagggagagacggaaggaaggagaggacaaaagcagcgggggggaaagaaataatggggcgcggaccgaaagggaggaacaaagaaagaaagggaaaaccggagccggggtaagagagcgcgaagagatgaacaaggggagacaaggcgacaggaccacgatgaaaaacagcacagaggaacacaggacaaggaaat

SEQ ID NO: 40163 - DNA, 517 bp, Macaca Mulatta
ttttctttgttgcaaggtaaaggaagcacctgatgaggccgaaatggtgttcacggcacattgcagagcaacggtggccttccaggcgagcggagactcctggcgggagcagaaggagaagcgagcaaccatgatggtgggaattctgattggcgtgtttgtgctgtgctggatccccttcttcctgacggagctcatcagtccactctgtgcctgcagcctgccctccatttggaaaagcatatttctgtggcttggctactccaattctttcttcaaccccctgatttacacagcttttaacaggaactacaacaatgccttcaagagcctctttactaagcagagatgaacacagggattagagagacgtgggtagattgcaaggaggaaggaaacttggactttttcatcagtgatctgagatccttccctccacagctgagtgctaatgctgtcttgagagttataccattggacttggactgtagaagcagcagcgccaaggctctcaaga

SEQ ID NO: 40164 - DNA, 1023 bp, Macaca Mulatta
ggataagccatggattcaaagctcctgaaagttatcttaatgaggcatgtaaactctttttgtttaatgtccacaccagatcattatggtctgccatttcatgaaatagcaagacttttaaaataagtgatgttttttagtttgtatttctatattctttcctaccaagtatagcacagtgtagtacaagggcctacagttataagcctcgggaaagatgctgttttggacacatatttcatctgtgtgaccctggaaagagggtctcaaagggtcactgtggccctccctgacctttcattggtaaagtgggtcatcctctcttgtataatgagagctgaaaaaaataacatatttccatttagagctcccatacatttcaatgaaggcacgaagattttacacattttataaactaccaaagtagttttcatactccttgaatatacaccttaccaagacgtaaacagtccacttagaaaaatattattattggcgaaagtctaacctttcctaaaaaaagcctttgtttcccgttgaaagataaattcaaatattaaactcatacgaacatcgttaatactacgcccgcaaaatacatttgctgatactatagatatgtcctcaatcatgaatatttattttggggagaaaaaaactggcgccccactgagaaacatatgtgcacagcgaaaacttagcaaagccccttctccgcacgatctcaacacacgcccgcccattgagttactccccaacaaatgggtatgagacatcaactgtactcgtcaaacacaagcagaacgttgcctaggagtgtaaaaatatttagtagccgtagaaaacatataaaccatagagagagaaattttgtacgaaatggagaaagaatggggaagagcagaaaatatatttacgcttcatttctattatcttgtagaccctactgtttaagaaaaaaacacgtgtagagcgataacaaaactcatcctcaaggtcccacaaaatatcacgcacatagcg

SEQ ID NO: 40165 - DNA, 116 bp, Macaca Mulatta
tgggaactctgaatagatcccatcaccttctacctccagtgttgacacacctgctgagggagacatgatcatcatcatcattttggagatgaggaagctggaatgcagcacagttc

SEQ ID NO: 40166 - DNA, 775 bp, Macaca Mulatta
attatcaagatctggagcccactacaagcagccaggatgtactggagacctcgatggtcggattgaggacgattcccgctgcctttataccgcaggaagagtacatcagccttgtgctgaacagtgggagtggcctgtcacatgactacgccaaccagtcggtccaggaagacccgcggatgatggccttctttgactccctggtacgccgagagatcgagggctggagctctgactcagacagtgacctcagtgagagtactatcctgcaactgcacgcaggggtcagcgagcgctcaggctacactgactcagagtcttcggcctcactgcctcgctccccgcctcccacagtagatgagtctgccgacaacgccttccacctggggcccctgcgggtcaccaccacaaacgcagtagcctcaactccaccaacacccacgtgtgaggacgcagcctctcgccagcagcgtctgtctgctctgcggcgctaccaagacaaacgcctcctggccctttccaatgagtccgattctgaggagaatgtctgtgaggtggaactagacacagatctctttccccggccacggtcacccagccccgaagatgaatccagcagttccagcagctctagcagctccgaggatgaggaggagctgaatgaacgccgaggctctaactggcagcggaatgccatgcggcgtcgacagaagacaacccgagaagacaggccattgcccagttcaggccacaattcttaccttggagaagacac

SEQ ID NO: 40167 - DNA, 636 bp, Macaca Mulatta
ggaagacaggcatctcaaatcggctgattctgcatctggaaactgccttcatcttgaaagaaaaggtcccttctccagccacccagccccaagatggtgatgctgctgctgctgctttccgcactggctggccttttcggtgcagcagagggacaagaatttcgtcttgggaagtgcacctcgcctccagtgcaggagaattttgacccgaataagtatttcggaagatggtacgaaattgagaagatcccaacaacctttgagaagggacgctgcatccaggccaactactcactaaaggaaaatggagagatcaaagtgttaaaccaggagttgagagctgatggaactgtgaatcaaattgaaggtgaagcctccccagttaacatcacagagcctgccaagctgggaagttaagttcttctggtttatgccatcggcaccgttactgggtcctggcccaccgactattgaaaactatgcccctcgtggtattcccggtggtcagccattcatccaaatcctttttttccgtggggggaaattatggcctttgggaatcccttgggcccaaaaaaaaaaccggtttcaattctttccccctttttaggaaaaaaaaccgggtgtgggaaacac

SEQ ID NO: 40168 - DNA, 225 bp, Macaca Mulatta
  misc_feature (1)...(225): n = A,T,C or G
gatggtcagggtggccgtgttccctgagttggagccagagannnnnnnnnnnnnnnnnngggccgcttactgacatcataaatcaggagtctgggggctgtgcctgggtgatactggtaccaggagacgtcattataaccaccaacgtcactgctggttccagtgcaggagatggtgaccgactgtccaagagacttggacactgagggaggctgagtcagggca

SEQ ID NO: 40169 - DNA, 1072 bp, Macaca Mulatta
  misc_feature (1)...(1072): n = A,T,C or G
gggaggcattgaggcagccagcacaggggtttctgctgaagtggcaggcgcagcttgaggaacccgcagataagttttctctctttgaaagacagagattaatacaactacttaagaaatgtagtcagtagcttactaagattttgcttagcattaggttcttaacgtaatttgaataagattttaagagaaaatatgaagagttaaaagtgtagcgtgagnnnnnnnnnnnnnnnnnnnnnnnngtttctaaaacatgacggaggttgagacgaagcttcttcaagaagtaaaaaaatgtatttaaaagaaaattgatagaacggacgccagagccctgaattaatacaagtagcaagggcagtgcttttagattacaatgaaggtgatttaaccagagcttaaacgtcggtttgaaaagctggtaggtgattcaaaaataacttgaaagggcgaatctttttggaaaatgaagatttacaattctgatagggacacttaacataataacctttttaaaacctccccattggaaagtccaaggggaaagcaattttatcccgtttctatatttattaaatgagccccctgaaaccattatagaaatccataataatacatctgacgcgccttcttaggcgactaaaaatactcgtctcttatgatatcgtgcccgcatctcgattaatggggcatcnaaacggaatagtataaaaaatcatggcgacagaacgctttatgtctataatgtgcaactggtgtaatataccccccatctcacttggggaaaaaaacnatagaaattatcaatcaaaggattattcttagaataatgttggagacacaaatacactagtaagctagaaacacgacaatgtgctctacatagtggaaattgtgatcctgtatacacaacataagcggcgacgattgccaccctaaaccgaattccgcgtggcgaatatttcttttactcaccgcattcttatcatatcacncacacctacccccctttttatttgcataacggaataaaataaagggaggagaacaagtccttactctatgccct

SEQ ID NO: 40170 - DNA, 807 bp, Macaca Mulatta
  misc_feature (1)...(807): n = A,T,C or G
ggggaccttggtnnnnnnnnnnnnnnnnnnnnnnnnnnnnnnnnnggagtctcgctgtgtcgcccaannnnnnnnnnnnnnnngtnnnnnnnnnnnnnnnnnngctctgccttccgggttcacaccnnnnnnnnnnnnnnnnnnnnnnnnnnnnnnnnnnnnnnnnagtctgccaccacgctcggcgaannnnnnnnnnnnnnnnnnnnnnnnnnnnnnnnnnnnnnnagctcggatggtctgnnnnnnnnnnnnnnnnnnnnnnnnncacctcggcctactctctcatagcctaaatgtcttcattttaaaaataagcacttttatgagatgatttctcatgttttaaagttccatctcatttctctgtctcttctcaactcctctctttgtgtgtatatgtatacatatgaattcacatactttatacaccctatatgcatccaattactctactttgatgctcactgctcacatcccagaatttgtttaataatttttttcaatttaaatcattttaaaaaaatcccatggtgaagaagaatccggtaatataatatggcctaattggatccccttcatggcccgcccccccaatgaattatttataaaattatttttgtatggcctcttgaacaaaccaaaacacccttaacccaaattttaggttttttggttttaaaccccttgtgaaaaggggaaatctccccccccgcnnnnnnnnnnnnnnnnnnnnnnnnnnnnnnnnacggccgcgcccggcgcccctatataatttggtgcccacaaaaaggggggggatatttc

SEQ ID NO: 40171 - DNA, 649 bp, Macaca Mulatta
  misc_feature (1)...(649): n = A,T,C or G
aattttttttaaangcgaccaaanaaaaaaagactaaaaatagtgttttgtcatcactgtctgtctggtgtgtttattttggtttaaaaaaatctgtggtttgacttaaattcatcagttttccttttaaaggggggattggggtggacctagcaacggcttatagtctccttttccctttttgccccagtctcttttaaagaactgtcttctagtaactagaagtgaaatgtactgtccagttacagtttgagtgggtatgagatttaactcaaaaggcatctnnnnnnnnnnnnnnnnnnntgttttcttataaaatccaatttatgtaaatgttttctctgtagttcatactacctactttttattcattctttccttaatactgtataaccttttgagtgttttgacttgtccagaggtttgttagtgttgctgtgcatgtgtcttgaggtctcatctcaagtaagtttgtgtatgatccaagatttcagtggatattgcaaggcaactaatgaaccgatttcataagttttccttttgccaaactaacgattatcaattaagaatttcctctggttgatgttatacaagaaagcacaatattttttgccctttggtcttctttgtaaaagtcttcagatacttg

SEQ ID NO: 40172 - DNA, 742 bp, Macaca Mulatta
  misc_feature (1)...(742): n = A,T,C or G
ggaaggaatgagatattgcttaattgttaaacaatcaagactttactggtgaggttaagttaaattactaccggtacattttcccgggtaaccgggaaggagatagtataggaaatgaagtaatagaagtgaggtcgagaccaaaagtcacttaattaagtttgcgaatgtgctttctaaattataaggcacttgtaaatgtgaaaaattcgatgctttctatatgagtaaaactttctgtaagataggtactgtctctacaaaattctcattgtatactgaaaccacaatgagaagggttctatacgtagttatacaaaccaagggtttaaatacctgttaaatggatcaattttgattgtctactatgtgaactcattgttagaggcactgataatttatcatatttcatttacccacagccaaagataaggcaatacctatgttagcattttgtgaactctaaggcaccatataaatgtaactgttgattttcttacttggtgctgagcactaggtttataccattgtatgatagttattatattgtgcaaataaagtaagaaaatttgagtaacaatgattaacttttgaatacgcatatgcaagggattggttggtctgaaaaatgccactatagtagttatctattggtgtgcaaatctcattgcctaggcatttgngggatgcaaagaataaaccatcctttatgggtgtccctggggtagccagaagaaaaatt

SEQ ID NO: 40173 - DNA, 637 bp, Macaca Mulatta
  misc_feature (1)...(637): n = A,T,C or G
gaacgaccaaaagaccaggtctcannnnnnnnnnnnnnnnnnnnnnnnnnnnnncnnnnnnnnnnnnnnnnnnnnnnncannnnnnnnnnnnnacnnnnnnnnnnnnnnnnnnnnnggtcaactggataacatttaaaacaataaatgcaactacattgtattggatttaaaagagcaacaaatgacagggtatacttcgtcaccagcaatcaatcagaagcaacagacgtgacattgtgacatttggagtctaggcctcaagaggccctatacactctgctctcagaaccctgcccagcctccatgagaagtccggctagcctgcaggagcatgagagaccacacagaccacagctgaatcacagcagttgttcaagtttagacctcagatttatgagagaacccaggcaagataaagtgggggcctgacccaggtgaactgaactccccagcatatcctagactcacaagcactgataaatgatgttttaccaaagttctgggaatagtttggtctgttatgtagcaatagatcactcataaagaatttatgacatgaaacaaaacatcctacaactgaattctaaaacaactaagtaagcggaacttaattaagtggaacaggtccattgccct

SEQ ID NO: 40174 - DNA, 824 bp, Macaca Mulatta
  misc_feature (1)...(824): n = A,T,C or G
ctgccccgcaaaaaagttggtggtccccaattccccagcgctggggggcgccaccaaggggcgcaggggacctttggtctcccagaaaaaaagaggggaaaaggaaaaggggagggttttccccccccggcccaaaatgttccaggtgtaaaaatggaaaatggccccagtcggtgaagagggtggggggcctgggggggaaggtgttttggaatcggtggggaccagaattcccttaaggaatgaacctggggcccatcccccgggaatggggaagctctcccttcggagtttcacaggagattttggtggtttaaaaaatatggggcaccccctcccttaccccactttctccctttcgttctcattctcaccatgtgatgtgcctgttccccctttgccttccaccacgattgaaagcttcttgaggcctccccagaagcacatgccactatgcttcctgtacagcttgcagaactgtgagccagtttaaaaaatatatatctttttaaataaattacccagtctcaagnnnnnnnnnnnnnnnnnnnnnnnnnnnnnnnngctttgtcgccaggctggagtacagtggtgcnnnnnnnnnnnnnnnnnnnnnnnnnnnnngggttcaaatgattctcctgcctcaaccttnnnnnnnnnnnnnnnnnnnnnnnnntgccaccatgnnnnnnnnnnnnnnnnnnnnnnnatagagacggannnnnnnnnnnnnnnnnnnnnnnnnnnnaatctcttgaccttgtgatccacctgctttnnnnnnnnnnnnnnnnnnnnncacagacctcggccagcgctcc

SEQ ID NO: 40175 - DNA, 587 bp, Macaca Mulatta
  misc_feature (1)...(587): n = A,T,C or G
gggatgagacctccaacaaatactagccctaaatttcaactcaagctnnnnnnnnnnnnnnnnnnnnnnnnnnnnnnnnnnnnnnnnnnnnnnnnnnnnnnnnnnnnnnnnnnnnnnnnnnnnnnnnnnnnnnnnnnnnnnnnnnnnnnnnnnnnnnnnnnnnnnnnnnnnnnnnnnnnnnnnnnnnnnnnnnnnnnnnnnnnnnnnnnnnnnnnnnnnnnnnnnnnnnnnnnnnnnnnnnnnnnnnnnnnnnnnnnnnnnnnnnnnnnnnnnnnnnnnnnnnnnnnnnnnnnnnnnnnnnnnnnnnnnnnnnnnnnnnnnnnnnnnnnnnnnnnnnnnnnnnnnnnnnnnnnnnnnnnnnnnnnnnnnnnnnnnnnnnnnnnnnnnnnnnnnnnnnnnnnnnnnnnnnnnnnnnnnnnnnnnnnnnnnnnnnnnnnnnnnnnnnnnnnnnnnnnnctaacaagaaaaaaaatttcaaaaaaagggggcnnnnnnnnnnnnnnnnnnacccacttccaaacctgggaaccaacccccgggaacctttcccggggttttccaaaatctttttggacccaccctttccc

SEQ ID NO: 40176 - DNA, 251 bp, Macaca Mulatta
atttttcaggctttgctagccaacccagaaggaagtggtctccgatattcaagacaataataatatcttcctgtccttgggtatgcaagagaaaattttgaaaaaacttctgacagtggaacacaaagtgacggccctagaagggataatcattgctcaaaaacctgccacgaagagggattgttcctatgagccctactgcagatgctctgactgccagagtcccttgcccacatcatggtatacttccc

SEQ ID NO: 40177 - DNA, 790 bp, Macaca Mulatta
  misc_feature (1)...(790): n = A,T,C or G
gggtgaacttggtcttgtcatttaatctctgaaaaaccttttttttaacctattaaatgtgttggttggtatgatcaaatgatctctaatgtctattgaatttataaaggagtgtaattttgtgtttcctgagagaagaaaaatatgtttgagctcatgtttatagtgtttatatgtgcaaagttttcaacannnnnnnnnnnnnnnnnnnnncaaaactctaattgcaatcaacagcaaactgagacaggtattaaagtacttaagtacagtgatgggtagctctgggcaaagttcataagaaaaatcaccacactgattacaggcattgtaaggggttgtcagaaacagcaagtaaattacagagaaaaggatccacaaatcctttccttaaaatcactactattatcatggtgttaactgggtaatttttccagcacaaggggcaaatgcatttttgaaaaacataaatcagttaaatggtacacacagaaaatacccttcttacaacagccaatctgaggttattctattaaataaaataagcnnnnnnnnnnnnnnnnnnnnncaacattacatataagtacaaaagttatctgtttagaagacagacttcattttttcagctttgttaaaacattaagaacagaatacagaaatctcagaaatcatgtctcattcagacctaagcaaacctcaattaatattaaaagataatatttaataaaaataaaactttgaattaaatcatggtttggaattatctggggtatttttcatttgaaaaaac

SEQ ID NO: 40178 - DNA, 356 bp, Macaca Mulatta
cagatctcaatccctgcaaatgaattttgtcaaaggccccttttcagtatcaaggagcaggaagcaatatcctttaaaaaccgattggccatacatttctgctcattaaataaatatttttactttggacccgattgatttttcagacgcgcagaacaatgggactggctcacctgtgtgcggctgggagcctccttcctccctggggtcctttgaagtcacagtgaggcggccacacctggtgcacaggtggagcccggccgataggcacctgaattctcaccaacttcacagagtgttcagaaataggctctcactcggccgacacgtccccttcctggatcactggggtgggg

SEQ ID NO: 40179 - DNA, 948 bp, Macaca Mulatta
  misc_feature (1)...(948): n = A,T,C or G
gggagatggcacctgtcaaaacagcattggttccatttctagattgtggatcttcagataaattctgccattttcatttcacttcctgaaagtcagggtcggcttgtgaaaagttgttaaacaacatgctaaatgtgaaatgtcaaccctcactctaaactttccctgttcagagcatcagatgaagacttcattgggttttatagtggctttctgatttttggtagtccattgaagaagggagtttgaaagttgttgtatactgttaacgattgtctgcccatgtcctgcctgaaataccatgattgtttatggaaagtatctttaataaagctggatacagtttggcttggaaaaannnnnnnnnnnnnnnnnnnnnnnnnnnnnnnnnnnnnnnnnnnnnnnnnnnnnnnnnnnnnnnnnnnnnnnnnnnnnnnnnnnnnncntttnngggcccccttggccctnnnnnnnnnnnnnnnnnnnnncttctttttggggccccgcgggcccccgtaagggaaagggaaacacggtggcaaaacctgttttccccaaagaaaaattccgggcgcccggaaacaaaggggctgggggaattnnnnnnnnnnnnnnnnnnnnnnnnnncgggggggaaaacaaaaagcgttnnnnnnnnnnnnnnnnnnagaaggggggcttctctgggggggctattatcgcggggggcctcaaccaaacgcgggagtccccaagacccaaacccccaaaattataaaatttaagcgccccgcgcctcctgtgcgatcttattttgaaaaaaagagggggtgggaatattctatttataacttatctccgcgcggcccagggggaacaccccctcccacaaacacggggagtggagagaagacccttaaactctccccccaggcggcctttcgccccgcaccttggtggcccccccct

SEQ ID NO: 40180 - DNA, 602 bp, Macaca Mulatta
  misc_feature (1)...(602): n = A,T,C or G
gggtaataaaaatacaaaactagccaggcatagtggcgnnnnnnnnnnnnnnnnnnnnnnnnnnnnnnnnnnnnnnnnnnnnnnnnnnnnnnnnnnnntcggaggttgcattgagccaagattgtgccattgcagtccagcctaggcgacaagagtgaaacttcgtctnnnnnnnnnnnnnnnnnnnnnaatggggaaacagtaatagtataatgttaaattgcaaaatctaattctgtgggtcaagggtgggacctgaaggtctgtgtttctaagaagctccaaggttatgccagtgctgctggtcctcagaccatattttgagtaacacaagtacaaagctatgctgcccagtacagaagccgctagcctcatgttgctgttgagaatttagagttttactggttcagattaagatatgctgtaaatgtaaaatatagctgggcatgatggcacatacctgtaatcccagcaccttggtagtctaagatgggacaatcacttgagactgggaggtgnnnnnnnnnnnnnnnnnnnnngtgagagctcacctttacaaaaatcaaannnnnnnnnnnnnnnnnnnnnnnnnnnnnnntcgg

SEQ ID NO: 40181 - DNA, 936 bp, Macaca Mulatta
  misc_feature (1)...(936): n = A,T,C or G
gggtggtagtggcagtgttcgtgtgctcgggtctgaatcgccggggaggaggcggtggaggaagaggtggcggcggtggcggtggtcgtagcggtggcggaggaggcgggtacgaatcagctgcgggcggagacatggccaacatcgcggtgcagcgaatcaagcgggagttcaaggaggtgctgaagagcgaggagacgaacaaaaatcaaattaaagtagatcttgtagatgagaattttacagaattaagaggagaaatagcgggacctccagacacaccatatgaaggaggaagatatcaactagagataaaaataccagaaacatacccatttaatccccctaaggtccggtttatcactaaaatatggcatcctaatattagttccgtcacaggggctatttgtttggatatcctgaaagatcaatgggcagctgcaatgactctccgcacggtattattgtcattgcaagcactattggcagctgcagaaccagatgatccacaggatgctgtagtagcaaatcagtacaaacaaaatcccgaaatgttcaaacagacagctcgactttgggcacatgtgtatgctggagcaccagtttctagtccagaatacaccaaaaaaatagaaaacctatgtgctatgggctttgataggaatgcagtaatagtggccttgtcttcaaaatcactgggatgtagagactgcaacagaattgcttctgagtaactgaggcatagagagctgctgatatagtcaagcttgcctcttcttgaggagcaccaacatctgttatttttaggattctgcatagatttcttttaaactggcattcttgcctcatcgatgttatctaggcaccattggagacnnnnnnnnnnnnnnnnnncctgctctgtaaataaagctaataaacgtgctgtgtaaattt

SEQ ID NO: 40182 - DNA, 450 bp, Macaca Mulatta
attgacaacgaagccctctataacatctgctcccacgctctgaagcagaccacaccaacctacagggatatgatctccctcatctcagccaccatgaacagtgtcaccacctgcctttgcttccctgcacagctgaatgctgacctctgcaagttggcagtcaacatggtccctttcccacatctccatttctttatgcctagctcttcccctctcaccagccatggaagccagtagtatcgagctctatcaatgcctgagtttacccagcagatcttcaatggcaagaacatgatgactgcctgtgaaccccaccatggatgatactttcccatggctgccatcttcagtggtcagatgtccatgaaagaggtcaatgagaaaatgcttaatctgcaaaaaacagcagcagctatattgtggaatgaatctccaacaacatcaaaaaca

SEQ ID NO: 40183 - DNA, 1119 bp, Macaca Mulatta
  misc_feature (1)...(1119): n = A,T,C or G
gggctttccgcgctacctacagaagggtccatacggcgttgttctggattcccgtcgtaacttaaagggaaactttcacaatgtccggagcccttgatgtcctgcaaatgaaagaggaggatgtccttaagttccttgcagcaggaacccacttaggtggcaccaatcttgacttccagatggaacagtacatctataaaaggaaaagtgatggcatctacatcataaatctgaagaggacctgtgagaagcttctgctggcggctcgtgccattgttgccattgaaaaccctgctgatgtcaatagtaatatccaccaagaatactggccacatggcccacgctgaactttgctgctgccaactggtaacacaattcaaatagacagggccacattcaactcacatgcaaacctatcgacttgtccaaaaatccaaatgcatacatttttgtgtgaaaccttccagtaattcagttgtgtgtttaattagaatcgctaacaggtactggactcacaccaagaccacatctactatcttataaaggcaaaatactcaagaaatggataaattacatcattaagccgcaaagtaacgcgagtctaggatatatatattgggttcgatccactaacaattaacaaaaaggtagtacattccctctgatacacctaccaaagtttgcaatgacgcacacaacgtatgagagagcantcagggaaattttgtgcgacactacactacatattcataaatttgtggctgtacaactgttccccgcgggaggggggggtatcatggggttttaaaaagtaaagatattacgtaatgggatatatctcacattagttgtagcgacgaaaaggctaaattgaattgttggtaatactctgtatagttctatcccggtgatagagatgcctgtcgctattccatacacgtgaagtcactaccctcaacatgtattcctatcttgcataatagtttatctaaccacgtaataaaagaagaaagaacgctcagggtaactagaaatatggccaatacatactttcctgcacatagaggagactataatagttcgagacccctgactatgccaccacaaatggtaggagcg

SEQ ID NO: 40184 - DNA, 571 bp, Macaca Mulatta
caggcttggactcaatttctcatgacttgccaactgtacattgcccttgttaactctgtatagcaaggctgtgatgaatcaagctttaaaagctaccttcagtggcttcaaaaaggagaaaaagtgctttggcattccaaagaaaccctggctgtggagtgagcagcaagtatgccagtggcttctctgcactaccaacaagttcagtctggtgaacgtgaatctccagaggcttaacatgagtggccaggtattgtataaccttggcaaggagtactttctggagctggtatttgactttgtggatgacattttctgggaacatctggaccagatgaccgaagaaaaccaagaaaagacaaaagatcaatataaagaaaattcatgcctgaactcaattcctcattggtttaacaatacgttaggttttggcataaagcaggtaccctatggtatgcaaacacacaattaccccgaaggcagcctcctggatggcatgtgtccagcttctgcaaccagcatgcccagctctgaacaggagtttcagatgttctccaagtctcagctcagc

SEQ ID NO: 40185 - DNA, 798 bp, Macaca Mulatta
  misc_feature (1)...(798): n = A,T,C or G
ggatcactacttgtgtcttttaacaaaatgaaaaaattgactactgatgggaagttaattgccagagcattaagaagttcagctgtcgtagagcttgatttggaaggcaccagaatcaggaggaaaaaacctctgggggaaagaccaaaagatgaggatgagcgcactgtgtatgtggagttacttcccaaaaatgttaatcacagctggattgaaagagtctttgggaaatgtggcaatgttgtttatatcagtataccacattataagtctactggagatccaaagggatttgcgtttgtggaatttgaaacaaaagaacaagcagcaaaggcaattgagtttcttaacaacccaccagaagaagcaccaagaaaacctggcatatttcctaaaacagtgaaaaataagcccattccagccttaagagttgtggnnnnnnnnnnnnnnnnnnnnnnnnnnnnnngccgaatgaaaaaggaagacaatgtccaagccaaagaggaaaatatggacacaaccaacaccagcatcagtaaaatgaaaagatccaggcccacatctgagggctctgacattgagtctactgaaccccagaagcaatcctcaaagaaaaagaanaagcgggacagagttgaagcatcgagcttacctgaagtcagaacaggcaagaggaagagaagcagctctgaagatgcagagtccctggggtccgcgatcaaaagtaaagaaaattattcagaaagacctcattaaggaaaccttcagaagcttccaaggaaaataggagatattgaa

SEQ ID NO: 40186 - DNA, 706 bp, Macaca Mulatta
gggggtgacatcagatggcggcggtatcagatggcgacttactgggtgacatcagatggcgacttactgggcggtatcagatggcggcggtatcagatggcgacttactgggtgacatcagatggcggcggtatcagatggcgacttactgggtgacatcagatggcgacttactgggcggtatcagatggcggcggtatcagatggcgacttactgggtgacatcagatggcggcggtatcagatggcgacttactgggtgacatcagatggcgacttactgggtgacatcagatggcgacttactgggtggtatcagatggtgacttactgggtgacatcagatggcgacttactgggtggtatcagatggcaacttactgggtgacatcagatggcgacttactgggtgacatcagatggcgacttactgggtggtatcacatgtgacttactgggtggtatcacatgtgacttactgggtggtatcacatgtgacttactgggtggtatcagatggcgacttactgggtgacatcagatggcgacttactgggtggtatcagatggcgacttactgggtgacatcagatggcgacttactgggtggtatcagatggcgacttactgggtggtatcagatggcgacttactgggtgacatcagatggcgactttactggggtggtatccgaagggcgacttac

SEQ ID NO: 40187 - DNA, 626 bp, Macaca Mulatta
ggggacgacagcatctgtagaagtcctaggcctgggggaaacagtgtgatctagcagcagactcagaagggtccccgtcagaaccaagttttctgtgaagcgagtttcagtccttttccctgaagtacctagcacgtaggtgttctcaggaaacaacccaagactcagagttctccgcggaggaatgcaaagaacacaggaagtcagtattcccagaaacagtctctgccagtcaatggcgcgctcacacccaactccatcccgcccccgtcccgccccaccctcttgatttctggcgccggtgaccaagcccgacgcagcctccagcccaaacacggtttccgcctcaaggatatttatataaccattgcttattggctgctggcaaacactcgctcttctggttggctgaaactgtcgggggacgttctgcgaaggcggctccttgcggcgttgtgactgagggtcacaggaacctacatttccgtttccggttcgcctccggagccatggcgggggcactgaagtctctactgatattaggaagatggtgccccggccttggagtagctccccaggcccggtcgctcgccgcagtagtacctggagtgacacagatagataac

SEQ ID NO: 40188 - DNA, 682 bp, Macaca Mulatta
gggctttcccaggcggctgccgaagatggcggaggtgcaggtcctggtgctcgatggtcgaggccatctcctgggccgcctggcggccatcgtggctaaacaggtactgctgggccggaaggtggtggtcgtacgctgcgaaggcatcaacatttctggcaatttctacagaaacaagttgaagtacctggctttcctccgcaagcggatgaacaccaacccttccagaggcccctaccacttccgggcccccagccgcatcttctggcggaccgtgcgaggcagtgctgcctcacaggagcaagcgaggccaggctgccctggaccggctcagggtgtttgacggcatcccaccggccttcgataagaagaagcggatgggggggtcctgcctgccctcaagggcggggcttctggaaccctaacaaaaaaaggttggcctaatccggggggcgccctgggcctccacaaaggtttggcttgggaaaatgacccgggggcgagtggaaaacggcccagcctttggggcagggaaaaaagaggggaaggggaaaaaaagccccaagaaggcccccctttcccggggagagaaagaaaaacggcccgcccctcctaaggaggagggttggaggggggaaaaaggaggcctgccggtgaaaaaagaaaggttgtggcaggaaaa

SEQ ID NO: 40189 - DNA, 754 bp, Macaca Mulatta
  misc_feature (1)...(754): n = A,T,C or G
ggggattaaattatttgaaaagaaagtcatgttgtaaatgactttaaatatttgaagccagagaattcgggtattctatttattcattcagcaaatatttagtgacctcctatagtatagcataccctgggactacaaactatagacaaaatgcctgtccttacggaatttacatttctaggtagctgttagagatgggtagggacaggatgtgtggaaaggaacagannnnnnnnnnnnnnnnnnnnnnnnnnnnnnnnnnnnnnnnnggcacgcgcacgtgcgcgcaggcatgaagaaaaagtgatcgttaaatatatgtatacacaaaaagtaataaatttattttaaatgaaagcaactcctttttatagcaaaattgcattcaacttttctaaagcatagtttgagtttacaaaatttgacgtttttactcacaaaaatgtcatattttgatcattactaaaaacaaaatttttgataaaatatctgttgtgcttttaaaatggttcatatannnnnnnnnnnnnnnnnnnnnnnnnnnnnnnnnnnnnnnnnnntggagtctcannnnnnnnnnnnnngnnnnnnnnnnnnnnntaatattgatttnnnnnnnnnnnnnnnnnnngggttcaagcannnnnnnnnnnnnnntnnnnnnnnnnnnnnnaattacaggtgcacaaccacctcaccccagctaaaattttggattttttaattaaagacgggttcacatatgcacgacttg

SEQ ID NO: 40190 - DNA, 216 bp, Macaca Mulatta
  misc_feature (1)...(216): n = A,T,C or G
atgttcactatatattaagcatatacagtcatgtgccatataacaatgtttccatcaacgatggaccacagataacaatggtggtcccataagattatactgctgtatttntactgtatcttttctatgtttagatatgtttagatacacaaatagttaccactgtgcaacaattgctacactattcagtgcagtaacatactgtccaggtttgta

SEQ ID NO: 40191 - DNA, 185 bp, Macaca Mulatta
tgaaaagtttatttcatatagtgaaagcacaaaatctattggccagtcagatgtttctcatcctttttactctgcatttgagttccatgaccacttctgaataagcagtttgcctttattaaaacctgctgcctgattaaagattaccaggttatagtttaaatttgcaattaattctaccatct

SEQ ID NO: 40192 - DNA, 814 bp, Macaca Mulatta
  misc_feature (1)...(814): n = A,T,C or G
ggagctaggaatatcattaaaactgcagagaagcaaacacgaataagaaaatcttgagcaggggagagaaaccttatttacagagcagcaaacgtaaaaattgcatctgacctctcctcagaagctatccaaacaagaagagagtagagtgaaatatttaatgtattgggaataaaaaatgaccaacctagactttggtatcctgcaaaattatcctgcaagagataagaggtagtaaagcatttctcaaacaaataaaaactgaaggaatttttgctggtagatctgccttgtaagaaatgttaaaagaagttcttcagaaagaaggaaaattatgtaggtcagaagctcaaatctgcataaaggatgagcattagaaaagtggaggtaaaattaaaactttctattttctnnnnnnnnnnnnnnnnnnnnnnnncgnnnnnnnnnnnnnnnnnnnnncnnnnnnnnnnnnnnngcaatctgggttcactgcaggctccgcctaccgggttcatgccgttctcttgccttagcctccagagtggccgggactgcgggcgcttgccaccacgcctgtctccactnnnnnnnnnnnnnnnnnnnnnnnnnccagcgtggtggcgggtgcctgtgattccggctactcanggggctgaagcagggagaattgcttggaacctgggggggcggaagttacagtggagctgagttcatgcccgccctgggtggacagaatgagactttnnnnnnnnnnnnnnnnnnnnnnnnnnnattaccctgtggaatgggtaacgttaaagtggttatttgaaat

SEQ ID NO: 40193 - DNA, 793 bp, Macaca Mulatta
  misc_feature (1)...(793): n = A,T,C or G
ggtggcctacgtctcctttggacctcatgccggaaaattggtcgcgattgtagatgttattgatcagaactgggctttggtcgatggaccttgcactcaagtgaggagacaggccatgcctttcaagtgcatgcagctcactgatttcatcctcaagtttccacacagtgcccgccagaagtatgtccgacaagcgtggcagaaggcagacatcaatacaaaatgggcagccacacgatgggccaagaagattgaagccagagaaaggaaagcgcaagatgacagattttgatcgttttaaagttatgaaggcaaagaaaatgaggaacagaataatcaagaatgaagttaagaagcttcaaaaggcagctctcctgaaagcttctcccaaaaaagcacctgggtactaagggtgctgcnnnnnnnnnnnnnnnnnnnnnnnnnnnnnnnnnnnnnnnnnnnnctgcaaagttccagcaaaaaaaatgaccaccggcgagtaaaaaggctccagcccataaggttcccggccccaaaagcccaagggccaaaaaggctgcgccctggctcaaaaaagatcggaaggggtcaaaaaaaactcccagccaataaaagcaccctgccctccaaagcaatcctgtgcaagaaaagccataagtgggccaaccaaacaaaaagttaatcaaaagtgttcattttctgaaactggtttgtgccaaaggtgggaagacacgcataaggtagaatagaaacataccatcacgtttttgttttaggcgcgcccttgcagtag

SEQ ID NO: 40194 - DNA, 287 bp, Macaca Mulatta
aatcactctcacccctcagcaggcccaggccccggggatccctctcacccctcagcaggcccaggccctggggatccctctcactcctcagcagatgcaggctcagggaatcactctcacccctcagcaggcccaggccctggggatccctctcacccctcagcaggctcaggaattggggatccctctcacccgtcagcaggcccaggctcagggaatcactgtcacccctcagcaggcccaggccctggggatccctctcacccctcagcaggcccaggcactgg

SEQ ID NO: 40195 - DNA, 739 bp, Macaca Mulatta
  misc_feature (1)...(739): n = A,T,C or G
ggggattcatagtatgttttcatttcccagaaaacttgtaaatgatgatgtgctctcaaatgctatttaaacttagcaatatgttgcagaaattatgccatgtcggtacaaatacaagtactcattatttttctagaggttgtagagtattatttcatatttgttgcagaaattatgccatgtcggtacaaatacaagtactcattatttttctagaggttgtagagtattatttcatattatagatatgccataatttatgtaatgagtcattttctactaggtattttgttgtttccagttttttgctgcctcaaacaatgctttgagatatatatatatagatatatatatagatatatatatatatagatatatatatagatatatatatatagatatatatatagnnnnnnnnnnnnnnnnnnncatatacacacacacacacattaaaaaaatcatctttgggcacaatgcaggtatatttgaatttcctattggtgaaattgctgagtccaaatgtatgtgcatttttaattatgaaatacattgccaaatggctcaactaagagattatatcaattaatcaattacacttccaccaacaccaatcaagatgacctgtttcctcattctcttgcccaatgccattttttgactgaatttttttttgggtctttttgaaatggttattagattgaaaaaattggggaagccccttttaattaacttttaagtn

SEQ ID NO: 40196 - DNA, 1566 bp, Macaca Mulatta
tcgtgaaaactacccctaaaggctaaaatgggaaaggaaaagactcatatcaacattgtcgtcattggacacgtagattcgggcaagtccggcactactggccatctgatctacaaatgcggtggcatcgacaaaagaaccattgaaaaatttgagaaggaggctgctgagatgggaaagggctccttcaagtatgcctgggatcttggataaactgacaagctgatcagggaacgtggtatcaccattgatatctccttgtggaaatttgagaccagcaagtattatgtgactatcattgatgccccaggacacagagacttcagtcaaaaacatgattacagggacatctcaggctgactgtgctgtcctgattgttgctgctggtgttggtgaatttgaagctggtatctccaagaatgggcagacccgagagcatgctcttctggcttacacactgggtgtgaaacaactaattgttggtgttaacaaaatggattccactgagccaccctacagccagaagagatacgaggaaattgttaaggaagtcagcacttacattaagaaaattggctacaaccccgacacagtagcatttgtgccaatttctggttggaatggtgacaacatgctggagccaagtgctaacatgccttggttcaagggatggaaggtcacccgtaaggatggcaatgccagtggaaccacgctgcttgaggctctggactgcatcctaccaccaactcgtccaactgacaagcccttgcgcctgcctctccaggatgtctacaaaattggtggtattggtactgttcctgttggccgagtggagactggtgttctcaaacccggtatggtggtcacctttgctccagtcaacgttacaactgaagtaaaatctgtcgaaatgcaccatgaagctttgagtgaagctcttcctggggacaatgtgggcttcaatgtcaagaatgtgtctgtcaaggatgttcgtcgtggcaacgttgctggtgacagctaaaaacgacccctccaatgggaagtatctgggctttcactggctcagggggattatccgtgaaaccatcccaggcccaaataaaggggcctggggtaatgccccccgtttgtttggaaattggcccacaacaggcttcaccaatttttctatgacaaaggtttttgccagaaaccctgaagggaataaaaatttgtttggccgggcatctgggaaaaaacaatttggatgaaaagggccccataatattccttgtaaagcctgggggaaatcctgccccatttgttaaaatttgggattcctgggcacacagccttaatgttttggtttgaaaagcgcccccccccaaaaaaagacccagctttttggggttcatactaattacgggggacattggaaatattaaaagcttaaaaacagagctcccaagttggattgtttttactaccataacgtattaggaacataaaaaagagggggacgggtagatactaggggggcaaggtatttttcgatggtgtttgtgtattctagaaaaacccccccca

SEQ ID NO: 40197 - DNA, 653 bp, Macaca Mulatta
tttgagggtatcatttgaatgctgagaatgctgttggtcaccagattgcctctgaaacacagatccttgaagactcttcgggaatatctgtaaagtcacactgcagcacaggggatgctcatacagtcctgagtgaatctaacagaaatgatgggcactgtggaaattctaacaacaaatgtgaagtaattccagaaagcatcagtgcagtaacaaacattccacacgtgcagatggttgccatacaggtatcttggaacataatacaccaagaagtcaatactgagccatataatccttttgaggaacaacaaggggaaatttcacggattgaaaaggagcaccaggtattacaagagcaacttaaagaagcatatgaaaattatgagcagatgaaacttaagggcttagaagagaccagggacctggaagaaaagttgaaaaggcacttagaagaaaacaagatctcaaagacggaattagattggttccttcaagatttggaaagagaaattaaaaaatggcagcaggaaaaaaaagaaatccaagaaagactaaaatcactgaagaagaacattccaaaagtttcaaatgccagtgaaatgtatacccagaaaaatgatggacaggaaaaggaacctgaattacatctg

SEQ ID NO: 40198 - DNA, 556 bp, Macaca Mulatta
  misc_feature (1)...(556): n = A,T,C or G
gggcttttctgagcatccggcaagatggcagaggtagagcagaagaagaagcggaccttccgcaagttcacctaccgcggcgtggacctggaccagctgctggacatgtcctacgagcagctgatgcaactgtacagtgcgcgccagcggcggcggctgaaccggggcctgcggcggaagcagcactcactgctgaagcgcctgcgcaaggccaagaaggaggcgccgcccatggagaagccagaagtggtgaagacgcacttgcgggacatgatcatcctgccagagatggtgggcagcatggtgggcgtctacaacggcaagaccttcaaccaggtggagatcaagcccgagatgattggccactacctgggcgagttctccatcacctacaagcccgtgaagcacggccggcccggcattggagccacccactcctcccgcttcatccctctcaagtagtggctcagctaataaaggcgcacctggctccagtnnnnnnnnnnnnnnnnnnnnnnnnnnnnnnnnnnnnnnnnnnnnnnnnnnnnnttgtcgg

SEQ ID NO: 40199 - DNA, 798 bp, Macaca Mulatta
gggggagaggacacaaatgacaaaatcaggattgaaagatcagtcatcactatgaatcctgcagatacttaaacaatagagaatattacgagcaatattatgtgagcaaattcaccaacttgcaagacacaattactgaaacatgacatgagaatagggaatctgaatacctctgtacttttttaagaaactgaatttgtaattaagaatttttccacaaagaaagctctgagcagatagcttcactagtgagttcagtcagccatttaaggaagaaatattatttctactccacctgtttcagaaaatagcatacttccagactcatgttttgaggccagcattaccttcctaccaaatacaaaaaatagttaatgaaagatatatacaggcaagcatccctcacgaaaacaagtgtaaaagtcctaacaaagttttagcatatcaaatccagtaattcataaaaagataatacatcataaccaagcaggatttatctcatttataaatcactacaattcatgattttaacagaaacaaagaagaattgtgtggtcatctcaatgtttgcagaaaaagcatcggacagaatttaatattgactcatgatttccttaaaaatttcataaaatagaaaaccgaaggatactttcctcaaactgcaaaaaagccttttgcaaaacattttacgtttagcataattagtgaacgaaaaaccatattgctttttctgctttaaaggggaaactaaacaagccctgtcccatggtcgtccactctttacccaaacttgttcct

SEQ ID NO: 40200 - DNA, 849 bp, Macaca Mulatta
ggggggctttttcgcaacgggtttgccgccagaacacaggtgtcgtgaaaactacccctaaaagccaaaatgggaaaggaaaagactcatatcaacattgtcgtcattggacacgtagattcgggcaagtccaccactactggccatctgatctacaaatgcggtggcatcgacaaaagaaccattgaaaaatttgagaaggaggctgctgagatgggaaagggctccttcaagtatgcctgggtcttggataaactgaaagctgagcgggaacgtggtatcaccattgatatctccttgtggaaatttgagaccagcaagtattatgtgactatcattgatgccccaggacacagagacttcatcaaaaacatgattacagggacatctcaggctgactgtgctgtcctgattgttgctgctggtgttggtgaatttgaagctggtatctccaagaatgggcagacccgagagcatgctcttctggcttacacactgggtgtgaaacaactaattgttggtgttaacaaaatggattccactgagccaccctacagccagaagagatacgaggaaattgttaaggaaagtcagcactttacattaagaaaatttggctacaacccccgacaccagtaaccattttgttgccaaattttctgggtttgggaattgggtgaacaaaccttgcctgggaaacccacaattggcctaaacagttgcccctttggggtttccaagagggaaaaggaaaagggggtccccccccgtttaaagggggatggggcgcaaattggcccccaggttggggaaaaaacccccccgccctttggcctattgtaagggggc

SEQ ID NO: 40201 - DNA, 490 bp, Macaca Mulatta
agaatgctttgcctgtatgagctataaggtgaccattgaggatggggatgcatatgccctggtgctgtgtgtcaccctatactgtggaaagtaccacaatgaggtggtgctggcacccatatttgagagactctccacagagtccattcaggaccagctgccctactctgtcatgctcatgtccatgctggccaccacagagggcaggcagagcttctccgtgtccgtggagaatgcctgctccaactacattaccaccatgcaagtaaaagaggtcaaacagatgcatatcagtccaaacagccacaatgccatccaccccagggaccacatcctggagatcagtggaacccccatccacacactccaagtagaggagttggaggatgcaattaaccagaagaggcagacacttctgctgttgattgaacatgaccccgtctaccggtgcccagcccagctgcggctggatgcctggctctctcctcac

SEQ ID NO: 40202 - DNA, 784 bp, Macaca Mulatta
  misc_feature (1)...(784): n = A,T,C or G
ggnnnnnnnnnnnnnnnnnnnnntnnnnnnnnnnnnnnnnnnnnnnngggcagatcacctgacannnnnnnnnnnnnntnnnnnnnnnnnnnnnnnnnnnnnnnnnnnnnnnnnnnnnnnnnnnncaaaaaattagtcaggtatggtggcacacannnnnnnnnnnnnnnnnnnnnnnnnnnnnnnnnnnnnnnnnnnnnngacccaggagtcagaggctgtagtgagctgagatcacatcactgtactccgacctggacaacagagactctcnnnnnnnnnnnnnnnnnnnnnnnnnnnnnnnnnnnnnnnttgagttcagagtaaacaacactagaaaagagcttcgtgaaccgacaggacagagcagacatctcagtggccgctgcaggcatgtttcatgtttcctcatctatagtgtaagttgggcattccttccagctccaacacagcggtcaggagacaagttttatttccagctttccatgtgcaaactgaggtttactaaattcagtatttactggctaaactctgaaatgttttaaaattgactacagtgtcttcattgatactatttgccatatgactttggccaaaattcttaaccttctgggtagcaggctcctcacangtgaaattaggagaaaatttgcttccgattaaatacattgaaaaataccatcaccaaaagagaatgaaagtacatcttaaaaagaaaagggaatggctattggnnnnnnnnnnnnnnnnnngatgggcaataccgggcctgtaaggtaaccct

SEQ ID NO: 40203 - DNA, 793 bp, Macaca Mulatta
gggggctgggatgtgtactgctcttacaaggcaagggcacactggaaaacagtgtagcatccatcaagtccatgagcaacctcatggactggatggggactcagatgcttactgtattgggtagagcagagagtccagagaaaaagtgagccgaagttatcagtctcctcaaatgatggtagaaaagaaaatcactggtaattctactgtctgcctctttgatttcatccatcttttttaaggagctgatatatttgattgctgtttcataacctgctttccacacatttgtattcctttcctgtttccagcagacgatgggacacagactcattctgagaacagcagccaagaaaacagaatcaaggctcgctgcctgtcctgcacgtccatggttctgaagggcatctggggactcttgatcatcttgtcagtatcatcgtcttgggttggaactacacagattgtaaaaattacttataagaacttctattgcccatttttcatgacttggttttcaacaaactggaacattatgtttttcccagtctattattctggtcatctagccactgctcaagaaagcaatctccaatgaaaaaattcaggtaggtttcatgtttactggccaataagagattattgaaatgttttatgaaaatatgcccatttttatatcttggggatatgagtttgaggtttttttggggtatgtgaaggaaccaagatcctaaggttggttgaccaagccacttagaaagcaggaatcgggtccccttccctttaaaaaaat

SEQ ID NO: 40204 - DNA, 193 bp, Macaca Mulatta
  misc_feature (1)...(193): n = A,T,C or G
gnnnnnnnnnnnnnnnnnnnnnnnnnnnnccttgtcgggccgcctcgggccctcggagaagcttttctagacccattcgttttggcggcgcggggccccagtagggtaagtgaaccatgggtcaaagcctgttttcctaaggaaaaatccctgggtcatgaaccaagttggctttgggaatttcttcaaccaa

SEQ ID NO: 40205 - DNA, 796 bp, Macaca Mulatta
  misc_feature (1)...(796): n = A,T,C or G
ggagatataaaaattcttaactaaaattcacaaaattgagcctaactatatatagaaatgatggtacattgagaccaagtgcagtttattccaggaatggtagttcggtttaacatctaaaaattagtcaatgtaactcatcatattagcagacnnnnnnnnnnnnnnnnnnnnnnnctgtgattatctcaatagatgcaggaaaagaatttgagaaaatccagcctctactgtgataaaaactcaaagcaaactagagatagaagggaacttcttcaacctgctaaaaggcatctatggaaaatactacagatatcactgaatgctttccctgctaagattgggggcaaggcaaagatgtccacatttacacttctattcaacattgtgctagagtttctcgccagtataaaaaaggcatccaaattcgacaggaaaaatgcaagacaagtctttatttacggataacatgatctataaaatatagcatgaaatctacaaaaaagctactaaaaactattaagtgagtttagtaatactggatgattacagaacaatatccaaaaattagttgcatttctgtaaactagccacaaaacaattggaaaactgaaaataaaaatgcccaaatgaataaccttccaatatataaaaccccttagggaataaaatctgaccaaaaaggggtgcaaatggccttttgcaagggcaaaactttaaattggtggaaaaaatttttaggaaaggcttaaaatnnnnnnnnnnnnnnnnnnnngtttatggaaatccaattttg

SEQ ID NO: 40206 - DNA, 815 bp, Macaca Mulatta
  misc_feature (1)...(815): n = A,T,C or G
ntcatcgggtgttcgcccctcttttggtccccggcgtggttcctcaaaactcccttgaccctttggacggattcaactcctattctccagcttcttcaaaacgcgcctgggacttttagggcatggagccatctattacctcaactttagacaaggttggatttttttttggccccttccccatttttataattccagtatcctttctgccttgataattcaatggaaaatttcatttcaagtgagtattagggtagcaaaatagtataaatattttatataccagaccatttcctttcctttcttcggggctttgtttgaatacactcggaaaaagttccccgggatttgcagcctaggttcccaccttgccatgagttgtgttccttttagatttcctggatgagtatgaagttaactgtaccctaattatactagacactctgaaaaagggtttttgtgtgatgtctgcaggaaaacctttctcttctttccctgtggtgtctcccatttcagaagcttgtattcaaacatgccagtaatccttatatttttagttattcttatttctccaccccattgctcaagagctgagttcatgtcttattcaaactctgtattcctagtttctaaaagccagaacacggttcagtaaatgtaaggtaagtaaataattgttgcttccatttcctttaaaaagccatgcctctgccttacccccagctctaggaggccttacccttgcttttcatgataccttacaggtttgtgtatgtgtgggataccacaagcaggagaatattatataagctgcc

SEQ ID NO: 40207 - DNA, 741 bp, Macaca Mulatta
  misc_feature (1)...(741): n = A,T,C or G
agatgagtgtctcactgtgttatccaagctggtctcaaactcctggcttcaagtgatccttcccatcttagcctcccaaagtgctgggattacagatgtgagccatggcaccctgccaaatctttgagtcttgacaccagtaggtggtcatggtccagtcccttgcccagatgcccatagggacttcagcttccaggctgcaatcacagagaatgaagaaagaaggctgatctagaaatatgggtaactcttacaggaaagccccccagcctctaacaggccctctctgagcatcgaaggtgccagtggtcttccaaggtccaggatgtgnnnnnnnngtgattgctgtcctgggccctgtcttgctgccctttgcccctgccctcctcctccctacctgatggtgccaggtaaggcttcaggcatggcagaggctgaactgagagccaccccaccttgtgactgtggctccatccccctatccacacccaagaggtgagatcctggggcagttggcatctgacagcctggcatcgactcatgccaacagcttggaagctgcagtaattnnnnnnnnnnnnnnnnnnnnnnnnnnnnnnnnnnnncgaaagcaagctctagagagaaaccttcttctcctgcctgccgcagggcaaactacttcaaacgaattcgtttcgctcttgtgaaactgaagacaatttccttttctgtcataaaacaaattattgctcatcagga

SEQ ID NO: 40208 - DNA, 855 bp, Macaca Mulatta
  misc_feature (1)...(855): n = A,T,C or G
gggctcggagcagcagcagcggctcctccgcccccaccggacgcggccggaagtacgcgacgggagacttccggccactgcgttgtagtcgccgggctgcagagcggtcttccgccggctgttttcccaggctagctgggcctgtacctcgcgcactcctctggctcctggtccttcagtctccgctcgtctcaccgtaggctgtgacgacatgagcaacaaagaaggatcaggagggttcaggaaaaggaaacatgacaatttcccacataaccaaagaagagaagggaaggatgttaattcatcttcaccagtgatgttggcctttaaatcatttcagcaggaacttgatgcaaggcatgacaaatatgagagacttgtgaaacttagtcgggatataaccgttgaaagtaaaaggacaatttttctcctccataggattacaagtgctcctgatatggaagatatattgactgaatcagaaattaaattggatggtgtcagacaaaagatattccaggtagcccaagagctgtcaggggaagatatgcatcaattccatcgagccattactacaggactacaggaatatgtggaagctgtctcttttcaacacttcatcaaaacacgatcattaattagtatggatgaaattaataagcaattgatatttacgactgacgacaatgggaaagaaaataaaactccttcttctgatacacaggatgagcagtttggtacttggagactgagagtcacacctgtcgattaccttctgggagtggctgaactaactggggnaattgatgcggatgtgtattaacagtgcggggaatggggacatttnacaccccc

SEQ ID NO: 40209 - DNA, 662 bp, Macaca Mulatta
agtctctggggtgcccgtattcttgtgtgcacacagagaaagcacaaaggaaaggctgcttcctgaagagaatctccatatggaagacctgcagatcacaaacaacccacacagccattgcctggtcgcctggtcacttgtgtttttgagaagccataactccaagaatatcgaagggaagaaaatgctgaaaagcaggggctgcctaacaggtctggcttgcaaggcaaactcttggcagacctggccagcttctgcttgtcccagggcaatcccacccccataggatctggagtttttcagttcctttgctaagattcctgaaatagacttaatgaagagcctcagaagtgaaaatgcctcttcacacatttgctcaaaaagactgcttttctcctaacacagaaatcagctgccttgaggatgtgcaagtttgattagggagtctgctcttgcctatttctcaaacagttcaggccctgacacaatcagtatcacccctagggcatttgcttcaaatgccccccatataatcagaagttataaatgataacccaaaagttgaggtacattcattgcctttcagaatgaaaccttccaaggggccatggccgtattgtgactggacaagaactatcatggatgaggcacatcatcttttg

SEQ ID NO: 40210 - DNA, 4810 bp, Macaca Mulatta
  misc_feature (1)...(4810): n = A,T,C or G
gatttgatgcagtttgatgataaaggaaacaagaccaatataccagacaaggaccggcaaattgaggctctccagttgctcttcctcattctccctcctcctaatcgtaatttgctgaagttattgcttgatctcctataccagacagcaaagaaacaagacaagaacaagatgtcagcctataaccttgcccttatgtttgcaccccatgtcctgtggccaaaaaatgnnnnnnnnnnnnnnnnnnnnnnnnnnnnnnnnnnnnnnnnnnnnnnnnnnnnnnnnnnnnnnnnnnnnnnnnnnnnnnnnnnnnnnnnnnnnnnnnnnnnnnnnnnnnnnnnnnnnnnnnnnnnnnnnnnnnnnnnnnnnnnnnnnnnnnnnnnnnnnnnnnnnnnnnnnnnnnnnnnnnnnnnnnnnnnnnnnnnnnnnnnnnnnnnnnnnnnnnnnnnnnnnnnnnnnnnnnnnnnnnnnnnnnnnnnnnnnnnnnnnnnnnnnnnnnnnnnnnnnnnnnnnnnnnnnnnnnnnnnnnnnnnnnnnnnnnnnnnnnnnnnnnnnnnnnnnnnnnnnnnnnnnnnnnnnnnnnnnnnnnnnnnnnnnnnnnnnnnnnnnnnnnnnnnnnnnnnnnnnnnnnnnnnnnnnnnnnnnnnnnnnnnnnnnnnnnnnnnnnnnnnnnnnnnnnnnnnnnnnnnnnnnnnnnnnnnnnnnnnnnnnnnnnnnnnnnnnnnnnnnnnnnnnnnnnnnnnnnnnnnnnnnnnnnnnnnnnnnnnnnnnnnnnnnnnnnnnnnnnnnnnnnnnnnnnnnnnnnnnnnnnnnnnnnnnnnnnnnnnnnnnnnnnnnnnnnnnnnnnnnnnnnnnnnnnnnnnnnnnnnnnnnnnnnnnnnnnnnnnnnnnnnnnnnnnnnnnnnnnnnnnnnnnnnnnnnnnnnnnnnnnnnnnnnnnnnnnnnnnnnnnnnnnnnnnnnnnnnnnnnnnnnnnnnnnnnnnnnnnnnnnnnnnnnnnnnnnnnnnnnnnnnnnnnnnnnnnnnnnnnnnnnnnnnnnnnnnnnnnnnnnnnnnnnnnnnnnnnnnnnnnnnnnnnnnnnnnnnnnnnnnnnnnnnnnnnnnnnnnnnnnnnnnnnnnnnnnnnnnnnnnnnnnnnnnnnnnnnnnnnnnnnnnnnnnnnnnnnnnnnnnnnnnnnnnnnnnnnnnnnnnnnnnnnnnnnnnnnnnnnnnnnnnnnnnnnnnnnnnnnnnnnnnnnnnnnnnnnnnnnnnnnnnnnnnnnnnnnnnnnnnnnnnnnnnnnnnnnnnnnnnnnnnnnnnnnnnnnnnnnnnnnnnnnnnnnnnnnnnnnnnnnnnnnnnnnnnnnnnnnnnnnnnnnnnnnnnnnnnnnnnnnnnnnnnnnnnnnnnnnnnnnnnnnnnnnnnnnnnnnnnnnnnnnnnnnnnnnnnnnnnnnnnnnnnnnnnnnnnnnnnnnnnnnnnnnnnnnnnnnnnnnnnnnnnnnnnnnnnnnnnnnnnnnnnnnnnnnnnnnnnnnnnnnnnnnnnnnnnnnnnnnnnnnnnnnnnnnnnnnnnnnnnnnnnnnnnnnnnnnnnnnnnnnnnnnnnnnnnnnnnnnnnnnnnnnnnnnnnnnnnnnnnnnnnnnnnnnnnnnnnnnnnnnnnnnnnnnnnnnnnnnnnnnnnnnnnnnnnnnnnnnnnnnnnnnnnnnnnnnnnnnnnnnnnnnnnnnnnnnnnnnnnnnnnnnnnnnnnnnnnnnnnnnnnnnnnnnnnnnnnnnnnnnnnnnnnnnnnnnnnnnnnnnnnnnnnnnnnnnnnnnnnnnnnnnnnnnnnnnnnnnnnnnnnnnnnnnnnnnnnnnnnnnnnnnnnnnnnnnnnnnnnnnnnnnnnnnnnnnnnnnnnnnnnnnnnnnnnnnnnnnnnnnnnnnnnnnnnnnnnnnnnnnnnnnnnnnnnnnnnnnnnnnnnnnnnnnnnnnnnnnnnnnnnnnnnnnnnnnnnnnnnnnnnnnnnnnnnnnnnnnnnnnnnnnnnnnnnnnnnnnnnnnnnnnnnnnnnnnnnnnnnnnnnnnnnnnnnnnnnnnnnnnnnnnnnnnnnnnnnnnnnnnnnnnnnnnnnnnnnnnnnnnnnnnnnnnnnnnnnnnnnnnnnnnnnnnnnnnnnnnnnnnnnnnnnnnnnnnnnnnnnnnnnnnnnnnnnnnnnnnnnnnnnnnnnnnnnnnnnnnnnnnnnnnnnnnnnnnnnnnnnnnnnnnnnnnnnnnnnnnnnnnnnnnnnnnnnnnnnnnnnnnnnnnnnnnnnnnnnnnnnnnnnnnnnnnnnnnnnnnnnnnnnnnnnnnnnnnnnnnnnnnnnnnnnnnnnnnnnnnnnnnnnnnnnnnnnnnnnnnnnnnnnnnnnnnnnnnnnnnnnnnnnnnnnnnnnnnnnnnnnnnnnnnnnnnnnnnnnnnnnnnnnnnnnnnnnnnnnnnnnnnnnnnnnnnnnnnnnnnnnnnnnnnnnnnnnnnnnnnnnnnnnnnnnnnnnnnnnnnnnnnnnnnnnnnnnnnnnnnnnnnnnnnnnnnnnnnnnnnnnnnnnnnnnnnnnnnnnnnnnnnnnnnnnnnnnnnnnnnnnnnnnnnnnnnnnnnnnnnnnnnnnnnnnnnnnnnnnnnnnnnnnnnnnnnnnnnnnnnnnnnnnnnnnnnnnnnnnnnnnnnnnnnnnnnnnnnnnnnnnnnnnnnnnnnnnnnnnnnnnnnnnnnnnnnnnnnnnnnnnnnnnnnnnnnnnnnnnnnnnnnnnnnnnnnnnnnnnnnnnnnnnnnnnnnnnnnnnnnnnnnnnnnnnnnnnnnnnnnnnnnnnnnnnnnnnnnnnnnnnnnnnnnnnnnnnnnnnnnnnnnnnnnnnnnnnnnnnnnnnnnnnnnnnnnnnnnnnnnnnnnnnnnnnnnnnnnnnnnnnnnnnnnnngtagctgagattgagacggatgtagatgctctttgcttgaatggaatcagaaagcaagggttgtgttctggggtgagggtcgcgagagagatatttatcacatgcacatgcgtttatatagctggtctccttgggtagtttgtgtgtgttttgtttatttattgaggatgttttcccttgctttaggggtttataggtcatttttcttaatagaagctatgattgacttagaatccaaatttgaggagtaagcagcataaccttctaccttgtaatatgtaactattctaatcctgtggaatcttacagaaaacacagacaaaaccccttttatcatttgccacagaagctgctgtctcccttctgatttggtgggcaggtattgtttttgagccagtatttaacagagttttttaatctataagattgtttttgaatccatttcattgtgtttgtttttcatgttggaacaatctctttgagagtgcctcttcttgtggtttttacaacttcatttctttctggggtcacctgtgatgggctttgatgtggtgtcaatatggggcgttgtgtttgtgccaggatacacatattaaactgtaggccaccttcctggtccagactgtactgtgtgaaccccactgactgaactggtgagaaccgtaggtgttggagtttatcaccttttacaatgataaacttttgcattgngaccaatgaatgtggtgtggaaaacgctgccagcagtgaaagagcatcaggagatactgactnnnnnnnnnnnnnnnnnnnnnnnnnnnnnnnnnnnnnnnnnnnnnnnnnnnnnnnnnnnnnnnnnnnnnnnnnnnnnnnnnnnnnnnnnnnnnnnnnnnnnnnnnnnnnnnnnnnnnnnnnnnnnnnnnnnnnnnnnnnnnnnnnnnnnnnnnnnnnnnnnnnnnnnnnnnnnnnnnnnnnnnnnnnnnnnnnnnnnnnnnnnnnnnnnnnnnnnnnnnnnnnnnnnnnnnnnnnnnnnnnnnnnnnnnnnnnnnnnnnnnnnnnnnnnnnnnnnnnnnnnnnnnnnnnnnnnnnnnnnnnnnnnnnnnnnnnnnnnnnnnnnnnnnnnnnnnnnnnnnnnnnnnnnnnnnnnnnnnnnnnnnnnnnnnnnnnnnnnnnnnnnnnnnnnnnnnnnnnnnnnnnnnnnnnnnnnnnnnnnnnnnnnnnnnnnnnnnnnnnnnnnnnnnnnnnnnnnnnnnnnnnnacagatgcttgaggctaatggcccccattctgaggtcatttttgtgtagaactcctttccncaggagagaaccttatctctgccctcctttaccctgaaaccttcaaacagaagataggacctagatctaaacctagatactagcattttgtgggcttgtctagaatttggggaagatttgggttcctaagatgcacaggctttttacaccagtggtgattaactcaactaaaactcactgcaggaagttagcttccctagacagctaatgctaagatcttctaccagcatagagttgacagaagcaggccagcgaggagatgtgggacataatagcctgagtgcttgggttaccatggagactggagtgtgtgaggccatagcctatgctaaagagccatggagccctcccctggccatgtctggggacagatagaacctgtggggggaaatattccctcaccccagggttctttctgcagagcaagggttgtctttgtcctatccctgagcttgctcaacaagagaaacaaggtttcttaactgttttgtttaaagttttcattcttatttgactatatgtgtgtaattgtaaagaaacgatcctatgcattgtctttcttttatattcttgtaatattctgaaattaaaattgttttgtttcatatc

SEQ ID NO: 40211 - DNA, 715 bp, Macaca Mulatta
gggtcctctaagtagctttccaactccaatttgaggctgtttcttattgcttgttacttgactgcttctttgttctctttgagtcagtcataggagaatttggaggaaggaagggggaaaacaaagtgcatttcagagatacagagcctaggcagcagtgctgctggagatgcccaggggttgtggcagatgctgggaggtggggcttagaataatggcttcttcattttggcctggcaaaaataacaaaataaaaaatgaaggagacagagatgtgaacatccataagaagataacatactgatttaggttatgtatttcgttgctctcacaattctaggcaatagctatgttatctttttattcaggaagcataatcctaccttttctgtgtatcccttagaaaatggtaatttacagaactagcaattctgtcatcagctttcagacactttctgaagccccagaacaaatcctcatttcttgaggatatcgcgactggagggaggctctgcagcctcaactcaggtttacactgtggctttttaatcacgttgagcaaaaaaagctgttatgtctgaagtgttctatattctaagcccaattgttgtcttgcatttagtagtagttgctttgtgaatgcacatttttgttcaaaaaaaccttttcatggtttgttttttactgaaaccccttaaaatataaaatcagtttt

SEQ ID NO: 40212 - DNA, 115 bp, Macaca Mulatta
tggtgctggccttggagcaggcagctggcagtgagcactacgacgcctcgcccggctccccgccactgctctccaacatccccaccctggtggggtcccggcacgtgggtgggct

SEQ ID NO: 40213 - DNA, 656 bp, Macaca Mulatta
ccccctgggtgcctccttcccccacagtcatgctgccccactgcaggcccgaggaccccaccccagcagggccacacgctcagggctcctggtctgaggccgggggatcggagcgcaggtcacctgctggccacacccgcccacacagccctccaggagggccggcctcagggccacggggaagtccagctgtgtgtcagcctcggccagggtggagcagcccgtccatccgggtgacgtcgcgccctgggatgggcagtgatggtgccaggggccgcccgcctgacgcctgccatgcctgatcctggcaggtactaccgctgtgaccgaaacctggtgtggaacgcgggtgcactgcactacagcgacgacgtggagatcatccaaggcctcacgcgcatgcccggtgaccgcgacacgctcaaaagcagagtggacgccatcaagtattttgggaagggcacctacactgactgtgccatcaagaaggggctggagcagctcctcgtggggtgagtggcctcctgcccaggcagctctcacacgtggtacccagcctgggccggggttggcctggggtccctgtgcgacttcagctgcagcctccctgttctcttggaggctgtatggcctccctgaccactttgtgggcagga

SEQ ID NO: 40214 - DNA, 873 bp, Macaca Mulatta
  misc_feature (1)...(873): n = A,T,C or G
ggattctagaggccgagcggccgacnnnnnnnnnnnnnnnnnnnnnnnnnnnnnnnnnncctggcgcgattttggctcaccgcaacctccgccttccgggttcaagccnnnnnnnnnnnnnnnnnnnnnnnnnnnnnnnnnnnnnnnnnncatgccaccacacctggctaatttttatattattagtnnnnnnnnnnnnnnnnnnnnnnnntcaggctggtctctaactcctgaccttgtgatctgcccacctcagcttctcaaagtgttannnnnnnnnnnnnnnnnnnnnnnnnttggccgaatttttattttttaaagattcagtctatttgatgatttgaagggattattaatttttgttgggttgatatttcctttgaaaaaatgtttttaagaatccttatgcctgtgtgaaactttttaccttaatgtttcaagattaaatgaaataaggtttgggattttctttcaagttaagaaggaagcccgggaatttaatttggtctgaaaaataaatatggagtggtagttttgttggttttttaagattggggccttttttactggggtgggaccgttgattgtgtcccttattttcgcggctttgggggttgttggtcgatttgttataaagcccttattttttttgggagggcttaggcctgagataatagtcttgtttatctctggagaatttatgaatgactagggtggtgcgatattttggtataggtccctctctcctgagtagacatatgtatgtaacgcgaaatgcatcgggagttcgtttatcgcgactataaaagatttataaccgcgcgatcttattaaccgtggtgtgtcttttgttcataacgtgagtgtggacct

SEQ ID NO: 40215 - DNA, 667 bp, Macaca Mulatta
gctcaacaggtgaattcaaagatatgcctgtttttccagcatggggagctggatttgggtcgagctcgggggcatgatgttgaacagctcttatgagcttctgataatgcccaggaagtacagaaacaactgtctacaaatctttgaactcaaggcatatcacagggacatttgctttcttcaactagatacctgttttctcataaagagaaacaatgagaaatgatttttcacaatgcctccttagccctgaggctcacccatcccctagtgctgtgtcccaacatttaaaggccattgaagtcccactgtatgccatatactctggacaggttttctcatttacccctcaggacagcactgtaaggatggtatggtcagtcccatttcatagatggccaaactcaggctttcagagcctaagtttctccagataggtggtaggattggaatgaggttccatccctcatcatccatagacagccctgagtagcctcccttttagaagatgggcttccagggcttgagaaatggtcagattccacccctctgctattgtggaccaatgcatcctcactccacaacccctctgggtgatgaagaagatagagaagattaatcccgccatttatgccaggagactgtgtgtagggcacacgagttggtt

SEQ ID NO: 40216 - DNA, 633 bp, Macaca Mulatta
  misc_feature (1)...(633): n = A,T,C or G
ggggagagcggcagcaagatggcggcgcaacagcaagacggcgggggagctgcgcagctggcggggccggcggcggaggctgatcccctaggccgcttcacgtgtcccgtgtgcttagaggtgtacgagaagccggtacaggtgccctgcggacacgtcttttgctctgcatgcctgcaggaatgtctgaagccgaagaagcctgtctgtggggtgtgtcgcagcgctctggcacctggcgtccgagccatggagctcgagcggcagattgagagcacagagacttcttgccatggctgccgtaagaatttcttcctatccaagatccggtcccacgtggctacttgttccaaataccagaattacatcatggaaggtgtgaaggccaccattaaggatgcatctcttcagccaaggaatgttccaaaccgttatacctttcctgtccttactgtccgganaaaactttgatcagggaagacttgtggaacactgcaaattattcctaacacgggatacaaatctgtggtttgcccaaatttgcctcaatgcctggggaaaccccactacccaccgccattttaaaaacgatccaaccgggaccggttttcttaaaacttctcgggattataa

SEQ ID NO: 40217 - DNA, 2396 bp, Macaca Mulatta
  misc_feature (1)...(2396): n = A,T,C or G
tgctcaacatcacactgaaccagcacgtgcagacggtccacttcactgtgcgcgaggcgccccagatctacagcctctcctcctccagcatggaggtcttcaacgccaacatcttcagcacctcctgcctcttcctcaaactccttggctctaagctctactactgctccaatggcaatctctcgtccatcaccagccacttgcaggaccccaaccacctgactctggactgggtggccaatgtggagggcctgccagaggaggagtacaccaagcagaacctcaagaggctctgggtggtgcctgccaacaagcagatcaacagcttccaggtcttcgtggaggaggtactgaaaatcgctctgagcgatggcttctgcatcgattcttctcacccacacgctctggattttatgaacaataagattattcgattaatacggtacaggtaaaaggaccccaacagcattggagacggggagtcccaagaagctcatgtcagccaggtcttggagggcatctcgccagtgatgcgaggcaggggactgtactaatctgtattaattgtgtagcaggacttgattccccccatgatgaagtccaccttttggaatccattgtcctctgaacagaaccaccttttttcttgccattttgagctgcagatgggctattgtgacaagtgaagagtcagctgatgtgtactaaaggaggccacaggaggattttccagccgggacaaaggagtggcggctttctcctgngctccacccatctgtaccactagccagtgccgcgtttatccatcggtaagaaggccctgnnnnnnnnnnnnnnnnnnnnnnnnnnnnnnnnnnnnnnnnnnnnnnnnnnnnnnnnnnnnnnnnnnnnnnnnnnnnnnnnnnnnnnnnnnnnnnnnnnnnnnnnnnnnnnnnnnnnnnnnnnnnnnnnnnnnnnnnnnnnnnnnnnnnnnnnnnnnnnnnnnnnnnnnnnnnnnnnnnnnnnnnnnnnnnnnnnnnnnnnnnnnnnnnnnnnnnnnnnnnnnnnnnnnnnnnnnnnnnnnnnnnnnnnnnnnnnnnnnnnnnnnnnnnnnnnnnnnnnnnnnnnnnnnnnnnnnnnnnnnnnnnnnnnnnnnnnnnnnnnnnnnnnnnnnnnnnnnnnnnnnnnnnnnnnnnnnnnnnnnnnnnnnnnnnnnnnnnnnnnnnnnnnnnnnnnnnnnnnnnnnnnnnnnnnnnnnnnnnnnnnnnnnnnnnnnnnnnnnnnnnnnnnnnnnnnnnnnnnnnnnnnnnnnnnnnnnnnnnnnnnnnnnnnnnnnnnnnnnnnnnnnnnnnnnnnnnnnnnnnnnnnnnnnnnnnnnnnnnnnnnnnnnnnnnnnnnnnnnnnnnnnnnnnnnnnnnnnnnnnnnnnnnnnnnnnnnnnnnnnnnnnnnnnnnnnnnnnnnnnnnnnnnnnnnnnnnnnnnnnnnnnnnnnnnnnnnnnnnnnnnnnnnnnnnnnnnnnnnnnnnnnnnnnnnnnnnnnnnnnnnnnnnnnnnnnnnnnnnnnnnnnnnnnnnnnnnnnnnnnnnnnnnnnnnnnnnnnnnnnnnnnnnnnnccagaaatttttctgaaaacattattactcagaattcagattcccctctgggatctgtcttcagaatcaaagttagctcttttctatcccctgtaagtcgtccccttttgttatagcttcatctcgtttgtgacccccatttcacccaccgtcctcacaagctatggctccatatgccttttgaccattttctgttggaagaggaagattcgcggcccctgaggagatccggaagaaagagacagggtctccgagcgtgctgtgcagcaaggagcccaggagtggtgtggaccataatagtgcccttagggtaaatgtgtggcccctaagaccctgccctcaggaaggcggccttcccctgcagtcctgtgtcctacccctgggtctccgtggggtgccatccagggcaagcaacccaagcactgcttcccaccgggtgatgagctgtgcaggcctccaaactgcacgtcatgattcatccctaaagtgagcttggccttgagagtcccagggtcctccccccgggcaggggtcctcagacaaagccaaggaagcctggtgacacaggcacccatgggaggtgggcccagaaaggggcttcccgtagataagccctgtgagtagggagcttgtacactgggccatgggcagagccagctcccttgagcagtaaaggccctttcccccctaaatgggacccaggagtctctctgacagcttttctgccaggtgcagtggctcatgcctgtaatcccaacactgggaggctgaggcgggaagatcacctgaggtcaggagttcaag

SEQ ID NO: 40218 - DNA, 682 bp, Macaca Mulatta
gtatcctcaacactcacgccgtgtacatttgataacaagtaggtctgatctatttccccaaattaatattttccccggaagattctgacctgtctgatcaaataaaggcattcctctgagagtacacctagcccacttgtgaccaaattatacttcactgttatgtactccaaacaagcttgcctgttaatcgctttctcttacctctattacgaggacaagacgtggaagaagaattaggtcatcgggggatccgccatcgtgtatatttaagtgatataaagaagccaggattcctagaatggtctgtcttttgccatttctgggacaatgagaaaatccatctggagtgcttatgcccctctgaatagccaagtcatgggcttgtttgctttcagtcactgctttcagaaaaagacaatttcactatgacttacttctaataatcactgaaacagcctcatgaggacatgcaaaactgctatcttcaggcctggcccatcgtcaaatggcagacttgcagagcaaataagagacctggcctagttcataaggcagtcaagtgatccaaagttcaggctccccctcctttttgtccctccaccctgccttcactcctccgcctcctattcttccggcctttccatctggaaaccatgagcctcatggattccaggcacaa

SEQ ID NO: 40219 - DNA, 216 bp, Macaca Mulatta
  misc_feature (1)...(216): n = A,T,C or G
aggaaagtgtggtcccagaagtgatagtgatgatggggaattgacagctgacagggaagtaaggtgcgtctttccacaaggctcaacatattgtcagttacgaattgtcacaaaatacatttgaatgtcctttcaagtattaccagtttgaggtcacagctggaaaatgttaataagtcacagataaaatgggaaaatcaggaaattgtatnaaat

SEQ ID NO: 40220 - DNA, 757 bp, Macaca Mulatta
ggggtccttggattagttaaaagaaagttgatggaattttgcatgaaactgatgtttctttatgattagattcagattttgccttcttgacctatgctgttatagcaataatgttgtaacctcctcctgtgcatttttacacgtgataccagttttttctgttacagttggtgttaattttattcactaggttaagatgctttctgacagatttcttcactataaagcaaattagttttctctgtattattaagtacattggggagatttaataactgatgggcatgaaccatcacatttaatttagaagttctccttcttagattatttgaccttggaaaatgaaggctcttatttaatggtcaaatgaactgagataaatgcaggctctgccacttaatgtttggcagaatattctccttggttcagaagcattggcatcacaggtgaacttgttcaaaattcagaaagtcaggtttcagcccagaccttctgaatcaaaatctacattttaaacagatttccaatttcttgtcatatgcattaaaatctgagaggcacttcagatgatttttccttctgagaatttatccaacttatcttgtgtaatgtaaatatagctgtccaatatgtaatgcctgtattggcacccttatttttatactataacgcttaacaaaagtatagcattctacactgggttttgtaaaatcttatggccatcctcctttcctttagagtttaccagaatgcaatt

SEQ ID NO: 40221 - DNA, 655 bp, Macaca Mulatta
ttcagaaaagtaaaacgaaatcgtatgacagcagactataatagaagtttgcagtaatattttaataaatttatataattattcaaatgataaaatgtattaatgttatccagtgatttatattaaaaaattaccttaacacttagaactgtgcctattacataaaaagtgctcatatatttgaattttaaattatttacttaaatcaagaccataataagtaattaataatttaataattgttttaaatcagtggttttcaaccctcacttcatattagaatcatgtgaggacttttcatacagaatccatctcataacaattaagtctaaatttctggaagatggagccatgcttgttttttgagtggattctaatttgtagtcagagttggagaccactgctctaaattagttcagggaaatccttttatttctcccatgttaacgtttaaaattagtaatgtacccagttaagttttatggtttaaattccactaaagaacatgttcttctaataattagcatttattacatgaaatttaagagcttaagttccatcaaactagccgttgtgtaagattattatttcttatctgtaacttcaaaatagatgtttcattcaaactattgaggtgagaaaagtaatggatttt

SEQ ID NO: 40222 - DNA, 90 bp, Macaca Mulatta
tgtgcgagagtcggtattacaatatttggagtggttattacccttgagtcttttgatttctggggccaagggctcagggtcaccgtctgg

SEQ ID NO: 40223 - DNA, 261 bp, Macaca Mulatta
ttgattgcctatagatcaaagaagttcagaacagtctgcctgtctgtccctttgcctaggactgtcctgattttaaaactcaaaatctcttgtccaaggaaccctctcagtcctgggcaaaccagaagaatttcttaaaatactatttaggacaattggtcaccctaacaacaagtctgtgttgttgatgaggctttaggcatgttatttagctatagactaagcccagatcagtggttctgaagattctgcatggatcag

SEQ ID NO: 40224 - DNA, 1940 bp, Macaca Mulatta
  misc_feature (1)...(1940): n = A,T,C or G
agcaagaaactgcatttcctgttgtgacctaagcattactacaggataagtcacattcatctacaaagaggttttcatacaaacaaagtaatatgtaaacagacaaaagtgaagcacgtactggcagaaagcactgttactctccattgtttacatattggaattttgaaacctagcgctcccgctcccaaaggacttactaaaatgaacatttgtatgtcccatattaaaagtacttttcaactatttcaaaggctgtttttggcaatcagaatgaaattatttcacgtttagttcaattcaagagaaattctcannnnnnnnnnnnnttaagaaaagtatcaaataatgactggttaaaacaaaccaaaaagnnnnnnnnnnnnnnnnnnnnnnnnnnnnnnnnnnnnnnnnnnnnnnnnnnnnnnnnnnnnnnnnnnnnnnnnnnnnnnnnnnnnnnnnnnnnnnnnnnnnnnnnnnnnnnnnnnnnnnnnnnnnnnnnnnnnnnnnnnnnnnnnnnnnnnnnnnnnnnnnnnnnnnnnnnnnnnnnnnnnnnnnnnnnnnnnnnnnnnnnnnnnnnnnnnnnnnnnnnnnnnnnnnnnnnnnnnnnnnnnnnnnnnnnnnnnnnnnnnnnnnnnnnnnnnnnnnnnnnnnnnnnnnnnnnnnnnnnnnnnnnnnnnnnnnnnnnnnnnnnnnnnnnnnnnnnnnnnnnnnnnnnnnnnnnnnnnnnnnnnnnnnnnnnnnnnnnnnnnnnnnnnnnnnnnnnnnnnnnnnnnnnnnnnnnnnnnnnnnnnnnnnnnnnnnnnnnnnnnnnnnnnnnnnnnnnnnnnnnnnnnnnnnnnnnnnnnnnnnnnnnnnnnnnnnnnnnnnnnnnnnnnnnnnnnnnnnnnnnnnnnnnnnnnnnnnnnnnnnnnnnnnnnnnnnnnnnnnnnnnnnnnnnnnnnnnnnnnnnnnnnnnnnnnnnnnnnnnnnnnnnnnnnnnnnnnnnnnnnnnnnnnnnnnnnnnnnnnnnnnnnnnnnnnnnnnnnnnnnnnnnnnnnnnnnnnnnnnnnnnnnnnnnnnnnnnnnnnnnnnnnnnnnnnnnnnnnnnnnnnnnnnnnnnnnnntctgttaaagaaataattattccacatttattctggctgagacaaattaaaggtgaaacactttaggctgcacttagataatttttggctttaaaattttcgtgtgtccagtgcaggggagaggaatcccaatttcacatttgatgatggaggaacaagttatgtggttgctctgcagacaatatgaaaattagttgaactaactcagaaaccagttgatcagctctttcattacatttgtgatgtaagcacaggtgccatattagctttcatgttgggattttttcatatgccttttgatgaatgcgagaaactttataaaacattaggatcagatgtattttcacaaaatttcattgttggaaaagttaaaatgagttgaagccatgcattttatagcagtcaaatgtggggaaaaattctgaaaaaatagaatgtgatttgcactattgattgcaacagcaagaaaccacacatgccttaaggtaactgccataagnggaggtttgcttctgaataactctttggcattagcaatgcatgagcgtaaatatctttggccggatattccattagagtacacagtatgtctggacactggacattcggagagtgatatgaaaaacactgtgatacacacaagcttgaaaaccaaacattctaatgttatcaacagtgctacagatatagaagcagtctgtataattcttgatggtctgttacctcctgatacctattttatattcaatcctgtaatgtgtgaaaacataactctagatgaaagtcaaaacgaaaagctgaatcagctgcagttagaagggttgaaatacatag

SEQ ID NO: 40225 - DNA, 572 bp, Macaca Mulatta
gtttcatcacttttaagtctctcatttagatggggctttgccgacgtacagagattataaggaaaggcgaaggccctgggactggaggccgtctacaaacccgtcaaaccgttttaggatctacatctttattagaaattacttgcaccgagattccctaagcccaagcattgaaagctcttatcacgactacgtctgtcccggtccctctttaatgtgccgtggcaccatctcccggcattttagctccacttattacgatgtcgtgcacattactggttattcttctaccagtgtggtatacgtttaccaacctttaattcgggtcatcaacctcgacatataccaggcctcaatatacgtcgtaggtcgaaagttcgtctacacagggatccgttactacgtcgtcacggggacagtccttctcccccatagttgtgaatgtagggaaattagtcagagggaaatcaaggaccgaagggaatgggatgacgtcggtggtgccgtcggcgaaagtctcctcgggtaaactccccgtctcccgcctgtcatataccacgtcaggctcgcca

SEQ ID NO: 40226 - DNA, 725 bp, Macaca Mulatta
  misc_feature (1)...(725): n = A,T,C or G
ttatttaccacagaattatagtcagtggcttaaattctttgaattcttctcaaggactacaagattatttgataaagagtagcatgaatgttgtcctctaagattacacagtaagttcaaagaaaagatatacgtcaaaggcttgttatgtagagggagaatggactgggatagaggacagaatgatagtttcttcctttcatatcacatgtatagagaaataattatatcagaaactcaaacctagagatggaaaaacagattactgtctattgtcagcatcattttaatctgtaagtcagtactggaatatgtttttcttttaatttccagtgactttagaatacacacagtttttccaacttttcaaaattttgactaaatggttttatagtatattgttgggaccccataccgttagcccttgtgtgtataccaacactgccaaagtgaaacattaggccaggcatggtggctgaggcctgtaataacagcattttgggagtctgaggcaggtggatannnnnnnnnnnnnnnnnnaaannnnnnnnnnnnnnnncannnnnnnnnnnnnnnnnnnnnnnnnnnnnnnntagccgggtgtggtggcannnnnnnnnnnnnnnnnnnnnnnnnnnagctgaggcaggaaaatcgcttgaatccgggacgtggatgttgtagtgagccgagaacgtaccactgcactccagtctggatgatga

SEQ ID NO: 40227 - DNA, 772 bp, Macaca Mulatta
gggctgggcggaagaaccatgttggacttcgcgatcttcgccgttaccttcttgctggcattggtgggagcggtgctctacctctacccggctttcagacaagctgcaggaattccggggattactccaactgaagaaaaagatggtaatcttccagatattgtgaatagtggaagtttgcacgagttcctggttaatttgcatgagagatatgggcctgtagtctccttctggtttggcaggcgcctcgtggttagtttgggcactgttgatgtactgaagcagcatatcaatcccaataagacattggacccttttgaaaccatgctgaagtcattattaaggtatcaatctggtggtggcaatgtgagtgaaaaccacatgaggaaaaaattgtgtgaaaatggtgtgactaattctctgaagagtaattttgccctcctcctaaagctttcagaagaattattagataaatggctctcctacccagagacccagcatgtgcccctcagccagcatatgcttggttttgctatgaagtctgttacacagatggtaatgggtagtacatttgaaaatgatcaggaagtcattcgcttccagaagaatcatggcacagtttggtctgagatcggaaaaggctttctagatgggtcacttgataaaaatacaactcggaaaaaaacatacgaagatgccctcgtgcaactggagtctgtttttaaggaacatcataaaaagaacgaaaagggaaaggaactttcagttcaac

SEQ ID NO: 40228 - DNA, 517 bp, Macaca Mulatta
  misc_feature (1)...(517): n = A,T,C or G
nggtttccaccatacacattacccagacaagatatggaggtgggagttttagtaacgattcctcctccattccaccgactcccagcaccagccaggaggaccttcagatcaatgttcctcccactgccaacacacccatgcccgtttgcaagcagtccaagcgctggtccaagctgttcacatctgagaaagggagtcacccagacaaagagaagaaagccccggacagtcatgctgacaccatcgggagtggcagagccatccccattaaacagggcatgctcttaaagctaagtgggaaatggctgaagaaatggaaaaagaaatatgtcaccctctgtgacaatggcgtgctcacctattattcaagcttaggtgattacctgaagaacattcataaaaaagagattgacctttggacatctaccatcaaagtcccaggaaagaggctacccctagccacattggcctgcgcgcctatctccagctctaaaagcaatggcctattcaaggacat

SEQ ID NO: 40229 - DNA, 688 bp, Macaca Mulatta
  misc_feature (1)...(688): n = A,T,C or G
gagggtgctcaacttactggagtcatctctgctgtggctttatttgccaacaacagagaacttgctctgcagcagccccaggctctctggggaccccacaggctgtgcagatcccccactccagaaccacacaaggagacggagcaggagcacgccccatcttccaggcccgggacagctgctgagctccaggacaccgactcttgaaggttgattttgactacctaccaagcaccagctgaaccagttcnnnnnnnnnnnnnnnnnnnnnnnnnntgtgaggggtctgcggtgttgttatttgcaggtaaagaaagtgagatggagggaggctgaaagacttggtgccaagtcacaatgccccgccgaatgtggcccacctggatatcctgggtgcttcaacctcagcagctctcggcaagtgagtgggcaatgaagggtggatgagggacatgggagagctagcccggctgcacagtcccaactcttcccgccacatcgcagcttctgcagttggaaagccagaacagtgattttcagttcgttcatcaaagggccaagaaatgtgtccccaccttctctgcttcaattctggtggtcttaagccaattatttcgtgccctaaaccaaaaaataaactctacagttacaaacatcaacattacataggacaggatctggcccacag

SEQ ID NO: 40230 - DNA, 783 bp, Macaca Mulatta
  misc_feature (1)...(783): n = A,T,C or G
gggagtgtgtattcggctgcctgcctgcctgcttgctctctggctgtgctcctgcttaaagaaatcagtccttcctttccgacttagtcctcgggaagaagtttcagcctacgaggtatcattggaacatttcaagatcatcaaatcaaattccacagggattggtgatctaccagaaggctcagacatctgattgctgacctgtccagacgtcatctggtctccctgaacctgaaatcacaccatggatgattttgaacgtcgcagagaacttagaaggcaaaagagggaggagatgcgactcgaagcagaaagaatcgcctaccagaggaatgatgatgatgaagaggaggcagcccgggaacggcgccgccgagcccgacaggaacggctgcggcagaagcaggaggaagaatccttgggacaggtgaccgaccaggtggaggtgaatgcccagaacagtgtgcctgacgaggaggccaagacaaccaccgacaacgctcaagtgggaaggggaatgatgaggccgccgttcctggaacgccctggctcgggcgagaggaaaagacgccagaaaccgccttccagaaggctctgggagcggcanaaaggaggtgcgaccccaagagttaaccgaatggaaggtctggtcggcctcccagcccaaaagaaaggccgaaattggccccggccggaaaaaacggaaacgtggcccgaagnnnnnnnnnnnnnnnnnnnggtgaaaaggtcccgcccgcaaagagaaagatgccgcgaagaaac

SEQ ID NO: 40231 - DNA, 106 bp, Macaca Mulatta
ccagtgggaacaggattgtcacctacctcagagggctcagagagccgggaggcccaaagtggctggagaaagtaaaggaaaaatcctggcctgagctcagggtcac

SEQ ID NO: 40232 - DNA, 869 bp, Macaca Mulatta
gggctctaccggcgggatttgatggcgtgatgtctcacagaaagttctcggctcccagacatgggtcgctcggcttcctgcctcggaagcgcagcagcaggcatcgcgggaaggttaagagcttccctaaagatgatccgtctaagccggtccacctcacagccttcctgggatacaaggctggcatgacccacatcgtgcgggaagtcgacaggccaggatctaaggtgaacaagaaggaggtggtggaggctgtaaccattgtggagacgccaaccatggtggttgtgggcattgtgggctacgtggaaacccctcgaggactccggaccttcaagactgtcttcgctgagcacatcagtgatgaatgcaagaggcgtttctataagaactggcataaatctaagaagaaggcctttaccaagtactgcaagaaatggcaggatgaggatggcaagaagcagctggagaaggaccttcagcagcatgaagaagtactggcaagtcatccgtgtcattgcccacaacccagatgcgccctgcttcctctgcgccagaataagggccaccctgatggagatccaggctgaacgggaggcaccgtgggcagagaagcctggactggggccgcgcagagggtccgagctctccggaccccgcgtgaacccagcggtttgcgggcccgcacgacatttaacgtaacccctttcccgcggttccatccgcggccaaaggccttcccatggggggctcccccgccctctgcgatcccccttacatattctgtttcccccccgtaaccctccgcccttgccttcccccctggcttggcccgcccctctcttgcgccatgtcctctccccccttct

SEQ ID NO: 40233 - DNA, 902 bp, Macaca Mulatta
  misc_feature (1)...(902): n = A,T,C or G
tccgccacagaacggcatccctgccgagtatgccccgcccccgccgcaccccacgcaggactactccggccagaccccggtcccctcagagcatggcatgaccctgtacacaccagcacagacccaccccgagcagccaggctccgaggccagcacacagcccatcgccgggacccagacagtgccgnnnnnnnnnnnnnnnnnnnnnnnnnnnnnnnnnnnnnnnnnnnnnnnnnnnnnnnnnnnnnnnnnnnnnnnnnnnnnnnnnnnnnnnnnnnnnnnnnnnnnnnnnnnnnnnnnnnnnnnnnnnnnnnnnnnnnnnnnnnnnnnnnnnnnnnnnnnnnnnnnnnnnnnnnnnnnnnnnnnnnnnnnnnnnnagggttttgggtttgtaacttttgaaactagctcagatgctgaccgagcccgggagaagctgaatgggacgatcgtagagggacggaaaattgaggtnnnnnnnnnnnnnnnnnnnnnnnnnnnnnnnnnnnnnnnnnnnnnnnnnnnnnnnnnnnnnnnnnnnnnnnnnnnnnnnnnnnnnnnnnnnnnnnnnnnnnnnnnnnnnnnnnnnnnnnnnnnnnnnnnnnnnnnnnnnnnnnnnnnnnnnnnnnnnnnnnnnnnnnnnnnnnnnnnnnnnnnnnnnnnnnnnnnnnnnnnnnnnnnnnnnnnnnnnnnnnnnnnnnnnnnnnnnnnnnnnnnnnnggcactggagcaaacgcttgttaaaatgccagtcccatgggcggggctggcaccgtgccccctccctcctcagcagacaccggagccggcctaccccacctctccagcgttcccaccactttcttgtccgtttgcttccagggtcgtgtatcaggatggattttatggtgctgagatttatg

SEQ ID NO: 40234 - DNA, 815 bp, Macaca Mulatta
ggggataccatttgttattttcttttttatcttgatgcagggggacttttttataatatgagacttcagttggtattaataggagttacctgtttaattctcccagtcatcaatgagctaactatcaattcctttagttcaaattagtcatagacaagagctacagcaagactgatagagtaaaaactatataaatacagtaaaaaatataatttatggtgtgaaatgtgaagtatagcagtatataacgagaatatgtaagcacttgcttgcacagcataagtataatttacacttgcattaaaggataattttctctgtgaataagagcaaaatggtctttagagaaacaaactgttcatttgaagccatttctgtgaacatcttccaagatagaactgtaatggattgaggaaataacacagaaaagacagaaacttttgatttcaggcgtgcaaagtgtgtgggcagatggacagttcctgttgtgcattgcctttgataaattgggccttattttatatacctgtgctgtgttcacatccctcttctagcctaagttgtctttattggtttatattgtgttaagattagctcataagtgttacttttatattatgttctagtttttaagttgcctgtttatactatttgctacagtatttttgagtttgggggtgaaggcccatcagctgtatcggaaaagacaaaaccaatcgctattttaattcagtattgcgtggcttttacatcctcccaaaattaaacctttcggatgcccaagaacaagccgacgtgcccttgaaaagcctgat

SEQ ID NO: 40235 - DNA, 601 bp, Macaca Mulatta
  misc_feature (1)...(601): n = A,T,C or G
ggtggagccatgcagctaagctaaactcccatgagacagggatctccatggcagtgctctcccttttatgtttgcatttcaaatacgccgcccttaggaaaaatattcttgggttgtaaagaaagaattgatacattttctaaggaaaatgaactaagagaggggaagaggaaagtgtctctctttttgcaccaggaaaaacccaatattttctttgtagcctttaatataaatcttaatttatattatttatatttattatgaaacttaagtttatatacaaatttttagatgggtaaatgtttgcatgcacggacccctttacagagggcatgattcacatggatacctttgggaaggtggtgggaagggcaaagccaggggcctgagagggaaacagccaggaagccagagggtcgaggcggagggtcacaggtcagagagacagtcggccctgagcccgtgctcttgaccccaggcgattgcttcacacaccatctgttgtgaggaccaatccattgtgacccagtgttcttgtaccatacaataaaaatgcacnnnnnnnnnnnnnnnnnnnnnnnnnnnnnnnnnnnnnnnnncc

SEQ ID NO: 40236 - DNA, 785 bp, Macaca Mulatta
  misc_feature (1)...(785): n = A,T,C or G
ggggttccacttaggaagaccgtgcgatctcattttgccctgtgcgattccttaggtataacatccaattgctcctgttggaaggaacattctgcatgcaaatggcagacatactctggggcactcaaatatattgttcctgaaagaaaggaagtggcctgtagagaagatattctactagaagattcctctgtgaggctgctagtacttctccagcagaccaagccaggagagctttctgaaagattttaccagattttccaggggttctcaaagattgtctgcagagcagcactgataagtgattgcagcttcttgagtctatagagagagacctttatgctgtctctactagaaaaatgatgaaggccatatgtaaatttctgaaaagatttgaatgatttgatttggcaaaataaagaattgtcaatcctacatagagccccgtacacnnnnnnnnnnnnnnnnnnnngttgcttcacaaaatctgggaaccactggatatatgaagtacctcttttagcaaaagcaaagtcaactctcaccctangaaacagttcattttttgatctgtttttatttttctgtggcaaaaagggcttttgtgatgcctctttgaataaaagacttgtttttcctanannnnnnnnnnnnnnnnnnnnnnnnnnnnnnnnnnnnnnnnnttgttggcccccttcgnnnnnnnnnnnnnnnnnnnnnaaccattcctttgggcccgccgggcccccntagggaaaatgaaccctgggccatacctgttttcc

SEQ ID NO: 40237 - DNA, 207 bp, Macaca Mulatta
gctcgtcccccagtccagccccaaccgtccctgtcacagggatgccggtcacacagccgtcccctgcctcctgggctggcgactgcccacgtggccttggccctgccctcaccacctctgggccccgaccaagtgctctaatggacaccctgaccctggggtctgtgaggcagagggccccactctctggctggcggaccagagagg

SEQ ID NO: 40238 - DNA, 329 bp, Macaca Mulatta
cagagttcaggctggtcaatggcagcagcagctgtgagggccgcgtggagctccaggtgcaggggtcctgggcgcccctctgtgccacccactgggacatagcagatgccaccgtcctctgccatcagctcaattgtggcagtgcggtggccacacctcgaggaggccattttggggacggggacgctgccatctggcctgacgcgtttcactgtggggggacagaaccctacttgtggaattgcccagtaagcaccctgggcgtcccggcctgtgccccgggaaactcagcctccgcggtctgctcaagtgggtgcagccaggacggt

SEQ ID NO: 40239 - DNA, 440 bp, Macaca Mulatta
atgtgtctctgccttgctcctggagacaataggagagtccacagatgcagacatgtaagaaaaggagaagcaatgaaaagcagaaatggtttaagggaactggcgggaaagacaggaagctcatctgtcgacgttttccatcctcttcaactcagtggtgtgttggaaaaaggcatctttttccccccaactgttacactgtctgaaaaggtcctaattaaatattcattaaagattcatttggcttaattgagattccttttaaaatgcaactgcctgtagaataataggatagtttggaggaaattatcaggaaaaaaatacctgtgctgtagtgtatgtaagtctctgtaagtgtgtacaagtgtacccttgtacaaatacacaaagcaaaagatgcgagcctttaaaagaatgtgttctcttaagtcacatatgta

SEQ ID NO: 40240 - DNA, 901 bp, Macaca Mulatta
  misc_feature (1)...(901): n = A,T,C or G
tgggaaaggaaaagactcatatcaacattgtcgtcattggacacgtagatacgggcaagtccaccactactggccatctgatctacaaatgcggtggcatcgacaaaagaaccattgaaaaatatgaaaaggaggctgctgagatgggaaagggctccttcaagtatgcctgggtcttggataaactgaaagctgagcgggaacgtggtatcaccattgatatctccttgtggaaatttgagaacagaaagtattatgtgactatcattgatgccccaggacacagagacttcatcaaaaacatgattacagggacatctcaagcatgactgtgctgttcctgattgtttgctgcatggtggttggtgaaattttgaaagactggggtaatctcccaaagaaatgggggccaagaaatactgaaaaaagcaaatggccctccttttccatggggccttttaaacaacaaaactattgagggattgggtctggaaaaataaaacaaaaactctttaaaaaataattggggaattattgggggagannnnnnnnnnnnnnnnnnnnctcnnnnnnnnnnnnnnnnnnggggggacaaatttattctcccgcacatacaccttgaggtgaaaagagctccacccataaaccacgcccttattaacaacaagaggcgcctccatttgtgaataaagagacagagggaaattaatacgggtaaagaagggtataaaacacactattgtttatattctcggaaagagggggaaaagagtatttttcaaagagccacaacctctttttaacccattgnnnnnnnnnnnnnnnnnnnnnnaaaatgtggggggtcataaacaacaaaacatccacactagtaaaaaccaggtaaaataagaaaaccaat

SEQ ID NO: 40241 - DNA, 734 bp, Macaca Mulatta
ggcaagaaatggggaaaggattccctatttaataaatggtgctgggaaaattggctagccataagtagaaagctgaaactggatcctttccttactccttatacgaaaattaattcaagatggattagagacttaaatgttagacctaataccataaaaaccctagaggaaaacctaggtagtaccattcaggacataggcaggggcaaagacttcatgtctaaaacaccaaaagcaatggcagcaaaagccaaaattgacaaatgggatctcattaaactaaagagcttctgcacagcaaaagaaactaccatcagagtgaacaggcagcctacagaatgggagaaaatttttgcaaaaacaatgatttttatttaaattgtattatagagggtaagcaaccaagtaatattctcagtgtttttcagtcatacagaggaaaattttgtatatgctcatatttctgtgtttattgttgtatgaaataaatgctttactggtccctatatctggtggtggagatgggatagtgggaagtgagggttacagataccaagctggcaggtctcattcatttactcagcagttgctcagcaggggccctccagtgtgctagactccttgctggggctctaaagacacactgaaataagcaagatcctggtcactgcaccccttagacccttcttttttagtggactagaatggatgacaagccggagagagagaaaatc

SEQ ID NO: 40242 - DNA, 689 bp, Macaca Mulatta
  misc_feature (1)...(689): n = A,T,C or G
agaaaatatgtgtaaantatcttagttataattgtttctcatttgaggttttcttctaagggaccttaaagagtttatatacttttgctcacagatactgctagtgagattacaattttttcagtatctagtcttctagtttttcttttaggcattaggaagccttcttaagagttcaaaattttagaagcctaatttggtgttacttccttcaattatgtgccatgtgttttggtttatatatgttttaaattgtatattaccttggaatatgcttgaaatatttaagaatacattttcaaaatgtataatactgtattgttttgttgatcaaaataataagtctcagttaaatgttagttattactgatagtcaaaacgctcaatagaaatgatgagaggcattggttccagttcattgtcaaatgaacattttgtaattttgttcacaggttctttccctttcagttgttctgtatattaagatagtggcttctgctctcactgttttcctatttatattactagcagataggagtgctaattagaaaaacttataatggtattgaaattgcagttgacaacttatatttttatgagatggagaacaaggattgtttacgttgataatgttgactttttttcttccttattctgcacgaaatattgccctcgtttcctctactttc

SEQ ID NO: 40243 - DNA, 490 bp, Macaca Mulatta
caggacaccagggtctgtgggatacaatccatacagtcatctcacctacaactacaggctgggaggcaacccaggcaccgacagctgggtcacggcgtccttcggtattaagattccaaaactcccaaagccaccagataagctgctgttgctctacatgaggtgcagcagaaaggtctggggccaagtaaaggcttccaaccctgacctaaagttgtgggagactggcaagattattggtggcatgtggggagatctcaccgatgaagagaaacaagaataaacaaatacaaagcagaaaagatagagtacaatgaatctgtgaaggcctctaattccacacgaaccttgcttacataaatgcaaaaagtcatgcagaagctgctttaggggaagaaggtggacacagacagtcttgcatggagagatgagaacctgatgtgagtattcggtttgctgaagatccagatgaatatgacaatagcttttc

SEQ ID NO: 40244 - DNA, 848 bp, Macaca Mulatta
tagtgacaggagtcgcattgctttcccttttgcaaatatttttaatgtctggctgaaaaaaagacaactagattctcctatttacttctgtattcattctattggtttaaacataaagaaaaattcagtcttacacaaatacgtcattagaaaaagtaagactttgctcatcccttaaaagggtcttggggattcccaaggttcctcagaatccccatgttgaaacctgtaaattagtatatattataaattcatgtattagtatgagctacaagcagcttgacaccaccaaagcataaagcaccaggtggaaagagatggagcacacaacctcaccggcctgtgtgacatctcaccctacctcaaaaatggcttgagcagagaaagaaagatgatgggagagtatggaacaaaactgagaagttgcagcgatgtaaaaaaagacttcctaagctcagctctgctcctcatgtcagacattgtacctggatttttcaaaccacggtcagggctcctgactgttaggtcattttcatggagagtaggaacttctggcagacagctgtgcatgtgaggtggtttctggtcctgaactaaattgagatcatcttgctcatttgtttgacagtcatttgataagttccaactctgtgctgggtcttgtgctacaggacaaaaagcatatggtcctactctgaagagctcaagtcagcctgaagacgagactgtacataccccaagttatacgtatgacaagctagatgtcagcaaaaaaagacaatcgcgaggaaggggtagaaacaccgcggaagctacactgggcaaaaacaggacaccccaaaaaccaa

SEQ ID NO: 40245 - DNA, 518 bp, Macaca Mulatta
atgattatctaccgggacctcatcagccacgatgagatgttctccgacatctacaagatccgggagatcgtggatgggctgtgcctggaggtggaggggaagatggtcagtaggacagaaggtaacactgatgactcgctcattggtgggaatgcctccgctaaaggcccagagggcaaaggtacccaaagcacagtaatcactggtgtcgatattgtcatgaaccatcatctgcaggaaacaagtttcacaaaagaagcctacaagaagtacatcaaagattacctgaaatcgatcaaaggcaaacttgaagaccagagaccagaaacagtaaacctttttatgacaggggcttcagaacaaatcaaggacctacttgctaatttcaaaaagtaccagttctttagtggtgaaaacctgaatccagatggcacggttgctttactggactaccgtgaagatcgtgtgaccccatatatgattttctttcaggatggtttagaaatggaaaaatgtta

SEQ ID NO: 40246 - DNA, 423 bp, Macaca Mulatta
caacaggtctccctacggccagcttcactccaagtctgggtcccctacttgctctcgctctccatcgacctccaaatcgagatctcgcgaagatccaagttctccaatgtctccagatctcgctcacggtccatgtccccgcccacgtccaagactcctcccccagtatccaagagggaatccaagtacgggtcgcgatccaagagtcctcccaagtctcctgaagggcaaggactagtgtcctcctagaaaaatgatcatcagctaacacgtgatggaggacttggggaaaggaccacatactcagtccatagaagcagagtccctggaagtagcactgcctatggaaaaggttgtgtcacacttgtctacctttttatcagtttgaagctttgcatcaggtggcaaaattcattttgtgtg

SEQ ID NO: 40247 - DNA, 749 bp, Macaca Mulatta
ggcagcaagagaaaccagttttgcaggagctgccagagatcatagaaattctttctccatatgtcccagcctaccccgctttaccgaggccattagccccctcagaaaggagattcaggagctaacacaccccaggtctcacctcgaaggggagaatcggaacctggagaggccaaagaaggaagtcaagatagtcaagtgggccttctcagatctggtcttgcttgagctatgcaaatgcctctcagggagatgaggacctgtctattagaatgaccaggcccacatcttgcgggggcaacagactttcatctatcagcccttttcaaccactgatctaccaaactggaaacaccctgaatccaccaccttgctctcggcagctagagccctgtcgagcatgactgtgtagaggtgttggattccagtttcctctagcagacctgacctccgggaccagccctgggcatcagtagactagtagctatacatggacgggaacagcttcatcaacccgcaaggagagagatgtgcagagtatgcggtggtaaccctgcacactgtcattaagctgagctcattgctttaattcgggccttagaactcagtgaaggtaagactgtaaacgtttacactgactctcggtatgcctgtttagccctccagtgcatgggaaattatataaagagcttggtaaactctagaaaaagggaaaaaaagaccccgagaagccactcagcttcagcgtt

SEQ ID NO: 40248 - DNA, 387 bp, Macaca Mulatta
acaatgacctttatcctagttccattcttggtcaagtttttctctcaaatgatacagtcaggacacatcgttcgatttaagccatcatcagcttaatttaagtttgtagtttttgctgaaggattacatgtattaatagtatggttttaaatgtgttgctctgtatacatacatagtttcttttttaatagaatgtactgtcttgtctcactttggactgggacaatggatgcccgtctaacagtaagtgtcatttcttttagatgtttaccttcagccatagcttgattgctcagagaaatgtgcagaaggcaggatcaaagacacacaggagtcctttcttttgaaatgctacgtgccattgtctttcctcccttctttgcttct

SEQ ID NO: 40249 - DNA, 826 bp, Macaca Mulatta
  misc_feature (1)...(826): n = A,T,C or G
gggtgggtgataatctttgtgtagaacacaaaagacaaagtggggccaggtgcagtagctcacacctgtaataccagcactttgagaagccaaggtggtagaatcgnnnnnnnnnnnnnannnnnnnnnnnnnnnnacaacatggtgagnnnnnnnnnnnnnnnnnnnnnnnnnnnnnnnnnnnnnnntattagctggacatggtggcatgagcctgtaggcccagcatacttgggacattgaagtgtaaggatcacttgagcctgggaggtcgaggctgcaatgagccatgattgtgcactccatctggacaacagagtgagacgagaagagagagagagacagatagacagacaagacagagcaagtgccttgttgatttcttcagttttggctcaaagaagggaaaaaatttgtgtgtataaatagaaaaaaaagaaaactaactttttaaggctttaaaaataactgaaagtgaagaccctgatttatgaaaagtgttttttgttaatcagaaaattggtgatttagatggtaatggggtagaagttggaagataggatgtgagtggacagagtatttggattaaaaacatggtaacttttattcagtatagctatctgtatgacgacagagttgtttgaatgttcatgaagttatgcgatctctaccgnnnnnnnnnnnnnnnnnnnnnnnnnnnnnnnnnnnnnnnnnnnnnnnnnnnnnnnnnnnnnnnnnnnnnnnnnnnnnnnnnnnnnnnnnnnnnnnnnnnnnnnnnnnnnnnnnnnnnnnnnnnnnnnnnnnnnnnnnnnnnnnnnnnnnnnnn

SEQ ID NO: 40250 - DNA, 437 bp, Macaca Mulatta
  misc_feature (1)...(437): n = A,T,C or G
gaaagagcagaagaggaggtggggtggagggagcagagtcagggattagggggctactgaggctctggagatgagactgccaggagtccttccccaccatcagccccctccactcctgcagctggaggagtttttcccagtctctgtgctcccctggggtgacagagactgaacaagatgtttgggtgggaaaagagaatggaggaagttgacagggatgggcggggcccgtgggggggctgaccaggaactcagcttcctgctcagtacccaggcannnnnnnnnnnnnnnnnnnnnnnnnnnnnnnnnnnnnnnnnnnntcaggaacccaaggttccggccctcctcccaaatcccagccacccctcccccaccagtttctcccctccaggggatggaggctgagagaccccaggaagaagaggatggtgagcag

SEQ ID NO: 40251 - DNA, 777 bp, Macaca Mulatta
gggggtttaatttgatattaaggcagttcccctccggaaatggtgtgatgttacaagaagaagaggctaagggatgcttcggactgacagggttcgtatctgtaatcaacagaggctgattctggctgcttaagcatgaaagtttactaaattaatgttgggaaacacacagatttgttgagatttgttgtgaaggctaggagccaggtttaaagctgagccccaaatcacatcatagaactgacctgaagagaaaatttctgccaccaccactaaatcttggactgctgctaaagtttgtactgctgctattttctcaccataaatgtggtttttctgtaacttactgctgccaggagggtaggagcggtcccttatctccttccttttgcttcaaagctcctacatcactgtttgacatgagaacatcacatgcctaaaggagctgggaaaaacaagtacctagcagtttccattcctatgaaggaggaatttttgctccccttccctcattaggactcattaagtggagattcctcaaacatggaaaagagtttctgaatctaggcagcaaatatctaccatacctgtttcacatcattaataccacaggggtttccttcctctgtacatgaacccaagcacagtgccttacttggcaaaggcactggcctgcaggggttgagacactcagcccttccatcacaaaaacatgccctcattgtcaagagctatagaaagaaaagttgggtgtcctcaacaaaatgaaaaggtccc

SEQ ID NO: 40252 - DNA, 780 bp, Macaca Mulatta
  misc_feature (1)...(780): n = A,T,C or G
gggggatgttttgattttactgtttatagatgttagattgtacagatttgtctgtatttctcaccatatctaatgatacttttttcattagattggtcttcaagagcagtattagttacaattattttggttattcagtatatagttagctcttacagtttagctttattcaccatatttatactgtggattcacagccagaggtagaggttattccaggagagttgatgaccttcatttaaagtccaactaaaatcagtactagaaacaaaagaaaacatccttgcaatatttacttttgtttctgtttgccataaatagtaacattggtttttttattttgtgtttgttataaaacagttgcattcacaatattattggcctgagatattgatgatattgtgatggtatgaaaatgtgtacattccctgtgcaacatcagatttgcaggaaaaatgaagcacttactgaaatcgctggtactctgaataaataagcatggtcaaggagtgaactattttcttttggaaatttctttttaatttttattattaaagtataattttatttttagggccttttgggttttattgactagttcatttcacctcttttagacttactagcaataagcataaaacttgacacgttaaaatccctgccctttggtaagcccactgttatttannnnnnnnnnnnnnnnnnnnnnnggggtgatttaatacaatgggttttttcttttttccctaaattaaacaaataatttttaaaataaactga

SEQ ID NO: 40253 - DNA, 791 bp, Macaca Mulatta
cctactcactatcgtaacccataacgtccctagggattcctccggataaaacagattttcaaataatgcctgaacctttaggaaatttttgacagaaggaatttcgtacttagggccaatttctgctaaccaggaacaaagcagagggaagtgacatctgaatagatcattgcagtgctaaaaaccttgcacactgttccaggcctctcctcttgtctttattgatagtttagctcagtggtttttagtatgaatcccacatcttctcaaacatgtacccctcaaatctactagcccccaatatccacacctggtttagaagtgtgtgtaggcatcctgtttgtcacagtgacaggcagctgctactgacatttaataggtgaaatcataaatgggcccagggatgccatgggctcagaaatggagagcatagtctacaccaaaaattattccacccaaaatgccaataatatcttaccttgagaaacactggtagtgcccaggttcttttctctacttaaatgcaaaaacaacttttcacaaaattaatatactatttcataaagtcaggatatgccaaagatcatgccatatatattacagagcatagaccaacttggaaaatctttacatgtgtattctgttatttctgtcttttctgtgtataagttcttttcaagttactatagtaagtttcaaatttgttacttaagagttccattattccgttaattatgatctgaagtttaagtatctgtggtgttgaacattacgcagctccgtaatataca

SEQ ID NO: 40254 - DNA, 121 bp, Macaca Mulatta
agtggtggacatgacaacagagtcaactgcatacagtggcatcaagacagtggctgtttatatagttgttcagatgataagcatattgtggaatggaacgtacaggcatgcaaagtaaagt

SEQ ID NO: 40255 - DNA, 347 bp, Macaca Mulatta
ggtatgaggatctgggtcttccagtgtctgaggaggtggggcctggcacaggtatgaggccctgggtctgctggtgtctgcagagacagggcccaacatctcagggaagaccccggtaagctcttcagtttgtgttgtggctgtggtcagttccacgtgtagtctgccctgttggtcttcccgtgtgttgccagagcctgcctgctgccttgcttgtaggtggggttggccagggccctccaagatgcccctgtgcaagactaggtacagggtttccggcagtaggtggggggcggggtgtgccggccctccctcagcaccttgtcctgtctctcctagtgggtggg

SEQ ID NO: 40256 - DNA, 1477 bp, Macaca Mulatta
  misc_feature (1)...(1477): n = A,T,C or G
ggatacatacaataaacaactgtcagggttgtttatcatatttgagttttgtcacctaggaaaacattgtttatactttgtttttgaaaaaaatcgtatgaatttcccctggaaataacttgttttatttctgtttttattttctatttagtccttgaaacacatgttttctagtctaggattttagccaaatagaaaagctatcacttaannnnnnnnnnnnnnnnnntattgacctatgaagaatttatagcaattattaaaactatgttgcttaaatatccaaaaactggacaactaatggaatatttagatgtttccattcactgaacaagccgtgatcctttattggcaggaagacttgcaggacgtatcagaaagctctgtcagaggtacgcaggcggtgagatggagggaagccctccgtgggaagagtcgcgcagtgtgtgacgtgttagggtaatcggatgtgtttaagctgcgtccttattctaaaagttattagaactgagctcttctagatttaatatcatgctttgctttggtagtgaagaacattgagataaaatctagtattaccaagttagagataattttagatcatcccttatactgttatgtgaattgttgtgaacatgaatattactgattctcaagttccagtatacagaagaatgacttgtcgttgcctgtcctggtgtgcccagatgttccgtgatggactctttatcccataagacatctccctcttgatagatgtctgtatatgcagattaaactatcaacattttttccagcaaacgtggtttttgaaagtaacctaatgaaaccctggctgccatggtcattttaattgctggactgagaagaagcgactacatgttgtgctgttggcccaggcctgcaagcgcgaggactgttggccgttacagttcctcgctgtggttgccggtttctctgtatcctgccagtgctctcatgtggcatttggcagaagtacgacgtagatttctgtgctccattttttcgtccctccaggctgtgggagaccaattagctggtggtgatgtgtccggaatgggtgggttcttggtctcactgatttcaagaatgaagccgcgggctctcgtggtgttacagttcttaaagatggtgtgtctggagtttgttccttcagactttcagatgtgtctggagcttcttccttctggtgggttcgtggtctcaatatcaggagtgaagctacagaccttcatggtgtgttacagctcttaaagacagcgcgtctagagttgttctttcttcccagtgggtttgtggtcttgctggctccaggagtgaagtttgcagaccttcgcggtgagggttacagcttataaagggagtctggacccaaacagtgagtagcaacaagacttattgcaaagagcaaaagaacaaaactccacagggtgaaagcgcacccgctcagtttccc

SEQ ID NO: 40257 - DNA, 587 bp, Macaca Mulatta
cgttttactgcacaggaggaagtggggagaacattactcagataagagcttgggagtgttgtgacattcataaccttcgtaactgttactggttttcttccccaggttttggagaaggtggatgtagaacagaaaatgagcatccgatttcttcactaaaggagaccaaactgttccttgcagtctagtatttaagaactggaacttgaaagtcctccttccaccaactccacctccaccccctcattccccttctcccaaagtactactgctgttgcatgacaaccccaaatatgttctgtcaacacaaacctgcctttggtgtataaacagggcattacagaatggtacaccctatctatttctgttcggtatccattcactagttcttcatttataaatatcttccctgttctgccgctgaatgccacacatccatccagtctgagaaagtgagagaggcaatcatgccaagaacaagccagcaaagctctttcaccaggtgtagactgtagccctgctgccttccctccagcgagtctgccagcatgctttatcctttttatatgttctttgcttcctacttg

SEQ ID NO: 40258 - DNA, 785 bp, Macaca Mulatta
  misc_feature (1)...(785): n = A,T,C or G
ggactcagccaagtttaccataaacagaaggcagaattgtctatttttaactttacagcccttgggtgattaaaattttgagccataataaacaacttttttcttttttgcaacataatttctcatttgaaattgcagtctttttagttgtttaggagatatggattgagcacttcatgtttttaaattctttcttaaatggaaatttcttgcagagactaaatgcatgcattagcatgccaaaagcnnnnnnnnnnnnnnnnnnnnnnnnnnnnnnnnnnnnnnnnnnnnnnnactaaggcccaaaactgaattgccttctcttctttctattttaactgtttaccaattagcacctttggccagctgcattttaggagaacatagtaacagatcccaccattctgttcctgtaagtagaatggccacaaacacctcaccatcacagggcagattattgggcaatttggcatgtctgcatatctattatgtcagcagaaagtgtatcttcccaccaggacagacagttgcatatgcaataaaccagtagcctttgacatgtcagttaattacatcagttagccactatctcctgtgcatgatcgctgtgttaatgaaactattttggtgtggaaatgaaacaggtcaagacaagtagatcaggaaatagaagggatttagggtcatataaaatgtcaatctgctgagtcacacagaacttaaccttgggccctccagaaaaggaaataaaatggtttcccctctgcctgtggagaaatgtttat

SEQ ID NO: 40259 - DNA, 868 bp, Macaca Mulatta
gggccttccttctcgcctaacgccgccaacatggtgttcaggcgcttcgtggaggttggccgggtggcctacgtctcctttggacctcatgccggaaaattggtcgcgattgtagatgttattgatcagaacagggctttggtcgatggaccttgcactcaagagaggagacaggccatgcctttcaagtgcatgcagctcactgatttcatcctcaagtttccacacagtgcccgccagaagtatgtccgacaagcgtggcagaaggcagacatcaatacaaaatgggcagccacacgatgggccaagaagattgaagccagagaaaggaaagccaagatgacagattttgatcgttttaaagttatgaaggcaaagaaaatgaggaacagaataatcaagaatgaagttaagaagcttcaaaaggcagctctcctgaaagcttctcccaaaaaagcacctggtactaaaggtactgctgctgctgctaaattccagcaaaaaagatgaccaccgcgaataaaaagggtcccgcccaaaaaggttcctgcccagaaaagccacaagcccaaaagggttgcgcccggcttcaaaaagctccaaaagggggtcaaaaaagcttcccacccccataaaagcaccctggcttcccaaaagggcatcctggggaaagaaaaaaccttaaccgggggcccattcaagagaaaagggaacgagaggggcgtccttttgtgttggagacagcaagcccgcaagcggggcgccgggcggcggtggcccgccctcgtggcgctggcgccctgcccgacaataagaggcgctgagcacggcggtgtgtacgattccggtgataccctacagcgcgtgc

SEQ ID NO: 40260 - DNA, 795 bp, Macaca Mulatta
ggggtggctgtgagctttccccgaggtctgagtttgtggctgcatttttatacctggtggctctgctacggcggcgcagaaatgaggcagaagcggaaaggagatctcagccctgctgagctgatgatgctgactataggagatgttattaaacaactgattgaagcccacgagcaggggaaagacatcgatctaaataaggtgaaaaccaagacagctgccaaatatggcctttctgcccagccccggctggtggatatcattgctgccgtccctcctcaatatcacaaggtcttgattcccaagttaaaggcgaaacccatcagaactgccagtgggattgctgttgtggctgtgatgtgcaaaccccacagatgtccacacatcagttttacaggaaatatatgtgtatactgccctggtggacctgattccgattttgagtattccacccagtcttacactggctatgagccaacctccatgagagctatccgtgccagatatgaccctttcctacagacaagacaccgaatagagcaatttaaacaacttggtcatagtgtggataaagtggaatttattgtgatggggtggaacgtttaaggcccttccggaagaatcccggagattatttttttccaaaatttacatgatgcccttatcagggacattctttccaacaatattttacaaagccagtccaagtattcttgaaaagaagcccccaccaaagtggaattggaaatttcttttagagggccccgaacccggatttcctgccctggaaacccg

SEQ ID NO: 40261 - DNA, 634 bp, Macaca Mulatta
ggggacaggcggcagcgctggcttccggctcggtgccgcctgtcctcggggaactgtggcctccctgggccccggggctaggctgagaatggattatttgcccatgattttctctctgctgtttgtggctttccaaggagctccagaaacagcggtcttaggcgctgagctcagcacggtgggtgggaacggcggggagaaacccactcccagcccaccctggcggctccgccggtccaagcgctgctcctgctcgtccctgatggataaagagtgtgtctacttctgccacctggacatcatttgggtcaacactcctgagcacgttgttccatatggactgggaagccctaggtccaaacgagccttggagaatttacttcccacaaaggcaacagaccgtgagaatagatgccaatgtgctagccaaaaagacaagaagtgctggaatttttgccaagcaggaaaagaactcagggccaaagacactatggagaaaggttggaataaccataagacaggaaaagactgtcccaagcttcgtaaaactgtatttatccccatgtagtgagaggaagaaaatatcggagtttctgataacccctaagaccaaccctggaggagaccatgaaaa

SEQ ID NO: 40262 - DNA, 769 bp, Macaca Mulatta
ggagtcctcaaaatctcaccccactcccactagaaagcaaacttccacgagtcctgcttgtgcctaccacaaaacagttatgaaaggaatgagccatatcatgataacagctgtgagggctgtgtggaagacccattagcccagtattcaagaagactaaggcccacttgagttaagtatagtgggtttaacactggactcagaggcagcaacctagcttgcctcctaaattctgcatttaatagttgtgtgactatgaacaccttcttttaactacctgtgagtattgtttcctcgtctgcaaagtgaaagaccctacattacatggttatcataaagattaaatgagataatctttgatgtaaaaaggtttaacacaaggcaggtagtcagaaaatgttgcagcacacacttattgataaccttcactggtttattaagatgaaataagtttcttgagttaggaaatactgttttgttaagtgtctaactcaaagtctgaaagctagtgagtgatagaaccaggaacaaaaagaatgcaaccttctaagtgccaatgcaaaaagaggtagtaatgggggtaagtcttccaggcttctgaattggcctgggctgtgacttgttaaccagggctatacattctgtcccacgaaccttttcctttccttgttttgttttttcttctaagaccccggtcctccttccagcaccgcaaaccctgacaggacgaaaactggaaagaaatccctatctacccctggcagcccgc

SEQ ID NO: 40263 - DNA, 758 bp, Macaca Mulatta
  misc_feature (1)...(758): n = A,T,C or G
ggaggtgctgcattgagggcgtggggtgtagggcggaaacacagaggactgagtgcttagggaaggtccgggaaatgtggggttgaacggcttagttctggcaattatttttaagctttgttaagatggagatttcaagaagtatatttatctttaatattgtagctcctggtaattcttatttgattaccatttatacacatggaaaaccagcatacctttttctggcaaagctccagggtcgtctttgtgcataatttccaggatttttatataatgctattaaaatnnnnnnnnnnnnnnnnnnccaaagaggggaagaagcagcttttgaatcggttacgttcgtgtttgagttgtttgggaaatattaactacattttctaatgctctagcctggagaaaggaagaaaccccacatgcgtgtgattcatttccttgtgtatggatattaaatgcaatataccattcaggctatgacattttgagtgaaagggtttactgcatgtcgattcagttagttttaccctattgtgttattatttaaagtgtggattgcattgcattcccggaacctcataaatgagttctttttcccaggaaaaaaggccactggcttcggatgttcattaatgtggattttttgtgggtgtaaatgaagctgccctaaaaaaccgggtgtgtgggtgaaggttggtttcctgaaaaggggaaaacaactttttatagccatggatcttaatttaaattttggtttt

SEQ ID NO: 40264 - DNA, 2222 bp, Macaca Mulatta
actcctacccattccccaaaccaggatttcccttcgtcctctccagtttcgcctctcccagaatcctaacaaattctctcttctctatcgttcgccttctttctaaacaccccagagaaaagattaaaagcggcctcgccctctgctcagcttcccggactctgagcgcctgcccaccccctccctctttcccagtgtcttcccaggagcggggaggtgacgctgcagagctgaccccggacacgcagctcctcccgctccggacacccagctcctccagctccggtctgccctccgaccccggggaccaggggctgggaggtggagagacgcccgaatctcacctatgactgtgagcctggtgcccggcccgaagtactgctcgtaggagcacggaggtgcaccccggcacgcaaaccactaaggctccctgagctcctgcccaccttggggacccagcccaggtctcctagcacagggcgggaccaggtgccgcgaagcagccaccttccacccggaccccgccgtccggatgttcccgcggcaactcacccagcacggtcagccggctgccggccccgaaagtcaggacgctggccccagagcacagccaggggactccccacaaaaaccggacccaagccgccccgcgccgcgcccctgcggcccgcgctcaccgagcaccaggagccgcgtgcctggtccgaagtactgggtctcttggtcacggcccccgagccccacacaaaaacccgacgccgtctctccccaggtcccccggcgcccccagcttacccagcactgagagccgggtcccggcgccgaagtactgagtgttttggctcacagccccgagacgcagcacaaaaactggccctgctatgcccccggcctgccttcccgggctggtccagcccccgcttaccgagcactgtcagccgggtgcctgggccaaaatactgcggatctgtgctcacagcctggaggcccaggacaaaaaccggtgctgcccgccctgctatcccagactcagctcgggtccttcccaccgctgagagccccatcgccctcccagcacccagaaccaggagtcctcggcccagacgcccagcagcgccactcagcacagcccctctcggagtggggcagctgctcaactctgcccatcccgccctctcggagcgctccggagccccaaccgcctccttacccagcacggtcagcctagagccttctccaaagaacagctgcgcggtgttagcacagccctggggaccctggcgcaaaccccgctttccccgaggagggccctggattgcccagtgtccactcccctaagaacagggttctggggtcgtccaggctgggcagccctccctctctcccacctggagcccccttcttacctagcacggtgagccgtgtccctggcccaaagaactgctcattgtaggagcacagtgggaaggggctgcccagaattccttctccttccccacctcccttagcacgggtagagagcacaccctccctctctttcctgagcctgtctcttcctgtctcgaattagctggacacggtaacgtggatcttgcatgaggtcaccaccaatttgcagaggagaatccacttggcttggggacaacacagtggattcgaaatctgaaggggcattggtggtactggaaaggctgaagctgggcgatgttgcaggctggaccttgcctcttcctagttatatgacctgtaacctctctgatctcagtttcctcatcggaaaaatgggacaatatctttccctcaggttttcatcagtcttaataaataatgcatgtgcaagtactttgtcaagaacaagttttattaaaagtgctgagtgataatcccacttcgctgtcttggccttcttatttctaggaagctgagtgtggacaggaagatggacaggtgctcgctgggttggaggaccctgcaagacaacagctgggaacagccccagagacctcttcccacctggtagctgcattccctgggctgggtggggatgtttttggcagcagggttttttgtaaaagcacctcctctacctgaatcattgtgctccccccagtccccacaatgttacaccatgatacaaaaatgtttcctccctgctagtccccctcccccaaccactgggcagcggcaggaagcgcaggtggcagaggttagtctgactgtgt

SEQ ID NO: 40265 - DNA, 536 bp, Macaca Mulatta
aatctgagggtcaggcggctaactgggtgatgaagagggaagtgagaaggaggaacttggagcagaggaaagaaagggtctgtagggtcatgggaagcaggtgtttggccctactctttgtctcctggggaagggcctgcatttggtttcaccttgaggggatcaaaacttgggatcctcctaggaggtagctcagagttcttttgcctgtcgccggagtgacagctttgggatgttttccactcattgccagaccatagctggaccggaccttgtccatggagtagcccctggtcacaggtgacagggcatcagtgatgttttcctgacaggcaggggtgggcaggggcagtaagtgcatctggggccctgaggccaagccactggatgacaactgtgtccaaccggcagggatctctgctgccagagccagccagtgttggccattttggaaactgcacatcctggacatcctgtgtgttccttggacaccacaaacagacacagggaatttcaagttcatggataatttcccc

SEQ ID NO: 40266 - DNA, 785 bp, Macaca Mulatta
gggaataaaagatgatgtagagccaaaaacccatgaggcagtcaacaacgtgacttaaacacaccccgccaccttatccttcctggagataccctgaggaagccacaggttgccactgcaaggctgctccaagattacatgtcattttggcctaacagttatttgaaacagcaacctaatccaacaccaagccggaccgttctctctaaaagaatcctaactgtcttctgcaatgggatttctgtgcaagtcagccccaaactctgggaaagtggtgctgtgctggggccggggttctcccaaagagccaagtgttgtttggagattaatactgaaaggtgcgctttctaaatatcatcaagaatctgctgtagctcctcatcttcaaaccacccttctaggcttgggattagggccttggactcctcatcaatctctaggcaaaagttggccaagccaggccaaacctaaacgtatgaagcttttcctggagcagtaacctatgacaatctgggcagtggtcaaatccgtttttgaaaaagggggctgtgtggagtttaaaacatttggcatgggaaacctttgagaagtttgtggttcatcctccgataacccatggtataaatggctttttgatggctacaaaaaaccaaatggaattttctttaaattttggaaatttgcttccaccaggtttttcaaactctttgggggataggaatatactcttttgtaaggcctgttcctcccacccttaaaatacacacacgctcctatcgctgtaa

SEQ ID NO: 40267 - DNA, 958 bp, Macaca Mulatta
  misc_feature (1)...(958): n = A,T,C or G
gggcctttgcgttctctttccctctcccaacatggcggcctcagcaaaaaagaagaataagaaggggaagactatctccctaacagactttctggctgaggatgggggtactggtggaggaagcacctatgtttccaaaccagtcagctgggctgatgaaacggatgacctggaaggagatgtttcaacaacgtggcacagtaatgacgacgatgtgtacagggcgcctccaattgaccgttccatccttcccactgctccacgggctgctcgggaacccaatatcgaccggagccgtcttcccaaatcgccaccctacactgcttttctagggaacctaccctatgatgtgacagaagagtcaattaaggaattctttagaggattaaatatcagtgcagtgcgtttaccacgtgaacccagcaatccagagaggttgaaaggttttggttatgctgaatttgaggacctggattccctgctcagtgccctgagtctcaatgaagagtctctaggtaacaggagaattcgagtggacgttgctgatcaagcacaggataaagacagggatgatctcttgctgagatcgatctacacatcatgagtcgctgagaattnnnnnnnnnnnnnnnnnnnnnnnnnnnnnnnnnnnnnnnnnnnnnnnnnnnnnnnnnnnnnnnnnnnnnnnnnnnnnnnnnnnnnnnnnnnnnnnnnnnnnnnnnnnnnnnnnnnnnnnnnnnnnnnnnnnnnnnnnnnnnnnnnnnnnnnnnnnnnnnnnnnnnnnnnnnnnnnnnnnnnnnnnnnnnnnnnnnnnnnnnnnnnnnnnnnnnnnnnnnnnnnnnnnnnnnnnnnnnnnnnnnnnnnnnnnnnnnnnnnnnnnnnnnnnnnnnnnnnnnnnnnnnnnnnnnnnnnnnnnnnnnnnnnnnnnnnnnnnnnnnnnnnnnnnnnnnnnnnnnnn

SEQ ID NO: 40268 - DNA, 440 bp, Macaca Mulatta
  misc_feature (1)...(440): n = A,T,C or G
ggaggagcaaaggactcgtcaggcgtgcccgcgtcccctccccatcctctggaccagggcagcacgtccaagagccagaggctgcctgggaccctggtcttgctgctgagcctctggccaccccgtcttcctgccagggctccccatccctgctcctgagcctaggcccgcctcgggtccccacctcctcacagccctttgggtctaaatggctggggaccggcaggctccttgctccactgggaccacatcttccaggcagcctagctgctcctgtccagtcctgtccccacacttgcccagcctcacccttgatcatccacctctagaagggaacactcagagaagagtggcanggcactctggtgtgacgctgggtgagcagaaaagctggcaccagaagtcatcttccctgcctgcggtcagaggtatggagacca

SEQ ID NO: 40269 - DNA, 178 bp, Macaca Mulatta
  misc_feature (1)...(178): n = A,T,C or G
ctctctaaaccactataccactcagatacaggaccagattcagaaaggatccctctatnnnnnnnnnnnnnnnnncnnnnnnnnnnnnnnnnnnnnnnnnccgtagactcaccggttaaccaaagggaagatgaagatggcatggctaatgaagatgaattagacaacacctacacgg

SEQ ID NO: 40270 - DNA, 191 bp, Macaca Mulatta
  misc_feature (1)...(191): n = A,T,C or G
gattccagctgatgaagaaggctgccatgcaggctcagggcaaggagagggaatgtgctgctatcactggagctcagctccgggcaaggctacaccttctgaaccgacggnccaggagcaaagtgacccatacttcctccaaagcatcactctccagacatggnggaaacccccgctctccctggactgtg

SEQ ID NO: 40271 - DNA, 971 bp, Macaca Mulatta
  misc_feature (1)...(971): n = A,T,C or G
ctgtgtacccgtagtctttattatatctctttctaggtgattcgtatattatatcatttctgctatactatagttcttagcgctaattatatgttcgnttctctattctttatccatcattaatatccgtccttttcctttattattatactatcttgtttgttactctcctagtcgtgtatattatacctggtccgcaatatatcattcacttccaatatattgctattcacacactttccctattccttattttatcatagattcggggttgtttgttacgtccttgctcacatttgcaaacatcttctcaactcttacgcttacttattctttccttttacccttactctctattcttcttctaatacttttccaccctactctttcttatccctcttttttttgttaatttctgttcgccattttttattttttagtttctcattatcgttgacgtcattactgcttgttgagcgcttctcgcttcctcagtgtctctgctatctcttctttacttttccttataggtcttcctcacttgatttttcccagttacttgttcttgctgtggcttatccattctctttttttcccatctcaagtatttcatttcaataattcattctgctattgtgcattcaaacatctccctactctgctggatcgttcccaaaagcacacaatacatgctggattttctcctactgtaatgaacaaaagaaaacaaaacctcaccctacatctctctccaggctattgnnnnnnnnnnnnnnnnnnnccctctttacagcaaaacttcttgtaannnnnnnnnnnnnnnnnnnnnnnnnnnngttccaggatacatgtgtaggacatgcatgtttgtcacatagtttgccatggtgatttactgcacctatcaacccattgcctaggtattaagcccagcatgcaataactatttttcctgatgctcttgctccccc

SEQ ID NO: 40272 - DNA, 748 bp, Macaca Mulatta
  misc_feature (1)...(748): n = A,T,C or G
attccaaggcacctgtccttctttgttgttgacccaaagtaggaaaaagaggtttttacaaaatgcaaaccatgccagaaaccaggacttaaaaaaatatatataaataaaactgaatttcagccaagtgttaatatgggtgcttttaaaaatgacagaggcacagcgcttcttttggaataggagattcttggaatgggagcccttgtccctgaggaaacagggatgtgcatcccaccaaaacttgggttactgaagaaataacatgttctgagaagggatcagccaaaatcacctttcctgatgatgtaggagagcttactgggacatctgtgccaaagttgttgtgagagctttccttcctccaaagatccaacccatgtcaaacatttnnnnnnnnnnnnnnnnnnnnnnnnnnnnnnnnnnnncaatcacttgagcctgggtgatcaaggctgtagtgagccaagatggcnnnnnnnnnnnnnnannnnnnnnnnnnnnggataccagttctgtagttcagaagtccaaaatggatctcatagtgctaaaattaaggtgttggcagggttgcactcctttctggaagctctagggaagaatcattatccttgccttttacagcttctagtggcttcttgcgtttcttggctcataacccccttccttattcctcaaagacagtaacattaggccaagtccttcagatgctgcaatcactctgggtctctctcttctcttcccc

SEQ ID NO: 40273 - DNA, 1064 bp, Macaca Mulatta
  misc_feature (1)...(1064): n = A,T,C or G
cgcgacaacaagggccacgcacgtaagactcaactacagcctgctgcagcccacgcggagggcgggccgcggggagcggccgagcagacggcggcggggtcgtgtacagcggtaccccgtggaaacggaggaactacaaccagggagtcgtgggtctgcatgaagaaatcagtgatttttatgaatacatgtctccaagacctgaggaagagaagatgcggatggaggtggtgaacaggatcgagagtgtaattaaggagctctggcccagcgctgacgtccagatatttggaagttttaaaactggactatatttacctactagtgacatcgacctagtggtgtttgggaagtgggagaacctacccctctggactctggaagaagctcttcggaaacacaaagtcgcagatgaggattcggtgaaagttttagacaaagcaactgtacctattattaaactaacagattcttttactgaagtgaaagttgatatcagctttaatgtacagaatggcgtgagagcagctgacctcatcaaagattttaccaagaaatatcctgtattgccatacttggttttagtattgaaacaattcctattgcagagggaccttaatgaagtatttacaggtggaattggttcttatagtctctttttaatggcagtcagtttccttcagttacatcccagggaagatgcttgcatccccaatacaaactatggtgttctcttaatagaattttttgaattatatggacgacacttcaattatttaaagactggcatccggataaaggatggtggttcatatgtggccaaagatgaagtacagaaaaatatgctagattgctacaggccatcaatgctttatatcgaagatcctttacnaccaggtatgatgttggaagagttcaatggggcatgcaatgagcaggccttgatatcctacttgtttgagctgctgatcccatagcaagtcttcccacatgaacggaagctccagtagaaataagtaccatgaatcccctacgattggatcaaacaggggtgaaaaaaccaa

SEQ ID NO: 40274 - DNA, 843 bp, Macaca Mulatta
  misc_feature (1)...(843): n = A,T,C or G
ggcttcttgccagtgttttgggatttgaagataatggttcactcaaagaacctattattttctctactgaggaacccaatgtagaacttgcactgatatttttattactgcctttatatgaatctataggtatctaaatgttaaggcatgtatgatctttgatttcttttttcaaattaaagttgtataaaagtttcagtatcttgccttaaattagttgcctatttctagaattcaaatattgtggcatttaaaaaagaaaacattcacttttgaaacttagacttcagatcaaaaaagactgaacccccactatcataatctataaatttattgccatgttgtttgactagcagtgcatatatgaatgaatatggtaattagtctcatctataagaaccaaatactttaattatattaaggtagtgaataaagatgtataatatttttattaataccctgaatatattcagtggattgaatgtgacttcataactgtactacgattgtattaaaatatttctggcaaaaaanaaaaaaannnanaaannnnaaaacatgtcggccggcctccggccctcgaagaaagcttttctagacccatttcgtttggccgccgcggggccccagtaaggtaaagtgaaacatgggtccatagcctggtttcccttagggaaaattcctgggttccatgaacctaggtgcctttggaattccctcacccnnnnnnnnnnnnnnnnnnnncggggcggggcaaaccccgaaacgcgtttcctggaaacacaaatttccccggaatgggggaggntttccgtgagaagggtccctttatacctgggagaa

SEQ ID NO: 40275 - DNA, 765 bp, Macaca Mulatta
  misc_feature (1)...(765): n = A,T,C or G
gggaaagtgggagaaggaggagcaaaggagagaaggggagcgaaaggagaaaatagcttcagttactcagtgagttttcttcatttggaagcataaaagggctaataatttacatgtttctgtacttttctctcaaaggcccacaaggaagtttgctatttctgccagctgcaacttatatgggcttctcaaagaatccagcaaggctctgacaaaggcagacagaaaggaggcaaaggagaggagaagcaattttctacatcaaaggatggctcccaggtccttgcaaaagacatccttcagttgtagaagatttacatcccaaaggagcaaaaaaaaaatttacgactgcaagtttatttattaagtaaatgctctaagataaagaaggtcaaagtccaatagtcacgttaacctgtctaaagattagttaacgtgatgggaacatgaaggctgtcttggtcaatacttgctcatatttatgtattttgctaaacttacatatgcatatgttatctttattttatagatgtgaaaaataatatatcaattggcctatataaattagaattggatgtgtgctgatgcccaaagagcttgaaatatacaaatactannnnnnnnnnnnnnnnnnnattagaatatacattttgtatataaataattaactaaattccatgccccctagaacaccctaatttacaaattcacaggccatatttttattatagccaagggtaggaaagaaaattattccagggtggc

SEQ ID NO: 40276 - DNA, 766 bp, Macaca Mulatta
ggtaataatgcataacatataagccaaactgagttaccagcaaattttcattctcctattcccaaccttctttatcacacagattatcaaaagttaactaatttttagagaaaaaattgtatttaaaaaaatagggtgttgtcgagattgcaaaattttctccagattttctgggtaaatagtcattaacccaaaataccattcctgtgagatattaaaggtaaaatatggatactgatatatctatgttgttctacataatgataataataataaatgtttgtcaattatctaggtgaaaattaaacaaatcatagttcttaaagtacccattttccccacttcacatacctctagaaaaattaaatgtacagaaaaccaagtttagatagtaagaatatattatgaatgatctttgatagtgtccatgatttataagtgctattatttcccagatgttgtaaatctgagaatgtttattaaacattacagtaaattgatattcctgctttgctagaacctgaaaggattatgaaggggctaccatagctataaagtaagaagagtggtataggcaagaacagctaggtagtatctctcctagcactgacaggttcacagggtgtgccttcagggaaaagacccatgaagcttttttcaaattaattttccaacattttcttcagaaacctggaaagtaattttgcccccacggaaattttatattttccccttatcgcccatttggggggtcgcttattggcgc

SEQ ID NO: 40277 - DNA, 523 bp, Macaca Mulatta
  misc_feature (1)...(523): n = A,T,C or G
gggggccctgctgactcgaagcccagctcaagtgaacagatgctccatgggtgttgggccttgcctccatgccctggggtatcagtacagttccttctccccaggagagcctctgggacgcagcaggagccatggctccccgttctcctctccctgttgcccctgagcccccgctctcaggcccttcttttctcagtgggtgtcacatggtctcactgtctctgaatgaactctgttctgcccccatccatgagaagctgagtgtggcactcaggcagttggtacagcctggtggacagtggtgctaaccacttggagccacgaggcactggggagcggagccctggtcaggtcaggcctgtgtgtgccgatctggcactgagaatgcatgtcttacgagaataggggaatctggaacgtattggatttactttggcctaaactcgtgacttctgaactcccatttccccctcttttggggactaccnnnnnnnnnnnnnnnnnnnnnnnnnnnntccatgtc

SEQ ID NO: 40278 - DNA, 838 bp, Macaca Mulatta
  misc_feature (1)...(838): n = A,T,C or G
ggcatggaaatcagagagtgcttgtaggctcacctgttgtatctttttatgttttgtcttttagtttttataggttgagataattgtctttatttgcaattggttaaagaattagaacaatgccagaagcttgtctggagatgtcctttttaaatcgtttctggccgggtnnnnnnnnnnnnnnnnnnnnnnnnnncaatttgggaggcgaggcgggtagattnnnnnnnnnnnnnnnnnnnnnnnnnnnnnnnnnnnnnnnnnnnnnnnnttatctcnnnnnnnnnnnnnnnnnnnggtccattaaagaaattttaagtggagatgtcctttggagctgggagtgaaagtagcacttaagcggtggctttcgcatgtcttgataaaagtaatgagttgtttgcctcaacacagcttcagccaaaattgggattttgagctcaaaaactgttaatgcccttcatagaaattaagggcaatggaaatcttttcttaacattttacacctctacccctaaaattttaagaattatacttcataaaaatgtgcagttttcatacaacagcccagtgttgataatagaggttaatgattccttattgttagggaactatcttgtaaattccagagttatttatgtttttctacagttggaagaggaaaaataccggctttattcttgccttcctttttcaagaattttgttttttggcttcttggagtaagcttggaataatttttttggagaactccctacaagggcccgggcggggggtggcctccatgcccccatataatccctaaccttacttttaggaaaggcttaaaaggttgggc

SEQ ID NO: 40279 - DNA, 816 bp, Macaca Mulatta
  misc_feature (1)...(816): n = A,T,C or G
gggcttattgtttcaaatacatatgcaattatggcaggtggacgtggagaagtatggaagtagccattctctttaagacagtgtggaaaaaaaaacggcaggaatccttaggtatgacttggggtaggctagatgcgtgaattttaatatgcaatatgcctctttttgactttgaaaatagaagattggaggaaacaactggttgttggctgaagtattcaagttgaaagaaattgctaaaggtagagtattttcttagctcaggagaacgagactgtttttaggcagtgcactgtcagaaacatttaatttagcctgctttgatccgcagaatattaagagtttagagagctcttgatgctacttaacataaaggtttaaatttacaagtgaggaaactggacccccagctgtaagtgactagccctgtggttcacacaagaatctagaagcagtgattctttaccattggagcgtatttgtataatagaaaatttgtgcctacccgtgtttcagtaaccagtattactgtaatcaagttgtctccaccttgtggcagcaaatattttacaaggctgagtacaaacatggaagaaaactgctagggagaacttttaactgtttttgaggaagaaagaggcaggtagctttgtgacagttgtgttgctttttcaaggcagctgtgtctcattgcctacattcatattttgtaacccttataanggaattatatactctgtatacctgaatcaagcaatcattttatgttgaacgtgtaggaagtttatagtgtttaacctatctttttacaatttt

SEQ ID NO: 40280 - DNA, 577 bp, Macaca Mulatta
  misc_feature (1)...(577): n = A,T,C or G
ggaccccgggggctgcctggtttcccaggttttcccggagaacgaggaaagcctggtgcagagggatgtcctggcacaaagggagaacccggagagaagggcatgtctggctttcccggagaccggggannnnnnnnnnnnnnnnnnnnnnnnnnnnnnnnnnnnnnnnnnnnnnnnnnnnnnnnnnnnnnnnnnnnnnnnnnnnnnnnnnnnnnnnnnnnnnnnnnnnnnnnnnnnnnnnnnnnnnnnnnnnnnnnnnnnnnnnnnnnnnnnnnnnnnnnnnnnnnnnnnnnnnnnnnnnnnnnnnnnnnnnnnnnnnnnnnnnnnnnnnnnnnnnnnnnnnnnnnnnnnnnnnnnnnnnnnnnnnnnnnnnnnnnnnnnnnnnnnnnnnnnnnnnnnnnnnnnnnnnnnnnnnnnnnnnnnnnnnnnnnnnnnnnnnnnnnnnnnnnnnnnnnnnnnnnnnnnnnnnnnnnnnnnnnnnnnnnnnnnnnnnnnnnnnnnnnnnnnnnnnnnnnnnnnnnnnnnnnnnnnnaaggtttgcatgatgtggggccacctggtccagtgggaatgcctg

SEQ ID NO: 40281 - DNA, 1004 bp, Macaca Mulatta
  misc_feature (1)...(1004): n = A,T,C or G
tnnnnnnnnnnnnnnnnnnnnnnccggtgtagnnnnnnnnnnnnnnnnnnnnnnnnnnnnnnngtccgcccgtnnnnnnnnnnnnnnnnnnnnnnnnnnnnnnnnnnnnnnnnnnnnnnnggcctacttttatgtattttttaaaaactttgtatcgttataaaaagtctagtcgttctttcagaagactatctaggatcatagatgaaaaatgtaagccccaattgagaagtgtcttctccaggatggtcgctaaggaaatttaaatttggttctttcctactcagaaacaactatatatttcaggttatttgagcacagtaaaagcagagtactatgattgtccaacacaggcctctcagatacaagaggaacacaattacatatggggctagattttgcccagttcaaaataatatttgttatcaactttgttacctgtacgatgaattttaaaaccctaccactttaagaagacagggatgggttattcttttttggcaaactatgtgattttgaaatttaactgctctgtattagggagcagtaaaatcaaggctagacttatgagatctgtattatgtttataccagaatataggaaatttaacataatcctgaaaaataaaagaatccaaattattcaggttaaatattgatgtattatgatggttgcaaagatttctgtgtgtccaacaaacaaattgtaaaaaccagaatttgaatcggtatttcatctagacttttaaagccctagagactaattgttagtaacatcaaaaatagcaatttatattagaatatctgtataaaaaacaggcatccccaactggccacacagcggaaagttaaagcaagtatctcctcctctcagatcagcagcagcattagattctcacagaagtacgaaccctattgtgaactggtatgtgacggatctagggtgccatattccttatgagactctaatgcctgatgatctgagttggaacggtttcatcctga

SEQ ID NO: 40282 - DNA, 793 bp, Macaca Mulatta
  misc_feature (1)...(793): n = A,T,C or G
ggggagttgtatcttcccacctccatttcaatactggttgttaggacctaagcagaagagcagtaaaggctgattgacacacagggggatggagttggtccttacccgttctctaacccttgctgtgcatgtatcggtccttatcccagaaggtactatttagactgtgtagactgatgtagattgcatactgtagaggattaaggaaaccatagagattgggccttgtactattactgccttctcttagagttgtcctgatcaggcttggggcctagttacagattagtcttaaagagtcacagtaactttaaaaaaaatcaaaccttgcaaaagctaaaataatttggagatatctttgcccttgacttgtagatatctaagaggatgaagaaaggagagtctaagtgagactctggcctgcttcctaacaatgtcttggaagtgggatgatagtaaaggagaaaggccacggtccaatccctctaccttcagatagggaactcaaatcctgaaattactattttctttctggccttttctcctggttagaggaggaagtgggaagtagttttgagtaatacttggttcatattactctnnnnnnnnnnnnnnnnnnnnnnnnnnnnggttgtttccggccccctctaccaatagggcaataagcccccctaaccctggatggggtaaaaagggggggccttgggtcccaccagggtgccccaagaaggggtaccgaacctccctttttctggggggagaaaaaaaggcttccccctaccccttatataga

SEQ ID NO: 40283 - DNA, 755 bp, Macaca Mulatta
  misc_feature (1)...(755): n = A,T,C or G
gggggaaagagaccagccttggtccctaagcctccagaaacgtcctctgaatccccatcttttcttatcccccaaaaagaacaagcatccctgactggaatggtgtatactgccacatcagtgtttgagtcaatccccagaggagaggggaaccctccatctttttttgcaacatctcatttctttcatttttgctgttgccttccccccccaaaacaccttagtttttggtcctttcccaacattttggagaatttccattttgggggttaaaactttgccgggnnnnnnnnnnnnnnnnnnnnnnnnnnnnnnnntccccccccaagnnnnnnnnnnnnnnnnnnnnnnnattgaaaaaaaanaaaagtcanataataaaaaaaatattcnnnnnnnnnnnnnnnnnnnnnnnnnnnnnnnnnnnnnnnnccccatttttgggccccccctgggggccccttgagnnnnnnnnnnnnnnnnnnnnaattccttttttggggcccccgggggccccccnntggggggnnnnnnnnnnnnnnnnnnnnnccaaaaagggtgtttttcccccgggggaaaaacccgggggnnnnnnnnnnnnnnnnnnnnnnttttgaaaatttcnnnnnnnnnnnnnnnnnnnnnnnnnnnnnnnnnnnnnnnnnnnnnnnnnnnnnnnnnnntgnnnnnnnnnnnnnnnnnnnnnnnnnnnacaaaggggggggtttttttttggagggggggcgtctcctccc

SEQ ID NO: 40284 - DNA, 649 bp, Macaca Mulatta
  misc_feature (1)...(649): n = A,T,C or G
gggggtggtagccagcctccagatggcaccagtgatccctggcctcctggtgttcatgcccccgtatagccttctcctgcattttatagtgctgacttttgtaactaccaggatattgagcaagtgcagtgtgtgatttttgaggccatatcttttacnnnnnnnnnnnnnnnnnnnnnnnngacaagatctcactctattgctcagactgaagtgtggtggcaggatcatagctcactgtaaccttaaacctggactcaaacgatcctcccatctcgccgcctcctaaatcactgggattacaggcatttttgctcatttttctcttttgttttttttacttgtctgtttttagatattacatattttgaatactaataatctgttatgtatgtttcaactatcttttttagtctggtttgtcttcatattttggttatgaaatcttgaatttttaaattttaatgtaatcttaccaatctttcataatgatttgctttttctggtttttgtataggaaatgtcataaagatagtcttattcagccttccaaaagttaaaaaatttttaacatttagatgcttagtccnactgaaatttgttttcatttatggcatgattttggaaatctgttttaattttttgcacn

SEQ ID NO: 40285 - DNA, 757 bp, Macaca Mulatta
  misc_feature (1)...(757): n = A,T,C or G
tctatcacctagcacaggcctgttgcttttctagttatttaantgaatgataactgatggcagatccatcctgtaggagtctgtggtcatcatggcctccagtatcacaagcctcaatacaggactatggggtattagggcccctcttctgacatggagaaaaggggctgatgacccttctgactagaagcttcgaactgtttcatggttccaaatagtcaggattatagagattcttacagaaaagtgctttactgactctatccctatccaattccttgcctttcagaaggaaagaagtgcagattgcccaactcagcagagcaaagacgaaactttcccgtcaacattgggaggctagaaaaagcagattttcctgtctgtcccgagggaattgcataggctggttcagccttccccgtcttcagtacccagcattggaatgccgattatcctggtttactaatcttaatacttttgatttctaggttccattaagtgaatttgacttttcctggtctaaaatttctgacattcagtctcaggtatgtgctttttaaacgtttttgtgagtaggcaggaaccttgtcccagcactctctttatagtaattcattgggcagtcactgtcctttaaagtctaccctgtggtacagtgcggttcagctgggtggcgtataagggtcctgctgtctagttacaacgtcctgggctcttgaaaggttctctggaaggcttggcctcggatttggaaccg

SEQ ID NO: 40286 - DNA, 783 bp, Macaca Mulatta
  misc_feature (1)...(783): n = A,T,C or G
ctgtcgcccaggctggagtgcaatggcaagatcttggctcactgcaacctccacctccncaggttcaaacaattctcctgcctcagcctcccaagtggctgggattacaggcccctgccaccacacctggctaatttttgtatttttggtagaggcggggtttcaccatgttggccaggctggtctcgatcttctgacctcaggtaatccgcccgccttggcctcccaaagtgttgggattataggcatgagccactgnnnnnnnnnnnnnnnnnnnnnnnnnnagagacaagggctccctatgttgcccaggctagtcttgaactctaggctcaagcaatcctcctgcctgagcctcccaaagtgctaggacacaggtgtgagccactgctcccagctnnnnnnnnnnnnnnnnnnnnnnnnnnnnnnnnctgttctctctcagctctgaagaaaggctacccacccccttgagacattcctgaaaatgcaagtcatccaacatcaaggccaccacagtgaccactaagcaatgcaagaaggtcctctggggtgccctgagatcttggcagggcaggaagagtgagaaggggctttgcctgctcacctgaaagttcccacccaagccaggcccagaaaacaaaatgaattatctacatggtcatccaatcagccaccaaatggcattacctgggtccatcatcatgtaccaagccacgggtcagagccagggccccccaaattaagaagacacaggcactgtcctcaggaagtggagatcta

SEQ ID NO: 40287 - DNA, 754 bp, Macaca Mulatta
gggattcatgcctatgcaaggtaattacagtgacaagaaaggaattctttgtgtgctcctactgactcttaactttgctataaagtttcgacctctgctgggcactttcaggatctccacctgccctttacctcaactaggtttaatgagctcttaaagtaagtgaaggcttccagctgcaacgactctgcaaagactttctcttgtatcaccatagaaacaagaccttcactgtaaaagaaaaaaaatcacattataatgaggaacactgctataaaatatggattaatgagttgaataacaaacagggaggaacttgtagtaggaaggaactaagtgacagcaagagcagctggaggaaggagttaggatgaattgtgggactcagaatggggagacaaaatgtacagtctaatatttgcactatgagcctgagttcttacatacaacagtttctgagtggaggcttccactatggtgattgtgaagagataaaccgaatattcatgaccctgagttgcttctacttgtttattgttggagattccgccaaaaaatgacagatcaagatttaatgaagcttgaaaaaaaacattgccaaatttttaaagaaaaaatcctaatggcccaaacaataatgggcaaaaatttattcaaaacccccggtgggcctcaaccagggcataccgccagtagggaataaaattttaattttttgatgacctatcctaagacatcttacaataaaatttta

SEQ ID NO: 40288 - DNA, 763 bp, Macaca Mulatta
ggggagggatgggatggaaggacattaaaatagaagcagacaactggaatggatcttatatatcaggtagtaaaaacattttcattttctaaaggcttgagacccaaagacattaggtgtcatttaaacctacattgtatctagtttatggaagaactgggactagaactcagatttcatgataatttcagggtttcctagcatatgaaggctttggactaaaagagagattcatccgagtccagctctttcactacccatgtgacttttggttaaatgtataacctgaggtttctgattataaaatagacatcaacacctacctcaggggatgctgtgaggattccaagagataccatttgcaaattgctcacagtagagtgtctaaaacgtaattagacactcaatagagtgtctaaaacataattagacactcaataatagtttcctttttccaatttttaataccaactatttataattaggatacctttaataaaatttctccaagtcacatcctggcaattacacaaaatcactaatgctagggattaaaccggatctattaaaatcctggccaccttaaactcttttctcgactgggtatacattaaggtaattttttcccttacccagccacctcctcctaaactggctatacagtgaataggcaaaaaatttcttaaagagccttggctaattacaaaaattttccttcccaattttgggggggaaattgggcttaccttttaaggaaacactt

SEQ ID NO: 40289 - DNA, 334 bp, Macaca Mulatta
agtgcaagccctagataggcaaagttctgggaaagatgtaagagagtccaccaagtcccaggcagtggcagattcctctttcacaaaggaggacagcaaaatatctcaaaaggatattaagtcatatcaaggatcatcatatgaatatgaagtgcaggtttttgaaagtgtatctcaaagttccatccacacagctgcatccattcaagatatacagttgcgccatactgcatccctttcagaaattgcagaaagcactgagctatctaaggaatgtgccgaagagtccatgggtgaggcgcccaagatttctcctgcatcttcaggacatcac

SEQ ID NO: 40290 - DNA, 646 bp, Macaca Mulatta
  misc_feature (1)...(646): n = A,T,C or G
gaaaaaaaaagtagagggtggggggtgggttgagatacccaaaattaaagatatagccaaatatgacattaatttttaggtactattaatgagcccttttagcaatattcccaattctgtgctaaggtgtttctaggagtatttcaattatgaaaatttaaatctacttcaattctcttttgaagtaaatatagcactttttttgttaagtagcaggagtttaaggtttcaaggcaatgtggaaaattgagaataccagaaaatgaatccaaacaaaaatagggtatcccaaattctaaaaatctatgaatcacattatgaattgttgggaggagtagagctgccctgggcagctgcaggtcgtgcattgcagagctccaggtggcaccattcacttagagtgcagtgtgactagagtcctgagtagagcaaatactatctgaagggaccagaattcccccacgttccttcaacctaggttactttgtgcatcattttcagaaaagttcctgcttttgaaatagaagaatgtcataccccaagccatccaagtggatttaagagcataannnnnnnnnnnnnnnnnnnnnnnnnnnnnnnnnnnnnnnnnnnnnnnnnncatcnnnnnnnnnnnnnnnnnnnnnnn

SEQ ID NO: 40291 - DNA, 836 bp, Macaca Mulatta
ggggcttttcctgtagcagcatccggggtgagaggaacgtggttttctcctctctccgccatggcgtgtgctcgcccactgatatcggtgtactccgaaaagggggagtcatctggcaaaaatgtcactttgcctgctgtattcaaggctcctattcgaccagatattgtgaactttgttcacaccaacctgcgcaaaaacaacagacagccctacgctgtcagtgaattagcaggtcatcagaccagtgctgagtcttggggtactggcagagctgtggctcgaattcccagagttcgaggtggtgggactcaccgctctggccagggtgcttttggaaacatgtgtcgtggaggccgaatgtttgcaccaaccaaaacctggcgccgttggcatcgtagagtgaacacaacccaaaaacgatatgccatctgttctgccctggctgcctcagccctaccagcactggtcatgtctaaaggtcatcgtattgaggaagttcctgaacttcctttggtagtggaagataaagttgaaggctacaagaaagaccaaggaaactgtttttgctcctttaaaaaacttaaagccctgggaatgataatccaaaaaggtctatgccctctcaacccaaatgaaaagctgggccaaaggcaaaaattgagaaaaaccgttcgccccgttatcccagctgccagggggggcccaatgccatttcaatttttattaatttgaggggaataaatgggggtattccatccaaagaggccctttccgaaaaaaccttcccccttgggaagaattttagctcccgtaaagggcccccgaaactcggg

SEQ ID NO: 40292 - DNA, 890 bp, Macaca Mulatta
  misc_feature (1)...(890): n = A,T,C or G
ggggtcttcctctattgaggaaggtcatcctcttttcagcccaatcaactctggccatcaatggggtgatagatgttgcagccagattgccctaaaatccctttatatgtctgtgatttttaaaatttctctcccttttaccttctgcatcttttatgtctactttctattcttctttctagtttaatgttcttttctgaaataattcttttatttccatgtctgttctgaattttatcatctcattttagtttttcccattctgatttgtattgatctttatgacttctatcatttttttcctaaagaattcagctcattttgaaatattagattctatttttcatgtatttttgagcatgcctttatggcatgcatttattttagcaattcaagcaatgtgatctagaaaaagtcttactctgtgtaagcctcagttttcccagttacaaaatggtgagaataattcttaattcatttatgatcaactccaaatgcctgaccaaattttaaagttatgtagatgtgtaaagcactctacgtgtataacacattatttctacatctgcaatttcaaaagtgtattaactgtcttcctgacatcaacattccttatgtctcacttgacaaatcgtcagttggtgcttgctgacatatgactagtgcacgatgtgaatcattccgttctcatactatagaacccgtctagttgtcttaccaagaaattgcgtggggaaaaattacaattttatccgttgcccnttttttntccctttcctaaattaaacactttataanttaataaagccaatatttacccccctcccctgggttcctttttttttcccgggggttttnaaannattatatctatattttattttgtgatg

SEQ ID NO: 40293 - DNA, 1134 bp, Macaca Mulatta
  misc_feature (1)...(1134): n = A,T,C or G
ggtcgcccaggctggagtacagtggcgtcatcctggatcactannnnnnnnnnnnnnnnnnnnnnnnggattctcttatcttagcctcccaaatagctgggattacagtgaggtgcccgccacacannnnnnnnnnnnnnnnnnnnnnnnnnnnnnnnnnnnnnntgccatgttggctaggctannnnnnnnnnnnnnnnnnnnnncaatccacccannnnnnnnnnnnngnnnnnnnnnnnnnnnnccgtgaaccaccatacccagccacaatctcatgacctcttaaaaattactgaaagaatccaacagctttttttgcaaaggagttttgctgttgttgcccagactggagtgcaacctccgcctcgtggagttcaagtgaatcatcctgccaaaagcctacccgaaataccttgggaattaacaggccaaggcggcacaccccccgccggtcccaacctctagcaaactttcaacgcaagagccaaggagaattttccctcacgagatttgggacgcaaaaacatgggatcctacacaaaacatttccccaggcagaattcacagaggcgggagaggttctgcgggcagcactatttattttttcgcggtgaccctttgcttcgcccaacgaaaaattctcgacacattaatggggggagacaaaatatttaaaccccaaaacgagncaatgattaagagctttagggtctcttaagtataccaatataaagtgattgctcgagaaccacactattaaacaaaaaatattctaataaataggtgcttatgatatgtattgctatatgataagggattgacctttgtgtgacaatataccaaaaaatcatttgtaaaaactggtcactcttccccacactattgtaaattatccgatggggggaacacaaantgccttgtttatggatattgtgggcaaatagttaagaaggttgttcaacgatttgttcacagtatatcattgtgaggacatgaaatattcacaaaaagctcttaacacgagacaganntaatgngtacagcctgccagtcattcctcctaagtcggagttgatcagatgacgagaangcatagtaactctcactcattgatcaatattatgcgagact

SEQ ID NO: 40294 - DNA, 682 bp, Macaca Mulatta
  misc_feature (1)...(682): n = A,T,C or G
ccttccgagncagcccagnngtccctaaataggtcaccaaacttgggttaaacttcagnttgctgtcacatcaaggttcaggttatacagatcttgtagtgtggagttaattctgggtagagaagggagagctgactctccattgcttttctagtggaaaccagccagtttgacggcgctgcgcgggtacaggactccatcaggctagtgttggggaaccagcctggcagcgttccatgtgaattccatatctgttccaacactggctgataggcagacaaaaggttacttgtgtgtttctctgagaagcggtgtaaatgaagtcaccttagaatatattctgtgcagatgcttatattttgttaacttcacgacttatggcatgtctnnnnnnnnnnnnnnnnnnnnnnctaagtgtgaataacattatgaagtggtatttaattaaaaatccatgcagtnnnnnnnnnnnnnnnnnnnnnnnnnnnnnnnnnnnnnnnnnnnnnnnnnnnnnnnnnnnnnnnnnnnnnnnnnnnnnnnnnnnnnnnnnnnnnnnnnnnnnnnnnnnnnnnnnnnnnnnnnnnnnnnnnnnnnnnnnnnnnnnnnnnnnnnnnnnnnnnnnnnnnnnnnnnnnnnnnnnnnnnnnnnnnnnnnnnnnnnnnnnnnnnnnnnnnnnnnnnnn

SEQ ID NO: 40295 - DNA, 274 bp, Macaca Mulatta
agtccgaaagctccaattctgcctctttcaggagccgggtgtaccttacttctgtctgcctactggatgggactcagatattatatcaccccgtgcctgagtactgacccattacccagaaagccgcatgatatctgagacattgcaccaaggtatccctttctccctctcttatacatagcccttaaatgcgactggctactgagcctggtctcttgcagtttcacaaagacatctgccctgcacctgctgcaatcccatttccattcactct

SEQ ID NO: 40296 - DNA, 884 bp, Macaca Mulatta
  misc_feature (1)...(884): n = A,T,C or G
gcagtgaaggtgcctgaggccgtgtccgacatgctgatgtcagagttccaccacccagagaccgtgcagaggctgaacgctgtcctcaagttccacacgctctggaggtttcgctatcaggtctggccccggatggaggaaggagcacagcagatttttaagnnnnnnnnnnnnnnnnnnnnnnnnnnnnnnnnnnnnnnnnnnnnnnnnnnnnnnnnnnnnnnnnnnnnnnnnnnnnnnnnnnnnnnnnnnnnnnnnnnnnnnnnnnnnnnnnnnnnnnnnnnnnnnnnnnnnnnnnnnnnnnnnnnnnnnnnnnnnnnnnnnnnnnnnnnnnnnnnnnnnnnnnnnnnnnnnnnnnnnnnnnnnnnnnnnnnnnnnnnnnnnnnnnnnnnnnnnnnnnnnnnnnnnnnnnnnnnnnnnnnnnnnnnnnnnnnnnnnnnnnnnnnnnnnnnnnnnnnnnnnnnnnnnnnnnnnnnnnnnnnnnnnnnnnnnnnnnnnnnnnnnnnnnnnnnnnnnnnnnnnnnnnnnnnnnnnnnnnnnnnnnnnnnnnnnnnnnnnnnnnnnnnnnnnnnnnnnnnnnnnnnnnnnnnnnnnnnnnnnnnnnnnnnnnnnnnnnnnnnnnnnnnnnnnnnnnnnnnnnnnnnnnnnnnnnnnnnnnnnnnnnnnnnnnnnnnnnnnnnnnnnnnnnnnnnnnnnnnnnnnnnnnnnnnnnnnnnnnnnnnnnnnnnnnnnnnnnnnnnnnnnnnnnnnnnnnnnnnnnnnnnnnagacctatgttcgagatatttatcctttccggaggtcagtatctccccagctgaaccttgtacatatgcatccggagaagggacaggaactcattcagaaacaggtgtctgaccacgt

SEQ ID NO: 40297 - DNA, 129 bp, Macaca Mulatta
tgccattatatgtagagcatctgtctctaagtagaggcatgccatgcaccttgatatgtcattcaggaccagtagctgcttaggtgtgtggatcggagcctccaaacctcgctcactttgaatgccagt

SEQ ID NO: 40298 - DNA, 377 bp, Macaca Mulatta
ctctgggaagcaactgggctccatcttcctgaagattctgggcaccgctgcacatatggatggactactgggttctgctatgtcaactgagaatcaaggtcggctggggtctgggatgcctcagtttcctctttgacaagcacctagatggaatggcaatatttggctgattctcccgggagcaatgcagtgcagccccaggtgaaggataagaggctggtcttagtggtaggtggggctggggctaggcatgctaatgattaggtggcgaccctaaggactagtggaaaacagaagtttacagaatctcatctcttctctataatttcctcactagttctcctctccccaagggccatgtgaccaacagggctccc

SEQ ID NO: 40299 - DNA, 2308 bp, Macaca Mulatta
  misc_feature (1)...(2308): n = A,T,C or G
tgataggaccccctgggccacaaggatttcctggtcttcctgggcttccaggagaagctggtattcctgggagacctgattctgctccaggaaaaccagggaagccaggatcacctggcttgcctggagcaccaggcctgcagggcctcccaggatcaagtggngaaatgaaggactctgtgcctgtgagcctggtcccatgggcccccctggacctccaggacttcccgggaggcaggggagtaagggagacttggggctccctggctggcttggaacaaaaggtgacccaggacctcctggtgctgaaggacctccagggctaccagtgagtnnnnnnnnnnnnnnnnnnnnnnnnnnnnnnnnnnnnnnnnnnnnnnnnnnnnnnnnnnnnnnnnnnnnnnnnnnnnnnnnnnnnnnnnnnnnnnnnnnnnnnnnnnnnnnnnnnnnnnnnnnnnnnnnnnnnnnnnnnnnnnnnnnnnnnnnnnnnnnnnnnnnnnnnnnnnnnnnnnnnnnnnnnnnnnnnnnnnnnnnnnnnnnnnnnnnnnnnnnnnnnnnnnnnnnnnnnnnnnnnnnnnnnnnnnnnnnnnnnnnnnnnnnnnnnnnnnnnnnnnnnnnnnnnnnnnnnnnnnnnnnnnnnnnnnnnnnnnnnnnnnnnnnnnnnnnnnnnnnnnnnnnnnnnnnnnnnnnnnnnnnnnnnnnnnnnnnnnnnnnnnnnnnnnnnnnnnnnnnnnnnnnnnnnnnnnnnnnnnnnnnnnnnnnnnnnnnnnnnnnnnnnnnnnnnnnnnnnnnnnnnnnnnnnnnnnnnnnnnnnnnnnnnnnnnnnnnnnnnnnnnnnnnnnnaggtgctccaggtgggaaaggacagccgggagatgtggggcctcctgggccagctggaatgaaaggtctccctggactcccaggacggcctggggcacacggtcccccgggcctcccaggaatcccaggtccctttggggatgatgggctacctggtcctccaggtccaannnnnnnnnnnnnnnnnnnnnnnnnnnnnnnnnnnnnnnnnnnnnnnnnnnnnnnnnnnnnnnnnnnnnnnnnnnnnnnnnnnnnnnnnnnnnnnnnnnnnnnnnnnnnnnnnnnnnnnnnnnnnnnnnnnnnnnnnnnnnnnnnnnnnnnnnnnnnnnnnnnnnnnnnnnnnnnnnnnnnnnnnnnnnnnnnnnnnnnnnnnnnnnnnnnnnnnnnnnnnnnnnnnnnnnnnnnnnnnnnnnnnnnnnnnnnnnnnnnnnnnnnnnnnnnnnnnnnnnnnnnnnnnnnnnnnnnnnnnnnnnnnnnnnnnnnnnnnnnnnnnnnnnnnnnnnnnnnnnnnnnnnnnnnnnnnnnnnnnnnnnnnnnnnnnnnnnnnnnnnnnnnnnnnnnnnnnnnnnnnnnnnnnnnnnnnnnnnnnnnnnnnnnnnnnnnnnnnnnnnnnnnnnnnnnnnnnnnnnnnnnnnnnnnnnnnnnnnnnnnnnnnnnnnnnnnnnnnnnnnnnnnnnnnnnnnnnnnnnnnnnnnnnnnnnnnnnnnnnnnnnnnnnnnnnnnncaggagcacctgggcctccaggcctccctgggagtgttgacctcctgagaggggagccaggtgactgtggtctaccagggccaccaggtctccccggcccaccaggccctccaggatacaaaggctttccaggatgtgatggaaaagatggccagaaagnnnnnnnnnnnnnnnnnnnnnnnnnnnnnnnnnnnnnnnnnnnnnnnnnnnnnnnnnnnnnnnnnnnnnnnnnnnnnnnnnnnnnnnnnnnnnnnnnnnnnnnnnnnnnnnnnnnnnnnnnnnnnnnnnnnnnnnnnnnnnnnnnnnnnnnnnnnnnnnnnnnnnnnnnnnnnnnnnnnnnnnnnnnnnnnnnnnnnnnnnnnnnnnnnnnnnnnnnnnnnnnnnnnnnnnnnnnnnnnnnnnnnnnnnnnnnnnnnnnnnnnnnnnnnnnnnnnnnnnnnnnnnnnnnnnnnnngtctggcagggtcttgccttcccgtgtttagcacgctgccctttgcctactgcaacatccaccaggtgtgccactatgcccagagaaacgacagatcctactggctggccagcgctgcacccctccccatgatgccactctctgaagaggcgatccgcccctacgtcagccgctgtgcggtatgcgaggccccggcccaggcggtggcggtgcacagccaggaccagtccatccccccatgtccgcagacctggaggagcctctggattgggtattcattcctgatg

SEQ ID NO: 40300 - DNA, 659 bp, Macaca Mulatta
  misc_feature (1)...(659): n = A,T,C or G
ctccttctggtgcctctatctgctgagggcatttctcaccctttaaaaggnttttgaatgtcattgggagattttcctagacgtagaaagggaggnnccgcngaacccnaagccncnngcncccncanccccagcagaaaaggcgngacaaggcctgtcttggcagaataaataagagagataagtgcacctgaggatagtctgtgttatgggacaattggaatttctacagcaaaagagaagctattctcagtatttcaaggagaaattgttcaagttcagtaaattagagtctaaaccacagtctttccgaagcctaccgtatgttattcatgaagaacgtactagagacaggggattctcaggtcctcctccagaagccggagtgcacctgccccgggtggtatgtgctgagtaccgtgtgatgaccctcagacctgtctgagaagcccagggcgggggtgctgatgctctcagctgcctgcagcacgtctgcaggtgattctccagttcacacctaactgcatgtgttttacttcaggtgtcagtttacatgaacccaccactctgacttcccaatctcatgacagtggtaagttgtatcttattgcaatctcattgagcaactctaaagaaaccatagagagaagaggagtttg

SEQ ID NO: 40301 - DNA, 253 bp, Macaca Mulatta
  misc_feature (1)...(253): n = A,T,C or G
aaagggtgtccatccagtggtcagtagttccacccatgagatctccttcaccaagatgactggtctgctgtggaccctattcacggacaggctttgccaggtgccttgggggaagagatagaaatnnnnnnnnnnnnnnnnnnnnnnnntgttataaatgcctgctatgaaggtgacactgttattgtttgtcctggccattttgtggtacatggcataatggagtgcagtgttgactccattgagttggaag

SEQ ID NO: 40302 - DNA, 994 bp, Macaca Mulatta
  misc_feature (1)...(994): n = A,T,C or G
gggtatgtaaaagaatacaattcttttttatgtaattagtgaaattttattttttattaggaaacactaaatagtgtaatatttctnnnnnnnnnnnnnnnnnncctggtagcaaatcaagataaataattgcttaattttcttgagcaatactgaagcaggatgaaataagaggaatgcattcatttaaacatgcttcgctttatgaattttgtctcttttttggtctttttttcttatattcaagttacaaatgtacaagtgtccttactaagagtgctccttttgtattttacatatacacagtatgaaaatacattggaacactaggaaagtttttaaataacagttctaatttatcagaaaattgtgttttgggattgagttctttgactcagcccagaatcccacgtcctgggcctggttttctaacgcggtcatctcatctcgatattttactttagaatctggaatctcctccttaatatatgaccatgactttgaaagccaaaagaggaatcaacaagaaataaaacaaaccttcatctttaannnnnnnnnnnnnnnnnnnnnnccaaaatgagaatcaacactttatagtataggctcacnnnnnnnnnnnnnnnnnnnncttaatttaaattcagttatttttaatggttaatacataaatggtgcgaaatttaaaaagcgcaaatagatacctagtgggaaacccaagcctccctctctcctccagcacccattacctctccctggaggcaactcttttgattcatttcttacacacactgcccagaaatactctaggccatgtaaagccccaaacataccatattaaaatcttgcggggctttttaaaaaatataaggtaagcatggtcattaaccatacctgttcattaccaccnnnnnnnnnnnnnnnnnncaactttaaatgggttaataaccccttggggaattaattggttaatttataccctcgggggaatata

SEQ ID NO: 40303 - DNA, 726 bp, Macaca Mulatta
  misc_feature (1)...(726): n = A,T,C or G
ggcannnnnnnnnnnnnnnnnnnnnnnnnnnnnnnnnnnnnnnnnnnnnnnnnnnnnnnnnnnnnnnnnnnnnnnnnnnnnnnnnnnnnnnnnnnnnnnnnnnnnnnnnnnnnnnnnnnnnnnnnnnnnnnnnnnnnnnnnnnnnnnnnnnnnnnnnnnnnnnnnnnnnnnnnnnnnnnnnnnnnnnnnnnnnnnnnnnnnnnnnnnnnnnnnnnnnnnnnnnnnnnnnnnnnnnnagacccagaaactaacaacccacctggtcccacaagctttaccctgactagcatgcataataggcctttatgacaaaaaataccccctatatggggcctacacccgtgtgactttcctaaaggccccatggtcgaaagccccccctttggcaggaatcaaatagtttctttgccgcaaagaactccctaaaaactaagggtggctttgggggataaaaaacgaacttaactccccctttccttaaacccnnnnnnnnnnnnnnnnnnnnnnnntcttaccccatttccctgaaaaataaaaccccctggggggggggggccttattttcctttataaaaaaggcccctaaaacaagtgggccctccccgcacaaaaaaacagaannnnnnnnnnnnnnnnnnnnnnnnnnnnnccgggggggagaactcctcctcttgggggaaagggagccagccaatatgacccgcccgcccttgtgttatatttatt

SEQ ID NO: 40304 - DNA, 838 bp, Macaca Mulatta
  misc_feature (1)...(838): n = A,T,C or G
ggatatcttttccatctttgttcttattgagagttatctgattagagaacatgggatttaggcccaaagcctcccaagaacaaaaatgtgttacgatctgacataggttttactggtctctgtaaatattttagttgtttatggagatagtaagtgtgcccttagttcaaaaagaaagtgggacaaatcagtaactgaacccnnnnnnnnnnnnnnnnnnncacataaaataaaaacaactgaaatagtatactagaccacttttccataagactgaagagattattttttgaaagagtgaacatgtcaagaattattatttagtgtgtttatccactttgaaatatgtaaatgctcgtttcactttttaatcatttaacagattgaagtaaaaggatgtgtgaaaatggctaaaaatagtatttctgatttttgtgtctctatactctatctacataaccctttccttgaacttcaaaaataattatgtattatgcccatattttgtttatactatgctataaaaatggtgaaatgttcactgtcccattttagctattcataaaatggaaatgccccatcaaagctggttttttgacattatagattttttttagaatgaaaatactgcagggggtaaatatattatccaaaccctctggggttagcctggaaagttttagttccccggaaattggatcactggaattaaaaaaagggaaaagcccctcctggggaaaaaataaagtagcggtagttccaaaacataggaaaaattcaggaaaacaaagagcagtcgaaatagagcggcgtataataaatctgaagcgaagttggg

SEQ ID NO: 40305 - DNA, 426 bp, Macaca Mulatta
tccacctcatatataaaagtacaatatgaagccttcatttaatctctgcagtgcatctcatttcaaatgtttacagaagcatttcattgaaagtagtactgtaaatatcctgccatagaaatacttccatctacatgctgtctcattcaagaattcatcatcacacttcataggctgtctttgacagtgggtgttcccattttgattcactactctttatttcatggagtcatatcgacgtcacgaacacaaggctgtgatacagaaccagaaggctgtctgaacttctgaaactttgtgtgggattggtggtgctgccaaggcacggaaggctagaacgagcgagagaaggaaagagtgcagagggacagttgatgaggcatcatgaatattttaacttgtagagatgtgtctctcaatcctgta

SEQ ID NO: 40306 - DNA, 497 bp, Macaca Mulatta
tttggagatcttgttctaagtgtagagaggactgacgtggccctgtcccctcaacgcatcccagggtcaggcaagtctcagctgaaacaatgtcagggtcctcaagggtcccatttagacagacccatggcttgtaccagtgcgcctctcaggaggcagcattagctcacacccactcccactggacactgagttcccagtgatggctgcagcctccagccctaccaggagtcctgaagacagcagccctcagagaccctgcaggaatgagcgcaccccaccttgctcagctgcaccccactcccctgtgccctgtagttgtgctgcccatgctccacacaccatggggctcctctgctcatttttggactatttatacggcaggtttggatcatgtttttctactaacaagaatgctaacattgttgtgtagataatcagtgaggcctttatgaagtttacacctttgcattattaaaggaaataacagttcatgt

SEQ ID NO: 40307 - DNA, 382 bp, Macaca Mulatta
  misc_feature (1)...(382): n = A,T,C or G
agcacctggaggctgccagccagcagaagcagcagctaacggcccagctgcgcctcacggctctccctnnnnnnnnnnnnnnnnnnnnnnnnnnnnnnnnnnnnnnnnnnnnnnnnnnnnnnnnnnnnnnnnnnnnnnnnnnnnnnnnnnnnnnnnnnnnnnnnnnggtggcatgtttcaaatccgctggagccagtgcccagggggagcaggcacggttacgagagcgggtgacagagcagagggtgtactgccagcacctggcttacctggtggcctcggcccagaaggagccagaggcagcggtcccagccccagggactgggggcaagtctgtgagtgcggagacccaccgggccctgcaggaagtcatggagaagct

SEQ ID NO: 40308 - DNA, 722 bp, Macaca Mulatta
gccgggggaaaatacaaatgaggacaaatctgcatctaaggctaaagccaaaaagtcatctgagtcaagaggcacatatccgtccatggtccctggggcaggaatggggtcatgggatggagccatgatctggtcggaaactaagtttccacaccaaagtgaggccagtttcccagttgaagatgagtccagaaaacaaaccaggactggggaaaaacctcggccctggtcttgccgctgtaaacgcgaagctaatatggatccacgagatcttgaaaaactcatttgcatgattgagatgactgaagatccttctgttcatgaaatagccaataatgctttatataacagtgctgattatccttattctcacgaagctgttcgtaatgtaggtggaatttcagttattgaaagcttgctcaataatccctaccccagtgttaggcagaaggctttaaatgcactgaataatatctcagtggctgctgaaaaccataggaaggttaaaacttacttaaaccaagtatgtgaagacaccgtcacctatcccttgaattcaaatgtgcagttagctggactaagattgataaggcatctgactattaccagtgaatatcaccatatggttacaaattatatttcagaattttcttcgttttgttaacaggtggggaagtggaagaaactaaaagatcatggttttggggaatggctctttggaa

SEQ ID NO: 40309 - DNA, 1061 bp, Macaca Mulatta
  misc_feature (1)...(1061): n = A,T,C or G
atgggttggaagatggcgtctcccacagacggnnnnnnnnnnnnnnnnnnnnnnnnnnnnnnnnnnnnnnnnnnnnnnnnnnnnnnnnnnnnnnnnnnnnnnnnnnnnnnnnnnnnnnnnnnnnnnnnnnnnnnnnnnnnnnnnnnnnnnnnnnnnnnnnnnnnnnnnnnnnnnnnnnnnnnnnnnnnnnnnnnnnnnnnnnnnnnnnnnnnnnnnnnnnnnnnnnnnnnnnnnnnnnnnnnnnnnnnnnnnnnnnnnnnnnnnnnnnnnnnnnnnnnnnnnnnnnnnnnnnnnnnnnnnnnnnnnnnnnnnnnnnnnnnnnnnnnnnnnnnnnnnnnnnnnnnnnnnnnnnnnnnnnnnnnnnnnnnnnnnnnnnnnnnnnnnnnnnnnnnnnnnnnnnnnnnnnnnnnnnnnnnnnnnnnnnnnnnnnnnnnnnnnnnnnnnnnnnnnnnnnnnnnnnnnnnnnnnnnnnnnnnnnnnnnnnnnnnnngcactctacgcatctgaggacattcagcagcaagagaagaatctgctctacccaaggatcattgcagttactcagtcagctttcagacttgaaccttcttagcctcggatattggtaacagctgagggcatatcattcttaaaggtcaaagtccttttttctcatttctggaagtgattcaggagccccaggatcttacggttgatttgactcagtcatggcagtcagttgtgacatgttgattggatgggttcttttgaattgttcttgatctcttaggaagtgtttttgatgcaaggagaccagagaccaactagattctggaccagaccatgcagcctgacctgtgaactctccagtatatactaagttcccagaatccccagctggagaaaccagaatcttcttgaaatgtacatctgttttttaaaacttctatacctcttatgatagtcccatttgcttttcattccttacttcccagccccaccttccagttctgacttcgggcaaagggatccctgagtccctcctggaattagcttgtatagtgaaaggcccatccaaggtt

SEQ ID NO: 40310 - DNA, 477 bp, Macaca Mulatta
aatgttaccttttccttccaagaagttctcccaggctaggaccagctgcccattctgagctcagggcagcctcttcaaccattactgacctaacctggcttgtcaggaaaccaaccccacccttccacattgggcctggctgttctattctgtatcacgtactggagagaaagcgtcaagttcttagcccttgtagcttctcttctagtttcccatcctctctctgtggaggccaaaccaactctttgtcagtagccacaacatgtgttgacggcggcacagtgagatagaattgacgaactttgaacctgattggccggggaagctgtaggggtggatagagctggctttccttctgggctgtctccatctgaccctaccccttccatgtcccaccccactcccaccaaaaagtacaaaatcaggatgtttttcactgtccattgctttgtgttttaataaacaatttgcagtgac

SEQ ID NO: 40311 - DNA, 666 bp, Macaca Mulatta
gtcagttgtgagaccggagtgtgacccagtgggtggcccacgaaccggcgacacagcgacaggcgtcagggctcgggagctgcgagcctggcctcgtcttagagctctgccgagccgccgtcgacccccgcccccagtcagcaaaccgccgccgcgggcgcgcccccgctctgcgctgtctctccgatggcgtccgcctcaggggccatggcgaagcacgagcagatcctggtcctcgacccgcccacagacctcaaattcaaaggccccttcacagatgtagtcactacaaatcttaaattgcgaaatccgtcggatagaaaagtgtgtttcaaagtgaagactacagcacctcgccggtactgtgtgaggcccaacagtggaatcattgacccagggtcaactgtgactgtttcagtaatgctacagccctttgactatgatccgaatgaaaagagtaaacacaagtttatggtacagacaatttttgctccaccaaacacttcagatatggaagctgtgtggaaagaggcaaaacctgatgaattaatggattccaaatggacactgtgtattggaaatgcctaaatgaaactgacaaatcgaatgacatggaacctagcaaaacccgttccactgaaatgcatctaaacaagatggacctat

SEQ ID NO: 40312 - DNA, 3641 bp, Macaca Mulatta
  misc_feature (1)...(3641): n = A,T,C or G
gctctggtatcgagactttagtggaggagctctgctccagactgaaagaccttcagagtaagcaagnagaagagaagattcacaaaaagttagaggggtctccctctccagaggcagaattatcccctccagcaaaggatcaagtggaaatgtnnnnnnnnnnnnnnnnnnnnnnnnnnnnnnnnnnnnnnnnnnnnnnnnnnnnnnnnnnnnnnnnnnnnnnnnnnnnnnnnnnnnnnnnnnnnnnnnnnnnnnnnnnnnnnnnnnnnnnnnnnnnnnnnnnnnnnnnnnnnnnnnnnnnnnnnnnnnnnnnnnnnnnnnnnnnnnnnnnnnnnnnnnnnnnnnnnnnnnnnnnnnnnnnnnnnnnnnnnnnnnnnnnnnnnnnnnnnnnnnnnnnnnnnnnnnnnnnnnnnnnnnnnnnnnnnnnnnnnnnnnnnnnnnnnnnnnnnnnnnnnnnnnnnnnnnnnnnnnnnnnnnnnnnnnnnnnnnnnnnnnnnnnnnnnnnnnnnnnnnnnnnnnnnnnnnnnnnnnnnnnnnnnnnnnnnnnnnnnnnnnnnnnnnnnnnnnnnnnnnnnnnnnnnnnnnnnnnnnnnnnnnnnnnnnnnnnnnnnnnnnnnnnnnnnnnnnnnnnnnnnnnnnnnnnnnnnnnnnnnnnnnnnnnnnnnnnnnnnnnnnnnnnnnnnnnnnnnnnnnnnnnnnnnnnnnnnnnnnnnnnnnnnnnnnnnnnnnnnnnnnnnnnnnnnnnnnnnnnnnnnnnnnnnnnnnnnnnnnnnnnnnnnnnnnnnnnnnnnnnnnnnnnnnnnnnnnnnnnnnnnnnnnnnnnnnnnnnnnnnnnnnnnnnnnnnnnnnnnnnnnnnnnnnnnnnnnnnnnnnnnnnnnnnnnnnnnnnnnnnnnnnnnnnnnnnnnnnnnnnnnnnnnnnnnnnnnnnnnnnnnnnnnnnnnnnnnnnnnnnnnnnnnnnnnnnnnnnnnnnnnnnnnnnnnnnnnnnnnnnnnnnnnnnnnnnnnnnnnnnnnnnnnnnnnnnnnnnnnnnnnnnnnnnnnnnnnnnnnnnnnnnnnnnnnnnnnnnnnnnnnnnnnnnnnnnnnnnnnnnnnnnnnnnnnnnnnnnnnnnnnnnnnnnnnnnnnnnnnnnnnnnnnnnnnnnnnnnnnnnnnnnnnnnnnnnnnnnnnnnnnnnnnnnnnnnnnnnnnnnnnnnnnnnnnnnnnnnnnnnnnnnnnnnnnnnnnnnnnnnnnnnnnnnnnnnnnnnnnnnnnnnnnnnnnnnnnnnnnnnnnnnnnnnnnnnnnnnnnnnnnnnnnnnnnnnnnnnnnnnnnnnnnnnnnnnnnnnnnnnnnnnnnnnnnnnnnnnnnnnnnnnnnnnnnnnnnnnnnnnnnnnnnnnnnnnnnnnnnnnnnnnnnnnnnnnnnnnnnnnnnnnnnnnnnnnnnnnnnnnnnnnnnnnnnnnnnnnnnnnnnnnnnnnnnnnnnnnnnnnnnnnnnnnnnnnnnnnnnnnnnnnnnnnnnnnnnnnnnnnnnnnnnnnnnnnnnnnnnnnnnnnnnnnnnnnnnnnnnnnnnnnnnnnnnnnnnnnnnnnnnnnnnnnnnnnnnnnnnnnnnnnnnnnnnnnnnnnnnnnnnnnnnnnnnnnnnnnnnnnnnnnnnnnnnnnnnnnnnnnnnnnnnnnnnnnnnnnnnnnnnnnnnnnnnnnnnnnnnnnnnnnnnnnnnnnnnnnnnnnnnnnnnnnnnnnnnnnnnnnnnnnnnnnnnnnnnnnnnnnnnnnnnnnnnnnnnnnnnnnnnnnnnnnnnnnnnnnnnnnnnnnnnnnnnnnnnnnnnnnnnnnnnnnnnnnnnnnnnnnnnnnnnnnnnnnnnnnnnnnnnnnnnnnnnnnnnnnnnnnnnnnnnnnnnnnnnnnnnnnnnnnnnnnnnnnnnnnnnnnnnnnnnnnnnnnnnnnnnnnnnnnnnnnnnnnnnnnnnnnnnnnnnnnnnnnnnnnnnnnnnnnnnnnnnnnnnnnnnnnnnnnnnnnnnnnnnnnnnnnnnnnnnnnnnnnnnnnnnnnnnnnnnnnnnnnnnnnnnnnnnnnnnnnnnnnnnnnnnnnnnnnnnnnnnnnnnnnnnnnnnnnnnnnnnnnnnnnnnnnnnnnnnnnnnnnnnnnnnnnnnnnnnnnnnnnnnnnnnnnnnnnnnnnnnnnnnnnnnnnnnnnnnnnnnnnnnnnnnnnnnnnnnnnnnnnnnnnnnnnnnnnnnnnnnnnnnnnnnnnnnnnnnnnnnnnnnnnnnnnnnnnnnnnnnnnnnnnnnnnnnnnnnnnnnnnnnnnnnnnnnnnnnnnnnnnnnnnnnnnnnnnnnnnnnnnnnnnnnnnnnnnnnnnnnnnnnnnnnnnnnnnnnnnnnnnnnnnnnnnnnnnnnnnnnnnnnnnnnnnnnnnnnnnnnnnnnnnnnnnnnnnnnnnnnnnnnnnnnnnnnnnnnnnnnnnnnnnnnnnnnnnnnnnnnnnnnnnnnnnnnnnnnnnnnnnnnnnnnnnnnnnnnnnnnnnnnnnnnnnnnnnnnnnnnnnnnnnnnnnnnnnnnnnnnnnnnnnnnnnnnnnnnnnnnnnnnnnnnnnnnnnnnnnnnnnnnnnnnnnnnnnnnnnnnnnnnnnnnnnnnnnnnnnnnnnnnnnnnnnnnnnnnnnnnnnnnnnnnnnnnnnnnnnnnnnnnnnnnnnnnnnnnnnnnnnnnnnnnnnnnnnnnnnnnnnnnnnnnnnnnnnnnnnnnnnnnnnnnnnnnnnnnnnnnnnnnnnnnnnnnnnnnnnnnnnnnnnnnnnnnnnnnnnnnnnnnnnnnnnnnnnnnnnnnnnnnnnnnnnnnnnnnnnnnnnnnnnnnnnnnnnnnnnnnnnnnnnnnnnnnnnnnnnnnnnnnnnnnnnnnnnnnnnnnnnnnnnnnnnnnnnnnnnnnnnnnnnnnnnnnnnnnnnnnnnnnnnnnnnnnnnnnnnnnnnnnnnnnnnnnnnnnnnnnnnnnnnnnnnnnnnnnnnnnnnnnnnnnnnnnnnnnnnnnnnnnnnnnnnnnnnnnnnnnnnnnnnnnnnnnnnnnnnnnnnnnnnnnnnnnnnnnnnnnnnnnnnnnnnnnnnnnnnnnnnnnnnnnnnnnnnnnnnnnnnnnnnnnnnnnnnnnnnnnnnnnnnnnnnnnnnnnnnnnnnnnnnnnnnnnnnnnnnnnnnnnnnnnnnnnnnnnnnnnnnnnnnnnnnnnnnnnnnnnnnnnnnnnnnnnnnnnnnnnnnnnnnnnnnnnnnnnnnnnnnnnnnnnnnnnnnnnnnnnnnnnnnnnnnnnnnnnnnnnnnnnnnnnnnnnnnnnnnnnnnnnnnnnnnnnnnnnnnnnnnnnnnnnnnnnnnnnnnnnnnnnnnnnnnnnnnnnnnnnnnnnnnnnnnnnnnnnnnnnnnnnnnnnnnnnnnnnnnnnnnnnnnnnnnnnnnnnnnnnnnnnnnnnnnnnnnnnnnnnnnnnnnnnnnnnnnnnnnnnnnnnnnnnnnnnnnnnnnnnnnnnnnnnnnnnnnnnnnnnnnnnnnnnnnnnnnnnnnnnnnnnnnnnnnnnnnnnagaatgttacacaaatgccaagggagagagtggtttagaagaatgtccagatgctaaagagacacccagtaatgaagagcgcctgttagattttaatagggt

SEQ ID NO: 40313 - DNA, 633 bp, Macaca Mulatta
  misc_feature (1)...(633): n = A,T,C or G
cggcggtctttgctgccgcccgggggcgcagaggccgggccttttctttcagcacaaacgtcagtttgtaaaagggtggggctggagtctgaggagttttcaggcttctgtctcgaaggaagtctggcaggctcggaattgccatcttcctcaggcaaatagtttttcaccttagagccagccttggcaaggccaaaccgcccagtcacccgacttcccacagtctcagcaggtacacagggccgggagcctcgcgagcggctctctcagccggacctgagggtttcgggagagtcctgggtttgcacttagttttcccgctgcgtggctgcctccgtggcggttgtgctgctttttatgcaagatctgggatcgaaggcaaatcatcctttccctacgccccctgccgacccttgccgctctcctcgattttgtacactgtcattaaagggtttgaaatgaatgnnnnnnnnnnnnnnnnnncatctataatttggaagccaagtcgtaacaaaatgaaaccagtaaagcatctgttgaccaccagtaacaaatcggcaactcttccagcattaaccagcaaaaaaggactacataatttaccactatcacctaaactgaaggaaaaacata

SEQ ID NO: 40314 - DNA, 353 bp, Macaca Mulatta
cctttcctaaatctttaccagtaaatagatgctgggctcttcgttccctagcaatcagctatgctctgctgcccctacctggcttaagactgcctaagcctcagcaggaaggagaaaagttgacctgagctaagggctctccacgcaataaacctgagtttatggtgagtgtaaactggattaggttttcaattgtttgtgaaagacactagagacagcagaagaggatgacctttcagtttcagggaataagatcagcaagccctaaagaaccttgattaaatttgggtattcctaaggctccttagctacaacctgcatacctggattgctcttacaaatagctgaacacg

SEQ ID NO: 40315 - DNA, 782 bp, Macaca Mulatta
ggatacacagaagaaattaagtgtggtaaataaattagtttgatatgttcagtttgttaacttttaagagtattttataccaactagggaaatttggccattaaatacactggtgattaagtgacaacagcttttaaagattttttcttctttaaacaaagaactaggtacaaactaatacaaaaaggaatgccttttgtttcaaatctttggagtcacaattgtgtgttggactgccgtgtgaaggtatgtataaatgtgtaatgtgtttgcaatcactttattatgtaccaaactagggcaaaaaacatggaagccttcccctttcgttcaccgtcaatcaatcaatcaatcatacgtggttgtggaaactgcacctgtacttacgccttcagaaacagcagcgtacacaggctgacaggaaaaacagaacgcattgcatatgccccttaattggcatatgccccaaatccaaccaaaagtgtaattttcaagtaacccaaaaagagccaagcaatagggtcattaaacaaaagactgggatactatcatcttttgaaacaagaacgctctaaacccctacaatacctattcaccaaatacggagaaacccattaaatgggttttaagctggggtaattttcactttttctcaccattaatttccttcaccctttaactcgtatgggaaagccccacaacttatataaaaggggtaccagcagtggaaaaaataaaccaattgggggctcttgaaacaaaaaatggcgagacaggccccc

SEQ ID NO: 40316 - DNA, 679 bp, Macaca Mulatta
aggacaaagcattatataatcacttatgacttagttctctggaagggtatacttatcttgattgggtaagtataagtggtaactggtagcagatagcaacaaacttaacgtaaaatagaactacccccacctctttcctcctccccagtgcagaagagaggcagtgaaaagggtggttatgtaggtgtagaggactctaggaggctcttgtgacttgattggtgttcagtcttcctgttgagcctatcaacatggcctcaaggaagggagccattgcaaaagttttgcctgctgtttgttaagccacagcttgtagttttggttgcacatgacaaagcaaggtgctttccttttttgaccttgttcagaggcttaatacaattatttgtattaagcactagccacctgttaggatcattctcattaaaggtcactgtgtggtgcctgactgtctgactatggcagcctacatcagatatgctagtggctcctggtttgtgtgacacctgccaatagtaacagaaagaatggagatctgatagctgaaagggaacagaaggtactggaggagaaatgaggaatcaggagaaccatggagcacctgccactctagcaccattaccatggattttggtgctaccttgcctagtctaccttttctccggctaccccttcagtg

SEQ ID NO: 40317 - DNA, 761 bp, Macaca Mulatta
tcacgcctgagctctcctgatgcttgtacagtgtctccatgccatcagacagcaatgcttatatgtttagcattttgtcatgcagtttctcttctgttcccacggagatatttttggacaaaaaaatgacaaactcaaaagtacatgtgtttttccccaccgatctcttagaaaacctaatgtgtgtactgctacttttaaaaccaaaaagagacagcatgacgatgcataaagcatttttcttaacctttcctttgtcttgatctgttgttaacaagaataaaattgccagacttaaaatactctactattgtgctaaaagaaatacaatttagattgcacaaaatttgaaaatataactcagctgtcttttaaaagagttgtgttgttatctacaagactattagcagtcttttttcagagcaaattttaacagctagttgtgagtggtttaaaatatagaaaatattaaaatcttagtttgaagggttttatagtgggagaaaaaaacaggaccaaagtttatgtgccttcttcagtagtcttaattgaccttttcttcctatttgagactaaagtagtatcagtattctggttttcaggaaatatgtactatatagttttaaaagaatgtcatcccaccaaatatctatccaagcaaagaatcgtaactgtagaaatgaagtctcagttacacttttgcctttatcacataatattcattatagagcatcgtgcaggtccaagaatagagctgcttg

SEQ ID NO: 40318 - DNA, 884 bp, Macaca Mulatta
  misc_feature (1)...(884): n = A,T,C or G
gnnnnnnnnnnnnnnnnnnnnnnnnnnnnnnnnnnnnnnnnnnnnnnnnnnnnnnnnnnnnnnnnnnnnnnnnnnnnnnnnnnnnnnnnnnnnnnnnnnnnnnnnnnnnnnnnnnnnnnnnnnnnnnnnnnnnnnnnnnnnnnnnnnnnnnnnnnnnnnnnnnnnnnnnnnnnnnnnnnnnnnnnnnnnnnnnnnnnnnnnnnnnnnnnnnnnnnnnnnnnnnnnnnnnnnnnnnnnnnnnnnnnnnnnnnnnnnnnnnnnnnnnnnnnnnnnnnnnnnnnnnnnnnnnnnnnnnnnnnnnnnnnnnnnnnnnnnnnnnnnnnnnnnnnnnnnnnnnnnnnnnnnnnnnnnnnnnnnnnnnnnnnnnnnnnnnnnnnnnnnnnnnnnnnnnnnnnnnnnnnnnnnnnnnnnnnnnnnnnnnnnnnnnnnnnnnnnnnnnnnnnnnnnnnnnnnnnnnnnnnnnnnnnnnnnnnnnnnnnnnnnnnnnnnnnnnnnnnnnnnnnnnnnnnnnnnnnnnnnnnnnnnnnnnnnnnnnnnnnnnnnnnnnnnnnnnnnnnnnnnnnnnnnnnnnnnnnnnnnnnnnnnnnnnnnnnnnnnnnnnnnnnnnnnnnnnnnnnnnnnnnnnnnnnnnnnnnnnnncatttgcaagaacaaatagttcctttgcccgcagtactccttaaaacctaggtggggctacggcgcataaattaccaaattttactcccccatttccttatacccccctttaatcagaaaataacctaagcctttacacacgattctccctccataatttaattccccttaatgggcgggcgcaattaaatccatttaaaaccaggcgccccttaaacacttgtccacttctcgcaaaacaaaac

SEQ ID NO: 40319 - DNA, 543 bp, Macaca Mulatta
  misc_feature (1)...(543): n = A,T,C or G
gaagcccaagatgacagcatattaaagtgagtgaccccgtgaccctctctctggagcagcagcggatgaataaagcttcctgtgatgtnnnnnnnnnnnnnnnnnnnnnnnnnnnnnnnnnnnnnnnnnnnnnnnnnnnnnnnnnnnnnnnnnnnnnnnnnnnnnnnnnnnnnnnnnnnnnnnnnnnnnnnnnnnnnnnnnnnnnnnnnnnnnnnnnnnnnnnnnnnnnnnnnnnnnnnnnnnnnnnnnnnnnnnnnnnnnnnnnnnnnnnnnnnnnnnnnnnnnnnnnnnnnnnnnnnnnnnnnnnnnnnnnnnnnnnnnnnnnnnnnnnnnnnnnnnnnnnnnnnnnnnnnnnnnnnnnnnnnnnnnnnnnnnnnnnnnnnnnnnnnnnnnnnnnnnnnnnnnnnnnnnnnnnnnnnnnnnnnnnnnnnnnnnnnnnnnnnnnnnnnnnnnnnnnnnnnnnnnnnnnnnnnnnnnnnnnnnnnnnnnnnnnnnnnnnnnnnnnnnnnnnnnnnnnnnnnnnnnnnnnnnnnnnnnnnnnnn

SEQ ID NO: 40320 - DNA, 588 bp, Macaca Mulatta
ggctgggcagcccttgggcgccgtcctgggctgggggccaccctggccgcgtggtcaccggcaagaagcccggggcctcacccaggcgcgggggcagggggaaggaccggaccctcccgaagtcgcggacccctaccgggcggcacccgagctggggtggcctctaccgcgagctaagctggccgcgccgcatctcaccgtccccggggcccgagcgctgcgcctggaccagggccgagcgagggggccaagcggccggctggacccacagtccccgtgccataggcgggtcggggctttcagacccggcttcagccctcgaacccggtagccttggaggtcagcttgagatgactgctcttcctgcgcgggttgtcctccccaaaaacgtccaaaatggcaaagaggcgtccgtggccgctcgaggccctccctgcctgggttctcccctgccgaacctcactcccggcccctccctcattctctcgtggccaggctccccctgccccttgggcgagtccgctgcctcccacggtcctgactgtggcatttctgcgtgtctggagggctctccgcgacagcgacgtc

SEQ ID NO: 40321 - DNA, 860 bp, Macaca Mulatta
accatggacccccgcaaagtgaacgagcttcaggcccttgtgaaaatatgtaagcaggatctgagcattctgcacgccgaggaaatgcgcttcctgaggaagggggtggagagcatgggggtaaagtaccacctgctactcagaaatctaaatcagaagaaaataccaagtggaaaaaaaacctgacagtaagaaggtgcaggaagacttaaagacagacaaaccatcaagtgaggaaagtgatctagaaattgataaagaaggtgtgattaaaccagacactgatgcccctcaagaaatgggagatgaaaatgcagaggtaacagaggagatgagatcaggcaaatgataagaaagtggctgctattgaagccctaaatgatggtgaactacagaaagccattgacttattcacaaataccatcaagctaaatttgcacttggccattttgtatgccaagagggtcagcgtcttcgtcaaattaaagaagccaaatgctgccatccgagactgtgacacaggcattgaaataaatcctgattcagctcagccttacaaatggcaagtgaaagcacacagacgcctaggccactgggaagatgcacccatgatcttgcccttgcctgtaaattgttttacgatgaagatactagtacgatgctgaaagaaattcaacctagggcacaggaaattgcagaagaaagtatgagcgaaacatgaagagccagagaacaaagaacagaaagagttaagacggctcgagaagagcgtgagagagcccgggaggaggaataagccagaccacagtaagaagctcaggatggctcttttccaggtggctttcctgggggaatgcctg

SEQ ID NO: 40322 - DNA, 868 bp, Macaca Mulatta
ttataatactcaatctcaatcttcaggtcagtgtcagtaggtggcaaggatcacctattctgtcactccagcagaaagaggcatgtatgtacagtttaccactgtagacacacatctgtaaacttgcacactaattttaatcttaacaaggaatttcagtgtcttagtggttttaagtcaaaaggatggttcaagcattgtgtcctttgttctttagggttacgatagcttattggaaaacccagagccttctggatctgtgaggtagtagacttcaaccctcattcatgcatagatcacacttctccaaagttggtatggcctgtctccttggcatgttcccttgcttctgcttgtccagttaatcctttctgacataccatgcatctcagggtgaagcggttgacatcagtaaactgtctccttcttctagcttcatctgctaattccagtgcttgtacaagaacaatatcatcattagaggagaaaatggtcagaggaggtgtatctggatcagggaagttacgctgaagtggatcatagtggatgccatcataaataagcagaacccttttagtatatcctgcatcttccccaaaacgatcaattcttactgtctgtgtatccactacacatatttcacattggtaaaacttggacaaaatcgatatctctattgctcctccccaagtgtcatcccttttgatccagtcacagtactcttgatttgtttttccctagtattgcctcactatagaagtctggatcgcttgctacaatttgtgctatgaggcgtctcatctcaggggcacaagctggattcaagactcctccttcgacgacatagtacacactgtaaagaggcaag

SEQ ID NO: 40323 - DNA, 793 bp, Macaca Mulatta
  misc_feature (1)...(793): n = A,T,C or G
gggcttacccaagtaattggcaaaaatgttcatcacattactgnnnnnnnnnnnnnnnnnnnnnncagcttacacagtcatcaagaggaaagtgaatgaatgagctttgctggactattcattcattggaataaaatttaactatgaatcatacagcttcatgtatcaacatagatcagtctcaaaaatcatgttgtcaaaaatcatgttgaatgtaagttgtgaaacttattggccttgtaagagcctaaatgttatttagaaaggcattgggtaaatagccactatgtctttggtatcatgagtgatttcaggaggctggggaaacagtggaatttttgaattccatttttccatgtgaagaggaactccttcctctactgggtattctgaaaactgactaacctttgccccaggttgcaagccaaggagaggaagtatttacctgtatagctacctcctccagtcaggccacatgaccctccaggattactgctgctcttcagtctccaaaatgcagacagaagatagacgctcgggtctcagttccaattttgtttctttggctatgctgttatgagtctatccattcatgtatgtttcaagggtcatgcanagagatgcttggacagaaattgggatcacatctctggctctgtctcaacaagactgttggggatatcatgtttcgaggagaggtaggattcaaaccacggaggagattggtgggagtgaattatattagggtttttttggaaatgcccctcagggcaagagcattctctttgtttca

SEQ ID NO: 40324 - DNA, 680 bp, Macaca Mulatta
  misc_feature (1)...(680): n = A,T,C or G
catggcaaaggaatcagttttgtgtatcatttacagtgagctctcttgnaaataattgcctcagtcacaacttttacattttgggaaccataccattagaactgaatattaggaactatgatcttttgtcttttcacaattgacaatatattcagaacttatttctgataaagctgggcagtttctaaggatactgtacttatgatttaaagtcatgactccattatggaaaagagaacaagaaatatgtttcaatgactgccttttaaattagttgtactnnnnnnnnnnnnnnnnnnnnnntgacaggatcatttgaggccaggagttcaagacagcctgccagaccttgttnnnnnnnnnnnnnnnnnnnnnnnnnnngttccgggcctggtggcccatnnnnnnnnnnnnnnnnngnnnnnnnnnnnnnnnnngaggatggcttgggcctaggaggttgaggccacagtgaactgtgattacaccacaggnnnnnnnnnnnnnnnnnnnnnnnnnnncctgtnnnnnnnnnnnnnnnnnnnnnnnnnnnnnnnnnnnnnnnnnnnnnnnnnnnnnnnnnnnnnnnnnnnnnnnnnnnnnnnnnnnnnnnnnnnnnnnnnnnnnnnnnnnnnnnnnnnngcgttaccaacttaatcggcttgcagcaatcccccttt

SEQ ID NO: 40325 - DNA, 206 bp, Macaca Mulatta
  misc_feature (1)...(206): n = A,T,C or G
gggatactgacaacataaacacactagattttagactttcagtctttcagagttttaaaaacgtgtcaggagtagtctgaatggtgcgtgactccatacccatggttttgggttatatggttatttgtacagtcgtaacctcacaaagcagggaccactagcggtagtnnnnnnnnnnnnnnnnnnnnnnnnnnnnnnnnnnnnnn

SEQ ID NO: 40326 - DNA, 727 bp, Macaca Mulatta
gggcatgtccggaatatgagtttcctttttggcacgtagcaaaagggctgtgctgagtctgaaattaacttgccttcctgcggcgggaaagagagcctactcataatatcatagcatcgtatgtcacctggggcgatttgcttctccatttcttcacatggctctggaaatctccttagtccagccctctaggccatgggtccttaacagaaggcatttgatggccaacatagggttccctgagatatttggaatttcacacaaaatatgtacaatatttgcatgatatggcatggcttgtatcagctccttaaaagaatctatacatctccccccaaattacttacttaattaaaatgttaggagtcacatacttactgtggaaatgaagagtgatcataaactgagggtacacagaaaaatgctttactttattctaagtcatgagagccaaatttgttacaccaaagaaaattgaagcaatagatggaaagttgttctcacaatatttttcaaagttctagatgtaccagaagtggttccacgtctttttgcatacttgggtctcctttgctggcaaagaaagcccaactgaaaaaatccgcggccatgtaaagtggttatacattaaaaaacaatgggggcttcaaaaagaagtgggaatgtgtgcccccagccttctattcaagggaaatcccttgaagcctgaaaatcagaaataaaaaat

SEQ ID NO: 40327 - DNA, 677 bp, Macaca Mulatta
  misc_feature (1)...(677): n = A,T,C or G
gggggactacttctggggcggactccttggtagtctgttagtgggagatacttgtcgcccttcgcctccttcaacgccgcagaccccttcaagttctagtcatgcgtgagtgcatctccatnnnnnnnnnnnnnnnnnnngtccagattggcaatgcctgctgggagctctactgcctggaacatggcatccagcctgatggccagatgccaagtgacaagaccattgggggaggagatgattccttcaacaccttcttcagtgagacgggcgctggcaagcatgtgccccgggccgtgtttgtagacctagaacctactgtcattgatgaagttcgcactggcacctaccgtcagctcttccaccctgagcaactcatcacaggcaaggaagatgctgccaataactatgcccgagggcactacaccattggcaaggagatcattgacctcgtgttggaccgaattcgcaagctggctgaccagtgcaccggtctccagggcttcttggttttccacagctttggtgggggaactggttctgggttcacctccctgctcatggaacgtctctcagttgattatggcaagaaatccaagctggagttctctatttaccagcgccccaggtttcacagctgtagttgagcactaaactctatccttcctcctcacacc

SEQ ID NO: 40328 - DNA, 631 bp, Macaca Mulatta
  misc_feature (1)...(631): n = A,T,C or G
ggggaggttagtggaaaattacagtcaaagggggttgtgctcttgtgggcaggggtgggggggtcacaaggcgctcagtgggggagcttctgagccaggagatggaatttcacaaggttccttatcacaggaagaaaattttccttgacctttaggtgcttttatattcatctcaaaaacaaaattctgaactcaggacttggcaagtgtctctatgttgtctcctagaatgggtagtcctgcttcttttacccagttactttccctattcttgaaatgtggctatcacttctctacacattacctccatgatttggaatggaaaaggccacttttctttttgttctgcctctcaaattcaacacagaggagctcctaggattccagttatcctgccaacatctccaggaagaaagaagcaactcgcatgggtcttctgctgtttgcttacttataaagacatcatttgcaagcnnnnnnnnnnnnnnnnnnnnnnnnnnnnnnnnnnnnnnnnnnnnnnnnnnnnnnnnnnnnnnnnnnnnnnnnnnnnnnnnnnnnnnnnnnnnnnnnnnnnnnnnnnnnnnnnnnnnnnnnnnnnnnnnnnnnnnnnnnnnnnnnnnnnnnnnncccc

SEQ ID NO: 40329 - DNA, 4007 bp, Macaca Mulatta
  misc_feature (1)...(4007): n = A,T,C or G
gacaaagcggtcgccgcccccgcccggccccctggtctctgtctccgtcccacctcctttgctgnnnnnnnnnnnnnnnnnnnnnnnnnnnnnnnnnnnnnnnnnnnnnnnnnnnnnnnnnnnnnnnnnnnnnnnnnnnnnnnnnnnnnnnnnnnnnnnnnnnnnnnnnnnnnnnnnnnnnnnnnnnnnnnnnnnnnnnnnnnnnnnnnnnnnnnnnnnnnnnnnnnnnnnnnnnnnnnnnnnnnnnnnnnnnnnnnnnnnnnnnnnnnnnnnnnnnnnnnnnnnnnnnnnnnnnnnnnnnnnnnnnnnnnnnnnnnnnnnnnnnnnnnnnnnnnnnnnnnnnnnnnnnnnnnnnnnnnnnnnnnnnnnnnnnnnnnnnnnnnnnnnnnnnnnnnnnnnnnnnnnnnnnnnnnnnnnnnnnnnnnnnnnnnnnnnnnnnnnnnnnnnnnnnnnnnnnnnnnnnnnnnnnnnnnnnnnnnnnnnnnnnnnnnnnnnnnnnnnnnnnnnnnnnnnnnnnnnnnnnnnnnnnnnnnnnnnnnnnnnnnnnnnnnnnnnnnnnnnnnnnnnnnnnnnnnnnnnnnnnnnnnnnnnnnnnnnnnnnnnnnnnnnnnnnnnnnnnnnnnnnnnnnnnnnnnnnnnnnnnnnnnnnnnnnnnnnnnnnnnnnnnnnnnnnnnnnnnnnnnnnnnnnnnnnnnnnnnnnnnnnnnnnnnnnnnnnnnnnnnnnnnnnnnnnnnnnnnnnnnnnnnnnnnnnnnnnnnnnnnnnnnnnnnnnnnnnnnnnnnnnnnnnnnnnnnnnnnnnnnnnnnnnnnnnnnnnnnnnnnnnnnnnnnnnnnnnnnnnnnnnnnnnnnnnnnnnnnnnnnnnnnnnnnnnnnnnnnnnnnnnnnnnnnnnnnnnnnnnnnnnnnnnnnnnnnnnnnnnnnnnnnnnnnnnnnnnnnnnnnnnnnnnnnnnnnnnnnnnnnnnnnnnnnnnnnnnnnnnnnnnnnnnnnnnnnnnnnnnnnnnnnnnnnnnnnnnnnnnnnnnnnnnnnnnnnnnnnnnnnnnnnnnnnnnnnnnnnnnnnnnnnnnnnnnnnnnnnnnnnnnnnnnnnnnnnnnnnnnnnnnnnnnnnnnnnnnnnnnnnnnnnnnnnnnnnnnnnnnnnnnnnnnnnnnnnnnnnnnnnnnnnnnnnnnnnnnnnnnnnnnnnnnnnnnnnnnnnnnnnnnnnnnnnnnnnnnnnnnnnnnnnnnnnnnnnnnnnnnnnnnnnnnnnnnnnnnnnncccccagtgctccctaccctcacctcaaggcgaccatggccaccatcccagactggaagctacagctgctagccaggcgccggcaggaggaggcgtccgttcgaggccgggagaaagcagaacgggaacgcctgtcccagatgccagcctggaagcgagggctcctggagcgccgccgggccaagcttgggctgtcccctggggagcctagccctgtgccggggactgcagaggctggccctccagacccagatgagtcttcggtccttctggaggctattgggccagtgcaccagaaccgattcatccggcaggagcnnnnnnnnnnnnnnnnnnnnnacaaaggagtgaagagctgctagcagagagaaagcctgtgcctctggaggcccgggagcggagacccagccctggggagatgcgggatcagagccccaagggaagagagtcaagagaagagagactaagtcccagggagaccagagagaggagactggggatagggggagcccaagagtccagcctgaggcctctggaggctcgggactggaggcaaagcccaggagaggtgggagacaggagctcccgactgtcagagccatggaaatggaggctgagtcctggagaaactccagagcggagtctgagactagcagagtctcgagagcaaagccccaggagaaaagaggtggaaagtagactgagcccaggggaatctgcctaccagaagttgggcctgacagaggcccataaatggagacctgactccagagagtctcaggaacagagtttggtacaactggaggcaacagagtggaggctgaggtcaggagaagaaagacaaggctactcggaaaaatgtggcagaaaagaagagtggccagttccaggggtggctccggaagagactacagagctgtccgagaccctgacaagggaggcccaaggcagcagttccacaggaatggaggcagcagagcagaggcctgtggaagatggcgagaggggcatgaagccagcagaagggtggaaatggaccctgaactccgggaaggctcgagaatggacacccagggacatagaggctcaaactcagaaaccagaaccttcagagtcagnnnnnnnnnnnnnnnnnnnnnnnnnnnnnnnnnnnnnnnnnnnnnnnnnnnnnnnnnnnnnnnnnnnnnnnnnnnnnnnnnnnnnnnnnnnnnnnnnnnnnnnnnnnnnnnnnnnnnnnnnnnnnnnnnnnnnnnnnnnnnnnnnnnnnnnnnnnnnnnnnnnnnnnnnnnnnnnnnnnnnnnnnnnnnnnnnnnnnnnnnnnnnnnnnnnnnnnnnnnnnnnnnnnnnnnnnnnnnnnnnnnnnnnnnnnnnnnnnnnnnnnnnnnnnnnnnnnnnnnnnnnnnnnnnnnnnnnnnnnnnnnnnnnnnnnnnnnnnnnnnnnnnnnnnnnnnnnnnnnnnnnnnnnnnnnnnnnnnnnnnnnnnnnnnnnnnnnnnnnnnnnnnnnnnnnnnnnnnnnnnnnnnnnnnnnnnnnnnnnnnnnnnnnnnnnnnnnnnnnnnnnnnnnnnnnnnnnnnnnnnnnnnnnnnnnnnnnnnnnnnnnnnnnnnnnnnnnnnnnnnnnnnnnnnnnnnnnnnnnnnnnnnnnnnnnnnnnnnnnnnnnnnnnnnnnnnnnnnnnnnnnnnnnnnnnnnnnnnnnnnnnnnnnnnnnnnnnnnnnnnnnnnnnnnnnnnnnnnnnnnnnnnnnnnnnnnnnnnnnnnnnnnnnnnnnnnnnnnnnnnnnnnnnnnnnnnnnnnnnnnnnnnnnnnnnnnnnnnnnnnnnnnnnnnnnnnnnnnnnnnnnnnnnnnnnnnnnngatgagtcctgccggcggtgaccatcttcaacatagggatatacctccttccttcttataactgaagatcctggatcccggaagattcagggcagcagaccctgataatgagcctggcagggaagagcaacaaccaacatcttgtaacttgctttccccaccctgattgtgggggcagagccaattnnnnnnnnnnnnnnnnnnnnnnnnnnnnnnnnnnnnnnnnnnnnnnnnnnnnnnnnnnnnnnnnnnnnnnnnnnnnnnnnnnnnnnnnnnnnnnnnnnnnnnnnnnnnnnnnnnnnnnnnnnnnnnnnnnnnnnnnnnnnnnnnnnnnnnnnnnnnnnnnnnnnnnnnnnnnnnnnnnnnccatcccgtggggactcttgggatttaagcactcatctctctcgaggcccagagcccactccatttataggcacatctccctcatttcctaggtcactgcccctttgtttacagctcctgcctcctccttgaccacagcctggtttacaaattccaccagctcccagccccacctgccaaagtcccaggtttacaagccacgcttacttgctgtgtctgcgtggaattctttcctctctcccctccagtcttctcattggagtgacctgaaggtgtggcttcctccactttttctcagtattactttgccttagttttccccaagagggaaggctggaaatcttaactctgtacccgttgatacttatttaattctgtttctcctagtggttcacaattgaactgaattgagatggtgtcgggtggctaaggagacccctcacctctcctcccacattgtgccgcctttatcaattgcctgnnnnnnnnnnnnnnnnnnnaactttccataataaaatggagttctc

SEQ ID NO: 40330 - DNA, 701 bp, Macaca Mulatta
  misc_feature (1)...(701): n = A,T,C or G
aggatgtcaagtatctggttattcttggtgaagggctgaagggagcagacattgcccaagtctctgtggataagaggctaaagactatacttaaagatgccacactcactaggctaggccaaggacagcaacaagtgttcaaaggattgaatgataaagtgaagaagaaagctctaacatcatttgnatcatttgaaagggattccatcttcagcaacttgactgggcagcttgattagcaatgttttaaaggtcgacatggtgattgaagctgtgtttgaaggccttagtcttaagcacagagtgctaaaggaagtagaagcagtggttccagatcactgtgtctttgccagtaacacatctgctttcccaatcagtgaaatcgctgctgtcagcaaaagacctgagaaggtgattggcatgcactacttctctcccattgacaagatgcagctgctggagatgattacaactgagaaaacttccaaagacaccagtgcttcagctgtagcagtcggtctcaagcaggcaaaggtcatcattgtggttaaggatggacctggcttctataccaccagatgtctttcgcccatgatgtctgaagtcatctgaatcctccaggaaggagttgacctcaagaagctggattccctgaccacaagctttggctttcctgtgggtgccgccacactggtggatga

SEQ ID NO: 40331 - DNA, 755 bp, Macaca Mulatta
aggctgcaagattaaggccttgagggccaagaccaacacctacatcaagactccggtgagaggcgaggaaccagtgttcatggtgacagggcggcgggaggacgtggccaccgcccggcgggaaatcatctcagcagcggagcacttctccatgatccgtgcctcccgcaacaagtcaggtgccgcctttggcgtagctcctgccctgcctggccaggtgaccatccgtgtgcgggtgccctaccgcgtggtggggctggtggtgggccccaaaggggcaaccatcaagcgcatccagcagcaaaccaacacatacattatcacaccaagccgtgaccgcgaccccgtgttcgagatcacgggtgccccaggcaacgtggagcgtgcgcgcgaggagatcgagacgcacatcgcggtgcgcactggcaagatcctcgagtacaacaatgaaaacgacttcctggcggggagccccgacgctgcactcgatagccgctactccgacgcttggcgggtgcacccgcccggctgcaagcccctctccaccttccggcagaacagcctgggctgcatcggcgagtgcggagtggactctggctttgaggccccacgcctgggtgagcagggcggggactttggctacggcgggtacctctttccgggctatggcgtgggcaagcaggatgtgtactacggcgtggcggagactagccccccgctgtgggcgggccaggagaacgccacgcccacctccg

SEQ ID NO: 40332 - DNA, 493 bp, Macaca Mulatta
  misc_feature (1)...(493): n = A,T,C or G
ggggtaaatactacattctttcactaaaaataaaaaagcgtaagttggataacttatgttttggacatggacttcttttgactaatatgaaagtattttttctcgtagagaaggtaaaattaattaaaagatttccttttgttgtttatagatgtcattttaaactgagactttaggcnnnnnnnnnnnnnnnnnnnnnnnnnnnnnnnnnnnnnagaatactgaggtgggcagattacttgaggnnnnnnnnnnnnnnnnnnnnnnnnnnnnnnnnnnnnnnnnnnnnnnnnnnnnnnnnnnnnnnnnnnnnagggtgtggtggtannnnnnnnnnnnnnnnnnncctcggannnnnnnnnnnnnnnnnntgtnnnnnnnnnnnnnnnnnnnnnnnnnnnnnnnnnnnnnngtgccactgcgctccagctnnnnnnnnnnnnnnnnnnnnnnnnnnnnngcnnannanannnnanaaaaaanaanccttgtc

SEQ ID NO: 40333 - DNA, 732 bp, Macaca Mulatta
  misc_feature (1)...(732): n = A,T,C or G
ggggcggtagaggtgacctgactctctgaggctcattttgcagttgttgaaattgtccccgcagttttcagccatgtctgaaccaatcagagtccttgtgactggagcagctggtcaaattgcatattcactgctgtatagtattggaaatggatccgtctttggtaaagatcagcctataattcttgtgctgttggatatcacccccatgatgggtgtcctggacggtgtcctaatggaactgcaagactgtgcccttcccctcctgaaagatgtcatcgcaacagataaagaagaggttgcccttcaaaagaccctggatgtgggccatttctccgtggggctcccatgccnnnnnnnnnnnnnnnnnctnnnnnnnnnnnnnnnnttttacctggaaaagcaaaatgtggaaaaaatctttcaaaaatcccccagggggtggcaaccccnnnnnnnnnnnnnntannnnnnnnnnnnnnnnnnnnnnggttttaaagggggttaattgggttttttggggggtaaaaaccccccaacccccaaaaataaccccaaaactttgggccctctgaaaaaatggggcggttcccccaaaaaattttgggggggtctcccccccatttcccaatatctccccccccagagggggggggaaaaaacaacctctttccccnnttttttctcctcttggagcaannnnnnnnnnnnnnnnnnncccttcccaacccc

SEQ ID NO: 40334 - DNA, 647 bp, Macaca Mulatta
  misc_feature (1)...(647): n = A,T,C or G
gctcaagacagagcctgtggctggatttttccatgtctttgtgcaggaactatgggttgttggcatccaacactctgagcttaaagactgatttttaaaattgctatctgcagtatgtaaaaaactctgatttctcacatgctctgagactgctttttgtttcctttggttttatgctttagtgctggactttggttgccagagtgtgccagatactggagtcgtccttaaagcaactttccctttcttatagtcatcaatttttagttnnnnnnnnnnnnnnnnnnnnnnnnnnnnnnnnnnnnnnnnnnnnnnnnnnnnnnnnnnnnnnnnnnnnnnnnnnnnnnnnnnnnnnnnnnnnnnntgaatggaacccctcttgaccaaagtgaccccagaaaaaccttaaaactgagttcctggccatgacaggatgggagatcagacacgcttcattatacccccgtctcttttatggtttagacacaacaactgaccagcattaatgtcaaattaaagatcataaggctgacggaacagaccctttgtggcaataacaaattattcataagacctaaggccatgccaggcaagtgttatgtcatgaacgcctacacttaaagaataaactatattctaactgccac

SEQ ID NO: 40335 - DNA, 868 bp, Macaca Mulatta
agcgtggcgtgtgttgggttcttcttggtccagagggcctgtccacacacgggtggtcaggacaagatcttcctatctgtccagcccagcgctctggtgcctcagggaggacacatgactcttcggtgtcactatcgtcgtggcctttacaactttaccaacttcactctgtacaaagacgacagaagccacgttcccatcttccacaacagaatattccaggagagcttcctcatgggccctgtgactccggcagacgcagggacctacagatgtcggggttcatacccgcactcccccactgagtggtcggcactcagtgaccccctggcgatcatggtcacaggtcccctggtgaaatcaggagagacggtcaccctacaatgttcatcagataccgtgtttgagcacttccttctgcacagtgaggtgaactttgagaagcccttgcaccttgttggagagctccatggtgggggttcccaggccaactattccatcaattccaagacgtctgaccttgcagagacctacagatgctacggttctgtcactcactccccctatgtgttgtcagctcccagtgaccccctggacatcgtgatcacaggtatcaccagacacctgcctattgtgattaggtactcggtggccaccatcatcttcaccatcctcctcttctttctccttcgtcgttggtgctccgacaaaaagagactctgaagaacaagaccctcaggaggtgacatacgcacagttggatcactgcgctttcacacggggaaaaatcactcgcccttctcagaggcccaagagacccccaacagataccagcgtgtacatagagcttccagatgctgagcccaga

SEQ ID NO: 40336 - DNA, 773 bp, Macaca Mulatta
ggggttccaaaggccgttctgcaatgatgaagggggatgattgaaaagagctggactaaattagtctaactaggacacttgaaggcttgtgaatcagttcacacgatcagtgtgaagagcgggtatgaagacccagatgctggtgtgtgcgtgtgcgtataagccccaacagttctggcggtcagaagtccgaaatgggtcttacacgaccaaaatccagaagtcgacagggaggaagaactgaggatcctacatcctgtgagggagcagcgagagcactgcagggaaacagtgtgaatccaagaagatgtcattgagtgcaaacacagtcctggagctgggcccgttgggcgtcaacctcaggagctattaatctacatgcttcaatttattcccgggtcgagaaagtgctcttcttggtctgcgggcaagaacagcttccttcccttccttccagcagcctgcactatcttctgtgacaatggcctctgccagaccacgtcccattcccccaggacattttctgtcttaactggagctgtttaaattttccagtaccataaacaagaactctgggcagaaatttaaatatgataaccaaagtttataccctcccccctttctccagggggttcctttagcaaacagctcttacctttttttccaaccccccttggcttacaccctggcttttccccaatcgttttggttaaaactgattttttccaaaacagctccaaaatcccctcctcgaaacttaaccctttcttaag

SEQ ID NO: 40337 - DNA, 593 bp, Macaca Mulatta
  misc_feature (1)...(593): n = A,T,C or G
aagccgggcatgctcagagattgccgctccaaaaagaggctctagatgagcagctgtcccaggtccgagaggccgaccggcacccgggcagccccagacgggaacttcctcatgcagccggtgcaggagacgcttcagaccactcgggaagccctgnnnnnnnnnnnnnnnnnnnnnnnnnnnnnnnnnnnnnnnnnnnnnnnnnnnnnnnnnnnnnnnnnnnnnnnnnnnnnnnnnnnnnnnnnnnnnnnnnnnnnnnnnnnnnnnnnnnnnnnnnnnnnnnnnnnnnnnnnnnnnnnnnnnnnnnnnnnnnnnnnnnnnnnnnnnnnnnnnnnnnnnnnnnnnnnnnnnnnnnnnnnnnnnnnnnnnnnnnnnnnnnnnnnnnnnnnnnnnnnnnnnnnnnnnnnnnnnnnnnnnnnnngagacagagagccggaatcataaggagacccagttccttgaacgaccttgatcaaagtcaggatgagagagaagtcgatttcttgaagcttcagattgtggagcagcaaaacctcatagatgaactatctaagnagacccttgagaccgccggctatgtgaagagcgtgtta

SEQ ID NO: 40338 - DNA, 769 bp, Macaca Mulatta
gggcttgcctgctgccctgtaagattcgtcttgcttccccttcatcgtccaccatgagcgtgaggccttccaagccatgtggaactgtgacaagagctgcaaatacctcagtgctaatggagttataagtttatcattgctcgaaagcaatttctcaacaaatgcttatgaaatttaacttcatttgacactgcctaggcaatgcttggcccatagtgacatttgataaatacctgatgattgagagaagaagaacataagtgatcagcaccttactgggttatcctctggagttctttggctcaacttacatgaaacctactctagtaaatttaaaggaaaaggtgaatacattggaaggctggaaaggaactggtagaattttttaaaaccctgaaagccagacctcgggaaggatgggtcctgaggaagcagcggggattttcgcagtaggaactgggctctaagcaacgtctaactgtgtcacgttgatggagaagcagactggatcaaggctcacctctacaccctgggggcagtgcatctgatcacccctgccggatgatgtcctgggatgaaaaagcacctagtacaacaaaggaaaacggaagaatatactaatcactgggacatgggattagtgttggcaagcccagccccaaaaccagaaatcccacttctaccccctttaaattttcataagggtttgaagggtaggtaccctcaaatgggccccagaaaatcaccttggaaaaaagcggggaaataa

SEQ ID NO: 40339 - DNA, 1045 bp, Macaca Mulatta
  misc_feature (1)...(1045): n = A,T,C or G
ggcaaannnnnnnnnnnnnnnnnnnnnnnnnnnncagcccaggaaacaaaagtgtattaaattagtttaatataaaggaatttataagactttttttcctcaaaagatgtcctacatttagcaactgggtgggactggtacttttctacgacttggttaataagagacacacaactacacgggggagaaatagatgataggaagcaagacggagtagctcttgctctgacctacaagcgttgggagaatacttattatttattagacactagcttgatatgaaagagtaaagagggagtaagaaacaacatatggcgcctgagcgagatagtcgaagcgagtaagaaaaaaagaaataggcaaaagaaggaaaatagcaataaacagttcatcaatacaacattaaagcacataatataaataatgtaacgcaaatatttattaagaaatgtcagaaagtacaaaataagaaacaataaataaacaactacatccatcagatgtcacgctgctatgtttacctattctggattcaagtacatatattcctccctggcccctctagagcagtgcacctcaagcggagccattaagccacagctgtgcttgccgacttgcatactgacctttctcctaggcgtaaatcgtacagactataacacaaaacatgcattgcacgcagcaacagaaactaaaccacagagggaacagtaaaacggcaagaagaataacatgatacacacctcttcggaaggataggatagtaggacaatacatatagactaacttacacatattgagtatgaggtgggcagggaacaccacgacgtaaatgaaacgaagatggacaggaatgcggcagaaggccngcgcccgtaaaactaagatgacataatatcggaggagaacgaagcaaggtgagtctgagtatatgtcgccagtcacgnctgtacagactaataagatatacgccacaacagaaagacgtactatacgagagatattgctaatgatacaaccancgagtctatcgctatcaaccagc

SEQ ID NO: 40340 - DNA, 883 bp, Macaca Mulatta
  misc_feature (1)...(883): n = A,T,C or G
ggggggggggctttgctcctgtgcccgcccccttttgaagtgcttgttctcaaggagtgatctggcttcatagcagcctggcattggctttggtaagtccctcccttcatttctttagatttagtagctgtattatgatctgaaagattaccaaatcttgtaacgtaattggaattctagtatgtcctatagactcctttcaaagtcaggaaatggtcagtacttaccagagagggttttctcagtgaaatcataatatcctgtgaaacaatttaaatatgggatgtccatggggaaaaactaaaatcttctctttgatttttttctataagtggagaatttattatctgaaagctcctcagaagttcaaaaaccccgatgtaaagaattactaatgatcattctcattactgtagtgtttcttataaaacacaacccttcttttcacctctatgaaagaaaccagtactacacatttattattccttcactcctagtggtgtccccctctccttttccagatggaaacacaaagttcattattgaattaatttgaatactattggcaagcttaaaaattgattctttccgggaatataaaaaagttttacaaacaattcctttaaagccttcctttttcctcctgatcgttttcccaaaaaattgtccaatttaaatatttcccatgaatgaaatcccaaatattttttttcaacatgggccttttgaatggggcaaaaaaataatgttttccttccctccaatctctnnnnnnnnnnnnnnnnnnnnnnnnnnnnnnataccttgaagaataaggcttttacctaataattttgctctccttccccacaaaattaaattccctcctttttaaaatagaaan

SEQ ID NO: 40341 - DNA, 2256 bp, Macaca Mulatta
  misc_feature (1)...(2256): n = A,T,C or G
ttctggtggtcatagacaacataggcttttgtgcaaagttggttgatggctagtaaattaatgtcacttggagatagcttttgatattttcaatgaaacccatctcaaaaaaaggtaagtattaaatgttaacatcagcacagaggtattagaacnnnnnnnnnnnnnnnnnnnnnnnnnnnactttattccccagactggagtgcagtggtgtaatctgggcttactgcaacctccacctcctggattcgagtgattctcgtgcctcagtnnnnnnnnnnnnnnnnnnnnnnagtgtgtgccacacttnnnnnnnnnnnnnnnnnnnnnnnnnnnnngtgcagtttctttgtgttacccaggctggtcccaaaactcctggcctcaagtgatctnnnnnnnnnnnnnnnnnnnnnnnttannnnnnnnnnnnnnnnnnnnnnnnntcggcctgtagaacttttaacacaagtcacatttcttttttgaaagggaaagtgtgtacaagattaactgcttctttggatgaatcgttgctaataaaaagctgggcatttagaattttgccttataagcccttctcaaccataagattattttgtacctaaaactttggtgttctctaccaaagcagtcgttaaaaacttgtagtctgctactttttgtatttgtctactgacagcccccgatactatttaggttgggggaggggacctaaaataagtaactagactttaacatttccctcgggtgctaatcatagttggaagttgaatttaaggtgattattcgggtgacaattaaaaacctagggaaaaccagaaatcttagtagtggaagaaatgtgtaaggttaccccaatcagattttaatgaacgttgtggaatgttgggaagaggggatgttgaatgcagaatttcactaagtaaagtacttagtttaaatttattaaggatgtagctctttttatgtaagaatttaatataatggccaaaaggcagatttactgtttaaaatttgaataattttacatgacattcttgaagttctaaattctgttttatgtgtagaacatttttaaaattcagattattaaggggaaaataaatgattaatgatcattttgtaaggttaatgtgagctagacttaagcaaactttggttcatttgtgttcattgaatgttttggaaaccaccaaaaaaatgtaaatggcccttcactcaagttttgagtgttttaaagttgaaagatgtgcctctactaaaagtttacaggtaatttctaaactttcacatttggaaatgagacagcattccttgttatacaggctgaatttgaagattagagaggacctcatgtttacttatgaaaggtaaaggggcatagattttgtagttaagatgaccagacagctaaaagctgtgatgggaagtatggactgctcctatttatagtttcagaaaatggacctttaggtctctatccatattggcaattattaaagtcacacccttttgaaactacaaaagctgtcttggaatttccccttctccctatttatgtccccttagaatgttttagggagcctataattattttctaaccaaggaaaaacttaagtctctttaagaagcaattatttttcataacatcagattgaataacccaccttgctgttcagcccacatcctactggaaacaaaaggtaagaaaaccattttctgggttcctgattgtttggggtctgaattttgtttttaaaacgaagcttagtttaatattttcaaaaatgctggtttgggaatatggtgaatagattccccataaaatggtttttcctgttttatgctttagaaaatattcagtgctcacgtctgcgcatcatagtacttgcatttaatatgatttattgtagaatctcaacttttcttggtgttgcctttgaaacattgtcttggtcattagggctggggttttcacatttctgtggtcaagggggaatttcttatggggggcctttttgccttacttggatatgaaacttggaaatttaaaatggccaggaacgtaaaatataagggatttacccactccttagctgtcaaagaacgaacaaactggttaaaactggaaacttcggcttgtaacattaccccactcctttatttcgcctcaccgtattggaaaaatgcgaacccccggcaaagcagatttgcgggccttcctataccctatctttttgaaagccccacaag

SEQ ID NO: 40342 - DNA, 778 bp, Macaca Mulatta
atggaaacaatcacctgtaatggatcaggggactcctcaaccatcttctaccttatgggcatcccctctctgccaaaatgcctcttccttcctattttctttgtctttttcctcctctacatgctcatcctgatgggtaatgccttgatcctggtggctgtggtggcaaagcccagcctccacaagcccatgtacttcttcctaatcaacctctccaccttggacattcttgtcaccacaacaactgtccccaagatgctgtccctattcttgcttggggaccgcttcctcagcttccctgcctgcttcctgcagatgtacctgttccacagcttctcctgctcagaagccttcatcctggtggtcagggcctatgaccgctatgtggctatctgccgcccactgcactaccctgtcctcatgaccccacagaccaacgctgtcttggcaaccagtgcctggctcactgccctcctcctgcccatcccagcagtagtaaggacctcccagatggcatttgacagcattgcccacatctaccactgcttctgtgaccacttggctgtggtccaggcctcctgctctgacactaccccccagaccctcatgggcttctgcatcgccatggtggtgtccttcctcccccttctcctggtgcttctctcctatgtccacgtcttgacctcggtgcttcgcatcaattcccaagaaggatgctccaaagccttctacacctgcagctcccacctcctggtggtgggcacctactactcatcca

SEQ ID NO: 40343 - DNA, 666 bp, Macaca Mulatta
  misc_feature (1)...(666): n = A,T,C or G
aagtctaatgtgtacactacagatgaacccaatgtgccaacttccaaacagtctatagagtattagaagattttacatgttgaagaaggggagcaaatctaaaaaaaattcagttgaacttctgagagttaacatatggtggattatgttgatttagaacttaaaatagatgtgtaaatttgggttcaaaatatagatttgagtccagttcagtttggatgtatgattaattttcaaattatctaaagtttaaaagtaatattcatgatttctggcttttgatttgtcatattcctggtcataaaacattaagaaaattatggctgttgctgtcgttacatatctattaaatgtcatcaaatatgtagtagacaatgctgtaattaggtgaactctaaaactgcaacatctgacaaatagctttaaaaatacaatgattgtaagtannnnnnnnnnnnnnnnnnnnnnnnnnnnnnnnnnnnnnnnnnnnnnnnnnnnnnnnnnnnnnnnnnnnnnnnnnnnnnnnnnnnnnnnnnnnnnnnnnnnnnnnnnnnnnnnnnnnnnnnnnnnnnnnnnnnnnnnnnnnnnnnnnnnnnnnnnnnnnnnnnnnnnnnnnnnnnnnnnnnnnnnnnnnnnnnnnnnnnnnnnnnnnnnnnnnnnnnnnnn

SEQ ID NO: 40344 - DNA, 691 bp, Macaca Mulatta
  misc_feature (1)...(691): n = A,T,C or G
gagttgttctcaggtattcttgctcctagggagtgtcacaaattgaaagacagctnccgtttttttcctgcttctcagaaggcctctgctgagcacgatctctgcggggtagggagctcggcatgtgtgtaatgatagacaggctcatgccctttctcgtggctattntcagctctctggctttatgtttcactttctcttcttaattagatactagaagaacaaatcttgaaaaccaaattccctttctcctcccgtgttcagttaggagtggaagaaaataatttagaatttatgagaacagggtgaagagaaagttaatctacacaaaaaagtcagtccaagagggggaaattctggcagaatgtccccggggtcctttccaacatctttagttggagagaacgttccttcctttgcagaaaaaaaaacactctatgttctggggtgcttccacgttgtttgaagaatccacggctccagtgtcgaatgtgtacaggacagagggacgggttggcttgtgggacagtggaaagggaataagcctgggttctctttccccagtactaggcttcctctagcttctgtccaagtgagggagtctggaagcagattctgggagatcttttttcctgttgttttactctagagccttcagctgcctcagtccctcgccccagcttcgctcccc

SEQ ID NO: 40345 - DNA, 1042 bp, Macaca Mulatta
ctctaattagaacgttttaatgaagcttacgttggcttatgagttataattgtttcgtcccctcagctgagaataaagcgccgtccctctcttatgacgcgagagcgctgtgtataatgcagttcagcgaagatcagattgaaacaaaagctcggtagggccaatatatcagtgctcagagctcttttttctaatctagtgatatgcggtgtgcaagtgaaatatatcccatctatgacctgtatacactatatatacgagtttatggaacacaaggggttgtgtttgacttaggtgtggggaccggacataggaggtagtgtagggggaaccaatatggaatttgttaaaagatggaaatataatatatcataagcactacgatcagtggcgcgataatcctgattatagaggaaaattatgtctcttttcatacaaaaaaagtcttttcattgttctcggcacattttggtttgagtcgttatccttaatctgtgattccatccactcttcctcattgcgggattgtgtttttaaacaacattttctttctattcgtcttttggttagatgtaataggtaggtaaagtttttcggggatatgtttgtaattgttactccagctaaaaagagctgaaagaggtgattttattttagggttgttacattcggccacaaataaacacggaaatagtccagaatgtcacaagtccagggcagaggaccaacatgggcagttttgtttatgagcaaggtgggtctaagaagtgatcggcgatcagagggcgatgaagttctagatccatagagacaagctctagacagtagcatgaagtcccacaacttgtaccagcatccccagcgcctggcattccatgtttctgctcctgtggactccacgatgcaacaagctaagcggtttacttggacctctgcctcatctttcttcttatgcgcttcagcctgcgcattcgcttcttcctccacttggctctcatggcgcagaggtttccagaaaaatggcgctaaggccgagagaccc

SEQ ID NO: 40346 - DNA, 857 bp, Macaca Mulatta
  misc_feature (1)...(857): n = A,T,C or G
gagactgggactantcagagcaggtcttggacttctgtggctctttcagccctttataactagcctgagaagagggtttatctacttgtgcaagtggcccagaaatcactcttacatgaggctttggaaaatccttgcaaaggtacgctgagagtaaattactgttttccaggtggttctgcatgtttcctaacttttgtcacagtttaatgtttattatttaagaaaaattttaaaaaatccaaagaccagaaaatggcattagattttttaccattaaattattaatgcctatttggtgctcataaagattaatcatgtcacgcatgtttccaaactttcttttgcaatatattattttctaaaaattgttatatgcaaatttaaaccaagatttatcagtaaaagaaaaaaatagaatccttgataatgtaaatgttattagatatgctaccctggtgaaaatatttttataaatcatgttgtcatttatgctttatgaatggttattccagtagcctattttttgataaccttttttttaaaagcaattttttttggacaccaagattgttgatttttaattaacaccagttggtggcactagaaacctgaaatttttcaacgatgaacaaagaaaattgaaaaggtatctaacctggagaatttaggaaatactgaacctatatcgttctcgaatgttttcctctggatggattcttttaaatgcatggtatcctttgatgctgataactgtctcgagacaattatcgtgtgttgccaacttatgatacgtgggaatttcgtaagacgtcagaatgtatgtctaaggggggtcaaaaaacgggggcgctttt

SEQ ID NO: 40347 - DNA, 632 bp, Macaca Mulatta
  misc_feature (1)...(632): n = A,T,C or G
caagtaattctcctgcacacctcccatnnnnnnnnnnnnnnnnnnnagcgtcaccatacctggctatnnnnnnnnnnnnnnnnnnnnnnnnnnnncgccatgttgtccaggctcgtcttgaactcctgatctcaagtgatctgcccannnnnnnnnnnnngnnnnnnnnnnnnnnnnnnnnnnnntgccgtgcctggccgcacactgacgtcttaaaggctctgataggaatttacaagttgaaagatgggaatatgttattctcggcagatggaacagcatatgctaaggaaaagacataatgttcgtagaaagtataattgaccatgccctagacacctgaaaactaaatattcaaaacagctaggaaatgcgtaagccctgggtcttgacctcatgaccacagagttgcacaactctggggtaccatttacaatgtcatcaatgtaaggtgttcctccctagagcaaaatgtagatcatattgtgaaaggaggcccctggagatgtacaagttgataaccttgctgtgtgctaactttgctcactcgaaagtttggaaattttcagttttcttctttggagagtctataagatttcttcagattatttgttgttacaatatccgttggg

SEQ ID NO: 40348 - DNA, 814 bp, Macaca Mulatta
  misc_feature (1)...(814): n = A,T,C or G
ctgccgtcttcgcgcttctaggacgccgctctttttctcttccgggcgcttgcgggtcttccctgcgggcaaccaccactttcccctcttcccgcgccttcccctcgcttcccggaccttcccccttggaaccccaacccgctcctctccccaaacacggcccgacgcttcgcatcacagggggctccatgcgcgcagttccagcccctttcacgctgctacgcgcttgatctttgggacagccgtctccgaaattgttgccgcacgatcgcctgcgcacatcggccagaaccntgctcccacttcccagtgtgccttcagttcttcaatttcttcacgcgattcttgaacttccttccatacttgctcctcaccagttagcatatcagcatccttgtcctgggtttggcaacggcaacagtcacattcaaagcagtactggtccctcagctgcttccggcgctcctcgctggtcatcagcatatccaggtagcagatggtgagctcctctcccacctcaatgtcccggacacgctcgcagtaagaggtggggcccattgaacacaatggaacagttggggtcacagctgtgattgagcaaagagatactaggatacaggccaacaccaacttcctgcatctcggcattacagatggtgaaagagttgcagatcacctcaaataactgttaagaattagagacaattaggtaaaattcaaagaaccatgtctgatgtggcacctgcccacttgaaatgtaaccatcttcttctgtagcttctgtagcaagcctctgtatgtggacagcgtgccc

SEQ ID NO: 40349 - DNA, 656 bp, Macaca Mulatta
ggattgggacactgttcgtgttgcctgtggctgttgttcattattttcatggcactgtagtgttacacagcatagaggcgccaacgtttaccgccttctgtgaacgtatattagggatgtttccggtttggggctactatggaagagggctttagaacagcagtgcacatgaactaagattgcggtcgtgtttttcaactggcccctcatctgaaccacagaacagaagtgatctgaagaactattttctctgttctttcaagaatgctgtgtaactagtgccgtcctagacgtgtctgacagagtgagcgtatttcatacgccagatgcctcagtgcagcaagttcctccaacttgaaggcagaatcatggaagaggttttgttgaaacacacgttaccaggccctcacacccagagaatcctgattccgtaaggtcttggggttgggggcccttggaaaatttgccattttctgaacaaagcctccttaaaaagcctgcctgaaaagcctgccaagggccccataaggggccctcacaccctttggaaagaaaccttttttggccctctaaaagggccatattaagggggcgcttttgggaaaatttccttctatgtgcaagaaagaacacccccgagttttttctccccccct

SEQ ID NO: 40350 - DNA, 403 bp, Macaca Mulatta
cctaaaacaccaaaaggacctggttctgtagaagacattaaagcaaaaatgcaagcaagtgtagaaaaagcacattgaacagccctgggcactacatgtaaattaagcccaaagatggggagaaaggaaaaggagagacaaatatagtccattttgagtatcatcaacaatccagactgaagtcttctagtttaatctcaatccccttttctgatttgccacccatgcctcttcaggctggaaacaatctcactcttggttccctaaagcactttcttctgactgctgtggttcagtgaaccttgccctttgctttctattacttgtgcatttgcctcacctctgacaatgttttaaattgcctttgtatctccttatctgaacaataaatatttgaatgaat

SEQ ID NO: 40351 - DNA, 251 bp, Macaca Mulatta
  misc_feature (1)...(251): n = A,T,C or G
tgtagaatttctattgtgcttttcttcctaagagctaggaaactgccttggtgtacaggaatagtaaatgcaggtcggtggttaaggacatgattgcatttggtctatctgaacagaccaatcacaccagtgcagtgacagacatgtaaaggactatagccacaccaaactactggggtcagccctcaaaaaggaaaaacttccacaacttnaaatttaatcttattaaattcatggccntcaggacagcn

SEQ ID NO: 40352 - DNA, 253 bp, Macaca Mulatta
gcagagttccaaaaattatgtagcccagctctttaattttgtaacatctagtgatatcaccgccttgaagtgattaaagcagattgcttaagaattaaagctttaaagatgaaagatgttattgcttttgctggacatgaggaacagttgtaaagtttccaggtctacaataactttctggaaccctctcagtgaactgtttcttgtaaaagttttccctaggaaaaaagctcaatcccattgtttccacgct

SEQ ID NO: 40353 - DNA, 765 bp, Macaca Mulatta
  misc_feature (1)...(765): n = A,T,C or G
ggcatctaattcctctgtggctgcccttgcctaaactagctgtgaactcttgactttgtggtctctgccagggaagtggatggcaagggacctgggactctatcaccaccccgttggcccccacatcccaccacgtggtcagtagtgtgctccatccccctggggttaggagccaggccctgtttccagaaggtcacatgggtggtatcagggtgtttacacagactactcaaggagctgaataggcagcctcaggccgtcattaccctttgggatgcctcctgctcggcattcgcattagaaggttcccgaactgcacccctaccctctttctccccctcccatcttaaggagggtttcttggacttgaatctgtttctccccagcagcagaaccagctctgaatgactagtcttagacatcaaataggtgggaatgacttctttgtcaaagtaatagaagaaatgaatctagaagttctggctgctctcaccaagcctcatgaagtccatgaagaatcggtctgctcttgattccaggatggagggccagtttatccaaagccatttgcttccatgaactccccaatctgcctaactcangaccctaaatttgtgataggagaaaatacattcgaccaggattctgaaacttggggttcattcctaggccagccactggcatggtgatgggagcacaggctttagagggagctatactaggtttaatcctngcccctgtcttttctgggagaagatagcatga

SEQ ID NO: 40354 - DNA, 356 bp, Macaca Mulatta
  misc_feature (1)...(356): n = A,T,C or G
gggttccacagggcttggtcctttttctctttacagcacctccttaatactgtgccattagactgggaaaagacagaagagtttgcacctagatgttgctgtcttcttcttaatacattacacctcatgtattatcacaatttacaattgaggaaatgttagtcatctactgagaacatacagctatgttagtttaggaggcttaggaaatgtttaattaacaaagagatgactgttccacattgtgcatgaatttgttttctgttttctggtttttgctatgagactccagtacaaagaattcatttatttgtttatccnnnnnnnnnnnnnnnnnnnnnnnnnnnnnnnnnnnc

SEQ ID NO: 40355 - DNA, 118 bp, Macaca Mulatta
atggggactccaaatgatcgggcagtgctgcaggccatcttcaaccctgacaccccatttggagatattgttggactggacctcggagaggaagcagaaaaggaagaacgaaaagaag

SEQ ID NO: 40356 - DNA, 796 bp, Macaca Mulatta
  misc_feature (1)...(796): n = A,T,C or G
gggtgtcaagtactgtttaaatcagtattatttgaatacctgctatatttgaacaatagnnnnnnnnnnnnnnnnnnttggactactctggcaaggcctggctaacacacttatttaccatcacaaaaatcaaaagaaatcttaaaggcaacattcccagaagcttgactagaatattttctcgtaacggctcatctactcacaaagcctgtattgcattactataaatatttgctaattaagcaacaaataaaaaaagtatcataaaagaaccataaattcatacaaattgtactagctaaaagaattattaggaagcatttaggtaaacagggcaagaggcagtgattttaagattaagacaatgtagtattggcataaagaaaagcaaatggatcaaatagaacacagagtacaaaaacagatccacacatatacaactaactgaaattttgacaaaggtaccaaggaaatgcaatggggaatggataatctttctaacagatggtgctggagtaattataaatccacatgcaataaagtgaacctcaactgttatctatacctcatacaaaaattaatctgaaatggatcataggctatctaaatataagattttaaaccataaaatttatacaaggaaactataagataaaaatcttagtgacctttggggttttggcaaaggacttccctgaatatggaaagaaaaaagccaaaaactatttaccaannnnnnnnnnnnnnnnnnnnnnatttaaagttagacttacccatttaaaaatgaaaaaacctt

SEQ ID NO: 40357 - DNA, 766 bp, Macaca Mulatta
  misc_feature (1)...(766): n = A,T,C or G
tggccaagggttcccgggcctccccgggggtttcaacgcccaatttctccctgctttcaagccttcccggagttaggctgagaattacaaggcggcccaaccacttgcggcccgggttaaatttttttttctattttttagtggagatggggtttcacccgcattagccaggatggtctcaatctcctgacttcgtgatccgcccnnnnnnnnnnnnnnnnnnngtacaagttagtttcttaatacccttcagtggtggccaattagtggtatttgtggtattattatgttgtcatttgtggtattattatgaactctcagatttatatatatttgatgtgtttcaatccactgtggttattttccctgttgatactcagattgtctcatcttggccagtgggaacttcacattagctcctagtcattttgacattacctgtgtagttttctgtgatatccatgccctcaaatgacaagattattgcaggttcattctgtgccccaggcctgaatcacccgtttctccaaggaatcttaccctttaatgggaaatggaatttcaaggcaataatctgagatttcaaaacattcgaagattttgtaagatttttatgaaatgtttagagttagaaggggctttggagatagtcttgtgcacccggaaagcagtggtggccagttaggcacagagctggttggtcacagagctatgagttaacatggccggctgacttccagtgccagtttccttctaccacatatcc

SEQ ID NO: 40358 - DNA, 783 bp, Macaca Mulatta
  misc_feature (1)...(783): n = A,T,C or G
ggtgtttcagctttctctcacacatttagaggaacagttaagtaaaagataatgcagtcacatgaggggatataacagttatattggaatgtttttcaaaagctttcgataatgtagaataatgcttatagataatgtgagtggaaaagtatgatgcaagggtacacctacgcctgtctcaactgtggaaataatacacatgcatgaaaaaatactggaaagaaataccccaaaatgttaatagaatctatttctggatattaagattatgagtcatttaaattttctcttttagacttttctaaagtttctggaatgatcttgtattatttttataatgaaaaccattttcaaacaggtgagttttgctcgctcctctttggaaatcagcagacctgactaggagaactcatagtcaaagttgagaaaccagcaaaaggcaaaatggattgaacatgggtcttatctgtagagaccattattataaaaataaatgggatggcaggcacagggaggaaggagcaagagcagagggagaggcagagatgacctaacaagtaaaagcacatgatagatatattttggaggaaagaactaccctcaggaaatgggataattttttcagggtaaaatttttcttatattctaagagaaaattaaagtagtaaatggttactgaatggacactaagaagatnaggacctggaaataatttattaagattggaaatgaataaattgacctgggcaaaaaccagcctgtgtcaaaaataaactggaaaat

SEQ ID NO: 40359 - DNA, 164 bp, Macaca Mulatta
gctgtattgtatgaaattctctataaagatgtgtttgttgtggatgaagaagagttgaaaactgcgattaaattgtttcgaagtggttctaagaagaacagaaataatgctgtgactggaagcgaggatgcccatactgattacaagagttcaaatcagaatag

SEQ ID NO: 40360 - DNA, 107 bp, Macaca Mulatta
acagagctcatcttctgtcctgggtgtgaacaagtatatcttaccagggatgtaactgaacatttttttctgcagtgtgttcctactgagcaacccaagatggccag

SEQ ID NO: 40361 - DNA, 1524 bp, Macaca Mulatta
  misc_feature (1)...(1524): n = A,T,C or G
gacgccgagatgcgggtcatggcgccnnnnnnnnnnnnnnnnnnnnnnnnnnnnnnnnnnnnnnnnnnnnnnnnnnnnnnnngctcgcactccttgaggtatttcagcgccggcacgtcccggcccggccgcggggagccccgcttcatctccgtgggctacgtggacgacacgcagttcctgcggttcgacagcgacgccgcgagtccgaggatggagccgcgggcgccgtgggtggagcaggagggtccagagtattgggaccgggagacacagaacnnnnnnnnnnnnnnnnnnnnnnncgagtgggcctggggaacctgcgcggctactacaaccagagcgaggnnnggtctcacaccctccagaagatgtgtggctgcgacctgtggccggacaggcgcctcctccgcgggtattaccagtccgcctacgacggccgggattacatcgccctgatcgaggacctgcgctcctggaccgctgcgggtgaggcggctcagaacacccagcgcaagtgcgaggcggccggtgaggcatagcagcggagagcctacctggagggccggtgcgtggagtggctccgcagatacctggagaacgcgaaggagacgctgcnnnnnncccaaagacacacgtgacccaccaccccgtctctgaccatgaggccaccctgaggtgctgggccctgggcttctaccctgcggagatcacgctgacctggcagcgggatggggaggatcaaactcaggacaccgaacttgtggagaccaggccaggaggagatggaaccttccaaaagtggggagctgtggtggtgccttctggagaagagcagagatacacatgccacgtacagcacgagggattgccggagcccctcaccctgagatgggngagccatcttcccagtccaccatccccatcatgggcattgttgctgnnnnnnnnnnnnnnnnnnnnnnnnnnnnnnnnggagctgtggtcgctgctgtgatgtggaggaggaagagctcaggnnnnnnnnnnnnnnnnnnnnnnnnnnnnnnnnnnnnnnacagtgcccagggctctgatgtgtctctcnnnnnnnnnnagcctgagacaactgtcttgtgtgggactgagaagcaggatttcttcacgcctcccttttgtgacttcaagagactctggcctctctttctgcaaaggcatctgaacgtgtctgtgtccctgttagcataatgtgaggaggtggagggacagcccacccccgtgtccaccgtgacccctgttcccacgctgacctgtgtttcctccccagtcatctttcctgttccagagaggtggggctggatgtctccatctcagtctcaacttcatggtacacagagctgcaacctcttacttccctactaaaaataagaatctgaatagaaatttgttttctcaaatatttgccatgagaagatgatgggttaattaaataagtcaattcctagaacttgagagaggaaataaagacctgagaaccttccagaa

SEQ ID NO: 40362 - DNA, 1116 bp, Macaca Mulatta
  misc_feature (1)...(1116): n = A,T,C or G
gggccccgcccgctaggcaggccacgccccggtacggtcgccatgcccaacagaggaaagccacccaagttccaggcccacgacgcctgcttcggccgagtgaccgagacggattacgccaactcggatccgccggtcgtgaggtctggacgagtcaagaaagccgtagccaacgctgttcagcaggaagtaaaatctctttgtggcttggaagcctctcaggttcctgcagaggaagctctttctggggccggtgnnnnnnnnnnnnnnnnnnnnnnnnnnnnnnnnnnnnnnnnnnnnnnnnnnnnnnnnnnnnnnnnnnnnnnnnnnnnnnnnnnnnnnnnnnnnnnnnnnnnnnnnnnnnnnnnnnnnnnnnnnnnnnnnnnnnnnnnnnnnnnnnnnnnnnnnnnnnnnnnnnnnnnnnnnnnnnnnnnnnnnnnnnnnnnnnnnnnnnnnnnnnnnnnnnnnnnnnnnnnnnnnnnnnnnnnnnnnnnnnnnnnnnnnnnnnnnnnnnnnnnnnnnnnnnnnnnnnnnnnnnnnnnnnnnnnnnnnnnnnnnnnnnnnnnnnnnnnnnnnnnnnnnnnnnnnnnnnnnnnnnnnnnnnnnnnnnnnnnnnnnnnnnnnnnnnnnnnnnnnnnnnnnnnnnnnnnnnnnnnnnnnnnnnnnnnnnnnnnnnnnnnnnnnnnnnnnnnnnnnnnnnnnnnnnnnnnnnnnnnnnnnnnnnnnnnnnnnnnnnnnnnnnnnnnnnnnnnnnnnnnnnnnnnnnnnnnnnnnnnnnnnnnnnnnnnnnnnnnnnnnnnnnnnnnnnnnnnnnnnnnnnnnnnnnnnnnnnnnngatgctcataccaatccagaccagcactgctgcctactgcaggtcaccaccctcagtttcatctgtattccgattgtcatgggcatgatatttactctgtttactatcagtgtgagcacggacatgtggcatcatccagtgagactggtgttccaagattcccctgtccatggtgatcggaaactgcgcagtgagcagggtgtgcaagtcatcctggacccagtgcacagcgttcggctctttgactggtggcatcctcagtacccattctccctgagagc

SEQ ID NO: 40363 - DNA, 612 bp, Macaca Mulatta
  misc_feature (1)...(612): n = A,T,C or G
taaaaatagaaaaattagctggcgtggtggcannnnnnnnnnnnnnnnnnngnnnnnnnnnnnnnnacnnnnnnnnnnnnnnngcccatgaggcnnnnnnnnnnnnnnnnnnnnnnnannnnnnnnnnnnnnnnnnggggcaacagagannnnnnnnnnnnnntgnnnnnnnnnnnnnnnnnnnntgcctttgatcagtgatttcattaagttgactttagaccactggaatttacttaatgtctatttttgcctcttctgaggcatgtgtgcttctctccttatctctttggctataggctaattatttatgtttacataataatatttatgtttgcatgttactaagtgacatattttaaaatgtgatacactcctgtaatttatgagagtatgttaattgctgtgagctttgaaggtgctctagtccttcctcatatttggccttagaatgcaccttggatcccccaagtttaggctttctttgtttgtctttgaaactatatcttctgtctcttgtcatatctgcttattgcgtgtttttcataccttccacctctgtaaaagctgttacctgagcccttgttatcactttcggttgaatgtgctgca

SEQ ID NO: 40364 - DNA, 661 bp, Macaca Mulatta
ctggagagaaaccctacacttgtaatgaatgtggaaaggtcttcaatcatatttcacaccttgcacaacatcggagaattcacactggagagaaaccctacaaatgtaacgaatgtggcaaagtcttcagtcacaagtcatccctagcaaatcactggaggatccatactggagagaaaccttacaaatgtaatgaatgtggcaaggtcttcagtcgcaattcataccttgcccaacatctgctaattcatactggtgagaaaccttttaagtgtgatgaatgtaacaaagcattcagtcaaaattcacatcttgtacaacatcgcagaattcatactggagagaaaccttacaaatgtaatgaatgtggcaaagtcttcagtcaaaattcataccttgcatatcatcggagaattcatactggagaaaagccttataaatgtaatgaatgtgggaaagtcttcagtctgaactcatccctagcacatcatcggaaaattcacactggagagaaaccttacaaatgtaatgaatgtggcaaagctttcagtgtacgttcaagccttactaatcatcatgtgacccatactggagagaaacctttcaaatgtaatgaatgtggcaaactcttccgcgacagttcatatcttgttggtcatca

SEQ ID NO: 40365 - DNA, 93 bp, Macaca Mulatta
ccctgtgctcatggcctatggcttggatcaatctaagatgaactgtgaccaagtgttcagtgttttctgcttgtatagcaatgcggagaaggt

SEQ ID NO: 40366 - DNA, 632 bp, Macaca Mulatta
cttcggcgtcggcgtcgcgcccgcgctggagctctaggccggcgtctctccgcgagcggcgggtcaagtgctggcggctaaaggagcgcgaggagccgccacccgttcggcgttggctctggcgtcggggtcgttgtgtcgtgacaaccgctccggtagccgtttccgaggcagcaggtggggccgctttagccctgagcgggctccgcggctgcctgcgagtctctgctgtgccgacccttctcttcgcggaccccacgccaagcagcgaccctgagccgacagccggagcgcccggcaatggcggcctcgacggcctcgcaccggcccatcaaggggatcctgaagaacaagacctctacgacttcctctatggtggcgtcggccgaacagccccgcgggagtgtcgacgaggagctgagcaaaaaatcccagaagtgggatgaaatgaacatcttggcgacgtatcatccagccgacaaagactatggtttaatgaaaatagatgaaccaagcactccttaccatagtatgatgggtgatgatgaagatgcgtgtagtgacactgagaccactgaagccatggcgccagacatcttagccaagaagttagctgctgctgaaggcttgga

SEQ ID NO: 40367 - DNA, 145 bp, Macaca Mulatta
gttttaagaaaatgttaccttggcgcgggcctcacgggacgcttctgcttctgcagccatagctctctggagctgcacaggtagtttcacatccttgatttccacacgctccacctttattccccaggcatcagtggcatcatcc

SEQ ID NO: 40368 - DNA, 788 bp, Macaca Mulatta
ggatagtaagagggtgttttgtggtgttaggattcccacgccaccaaccttgcagctttgtaagggcgctaccaagacccaccactggggaaatggttcttattcattgtttctgttggaatgtggtcttgctttctggattttaggaattcaggttactcaatataaaactttgagaaatcagtgtgacttagtccttcacctcctaatataaagtgaatatttctttataaaagaattcatgtccttaatgttaaagatattttattttcaaaacatctgtaacatgactttcagaagcagttcatttttccaagattccccacattatactagataaataataggccctcagttaatactcttgggttattgaattaatctagtttgcagaatgaggtgtacctgccaattttcctctgcttccaagtgtactctgagaagtaaaatgctctgggaaatggaacaagaattgagtggatgctgactctgtgtgcccacctcctcaactgattcataatggctgaccttgggcaagtcacttctttcaatgcctcagttccccatctgtcaaatgggggtaataatactgacctacctcacaggggtggtgttgtgaggcattgttaatcaaagtttatagaatacttcagggtcctcctgtggaagatgtcttgagcccggattttaagccctgacacaccggcttttcatcctcactgagctgtcctccaagactgggaactactttatggactccggcaaaattctctgccccccaacccctt

SEQ ID NO: 40369 - DNA, 869 bp, Macaca Mulatta
gggtctcttgtctgccacgatgtgtgagacgtggcttttctcctcactcgccttccagccacgtggaactgattgaggccatcaagctacagagggtcttatgaatggaaccccaaatgagctcaactaacaacttccaccaaggacccctggaccaacctactggtcctttgactggcctagagagttcccctctggaggacactaacactgcagggccccttctttgcccctatccagcaatttatttcctcaggttagagtcctgaagacttcagagcaatgttactatattacaagattactagaatgacaggatccatatgtctacagcagatcttcctggaactcaaacctttcaaggaccacagctgtggcctctactttcctcgcctctgtaatttgtatcatccaaccttaaatctgtggatcacgtaaataatttggctgatgtcacaaagtgagggaagaaaatatttttcttcctccctaaagtcctcatgcttttttcaccctttgaagtggatatgaaatagtgggtcaaaaattcctgcccagaaatcctgatggccctgcccttttacatccctgtggactgccaattttctgagttggccctttgcccaatttaagactccccccaagtgcccttttttttaaaagtcctatcaaaatggggaaataaggaaatatttggtctatattccccaaagggggttgccttggtgaataaactggagggaaatttgcatggtaaaccacatttttaagaagaagtttccttgggcgcccacaggtaaggtgccctaaaaaaaaagtatggggttttaaaatttgccggcctggttgccttgtgggaaaagggaggt

SEQ ID NO: 40370 - DNA, 648 bp, Macaca Mulatta
ggggccccttctgccatgtgaagacaatgaatgactagacacccatctatgagttaggaagcaggccctcaccagccactgaatctgttagttccttgatcttagacttcccagcctccagagctgtaagaagtgaaacagtcacaaatggaatatcaagaaacatgctatagatcagcaccaggcactttggagaaagcataacaagtacaagacatgacctttatcccagttcccaaaggactagcagtctttgggggaagatacactgcctctaggactgggacagatagccactgagtaccagcttcaaatcaccctgcacattttcttgttggaaagataaccactggagaaccatctcgttaccttcagcaaaaatgaaaacaaatcaagacattaagaatgccacagtggacagcagttacgcaaggttcagcagaggaagttttcaagatggtgtgcctcgctagccagaaatcagaaaagatcgaagctagccttttcatctcagctgctccttaaatcagtccaacccctccaaataatgtgaattgaatatgcattgcttttcaacttattgagtacttactatgtgtgaaccactgcacaaaataggggaagaaatgtaggagaaaagcctgcctc

SEQ ID NO: 40371 - DNA, 790 bp, Macaca Mulatta
gggaaactaacctctctttctctgtcaagaagtgcttgcggagatcggatctcttctccagcaatcggggaaaagaagactttttctctgaaatcgcttagtgtaaccagcggcgtaaattttttggacgccttttcgaaaacctagttaaaattcatttgtttaaatctcattttatttttaagctcaaactgcttaagaatatcttcattccttaggaagagtgaaataatttactgcaaaggaatttcctcgatttggtgcatttttttttttattcttccacggtcttttctaactctcaaaccaactccgtcccatcatggtgatgttcaagaagatcaagtcttttgaggtggtctttaacgaccctgaaaaggtgtacggcagtggtgagaaggtggctggccgggtgatactggaagggtgtgaagttactccgcggccaagccgttagggacccttgcttgcggaatggccatagcgctcctggtgcagggatccccctccctgccggaaggactccacacccccggcgcttctaacacactcttcttccgccaataccttcccacacgggcgaaatgcgatgggggctccgggcagcctgggaactccagtgccagtcaaccctctgcgcctttccctttccccgctgcgtcccctcgggcacgctcccttggtccgccacccgtttcgctcgcccgtcttttctaagcgcccccagacgccttccctggtccccgcgcgttctgcttccgccccgcatcccctctcgttccctccacgc

SEQ ID NO: 40372 - DNA, 855 bp, Macaca Mulatta
  misc_feature (1)...(855): n = A,T,C or G
gggtccaataaatactntgagaaagaatttgatccaggagtctggggcagagcccagggctgagcatttccggcatgttcacaggtgatgctgatactgctggcctgaggtgccacagtttgaccgcaatgtatttttctgcagtggggcatattgctctataaatgttcctctgctcttgttctaaaccttcacaccctcataacgagggatttgatcacagtcacaggttctcaaacttgatactagcccacataattcttggttggggtgggctatcctttgtattataggaggcttattagcacccttagcctctacccagtagatcccagtaacatttactagttatgagaaccacaaaacatctccagacattgcccaatgtctctgggggtaaggggtgtgatggggagccacctcccgttttgagagctgctgggtctaacctaaatatttccctgtgaatagttcaggtcccataaaattttattccaaccccacacttttgtagactattttaatttcgggggccctggattaattcatttgagaaaaaaggtatggaagggagtcccaaccaaccttctgggtccccccttgaatttccaagggaaaatcctcaacccctttgggaacggcatttttctcaaaaggggtttccaccttaaacccccttcgttaagggaggccccgggaaaaaacgggcccggttttcccacaaaccgccccctatgtccctgtgtgaaccccccccacacctgggggggggacacccccctttgaatattcggagaagaaggacccgcggggatttcttcatgaaaataatacctaatgaactctataacgcca

SEQ ID NO: 40373 - DNA, 1867 bp, Macaca Mulatta
  misc_feature (1)...(1867): n = A,T,C or G
tctcctgagacgccgagatgcgggtcatggcgccccgaaccctcctcctgctgctctcgggggccctggccctgaccgagacctgggccggctcgcactccttgaggtatttcggcaccaccgtgtcccggcccggccgcggggagccccgcttcatcgccgtgggctacgtggacgacacgcagttcgtgcggttcgacagcgacgccgagagtccgaggatggagccgcgggcgccgtggatggagcaggaggggccggagtattgggaagaggagacacggatcgccaaggcccgcgcacagactgagcgagggaacctgcggaccgcgctccgctactacaaccagagcgagggggggtctcacaccctccagaagatgtgtggctgcgacctggggcccgacgggcgcctcctccgcgggtattaccagtccgcctacgacggcagggattacatcgccctgaacgaggacctgcgctcctggaccgctgcggatgaggcggctcagaacacccagcgcaagtgggaggcggccggtgaggcagagcagcggagagcctacctggagggccggtgcgtggagtggctccgcagatacctggagaacgggaaggagacgctgcagcgcgcggatcccccaaagacacacgtgacccaccaccccgtctctgaccatgaggccaccctgaggtgctgggccctgggcttctaccctgcggagatcacactgacctggcagcgggatggggaggaccaaactcaggacaccgagcttgtggagaccaggccaggaggagatggaaccttccagaagtgggcagctgtggtggtgccttctggagaagagcagagatacacgtgccatgtgcagcatgaggggctgccggagcccctcaccctgagatgggagccatcttcccagtccaccatccccatcgtgggcattgttgctggcctggctgtcctagcagttgtggtcaccggagctgtggtcgctgctgtgatgtggaggaggaagagctcaggtggaaaaggagggagctactctcaggctgcgtccagcgacagtgcccagggctctgatgtgtctctcacggcttgaaaagcctgagacaactgtcttgtgtggaactgagaagcaggatttcttcacgcctctcctttttgaaagagactctggcatctctttctgcaaaggcatctgaatgtgtctgcgtccctgttagcataatgtgaggaggtggagagacagcccacccctgtgtccaccgtgacccctgttcccacgctgacctgtgtttcctccccagtcatctttcctgttccagagaggtggggctggatgtctccatctcagtctcaactttatgtgcactgagctgcaacttcttacttccctactgaaaataagaatctgaatataaatttgttttctcaaatatttgctatgagaggttgatggattaattaaagtagatgatgcctaaaattagagagaggaattaaagacctgagaacctttcccgaaaaagcacgtaatccagcgcatcggaccgcgtttccgtggaccccggctgctaaatccgcccccgcccccgagaaccgcgcggtctctacacagcggttcggcgccgccccgccccgcagactaacaccgtaaatcacagaacggccanntcggtgttgggtgccggggccgcggcggcccgagagaacccttcctttacacccctttgttgaccggggcgcgcgcggccccccgagggctggagacgaaaaacggggtagtcggtcgttcctcggcgggaaaacccctggcgggcaatatgccgcgggggtgggagcctcccccccaaacaaaaa

SEQ ID NO: 40374 - DNA, 263 bp, Macaca Mulatta
  misc_feature (1)...(263): n = A,T,C or G
gtggaatgccatcctactggtggccatgctcctgtgtaaggcctcgtggtccaggcccagcggcaggcgtcgcggcagagccagcgggagctcggaggccaggtgncaggtggacctgtttaagcgccgcgtggtgcggagactggcatccctcaagacacggcgctgccggctgagcagggcggcgcagggcctcccggagccgggtgttgagacctgtgccgtgtgcctggactacttctgcaacaagcaggctagtgccc

SEQ ID NO: 40375 - DNA, 956 bp, Macaca Mulatta
  misc_feature (1)...(956): n = A,T,C or G
gggggctgcgtcgggctgcaggagaagatggcggtctccacaggagttaaagttcctcgtaattttcgcttgttggaagaacttgaagaaggacaaaaaggagtaggcgatggtacggttagctggggccttgaagatgatgaagatatgacactntaccanagggnttggacagngnncncccnnnnnnnnnnnnnnnnnnnnnnnnnnnnnnnnnnnnnnnnnnnnnnnnnnnnnnnnnnnnnnnnnnnnnnnnnnnnnnnnnnnnnnnnnnnnnnnnnnnnnnnnnnnnnnnnnnnnnnnnnnnnnnnnnnnnnnnnnnnnnnnnnnnnnnnnnnnnnnnnnnnnnnnnnnnnnnnnnnnnnnnnnnnnnnnnnnnnnnnnnnnnnnnnnnnnnnnnnnnnnnnnnnnnnnnnnnnnnnnnnnnnnnnnnnnnnnnnnnnnnnnnnnnnnnnnnnnnnnnnnnnnnnnnnnnnnnnnnnnnnnnnnnnnnnnnnnnnnnnnnnnnnnnnnnnnnnnnnnnnnnnnnnnggaacaaacgagaacaacccaaaaacaaagggcaaaggcataaataaacatcgggggcggacgaccaaaaaagaagaaggagaggagaaagcagcgagggagagggcgaaaaaaagaaacacacngccgggggcggaacaaagaaggacaaaaaagaacggagacgaacgcggcggcgcgcgcgaacaaagcgagagagatagagggcatggaactggagtagaggaattaatagagagcgggggcggggactgcgggtatcaaattcattacacacctagactcgactcaggaggtcagactagatgtgggagacattgtgggttggagactagagcagaaaaatagagggggcgaaagcctgtacaatcacaagacgnagcatggggagtaacattgagagtggaagaccggcctaagtcgaa

SEQ ID NO: 40376 - DNA, 806 bp, Macaca Mulatta
gggcctggtgtgattccgtcctgcgctgctgttctctggagcagcgttggtttatctccgtccgccttctctcccacctaagtgcgtgccgccacctgatggaagattcgatggacatggacatgagccccctgaggccccagaactatcttttcggttgtgaactagaggccgacaaagattatcactttaaggtggataatgatgaaaatgagcaccagttatctttaagaacggtcagtttaggggctggtgcaaaggatgaattgcacattgttgaagcagaggcgatgaattacgaaggcagtccgattaaagtaacactggcaactttgaaaatgtctgtacagcccacggtttcccttgggggctttgaaataacaccaccagtggtcttaaggttgaagtggggttcagggcccgtgcctattagtggacagcccttgttactgtggaggaagaagcccaaccctaaaaatgaacaggaggaggattgccaaattcttaaatatttccgggaaaccggttgccccctggaaggggtaacaaagggtcccccgcaaaaaaaggacaacctgcctggctcgctaaacccggcctgtcgtttttcctcccaagacgcccccacgtatccaaacctttccctcgccgtctgcactttcccccccctcggggaaaccctcccaaaaaaagcccccccgctttgagtacaaacctttatctcgtaaccacctcgccgcccccacaaatcgtgcccggacgggcttacctatttcttccaggggcgcccgatgtcctcccacacc

SEQ ID NO: 40377 - DNA, 845 bp, Macaca Mulatta
gggatcttatgtgcctcaccacacactccgatacacacaatggtaactgtgtgaggtaatggatatgttaattagcctgattgtggtaatcatttcataaaaatgtatgactatagcaaaacatcacattatataccttaaatgtatactatttttatttgccaatatctcaatagagctggggtaaaaaatgaaataaaagtacaaaattccaggaaaacctgatacaattttgaaaaaaagaatatggtgcaattttgcgggagaaggcttgttcttgtcaaggtttatactaaagctatagttattaagacagtgtggcattgagtcaatgatagacacatagggaactggattaacattttaagacacattcaattgtgtatggatttagtatatgaggttgtgggatgccttttgtttgtttggttgggtgttttttggagaaagggtctcactttatctttcaaacagaggtgcagttttgctatcatagcttactgcagccttcccctcttgggctcaagtgatcctcccatttcagcctctcaaataattggggactcccggctcatgcccaccataccctggctaaatttttaaattttcctccaaaaaaaggggaaccccaccgattttttctccaacccgatttttttaactccttggcctttcaagaatttccctcccggccttcgggctttccccaaaatggctggggaatccaagggcatggggcttaccccaacccggggccttgagggggggaaagtttttttcaatttaaaaaaaacccatggaaggggggttttttcccaaaaaatgggcaattgggcaacccacaa

SEQ ID NO: 40378 - DNA, 753 bp, Macaca Mulatta
gggatgagtcctaggaggcgctggctcttcggctgttcggaggagcggctgctgctgctgctactagtagcccctttgcagatgtattgctgtccttgaatattagcccatttgaaaacgcctgggaagttcagccatcagtatgtccaagtacaaacttattatgttaagacatggagagggtgcttggaataaggagaaccgtttttgtagctgggtggatcagaaactcaacagtgaaggcatggaggaagctcggaactgtgggaagcaactcaaagcattaaactttgagtttgatcttgtattcacatctgtccttaatcggtccattcacacagcctggctgatcctagaagagctagggcaggaatgggtgcccgtggaaagctcctggcgtctaaatgagcgtcactatggggccttgatcggtctcaacagggagcaaatggctttgaatcatggtgaagaacaagtgaggctctggagaagaagctacaatataaccccgcctcccattgaggagtctcatccttactaccacgaaatctacaacgaccggaggtataaagtatgtgatgtgccccttggatcaactgcccacggtctgaaagcttaaaaggatgtttctggaaaagacttctttccctatttggaatggaaaagaatttgctccctggaagtcctaacgtggccaaaaaccggttctgaaaatctggccccaggggaaattagccagttaagggccaccta

SEQ ID NO: 40379 - DNA, 296 bp, Macaca Mulatta
gaggtgcagctggtgcagtctggggctgaggtgaagaagcctggggcctcagtgaaggtctcctgcaaggcttctggttacaccttcactagctatggtatgaattgggtgcgacaggcccctggacaggggcttgagtgaatgggatggatcatcacctacactgggaacccaacgtatgcccagggcttcacaggacggtttgtcttctccatggacacctctgtcagcacggcatatctgcagatcagcagcctaaaggctgaggacacggccgtgcattactatatgagaga

SEQ ID NO: 40380 - DNA, 847 bp, Macaca Mulatta
  misc_feature (1)...(847): n = A,T,C or G
gggaggggtggggtaaggggaatagttttcaacgtctgttttattccgtgcttcggaggaccttgtttaatctttgattttggtccctgcttctaagaaaagcaactgaaaaggtcgtaatactgcccctcagaagaaaggaacagcgctaagtaatggagaaaatgcctcctcttggaagggatatagagatggaaacagaagatataagaaggattgagaatcatataatacaggagcttaaaaacctgttcgcgataataaagagggtaatgtcagagcgcttggaaaataccaggaagttgggagagttaacagaagggcgcacgctggattggccacaaaatcgaattactgaagtaagtgcaaaaccacaaattgtcacagaatacagagnnnnnnnnnnnnnnnnnnnngaggagaaaaagagagatctagagggccggtccaggagatacagtatatgcataataggaatacctgaaactgaggacagagcaagtagaactgaaacaataattaaggatctaattgaagaagaatttttccagaattgaagaacgaactgggatctacaaatgggaaaggctcacaggggtaccttttaaatttaatgaaaaagaaaaacacctagacatatccctggttgacgtttttttgaatttcaaagacaaagcatttttacaagccatcccacagagagaaaagcaggtttattttacaaaggggggcaaaagtccagacctgaccctcagaaatttttcttctcccattctaaaagccagaagacagtgggaaacaatatttctacagaagtttttaagggaaaaataattttgaagccaaa

SEQ ID NO: 40381 - DNA, 2621 bp, Macaca Mulatta
  misc_feature (1)...(2621): n = A,T,C or G
aatgtgaaagatgttgcagaagtgttccagaagtggctgaagatagaaggaaagaagtgccactgcctatcagnnnnnnnnnnnnnnnncatgggaaatacaaccaccaaattccgtaaagcactcatcaatggtgatgaaaacctggcctgccaaatatagtgaaaacaatcctcagctaaaagaatctctatgatccaaatacatcttatcggggagccctaccagcacaatactccattacattatgctgctagacatggaatgaataaaattttagggnnnnnnnnnnnnnnnnnnnnnnnnnnnnnnnnnnnnnnnnnnnnnnnnnnnnnnnnnnnnnnnnnnnnnnnnnnnnnnnnnnnnnnnnnnnnnnnnnnnnnnnnnnnnnnnnnnnnnnnnnnnnnnnnnnnnnnnnnnnnnnnnnnnnnnnnnnnnnnnnnnnnnnnnnnnnnnnnnnnnnnnnnnnnnnnnnnnnnnnnnnnnnnnnnnnnnnnnnnnnnnnnnnnnnnnnnnnnnnnnnnnnnnnnnnnnnnnnnnnnnnnnnnnnnnnnnnnnnnnnnnnnnnnnnnnnnnnnnnnnnnnnnnnnnnnnnnnnnnnnnnnnnnnnnnnnnnnnnnnnnnnnnnnnnnnnnnnnnnnnnnnnnnnnnnnnnnnnnnnnnnnnnnnnnnnnnnnnnnnnnnnnnnnnnnnnnnnnnnnnnnnnnnnnnnnnnnnnnnnnnnnnnnnnnnnnnnnnnnnnnnnnnnnnnnnnnnnnnnnnnnnnnnnnnnnnnnnnnnnnnnnnnnnnnnnnnnnnnnnnnnnnnnnnnnnnnnnnnnnnnnnnnnnnnnnnnnnnnnnnnnnnnnnnnnnnnnnnnnnnnnnnnnnnnnnnnnnnnnnnnnnnnnnnnnnnnnnnnnnnnnnnnnnnnnnnnnnnnnnnnnnnnnnnnnnnnnnnnnnnnnnnnnnnnnnnnnnnnnnnnnnnnnnnnnnnnnnnnnnnnnnnnnnnnnnnnnnnnnnnnnnnnnnnnnnnnnnnnnnnnnnnnnnnnnnnnnnnnnnnnnnnnnnnnnnnnnnnnnnnnnnnnnnnnnnnnnnnnnnnnnnnnngtgtgacatttgtatgtgcagtatctctgtatttgaagaccccgtggatatgccctgtggacatgacttttgtagaggatgttgggagtcgtnnnnnnnnnnnnnnnnnnnnnnnnnnnnnnnnnnnnnnnnnnnnnnccctgcatatgattggccttcaaacttgtggctgggggatatcatagaaagtgtagtttcaaaggagaggaacaaacgataccttcagtttgatattaaggnaggcctttgttgaaaataatcctgccattaaatggtgtcctactccaggctgtgacagagcagtaagactaacaaaacaagggtcaaatacatctggatctgatacactcagcttcccattgctgagagcgcctgctgttgattgtggaaaaggacacctcttctgctggngggagtgccttggtgaagcacatgagccttgtgactcccaaacatggaagaattggctgcaaaaaataaccgaaatgaaaccagaagaacnnnnnnnnnnnnnnnnnnnnnnnnnnnnnnnnnnnnnnnnnnnnnnnnnnnnnnnnnnnnnnnnnnnnnnnnnnnnnnnnnnnnnnnnnnnnnnnnnnnnnnnnnnnnnnnnnnnnnnnnnnnnnnnnaagtgcaagtatgacttttgctggatttgccttgaagagtggaaaaaacatagttcctccactggaggttattacagatgtactcgctatgaagtcattcagcatgtggaggagcaatccaaggaaatgactgtggaggnnnnnnnnnnnnnnnnnnnnnnnnnnnnnnnnnnnnnnnnnnnnnnnnnnnnnnnnnnnnnnnnnnnnnnnnnnnnnnnnnnnnnnnnnnnnnnnnnnnnnnnnnnnnnnnnnnnnnnnnnnnnnnnnnnnnnnnnnnnnnnnnnnnnnnnnnnnnnnnnnnnnnnnnnnnnnnnnnnnnnnnnnnnnnnnnnnnnnnnnnnnnnnnnnnnnnnnnnnnnnnnnnnnnnnnnnnnnnnnnnnnnnnnnnnnnnnnnnnnnnnnnnnnnnnnnnnnnnnnnnnnnnnnnnnnnnnnnnnnnnnnnnnnnnnnnnnnnnnnnnnnnnnnnnnnnnnnnnnnnnnnnnnnnnnnnnnnnnnnnnnnnnnnnnnnnnnnnnnnnnnnnnnnnnnnnnnnnnnnnnnnnnnnnnnnnnnnnnnnnnnnnnnnnnnnnnnnnnnnnnnnnnnnnnnnnnnnnnnnnnnnnnnnnnnnnnnnnagctttgctggtggaacatgggattgggaatatttaggatttgcatcaccagaggnaggaatatgctgaatttcagtatcggagaaggcacagacagcgtcgtcgaggagacgttcacagtctactcagtatcctccagaccctgannnnnnnnnnnnnnnnnnnnnagatattccagaaggcggcagcagcagccgcaggcctggcacatccgtggtaagttctgcatctatgagtgtgctgcacagctcttccctgcgtgactacacccctgccagtcgctctgaaa

SEQ ID NO: 40382 - DNA, 785 bp, Macaca Mulatta
ttacagcgataggagcgtgtgtgtattttaagggtgggaggaacaggccttacaaaagagtatattcctatcccccaaagagtttgaaaaacctggtggaagcaaatttccaaaatttaaagaaaattccatttggttttttgtagccatcaaaaagccatttataccatgggttatcggaggatgaaccacaaacttctcaaaggtttcccatgccaaatgttttaaactccacacagccccctttttcaaaaacggatttgaccactgcccagattgtcataggttactgctccaggaaaagcttcatacgtttaggtttggcctggcttggccaacttttgcctagagattgatgaggagtccaaggccctaatcccaagcctagaagggtggtttgaagatgaggagctacagcagattcttgatgatatttagaaagcgcacctttcagtattaatctccaaacaacacttggctctttgggagaaccccggccccagcacagcaccactttcccagagtttggggctgacttgcacagaaatcccattgcagaagacagttaggattcttttagagagaacggtccggcttggtgttggattaggttgctgtttcaaataactgttaggccaaaatgacatgtaatcttggagcagccttgcagtggcaacctgtggcttcctcagggtatctccaggaaggataaggtggcggggtgtgtttaagtcacgttgttgactgcctcatgggtttttggctctacatcatcttttattccc

SEQ ID NO: 40383 - DNA, 404 bp, Macaca Mulatta
  misc_feature (1)...(404): n = A,T,C or G
aatcaattattcctttatatgttcataagtacaaattttcactatcttaattacttccaaacaaacaatttccaagcaagggtgtgtgtgcctggtttttctgctcctccaattctaagatcattatttgtttgccttctgtttgtcacccaaaaatacagatggttgggaaagatacatcttactgagttgtcttatgcagtctctgtctatatttgcatttctttctattnnnnnnnnnnnnnnnnnnnnnnnnnnnnnnnnnacacagatttggttttccattccctttgtgaaaatcagtattgagcagcattgtacatcagaggtggtacccaggaaatatctttgttcctcagtattttccttcaaaacttccatgcaaagacagtcccagtaaagtt

SEQ ID NO: 40384 - DNA, 725 bp, Macaca Mulatta
gagataaggctggacttgtcttcatattgaaatccaagaatgatcacatgaaatgtttagggagatgtccccatggtgtatcctcgtggtaacaatgacaaaaaatgccggttgtctgtgttctcttttcactattcctaacatgtgtacatgatagctttgattctgcaagtaaaagtaaatcatgtgttgtgactggtgctttcatatatttgtgacaatttttgagtaatattgcatgaaaatgtccctacgttacatccattcagaagttttgttgttttactctaaagccaggaaaggaaatgagaggggaaagaccctggggaggaaaggaaatctcagtgttttgaaaactgagattacttcagagccttagccatgcctaaaatacctctgcgttaatagtggtataaatgcctcttcaatacgttttccagaatccaaagcattttggtttatccgggacccagggcagcacagctgtcaccaagcaggagagttaaggattcaccatgagttgggaagtgcttttgccatgagtatgagcaagttccctccttccctgaatcatggacattctagattaaaagaacattttttctgctcttaagaagaaaaccatggccctcctttgttcaagtgtaggaagaaataaacccacagctccagagaaggtgaccattctcagaactcgggctcttcagaaggacctcgaatcgcac

SEQ ID NO: 40385 - DNA, 918 bp, Macaca Mulatta
  misc_feature (1)...(918): n = A,T,C or G
gaggcgtcgccgcagcttggacggttcttctgcctctgctgctccttggacatcgtcccgcgcctgtcggattatatctgtccaagatgcacgtctgattttatcgaggagcttcctgaagagaccaggagcacagaaaacgattctactcctgccaccgtccccacggaccagagccgaccgccgttggagaacgtggacccgcacctgttcacgctgccgcagggctacggacagtttgctttcggcatctttgtcatctttgacgacagcttcgagatccccacgtgccctcctggggcnnnnnnnnnnggcagcaaggactctgagagaccgtgggagagagtcctggccccgtaccgagcccggcatccccgtctccgcctccccacgcggcgggccactgcccggtacaaaggcctccccacgctagaagggatcatccagcagctcgtcaacggcatcatcacgtccgccaccatccccagcctgggtccttggggagtcctgcactcaaaccctatggaatacgcctgaggggcgaatacgcctgaggggccgtcgcacagctcctcggcttgaaaacaccggccccccaccggcagatgaagagaaaatccagtccctccccaccgaccccgtcaccgagcagcacgtaggctcccgggtcgagtgccccgtgtgcaaggacgacgacgcgctgggcgagcagctgccctgcaaccacctgttccacgatggctgcatcgtgcacctgctggagcagtacgacagctgccccgcctgccgaaaaagcctcccgggacacaacacggccacgaacccacccccccgggcctgactgggatgaacttctcctcctcgttgtcctcctcctcctccagctcgccctgcaacgagaacgccacaagtaactcc

SEQ ID NO: 40386 - DNA, 694 bp, Macaca Mulatta
gagtcccagacaggttcaatggcagtgggtcaggcactgatttcacactgaaaatcagccgggtggggactgaggatgttggggtttattactgcatgcaggctctacagcttcttcccacagtggtacaaccccatagagaaacctgccttctggggtgtcccagctgctcacatgcactgcttgtctggggagcaggtcagcagggtctctgagtctgctgaagaagaggctgttggagaattcagggcaaagtttttggctgaggactccggcccatgagaccctcagctgcacctcagtcccacatgttaaggccccatcagctgtcacatgtggccacgtgctctgagaacagccagctctgatgaaggaagagtgagtgaaagctcatcctcagcctccctgtctggcccatatttgtcgagtccatttatttgcagaacaatcagatcatggatgcaggttagtgctaactcaagtgaaatacatgttggaaatgactggtttggggatagttttatacatggtaatacttggtcatgttgggaaattactgtcttcctgctttccaaactttctctctcctttaccactcgcacgaacctacccttcctagtattatggtggagaaaacattttacaccagctattttcatgggaatatggctaagaataatcagttatcatgttt

SEQ ID NO: 40387 - DNA, 637 bp, Macaca Mulatta
aacaacagatttaataggcatcttctttgttatgtgtcattagccctttgcccgtttaccttagggttctttgaaggagaaatggatgggagaaaacctgtcacttggaaaaagtaaaaggaataattaactgactcagagcttatgtgcagagttcccagcctcaaagttaatctggaactgctcgatagcaccaataaaaatatttatttcacatctgttatttctggaaaatgttctaagcatcttatatatatttctcattaaattcacaggtggccattgtgaggtagatattttgttctcattttccagatgaggaagctgagaccctaaaaggttaggtgacaggttatacaacttggagtgtgggaggaggagagaggaacctgaacagggcaagttggggatctgacttttgtttgggtgggtgtaggcacattgtatttttggtttagacgctttattcatcatggctgaaggtaataccatttactcaccgaaaactgtttacaataatcaagatgaatttactgtctttgaacatctgtcttttgactggaccccagtagatagtctgtggaaattcacttaaggagagggctcctttttgtccggttaggagaaattgtctgtc

SEQ ID NO: 40388 - DNA, 784 bp, Macaca Mulatta
  misc_feature (1)...(784): n = A,T,C or G
ggatttaatttatattaatataaatatttaatatttaatatatatttaataaatatacatatattatttattttttataaataaataagaatggactactgatatatgcaacaacatgtctgaatctcaaatgcatgatctcaaatgtatgatcccgtttacctgaagttctaaataggcaacaccagtctatggtggttgaagtcaggacggcaatcctttgcaagattgtgaagtatgaactaggacgaggtgctggaaatgttctgtacctgggtggtggttacattgatgtatatacatgtaaaaatatcttagtcacacacttaagatagtgcatttaagagggcatgtgagttacacttcaataaaaatgtaagtttnnnnnnnnnnnnnnnnnnccaaaggaannnnnnnnnnnnnnnnnnnnnnnnnnngaataaatgaaaggaagattggcaaaattctgccctctcatatgaaaaatggtatagcctttctagaaaataggcattttcttaaaaagttaaaccttcacctaccatttgacccaacaatccactttttaggtatttatcctagaggaagaaaaactttatttgacatgaaaagccggtatataaatatttatgcccagcattggctcatactttgtcaaaaaactgggccacaaccccaaatgtcttttgaaacaactggttaccttctttcccattaaaattatcccttagccaaagaaaaaagaatgggactttggggcccgggccccccgttggcctcaacc

SEQ ID NO: 40389 - DNA, 641 bp, Macaca Mulatta
  misc_feature (1)...(641): n = A,T,C or G
aagatgggttcaccgtgtagccaggttggtctcgaattcctgacctcagatgatcagcctgctttggccttccagagtgtnnnnnnnnnnnnnnnnnnnnnnngcacccagcctaatttgcatattgattcctttccattgttgtcaacaattaagtttattcttcttttagaaattatatgtaaatgatattattgatactttctaaataaaagaggtttttaaatatttaaaaatgttatgatccaattatagataaattttctaacatttcccagtaactagagttttacaaattgattaaacgtcaaatcagaatctagccaagcaggaattatattgaaataagttcacatcacagaaaaggttccataatttggccaaattgcatgcacgcaatgcttatttagtaatagtcactatatgttagatgaggataaaaatatatttgtgaattatttctgaggaaatgctaactcccacagcattgtatttaattataacaataacaggaacattacatttttatctttgctgtgtgatctcaaagtcatagatcatctggcttttaaggtaccttcactaaaggcaaaaatctgatttgtagttttaattagcgtgtaccttgaaattatttgacc

SEQ ID NO: 40390 - DNA, 927 bp, Macaca Mulatta
gggagagccgcaaagattccggggtgcagaagttgtctgagtgcgttggtcggaggcagtccggccagacccaggactctgcgactttacatctttaaatggatgagatggctaccactcagatttccaaagatgaacttgatgaactcaaagaggcctttgcaaaagttgatctcaacagcaatggattcatttgtgactatgaacttcatgagctcttcaaggaagctaatatgccattaccaggatataaagtgagagaaattattcagaaactcatgctggatggtgacaggaataaagatgggaaaataagttttgacgaatttgtttacatttttcaagaggtaaaaagtagtgatattgccaagaccttccgcaaagcaatcaacaggaaagaaggtatttgtgctctgggcggaactttagagttgtccagcgaaggaacacagcattctttactcagagggacgaaaaatatgctttttgttaacctgggataaaacaaagctttgggcaaatggttcctgatttgtagaacatgtttttcccaatgacaccctaaaacccgatggacctgttccaagcctgtttggtgaatggaatttgtgcctttgtaaaatggttttacccctttcccgttcctcggataccccattggcgtgaaaggagcagtttccacgaggaagaaaccttttcaacccctttctttatttggggggaaaaccttgcaactttggcgcctgggaaattcgtggcttttggcacatttgggcgggccatcgtctccggacaaactttggggggcacaaaagaaattttccggagggcttgcggaaaaacctctccacttcgggggttttgtgcggaattggcctctttgcccacgataccttccacaaactccggcccttgtgcttgtcgcgg

SEQ ID NO: 40391 - DNA, 674 bp, Macaca Mulatta
  misc_feature (1)...(674): n = A,T,C or G
ttcgtgcagcatgcgaggctcacattgagggagctgttcgtctgtggtgcttcatgctctggattctgtgatagtggaggatagttctcacagtcaccttgacttgtttgacatccgctgaggagacctcgttggcagcttgncactcatatttgcctgactgctccctggtgatgccgaggatctccaggtattcttcttctccttcaaattcccttccagttggtgtaaggtgtctccaggtgataacaggttcaggacggccattggccatgcagaccagagtcacattgctgccctcattcacagtgacatccgaggagatgttggagatctttggtgggacttgtacgatcaagtaaacttgggaggtcttgggctcatgctgtgtctgaactgagcaagtgtaggaaccctcatcatagacatccaccttctggattcggaggctgtattccagagaatggcgtttctccagctcaacccgtgggtccagagaccacttgtcatgtccagcaaaaatgatgccagaacggttcaaccaggccacctttgagttcttgtcttctacaacgcacctgaggatggctgtgtccccctgcctcacggtgatgttgtccgtgcctcggttaaaatccacgctgcgaacaggcagtcctgtttggatggatccc

SEQ ID NO: 40392 - DNA, 662 bp, Macaca Mulatta
gtcactccagactgtcctccaccccagacttccccaaactgatgggctgtttgtgccgtacagggtggtaggagaagaccaaacgaagtaacgtctgtaaaacctcttcctggacagcataaggcctccacatctaagttcctgccattaaaatggagacagcaaagccaaccctatccagtccttgggactgttatgaacagaaaatgatgcaatgtatgaaaaactgctttaacgaggaaaacaatacagtgtgtttttggaagatgttattgacttgtgaaccgcattaaatgctctgaaataaaatgaaagtaaaaatgaataagtaaaaacaggctggtacatattttaatacgacttcatcaatacttgggtatgtatccaaataaatcatgaaccagcggattagataagtaacttggtgattactgaaattctccatcaggttgtcctctagtctaagaaaatagtgtttcatattctgtaagcagatatgttttgaacatctgaggatgtggcgttttgtggcctgttggggttgtagagtttctagtagaaaaagcacgtgtgttgacactgagcctctgtcctgacaaggttattgtgcttgtggagatgtctgttgtaggcaggtcagagatagggtgtcacccccagca

SEQ ID NO: 40393 - DNA, 772 bp, Macaca Mulatta
  misc_feature (1)...(772): n = A,T,C or G
ggcaaaaaattttttttccttaacgttacatatcatagtgaatggtttccccagtgtatatgaatgttttaagtgtctccaatagcttatgcagtctaggagctttccaatactcatttaattaagatttaatcatttgctaatggaaatcttaccacctttcattttccctctattaccaaatttcagctcttaggagctgctctacaattctcaatttgcttttcttgcctctctttagtcacctgtcacaggaggttcctgctcagtaatgatattgtgagttaggataannnnnnnnnnnnnnnnnncttcagatttagaagaaaagatcctgtttccatttgaaaggaactgtaagcttttatcttttaaccaactgaacaatacaccaaaagcagcctagggatgagcatttctttgaaagcaattaggttattcacctggtattaaaactatttactgttaaaaaatctgtgacttcatgaagttgatttttaaaggcagcatcaaaaactgaaaaggaagggaaaaaataagcagcttctctgcatttgtttggagctccccaaaacgggagccatggagaagtggcatcaagacccgggctgccctttcgagaacaccctgtggcagttcagagacacgctttttctacactgcatgcagcccctctttccagcactggaaaagaagtggtctttgagcccggctgagaagcactttcacactccctctctccttgttcttgaatggtgtttttgtgttcaga

SEQ ID NO: 40394 - DNA, 801 bp, Macaca Mulatta
gggagatgctgcccccgtaaataccgtatctgctctttgaaacgtcataatgactccctaactaaaactgacctctactgaattaaatatcgatttaatctatattctcttggattcattcaattcagcttgcaataaagtttttgtagtctttgctttctttcatgctctgatgctggttggaaccattagtcatacaaccgtcctgtccttccagacactgcttgcaccagcaaccccagagccacaggccagccacttggcacatgttacagagccaaggtagcaggcagcctctaaaaatggggttggccccatctctgcaccttatgttaccatcccagaacaatctgtgaaaaactcttaaagctacttggcaagtccagatgaacttggaaacgtacctgaattagatacaaatttgttcttataactgtggccaaatggtgtttatgaggtgggcacttcctatcgttaatttacatctttcacgtaattgtagggcaactatgactgagaggtactgtttaggaattttattgtgactgggccataaaagaacttgattctcctccgtcttgcctttaactcacactttcttccctccttttttttatttctcaaactgtttcttgtgattttagtttaaattctaagtctattcatttctcccaaaaatatcttggaattgaccgttgggtttgtataatacaccattgtcttgaatgggtgtctactattaatcttcatgtgtctaagcaccacataatccaagggtctcgggtaatccaagctttaagg

SEQ ID NO: 40395 - DNA, 283 bp, Macaca Mulatta
  misc_feature (1)...(283): n = A,T,C or G
ttggttatcaaaatactcatatagctttgggatcttgaattgggtaatattcatgatgtgtgaaaaatcatgatacatactgtacaatctcagatcccataaaattggatgttgtgcctacacacacacacgatctagaagaacatgtcattctataaactgcttgtgagggataatgactttgtactttgcttctcgtgtattttcagtttcctgtaatgcacatattaacttttaaaaaaatcaaaggttattttaaaagccannnnnnnnnnnnnnnnnn

SEQ ID NO: 40396 - DNA, 828 bp, Macaca Mulatta
ggggtgttccagctggaagtaaccccttccgggagcccagatcctgtgctttactctgaagactctaggagagaagttcgctgaggaacgccttcaagcgcaaagggacgaatgactgccttcaagtctcaagaaaacgcttttccctaactctaattagagatgttttagctctttcctgtggcctggtcctctagcgaaaatcacagaaattcatgagtttctacttgagtgaggaaactgggtgaaggaatagagttttaaatagtaatagcctgttttttttgtgcaagtacttttatacataagacaaacaaaaaccttaccaccaaatataccaaaatgcacctgtttcataagtgagttactaatatttctatacctggaacatcatgtatgttttatttactggatgtttacattttaagaaggaaaatagttgtgtttatttaaacttgtaaactgttgttcctggaagatatttataccgtaaaaaatgtgttcttttctcatgaattcacaactcctaaatgaatacaagaaagtacaaattgctgggaggaagaataggctttactaattgactgatgtcttgatttttctaaatggggagattgttttattttttacactaaatataggagcagtttctagcaaacctttttttgaaaagttaatggttatgatgtgcatttgggctgcccctatcgtggtatttaaattgaagccagaatccgatcctttgtaatccttaaggttcctccacttttgtaggttttaaaaacgttttaaaatgtggacccaccggaacattgtaaaatgggtaaa

SEQ ID NO: 40397 - DNA, 1094 bp, Macaca Mulatta
cgatgtattctactacctaagtgtagctccagaagttgaaaacggaattagagtaccaggaaataggagtttcttttccctcaatgagatcgtgagatttagatgtcagcccggctttgtcatggtagggtcccacactgtgcagtgccagaccaacgacagatgggggcccaagctgccacattgctccagggtgtgtcagccgcctccagaaatcctgcatggtgagcatactccaagccatcaggacaaattttcacctgggcaggaagtgttctacagctgtgagcccggctatgacctcagaggggctgcgtctctgcattgcacgccccagggagactggagccctgaagcccccatatgtacagtgaaatcctgtgatgaattcctgggacaactccctcatggccgtgtgctgtttccaatcaatctccagcttggagcaaaggtgtcctttgtttgcgatgaagggttccgattaaaaggcaggtctgctagtcattgtgtcttggctggaatgaaagccctttggaatagcagtgttccagtgtgtgaacaaatcttttgcccaaatcctccagctatccttaatgggagacacacaggagctccccttggagatattccctatggaaaagaagtatcttacacatgcgagccccacccagacagagggatgacctttaacctcattggggagagcaccatccgctgcacaagtgaccttcaagggaatggggtttggagcagccccgcccctcgctgtgaactttctgttcctgctgaacttgttcttagcctgcccacatccacccaagatccagaacgggcattacattggaggacacgtatctctatatcttcctgggatgacaatcagctacatttgtgaccccggctacctgttagtgggaaagggcatcattttctgtacagaccagggaatctggagccaattggatcattattgcaaagaggtaaattgtagcttcccacagtttatgaatggaatctcaaaggagttagaaatgaaccaagtgtatcactatggagattatgtgactttggagtgtgaagatgggtatgcgctg

SEQ ID NO: 40398 - DNA, 1473 bp, Macaca Mulatta
  misc_feature (1)...(1473): n = A,T,C or G
agacagagtcttgctctgtcacccaggctggagtccaatggcatgatctcagctcactgcaaccttcacctcccggttcaagtgattctcctgcctcaagctccctagtagctnnnnnnnnnnnnnnnnnnnnnnnnnnnnnnnnnnnnnnnnnnnnnnnnnnnnnnnnnnnnnnnnnnnnnnnnnnnnnnnnnnnnnnnnnnnnnnnnnnnnnnnnnnnnnnnnnnnnnnnnnnnnnnnnnnnnnnnnnnnnnnnnnnnnnnnnnnnnnnnnnnnnnnnnnnnnnnnnnnnnnnnnnnnnnnnnnnnnnnnnnnnnnnnnnnnnnnnnnnnnnnnnnnnnnnnnnnnnnnnnnnnnnnnnnnnnnnnnnnnnnnnnnnnnnnnnnnnnnnnnnnnnnnnnnnnnnnnnnnnnnnnnnnnnnnnnnnnnnnnnnnnnnnnnnnnnnnnnnnnnnnnnnnnnnnnnnnnnnnnnnnnnnnnnnnnnnnnnnnnnnnnnnnnnnnnnnnnnnnnnnnnnnnnnnnnnnnnnnnnnnnnnnnnnnnnnnnnnnnnnnnnnnnnnnnnnnnnnnnnnnnnnnnnnnnnnnnnnnnnnnnnnnnnnnnnnnnnnnnnnnnnnnnnnnnnnnnnnnnnnnnnnnnnnnnnnnnnnnnnnnnnnnnnnnnnnnnnnnnnnnnnnnnnnnnnnnnnnnnnnnnnnnnnnnnnnnnnnnnnnnnnnnnnnnnnnnnnnnnnnnnnnnnnnnnnnnnnnnnnnnnnnnnnnnnnnnncttggcgctgttgcttatctgcataccaaagaaccaatcctgtgggctaggggctggatggccccacctggaccctagacaaaattaacgtacttggggggatcccagcactggggagatttgcctggccttcctgggggaggagtatggccgcccacggagcaggctgctggtctgcctctcccataacctcccggaagatccacaccacgaatgatctgatggggacaaaaaccccgggacttgagggacctttgcggcggacccttaaaacacctggcaatcccattaaattgaaacatggtacatattttgcttttctagttttggctaatacgttttatttcaagggtctcccggccacagtttaccagcgggcgggcggcgccgcaggtagtgacggggcaagaacgggcgtcgccgnnnnnnnnnnnnnnnggtctctgcgccctcggcctcgggctccaggccacactgggaggctgtgctggnnnnnnnnnnnnnnnnnnnnnnnnccccagaagtgacgtgggggcggggccaacggaccgcggaggcggagccgctacagtctgggcgctggagctgtgggagcggcgcgcgtccgccgttggggaccccagcccgcgcgcgtaaagcagctggccgaccaagccctgaagtcgagtgcctgagggggcaggacacctcctctggggccagcggg

SEQ ID NO: 40399 - DNA, 648 bp, Macaca Mulatta
agccaattagtatttatccacctggcactctcattatgagataagtcactttttaaaattgatatctaaactagtgttttcttaaaattttcagatatactggaattcacaataaatcccagtattgtggttacagatgtaaaaatgctatcaggatttactccagccatgtcatccattgaagaggtaaataatagaagcctaatctgtcagcacaaagacagctacatagagtataaagataaaataaatacttgtttagcagttgtttagcaaaacaaaactatagaattcttcttcaacattcacctttatatttttacgctaacactggagagctggtgtatttaattcgtacaaattagcagtcagtatttcccatggttcatcatatatttttctttagttgctacctgtgcttatgaaaacatcatggcaccaaggaatgttccataaaacagaacctgacacggaaaagcgtggacattcagttctgcagtggtgctgccatttgttctaatatctattctctatccttccttaacaatttcttcaaagcttgaaaacaagggccaagtgatgaagactgaagtcaagaacggccatgttcttttctatttggaaaatgtaagtttagcaataattttt

SEQ ID NO: 40400 - DNA, 865 bp, Macaca Mulatta
attcgtccttctgggactccctagttcagcagagcagcagcacctcctgtctgtgctctttctctgtatgtatttagccaccaccttggggaacatgctcatcattgtgaccactggctttgactcgcgccttcattcccctatgtatttcttccttagtaacttggccttcgttgacatttgttttacgtcgactactgtcccccaaatggtagtgaatatcttgactgacaccaagactatctcttttgcaggctgcctcagtcagctcttcttcttcgttacttttgtgaatatggacagcctccttctgtgtgtgatggcatatgatagatatgtggcgatttgccaccccttacattacactgccacaatgaacctgtgcctttgtgtccagctaatggctggactgtggcttgttacttacctccatgccctcctgcatactgtcttaacagcacggctgtccttctgtgcctccaatatcatccatcatttcttctgtgatctcaaccctctcctgcagctctcttgctctgacgtctccttcaacgtaatgatcatttttgcagtaggaggtctattggctatcacgccccttgtctgtatcctcatatcttatggaattatcttctccactgttctgaagatcacctctactcaggggaagcagagagctgtttccacctgtagctgccacctgtcagtggtggtggtgttttatggcacagccatcgctgtctacttcagtccttcatcctcccatacgcctgagagtgacactgtgtcaaccgtcatgtattcagtggtggccccgatgctgaatcctttcatctataccataaggaacagggatatgaagagg

SEQ ID NO: 40401 - DNA, 652 bp, Macaca Mulatta
ggggggggagtccaggctcggtgcccctacaccctcacctctttctaatggggtggtaacgaggaggggcaactcagatgcctaagaagcttaggcccaaatctcagagacagcgtggggctgttgcccccctcacccaggtccaccaggcggcctgttcccccacttataaacaggccaagcgcaacgccaggagctctcagggccgccgctgccatcgttgcggccagaataccgcttccagggttcctagccaactgcaagcagttgactcttcgtctgcttcctgcaggacctacaagaacagtgaggagcttcggtctcgtattgtgtctggaatcatcacacctatccatgagcagtgggagaaggctagtgtaagcagtccccaccgggagttcccccctgctaccgctagagaggtggacccactccggattcctccacaccatccacacaccagccggcagcctcactggtgtgatcccctgggcccatttgctgtcgggggagaagacttagacccttttgggcatcggagaggtggcatgattgtggatcccctgagatctggcttcccaagagcacttattgacctttcttatgcctcccgaaccggtttctctcaggcttgtgccccgagagctccttt

SEQ ID NO: 40402 - DNA, 157 bp, Macaca Mulatta
caagagcatataggagagatagtagaaaaaattggagtcaatctgataagaaccggcagccagccactaagagtaattgctcatgacacaggaacatcactggatcaggtgaaaaaagccctgtgtgtcctcatccagcataacctggtgagttacc

SEQ ID NO: 40403 - DNA, 802 bp, Macaca Mulatta
  misc_feature (1)...(802): n = A,T,C or G
gcccccgtcggcgcgcacaccctgcgtatttccggccctgccaccgtcttgctccgcatcccctgccctggggcccccccggcgcgctccacacagggggaaggtttgttgggaaagggcttcttacaggggcgccgagggcgcgccacgacaagcggcgtctgcccgttagctgccctgtctcgtctcggcgcggaggtctcccttnnnnnnnnnnnnnnnnnnnnnnnnnnnnnnnnnnnnnnnnnnnnnnnnnnnnnnnnnnnnnnnnnnnnnnnnnnnnnnnnnnnnnnnnnnnnnnnnnnnnnnnnnnnnnnnnnnnnnnnnnnnnnnnnnnnnnnnnnnnnnnnnnnnnnnnnnnnnnnnnnnnnnnnnnnnnnnnnnnnnnnnnnnnnnnnnnnnnnccgacctcgtgatccgcccgtnnnnnnnnnnnnnnnnnnnnnnnnnnnnnnnnnnnnnnnncgcacccagcctctagttatttccaaaatgtctttgtggcttccagaatttctttgaaaaccacagccttaaaacatttttcatnnnnnnnnnnnnnnnnnnnnnngatgagggtcttgctctgttgcccaggctagagcgcagttgcacagtcatagctcaccacagccttgaacttctgtgctcaagcaatcnnnnnnnnnnnnnnnnnnngatagctagtactacaggtgaatgcggccgcacctgccaccatacctggctaattgtttttttaagtttttcagagatggtgtcttgctatgctgcccaggctggtgtctagctcatggcctcc

SEQ ID NO: 40404 - DNA, 663 bp, Macaca Mulatta
gacgtacgggggcaggatctctaagcgctgtgtcccgcggagctccgctgccgcgagggtgaccttgggcgagaagctgccccaaaggccttggtatcgcggtctgcgcgccgtgtgggcaggagactgcgggattcggagctggggcgccgggaccccaaccttccgcgcggggctttagcatgccggtccacggaatgggcctggcggggcaagcggcgcgtgcgtcggggcctgcagaggagcccttaactcccccaccaacttctcctcccttagccttgccgcccgtggtcctggccactcagtacctgccaagggctcagcgctcacatcccccgtccaagggatcctctccgccgccggcgcaggcctgttctagccttcgctgccgcaacagattcagcctgtgcctcagcccccggaaacgcttcccggtcccgccccccgaaattgacagtgcttccgggggtgcgccagagagaaagaggagtgcgcatgcgggattcactgtctgagctgggcgtccggagagagcacataggtagcgggcgcctgcgcagtacagtctggagcgggtcaatcaattttagggactgactaagctgttgaaaataggggagcagataccgagttctaaaccttcttgaaaccttgacatag

SEQ ID NO: 40405 - DNA, 813 bp, Macaca Mulatta
  misc_feature (1)...(813): n = A,T,C or G
gggattctaattcagtgggtagaaggcctgagatacgtatgtctctgacaagttttcaggtgatgctgaagccacttgtctatgaatcccttgagtagcaagccctgaagtatactatttataaagtacctacatctaagatgctgttgggagaaccatatacatggctcaaaatgatactcaaatactttccttaagaaattatattcaactagaaaaagaaataataaattttccaaaaacaaaatcagacaaaacacccaaaaagcatgaatattataaaattattcctcaaaattattagccatttcatccacctaatggttaaactaacatctcagaatgatgaaatgagattattgaatgttaagaacttcaggatctccttaggaatgatttcatgaatatgacaacaaaagcatgggcaacagaaacaaaaataaataagtgcgactaataaaattcaaacaacttctatacggcaaagaaaacaatcaacagagtgtaaaggcaatctatagaaaggcagaacacatttgcaaaccatatctctgataaggggttaatctccaaaatatataaggagttcttataactcagtagtaaaaaataaataacccaattaaaaaaatgggctaaggactgaaatagacattttttccaaagaagacatacaaatgaaccacanggtatataaaaaatttttgaatgttcactnaagaaacagacaaattttaaatttaaaacccacagtgaaagattatcaccttcacaatcctattcaaaaattgtccttatttaatccaaaaagac

SEQ ID NO: 40406 - DNA, 787 bp, Macaca Mulatta
  misc_feature (1)...(787): n = A,T,C or G
ggaaataggaaaactagtaacttgagtaagggaataggaatactgttgtccctcggtatctgcagggcattgatttcagaactaactgcagataccaaagtcttcccttccccaagtcccacagttagcccttgcagaacccacagatgcaaaaaagtcagccctccatatacatgggtttcacgtctgaagaatagtgtattttcaatccatgtttaattgaagaaaattctcatgtaagtggacccacacagttcaaacccatgttgttgaagggtcaactgtacctacctcttagtaaagcatgggaaatgtttgggttacatggaacaattgaggcacatcaagaaagccagggccaggcactgtggctcatgtnnnnnnnnnnnnnnnnnnnnnnnnnnnnnnncaagctgatcacttgagaacaggaannnnnnnnnnnnnnnnnnnnnnnnncgaaaccctnnnnnnnnnnnnnnnnnnnnnnattagctgggtgtagtggcgcactttcgtaaccccagctactctagaggcnnnnnnnnnnnnnnnnnnnnnnnnnnnnnnncggaagttgtagtgagccaagatcgcgcctnnnnnnnnnnnnnnnnnnngcagagtgagactgnnnnnnnnnnnnnnnnnnnnngaaatccaagagcacagaatcaggatatactggaggaaaacataatttttctaggccttcaagatagaacatttcagtgtcaggccataaaagcagagttagagctgggagaaaaaagtacagaaagatgaa

SEQ ID NO: 40407 - DNA, 794 bp, Macaca Mulatta
  misc_feature (1)...(794): n = A,T,C or G
ggggatgtctaagaggcatatgctgctttggaggtgtagtgaacgtgtgtacagaagttttcaatcttaactatatagtgttagtgtgatgctatactattggaaaaatagcaacttttttctattttataagttgtatgcataaacataagatttgtaatgtttcatttataaactgccttcttcaacacatgttaatagtgttttctcaaagtattgatagtatgtcttccagaatttcacgatatgcttacagtaaatagttcctagcttgttgaaatgttaaattctttgttggctttctttttgattctgtgggggtgtataacaagcctgaaggacattgtaatcatttcttacaggggtggaaaaatttagaaagattgtgtatgagagcctatatagttgtttttatccattatcatcctttgattaagacttaaaaaaaatgctattttccagttaatgccgtttggccctatttgaattttccggggaccccgaaaacgtttaaagaaaaagattcctgccatcctgtggaatggggaaacccaaatgtaagacctttggaaattgttgttctgagaaaaaaatacacattcgnnnnnnnnnnnnnnnnnnnnntgtttgagaaaggggagccttgtggggggagaaaaaatatctcgcccccccggnnnnnnnnnnnnnnnnnnnnnnnnnnnnnnnnnnnnnnaagatttttttcccctccagcggacaaaagaggttcctctctctccccacatattttatttgtgttttttgtagaaaaa

SEQ ID NO: 40408 - DNA, 637 bp, Macaca Mulatta
tttaagtattgttatcgtggactttataaaagcaaaggaaattgaaaataacttttgattctgtatcaagaatcatattttcatacagtcataactgtctttctgtgaccctttcacagggcactgtaggatggattaaaggtggcaatttactgataactgcagatgtctctactttgttctaaaatctaagtcatgaggtgatttgatttactttatagaagctggattttgaagatataatgaaaaattttttgataatatagtagtacaaaaaaagcaccagcaactgataaaactgcttttttgtgcactacccaactggttacagccaatgtgatcttttatggcgaaactcctaagaaataggtggttttgctggaaacttggtagacccttaattatagtggtgctaatgagcactactgtaatataaagccaccattattttttatcaaacatctgaatacattttacaaaggctattgtgagggcattattttgagcatctattttgaggtgatgtttaaaaaaaactttaacatcaaattgtaaattaatttaaatatattgccttaaggacctactaaagaatgtgccaccagactttaagtgatagttgcaatatccttgtcta

SEQ ID NO: 40409 - DNA, 637 bp, Macaca Mulatta
tcccgggatgcagagcgctgctgctgacttaactattactcaaccttatactctgtctcctaatggaggaatatgaaggggtggcctgcccctccacacttgtgggcgtttctcgttaggtggaacgagagacttgagaaaagaaatgagacacagagacaaagtatagagaaagaaaaagtgggcccaggggaccggtgctcagcttacagaggacccacgccggcaccggtctctgagttcccttagtatttattgataattatctttaccatcttaaagataagggagtggctggacaataggatcattgtagggaggaaatcagcagtaagacatatgaacaaaaatccctgtgacatgaataagtttaaaggaaaatgctatgccttgagatgcatatgcaaacatctccataaatcttttagcagcattgctccagcaagtcccaccttattcctaaaggtgattttctccttgctcagcaaacaaagcatacaatcgggttttacatggagatgttccattgcccagggacgggcaggagacaaatgcttttctcttacttgagattaagagaatggtgatgacctttaaccagcaagcagcctttaggcacttgtttaacaaagcacat

SEQ ID NO: 40410 - DNA, 783 bp, Macaca Mulatta
  misc_feature (1)...(783): n = A,T,C or G
ggggaaactgaagagtagccactggcctactggtagactggaactgattttgtgattctgacgttctccggtctgcactctgctgtgctgtctgtgcgcagactaggggtgcatgccgttgcccttgcaggtgtgttgtgcagctctggttttgggggacagctcttttgtaagtaggattaaaaaataaaaaatatataaaatttatatagaataaatatttccattcattagagttgttagaaggagactgaattaatattttatataaagattttgttacattatgggaggttctatcctattctgaattggagannnnnnnnnnnnnnnnnnnnnnnnnnnnnnnnaactttattaaggtgaaataatttgaagtttacacgagtaacaaatatttgagtaaaaaaggcaaaagtttaaatttggaatgctgtatatattagagaatatgaggaatcatggtgtgaccaactgtataaggaagattcatatgaaggtcttaggggaaaaatgattctgaagggtgaaaaaaaaatctctcccatggagattcttcacattatatggtttgacataacggtttataaaggttgttttgtccaacctaattgaaaatgcgctttaataaaaaaattcttgggccttggggtggaaaaatttcgccttttttaccccccaattgcccgccttttctaccttaacattacattgaaagtggccatgcccattcccaataaaaccggcggttttttttcgctttacacaaaacacacttttaag

SEQ ID NO: 40411 - DNA, 803 bp, Macaca Mulatta
  misc_feature (1)...(803): n = A,T,C or G
ggggggttttccccatggaaacgtgtcgtggtggtgtcacttcgtgcaggtgtctggcacatacctgtatgtgtaaaaaaggagctcagtgtcccagggacatcttccccttggcaaacttgatcaaaccacagtgccttcctttatcagaggctctactggtttgtgctccccaaggagacagttggttttacacatttcagttcgtgttagtttcaaactgaggcttctgtgtggtgacaacactctatcaagatttgcttgatgctgattggttcggtagagatagcaaattaaaaaacaattgctttcacacacttcagtagattttataaaaatttgtgatgaaatagtaatttttactgcctttttgttaaaaaagttcattttcccccccatggtgcttaaaatggacgggaatcaaaactttgtcctaaagggggaaaaagctctgtgtgttgcaagtcagatccttccttttttttcctccccccgcccttctctttaaaacaaggtccacactccggttgcccaaggttgggaatgccaatgggtgcaattcataacctcccttgcaagccttggaacctcccgggggcctcaagccaatccctttccattcctttcggtctcaaaccctccctggagtaagcctggggaactataaagggggcaattgccaacccttaaccgtaagacctcctttatttatatttttttcgcannnnnnnnnnnnnnnnnnnnncaaccctgtgtttacccccaccggcttataataaaaaannnnnnnnnnnnnnnnnnnn

SEQ ID NO: 40412 - DNA, 765 bp, Macaca Mulatta
ggggtggtcaggctcacgatggaccatgagctttcaaaaaggaaaaaggtggaaatcctcaactatgctgccatctgaataagtgtttctttgtagcatgcacagagtcaaggaaaattacatccctgcattatgtaatgtaccaacaacgcacttacccactgttttaatctaggttattcttgaaagcagagcctgagacaaaggtagacacattctatttatgagtctaacacccaggagcaggaatgagaggcaggggagtgaacatgggaaaagggaaagtaagtccaagcaaaaccagatactgctgttatcaagtggtccacccctattaatggctacgtaatgcagaactttcttaggattcttcttaaactttatctcagaactgtctgccttagggagaatggagaagtatttctccatcagcagtcacctcctgtttgttgagggctgctcctttggggcattaactcaccgcccccaccaccccatccctctgggctgcaaagagctgagagcccacatggtacctcagcatcgcacattgctacatcagagaggtcttaagacacgaaactagagtcttggtgcatgctcgaagtgagacagtgtcagcacagagcagtgtcatatcttccataactgttcaacagagccatgactggactcagaggttgaaaagatattgggaccaaacacaaggaagcatcttgataagccctacataacaatagtggttagaactcatccggaaatcta

SEQ ID NO: 40413 - DNA, 660 bp, Macaca Mulatta
  misc_feature (1)...(660): n = A,T,C or G
agcacggtggcagacaccttgnaaacatgngagtggtgaaaacgcagtgccagagttcagttaggctttannnnnnnnnnnnnnnannnnnnnnnnnnnnnnnnngtnnnnnnnnnnnnnncagagattgcagtgagtcaggattgcaccattgcactccaatctgggtgacagggcannnnnnnnnnnnnnnnnnnnnnnnnnnnnnnnnnnnatggccaccnctggtgttggcatattggccccactggaacttttgggggcttcccggtctagccacacccctgggtagaaagacttgactgcataaagatgtcagttctcgctgagttgattgatagacttgtcaccctaaaaacacccacatatgcttttctatggaaccagataagttgacactaaagttcttatggaaaaatacacacacaatagctaggaaaacacaggaaaagaagagtgctgagcagggcctagtcttagccaatattaaaacacactatgaagcctctgatatttaaacagcatagtgctggtacgtaaataaacagaccagtgcattgggtgactctctccaagactctggggaaaaaagtaataaaaagctaaatgcaatcaatcagcaattgaaagctaagtgagagagccagacggcctccttgg

SEQ ID NO: 40414 - DNA, 1583 bp, Macaca Mulatta
tggccctcccttatcatatatttctctttactgttctcttaccccctttcactctcactgaaccccctccatgccgctgtatgatcagtagctccccttaccaggagtttctgtggagaatgtggcatcccggaaatattgatgccccatcatataggagtttatctaagggaacccccaccttcactgcccacacccatacaccccgcaactgttataatgctgccactctttgcatgcaatcaaatactcactattggacaggaaaaatgattaatcctagttgtcctggaggacttggagccactgtctgttggacttacttcacccataccagtatgtctgatgggagtggagttcaagatcaggcaagagagaaacacatagaagaagtaatctcccaactgacccgggtacatagcacctctagcccctacagaggactagatctctcaaaactacatgaaaccctccgtacccatacttgcctggtaagcctatttaataccaccctcactaggctccataaggtctcggcccaaaaccctactaactgttggatgtgcctccccctgcacttcaggccatacatttcaatccctatacctgaacaatggaacaacttcagcacagaaataaactccacttcctttttagtaggacctcttgtttccaatctggaaataacccatacctcaaaccttgcctgtgtaaaatttagcaatactatagacacaaccaactcccaatgcatcaggtgggtaactcctcccacacaaatagtctgcctaccctcaggaatattttttgtctgtggtacctcagcctattgttgtttgaatggctcttcagaatctatgtgcttcctctcattcttagtgccacctatgaccatctacactgaacaagatttatacaattatgtcatacataagccccgcaacaagagagtacccattcttccttttgttatcagagcaggagtgctaggtggactaggtactggcattggcggtatcacaacctctactcagttctactacaaactatctcaagaactaaatggtgacatggaacaggtcgctgactctatagtcaccttgcaagatcaacctaactccctagcagcagtagtccttcaaaatcaaagagctttagacttgctaaccgctgaaagagggggaacctgtttatttttaggggaagaatgctgttattatgttaatcaatctggaatcatcaccgagaaagttaaagaaattcgagatcgaatacaacgtagagcagaggagtttcaaaacaccggaccctggggcctcctcagccaatggatgccctggattctcccctccttaggacctctagcagctataatagtgttattcctctttggaccctgtatctttaacctccttgttaagttggtctcttccagaattgaagctgtaaagctacaaatggagccccagatgcagtccatgacttaagttctaccgcagacccctggaccggcctgctagcccatgatccgatgttaatgacatcaaaggcacccctcctgaggaaatctcaactgcacaacc

SEQ ID NO: 40415 - DNA, 740 bp, Macaca Mulatta
  misc_feature (1)...(740): n = A,T,C or G
ataaattgggaaggggccccaaaggggggggtttttaaatggggaattccaacagttttccccatggggggctgggggagggcccttcacgggatttatgggccggaggggtgaaaagcccatgttctttacgggggtgggcaggtaaagaggcaaaatgagagtcaaacaaaaagaggaaaaccccttataaaaaccaccgagtctcttgagacttattcactaccatgagaacagtgtggggaaactgccccccatgactcaattacctcccaccgggtccctcccacaacatgcgggaattatgggagctacaattcaagatgagatttgggtggggacacagtcaaaccatatcacctgactaattttatgtactttttttgtagaaacggggtttcaccatgtttctcaggctgatcttgaactcctgtactcaagcaatcaacccnnnnnnnnnnnnnnnnnnnnnaggattacagccatgacccatcatgcccaatctcaagcactgtttaatgtttggagacatttaacttcttaaacactttatttttacattatccatctaatgtgtaattctttaggcaaatgttaattacttaatacttagaaaaatgctaactgtttgaaacattcttaatgaattggtcatgaaataaaaatagcaccaaattgccttctgtacacacaagagcctcnnnnnnnnnnnnnnnnnnnnnnnnnnnnnnnncactccc

SEQ ID NO: 40416 - DNA, 778 bp, Macaca Mulatta
ggataactagggtagacttaattattggcttgctgtatttaaatcaaaatgaaaagctcatacaaaattttatacccgtactctgaaaaaatgtggaactgtttttggactaaaattttatagcttttgtggctaatgaggcatgaaataaattggcaagctccaactcttcagagtacagtggtgcagtgtgcattttctattcccagcccctgggattccagcaaaggtcacaaattaaacaaagtcaggattaatcaagactataatcaaataaaactcaatcattaatcctcttctgagttacaatagagtgattgtgtaattgtgtgagcagcactggagagggcccttttgtagtgcgtaggaaaatcaacattaaggtgtcaaacagaaaaatgaaaccatgcaggtgaagctgtctctggagccaagagaaactggcagtttatgcagagttgcaagtgaacctttggagtattgaaagggtgttggcactgagctgcagagcatgtgggtctctcagtggggcctccacaaagatgaatgtatgggctgcaacaggccctgtttgctgggaaactcaatgtttgggggcagcagctccaaacaacattctctccaaatttactgccaaaaatttaccgtgaaattctcagctccttggaatttttgaaaaaaaagtttctgggaaaaacatttccatccggggggaaataattatgtggtcaaaaaaatggccatttccccaaataaaaggggggaagggttcccaaag

SEQ ID NO: 40417 - DNA, 626 bp, Macaca Mulatta
ggggggacttggcggtgccctgttcctgttccacggggtgtcgggtcctgggagggaagagccaagtcccagtgaatactgacgttgtctctcgctctctggcgcttttcccagccttttccagttgctgcagagccatctgaaaggaaggaatcaagcctctgtgttctggaagtcagccataatctaattcagatgttttgtgacaatgcaaggaaaaaaatggatgtctgggtggatatcattaaagactcttctccacataaatccctatctctcattgaattagaaaaggatttcctgagatcttgctaaagaaatctaaaaggaaaggaaaaggggctgttccagcccagaggaaaaagcctaattctgccaggcagagaagagactaatccgaacatgggaagtgacatttggactcatttttgaattggtctcactctgttacccagctggagtgcagtgatgtgatcattgcttattgtactttcaactcttggattcccttttctcctaacttttttttaataatttatctcagctcccctaagattctttcactttcctatcacctaacaaatataactttgatccttttttcatctatatcgctcctcgaccgt

SEQ ID NO: 40418 - DNA, 212 bp, Macaca Mulatta
ttaaatcagtatgtacatcagtgtgattgagaatttgagtcagtaagtgcacaattgtgagttatctgctttatttggataatgaaatttaaaagtatatttgagttaataattaatcaacgttatttccatttggaactaataaaatgtgtgcttactggaacttattggtgttattgggatttgaaaatttccattggaaattccagagt

SEQ ID NO: 40419 - DNA, 144 bp, Macaca Mulatta
  misc_feature (1)...(144): n = A,T,C or G
gccgagccagacagctggaggaggaacttcgaaccatggaccaggccctcaagtccctgatggcctcagaggaggagnagtattccaccaaagaagataaatatgaagaggagatcaaactgttggaggagaagctgaaggagg

SEQ ID NO: 40420 - DNA, 206 bp, Macaca Mulatta
ccaggacacgggtggcattgggatgcagcagggatgtcccactgtgggacggacatcagacccaagtcactgggactctgtcgtatgactcaggaacaggaatgtggcctctcagaccctcaggtttgtcaggaagaagaggacaaatgtgtacacatccaaaggcttaaggctcagagaccaacgtggccatgcaggagggctgg

SEQ ID NO: 40421 - DNA, 5172 bp, Macaca Mulatta
  misc_feature (1)...(5172): n = A,T,C or G
tgtagccaatggtggcacgtgtcaagcaatcctgtgccgaggtgggaagccagtgcccctctctaaagtcttcagcctggagcaggacccagaggaggcgcaaagggtgaaggaccaaaaagccatcatcacagagnnnnnnnnnnnnnnnnnnnnnnnnnnnnnnnnnnnnnnnnnnnnnnnnnnnnnnnnnnnnnnnnnnnnnnnnnnnnnnnnnnnnnnnnnnnnnnnnnnnnnnnnnnnnnnnnnnnnnnnnnnnnnnnnnnnnnnnnnnnnnnnnnnnnnnnnnnnnnnnnnnnnnnnnnnnnnnngctgtacgtcatgtacaagacccattagcagctgcctagaagctgtgcacgttagcacagagctatggctgtcaggacaacgtaggggcgatggtggtttatttgaatattggtgaggaaggctgcacttgtgaaatgaatgggctcaccctcccaggtcctgtgggatttgcttcaaccaccagtatcaaggatgcccctaagccagccactccatcctctagcagtgggattgcctctgagttcagcagtgagatgtccacctcagaggtgagcagtgaagtggggtccactgcttctgatgagcataatgctgggggcctggactctgccttgcttccgaggccagagcggcgctgcagcctccacccaacacccacctctgggctgtttcagcgccagccttcttgtgctaccttctccagtaaccagtctgacaacggcctggacagtgatgatgaccagcccgttgagggggtcataaccaacggcagcaaggtagaggtagaagtagacatccactgcnnnnnnnnnnnnnnnnnnnnnnnnnnnnnnnnnnnnnnnnnnnnnnnnnnnnnnnnnnnnnnnnnnnnnnnnnnnnnnnnnnnnnnnnnnnnnnnnnnnnnnnnnnnnnnnnnnnnnnnnnnnnnnnnnnnnnnnnnnnnnnnnnnnnnnnnnnnnnnnnnnnnnnnnnnnnnnnnnnnnnnnnnnnnnnnnnnnnnnnnnnnnnnnnnnnnnnnnnnnnnnnnnnnnnnnnnnnnnnnnnnnnnnnnnnnnnnnnnnnnnnnnnnnnnnnnnnnnnnnnnnnnnnnnnnnnnnnnnnnnnnnnnnnnnnnnnnnnnnnnnnnnnnnnnnnnnnnnnnnnnnnnnnnnnnnnnnnnnnnnnnnnnnnnnnnnnnnnnnnnnnnnnnnnnnnnnnnnnnnnnnnnnnnnnnnnnnnnnnnnnnnnnnnnnnnnnnnnnnnnnnnnnnnnnnnnnnnnnnnnnnnnnnnnnnnnnnnnnnnnnnnnnnnnnnnnnnnnnnnnnnnnnnnnnnnnnnnnnnnnnnnnnnnnnnnnnnnnnnnnnnnnnnnnnnnnnnnnnnnnnnnnnnnnnnnnnnnnnnnnnnnnnnnnnnnnnnnnnnnnnnnnnnnnnnnnnnnnnnnnnnnnnnnnnnnnnnnnnnnnnnnnnnnnnnnnnnnnnnnnnnnnnnnnnnnnnnnnnnnnnnnnnnnnnnnnnnnnnnnnnnnnnnnnnnnnnnnnnnnnnnnnnnnnnnnnnnnnnnnnnnnnnnnnnnnnnnnnnnnnnnnnnnnnnnnnnnnnnnnnnnnnnnnnnnnnnnnnnnnnnnnnnnnnnnnnnnnnnnnnnnnnnnnnnnnnnnnnnnnnnnnnnnnnnnnnnnnnnnnnnnnnnnnnnnnnnnnnnnnnnnnnnnnnnnnnnnnnnnnnnnnnnnnnnnnnnnnnnnnnnnnnnnnnnnnnnnnnnnnnnnnnnnnnnnnnnnnnnnnnnnnnnnnnnnnnnnnnnnnnnnnnnnnnnnnnnnnnnnnnnnnnnnnnnnnnnnnnnnnnnnnnnnnnnnnnnnnnnnnnnnnnnnnnnnnnnnnnnnnnnnnnnnnnnnnnnnnnnnnnnnnnnnnnnnnnnnnnnnnnnnnnnnnnnnnnnnnnnnnnnnnnnnnnnnnnnnnnnnnnnnnnnnnnnnnnnnnnnnnnnnnnnnnnnnnnnnnnnnnnnnnnnnnnnnnnnnnnnnnnnnnnnnnnnnnnnnnnnnnnnnnnnnnnnnnnnnnnnnnnnnnnnnnnnnnnnnnnnnnnnnnnnnnnnnnnnnnnnnnnnnnnnnnnnnnnnnnnnnnnnnnnnnnnnnnnnnnnnnnnnnnnnnnnnnnnnnnnnnnnnnnnnnnnnnnnnnnnnnnnnnnnngcactcgagccaatcttcttagaggcagcccggcaccttcatccataggcagagagagaattgggtgttggagccttatccaagggtataggaaggaccctgtgaagttgatttaactgttggatgtcagactgtgaaagctcctgaaaaacttggggtaataggatcttcttttggggatgaaaatggggaaggagtgaggaccaagactacttctccctagatcagaaaaagagaattaccccttgacacatatgatacctgctaggtatttcccaaggaaattgagagattggcctctttccttggcacgtggaggaattggcaggcagcttcctaagggggagggtcaaggctgaccctgcttgcatccatgtgaccttaagttatggcagatgactctgaaatggactgaggccaatgagaacagatgaatggagcgctcaggttagacttgttccttctcctatgctggaggagagggatggttctctagaatattcgtatatgagttgagggcttgcctcttgaatgttgaacagtgtactcttctgaaaactgcatactctatgtggttttcgattactgggctcaatactaacataagaaagacacttcattgagaaattcttaagcttacagaaaacctgtattttttgcgcattccacataaccctagcaaaatgcagtttcttcatatttctgtcactttttccacttgaagatttgcctaggaaaattcctattcctacaaaatgttggcattgcttgattttacccaatggggaatgtgctttgaagttttggaacacttctacaattaaaaatagagtagagccattttttatttgtttcatcagaaacaatacgtgggagagagggttaaatataaatatattttcgtgtgtatttttgggaagtttttgttccaagcaatagtcaaannnnnnnnnnnnnnnnnnnnnnnnnnnnnnnnnnnnnnnnnnnnnnnnnnnnnnnnnnnnnnnnnnnnnnnnnnnnnnnnnnnnnnnnnnnnnnnnnnnnnnnnnnnnnnnnnnnnnnnnnnnnnnnnnnnnnnnnnnnnnnnnnnnnnnnnnnnnnnnnnnnnnnnnnnnnnnnnnnnnnnnnnnnnnnnnnnnnnnnnnnnnnnnnnnnnnnnnnnnnnnnnnnnnnnnnnnnnnnnnnnnnnnnnnnnnnnnnnnnnnnnnnnnnnnnnnnnnnnnnnnnnnnnnnnnnnnnnnnnnnnnnnnnnnnnnnnnnnnnnnnnnnnnnnnnnnnnnnnnnnnnnnnnnnnnnnnnnnnnnnnnnnnnnnnnnnnnnnnnnnnnnnnnnnnnnnnnnnnnnnnnnnnnnnnnnnnnnnnnnnnnnnnnnnnnnnnnnnnnnnnnnnnnnnnnnnnnnnnnnnnnnnnnnnnnnnnnnnnnnnnnnnnnnnnnnnnnnnnnnnnnnnnnnnnnnnnnnnnnnnnnnnnnnnnnnnnnnnnnnnnnnnnnnnnnnnnnnnnnnnnnnnnnnnnnnnnnnnnnnnnnnnnnnnnnnnnnnnnnnnnnnnnnnnnnnnnnnnnnnnnnnnnnnnnnnnnnnnnnnnnnnnnnnnnnnnnnnnnnnnnnnnnnnnnnnnnnnnnnnnnnnnnnnnnnnnnnnnnnnnnnnnnnnnnnnnnnnnnnnnnnnnnnnnnnnnnnnnnnnnnnnnnnnnnnnnnnnnnnnnnnnnnnnnnnnnnnnnnnnnnnnnnnnnnnnnnnnnnnnnnnnnnnnnnnnnnnnnnnnnnnnnnnnnnnnnnnnnnnnnnnnnnnnnnnnnnnnnnnnnnnnnnnnnnnnnnnnnnnnnnnnnnnnnnnnnnnnnnnnnnnnnnnnnnnnnnnnnnnnnnnnnnnnnnnnnnnnnnnnnnnnnnnnnnnnnnnnnnnnnnnnnnnnnnnnnnnnnnnnnnnnnnnnnnnnnnnnnnnnnnnnnnnnnnnnnnnnnnnnnnnnnnnnnnnnnnnnnnnnnnnnnnnnnnnnnnnnnnnnnnnnnnnnnnnnnnnnnnnnnnnnnnnnnnnnnnnnnnnnnnnnnnnnnnnnnnnnnnnnnnnnnnnnnnnnnnnnnnnnnnnnnnnnnnnnnnnnnnnnnnnnnnnnnnnnnnnnnnnnnnnnnnnnnnnnnnnnnnnnnnnnnnnnnnnnnnnnnnnnnnnnnnnnnnnnnnnnnnnnnnnnnnnnnnnnnnnnnnnnnnnnnnnnnnnnnnnnnnnnnnnnnnnnnnnnnnnnnnnnnnnnnnnnnnnnnnnnnnnnnnnnnnnnnnnnnnnnnnnnnnnnnnnnnnnnnnnnnnnnnnnnnnnnnnnnnnnnnnnnnnnnnnnnnnnnnnnnnnnnnnnnnnnnnnnnnnnnnnnnnnnnnnnnnnnnnnnnnnnnnnnnnnnnnnnnnnnnnnnnnnnnnnnnnnnnnnnnnnnnnnnnnnnnnnnnnnnnnnnnnnnnnnnnnnnnnnnnnnnnnnnnnnnnnnnnnnnnnnnnnnnnnnnnnnnnnnnnnnnnnnnnnnnnnnnnnnnnnnnnnnnnnnnnnnnnnnnnnnnnnnnnnnnnnnnnnnnnnnnnttacttccttctgggtggaggctttcagactcccaatcatgaaggcaagttaatctttctctccagttagtgacttttgccccatagttgggtaagcacttcctagattgagaaaaagcagctacagtcaatcctactcggtttccctcatttggtgatcagtcagtcacacataagctccttgtattctaaatttcatgcacttctcccagatgctatagggttttctctcactgttgccaatggatatcatccagacagtgggctcatatctcccgcttttgtgcaatcactgttgtattgtagtcctaagactcattatagtgtatttttgatatttttgaaatgtgttaaattttttaattcaataatatgagccagagcatgttgcagcaaatctattgttt

SEQ ID NO: 40422 - DNA, 624 bp, Macaca Mulatta
ttagagcagctattcagattagcccagggctgagcctcagaagttagatcattaggttagaggaagacaaaatattataatgtaagttaatatttactggatactttctatgggccaggcactgttctaagcactgtacataactttaatgtgtttaatcctcatggcaattttccaaatgaggaaaccaaaatacaaaatattggtattactgctctgagatttcaaagctggtcaggaggaggccggattttgaaatcaggctttgatcgtctcagctgggcatatttaactctgcgtggtttctgtattttgtaaagttatcatgatgctcactacttaacagggtttttgtaacctcaagtacagccgagatggtttcaatgctttatcgtcctaatcccacgtgaaagtaactccaatgttggagggaatgacatggtggggaggtgtctggggtcctggagacagatgcctcatgatgtcttggtgccatccttctaacgagtaagttatttgctaattaacatgggtggtggttgttgaaaggagctgcacccgcctcttgctccctctcaccatgtgacatgtttccccctccaccttgtgccatgacaaaagctt

SEQ ID NO: 40423 - DNA, 299 bp, Macaca Mulatta
tttaattcgggaggttagtttttagctagctttagaagtaagcctttatcgcttttctgaaggaaatcagagaagtgtcaatggaccatcactcagactgagacttgagctattatagaacctgggaaatatgtattagaaaactgttgtctacacctcttttaattggtgaacattttctaagttgtggtcatatataaacaaaaaaaccaaatcagactaaatcattgcatgtaattttgggattgggaggcctagttcctcaaaaagctaaatggaattaccatatgatgattacc

SEQ ID NO: 40424 - DNA, 828 bp, Macaca Mulatta
  misc_feature (1)...(828): n = A,T,C or G
ggcaccgtggctcacgactgtaatcctagcactttgggaggctaaggtgggcagattactttnnnnnnnnnnnnnnnnnnnnnnnnnnnnnnnnnnnnnnnnnntctgtctctattaaaaatataaaaattagccgggcatggtggcaagtgcctgtaacnnnnnnnnnnnnnnnnntnnnnnnnnnnnnnnnactcnnnnnnnnnnnnnnnnnnnnnnnnnnnnnnnnnnntgnnnnnnnnnnnnnnnnnnnnnnnntcagggcannnnnnnnnnnnnnnnnnnnnnnnnnnnnnnnnnnnnnnnnnnnnnnncacctggacagcactaccaaccagctctttctaactgacatttagagaatactccaaatgtttcaagtgcatttgaaacatttaccaagataggccacattctggccataaaacaaaacaaattttttagaattgaatttatgcagtgttgtttatggaattaatccagacagaagtcaacagnaaaatatctggaaaaatccccaaatatttggaaatttgaaaacatatttctaagtatcctttgngtcaaagaggaattcataaaaggaattacnaaatatttttgaattgagtagaaaatgaaaacacaataaaaatttgtgagatgtgacaaaaaacagtgctttagaagggaaattcatagcatttaagtactcttttatacacgaggaagagtttttcatgaaatgaaactcaataaattttaagcctacccttaaagaaaacatggataaaaggaaaagccaaactaaatttcaaaagccaagccaaaaagggaaggggattaaat

SEQ ID NO: 40425 - DNA, 453 bp, Macaca Mulatta
  misc_feature (1)...(453): n = A,T,C or G
ggatagaggagatgccactggccgtctgtgcccccagcccctccctcttaatcgaggctgcccttgctcgctgcagaggccactctgcaggatcctcatgtcgcgcgtgacgtgtggtggcacagccgtgtcagagtcacagtgtcttttctgtcgttctagttccagggtcacccccgagaggacaacaggcatctggaagtgctctctcgccactctgggggcttactgtctctggcttgtttccatcactggaaatcacttagagaagtgtagggtttttggtccttgataaagcctagaagacatttgtgaggttacaaaatggaaattttcttttgtttctgttttttaagatctaagaagttgtgaatgttgttaatcatttagccgttgcaataaatgtagaggaaatccatatcaagcaaaaaaannnnnnnnnnnnnnnnnnnn

SEQ ID NO: 40426 - DNA, 669 bp, Macaca Mulatta
  misc_feature (1)...(669): n = A,T,C or G
gggnnnnnnnnnnnnnnnnnnnnnnnnnnnnnnnnnnnnnnnnnnnnnnnnnnnnnnnnnnnnnnnnnnnnnnnnnnnnnnnnnnnnnnnnnnnnnnnnnnnnnnnnnnnnnnnnnnnnnnnnnnnnnnnnnnnnnnnnnnnnnnnnnnnnnnnnnnnnnnnnnnnnnnnnnnnnnnnnnnnnnnnnnnnnnnnnnnnnnnnnnnnnnnnnnnnnnnnnnnnnnnnnnnnnnnnnnnnnnnnnnnnnnnnnnnnnnnnnnnnnnnnnnnnnnnnnnnnnnnnnnnnnnnnnnnnnnnnnnnnnnnnnnnnnnnnnnnnnnnnnnnnnnnnnnnnnnnnnnnnnnnnnnnnnnnnnnnnnnnnnnnnnnnnnnnnnnnnnnnnnnnnnnnnnnnnnnnnnnnnnnnnnnnnnnnnnnnnnnnnnnnnnnnnnnnnnnnnnnnnnnnnnnnnnnnnnnnnnnnnnnnnnnnnnnnnnnnnnnnnnnnnnnnnnnnnnnnnnnnnnnnnnnnnnnnnnnnnnnnnnnnnnnnnnnnnnnnnnnnnnnnnnnnnnnnnnnnnnnnnnnnnnnnnnnnnnnnnnnnnnnnnnnnnnnnctcacagtttagccccgcatacatctataacatcgcacccaaaatattcttactgtgagggaaacctctatcaccn

SEQ ID NO: 40427 - DNA, 818 bp, Macaca Mulatta
  misc_feature (1)...(818): n = A,T,C or G
gggctttttcgtctgggctgccgacatgccatccagactgaggaagacccggaaacttcggggccacgtgagccacggccacggccgcataggcnnnnnnnnnnnnnnnnnnnnnnnnnnnnnnnnnnnnnnnnnnnnnnnnnnnnnnnnnnnnnnnnnnnnnnnnnnnnnnnnnnnnnnnnnnnnnnnnnnnnnnnnnnngcattaccacttaaagaggaaccagagcttctgtccaactgtcaaccttgacaaattgtggactttggtcagtgagcagacacgggtgaatgctgctaaaaacaagactggggctgctcccatcattgatgtggtgcgatcgggctactacaaagttctgggaaagggaaagctcccaaagcagcctgtcatcgtgaaggccaaattcttcagcagaagagctgaggagaagattaagggtgttgggggggcctgtgtcctggtggcttgaagccacgtggagggagattcattaaatgctgactactttttcaaannnnnnnnnnnnnnnnnnnnntcttttttacaatctctattcatacccgcatttcgctataacaatgtactgggatgtttggtatatccgacctttaacaagtacttttgtttgttcctctttagatcatcaagaaaaatttctataaaaaatttacttgggcttgtaatgaccaagtagaatagagtggtggtgggggacccaacannnnnnnnnnnnnnnnnnttctgaacaacatatttttgtggggggcgcggccaccccccattaaaatatacaacgggcggtctacaccgctatt

SEQ ID NO: 40428 - DNA, 757 bp, Macaca Mulatta
  misc_feature (1)...(757): n = A,T,C or G
ggcagcttccagaactatgagaaatacctttcttttgtgtataagccaccttgtttatggtgttttcgctatgacagccagaaaatattaatactaagacaaggaccctgccctcaaggagtttactgtctatggaaataaacaggaaaggacttatgccaaaaatgtgattgctatgatacagatatgtactgtggatgtgctgttggtggtacatataccacagataccagcaaaatactgcatccagtcagttctgctataatgagatgtatacattcttaaaaatcaccaagtgtagggaaaaataagattggggcacaacatataaaagtttcatcagtaacacatttttaaaagaagtaggaacctaataaaaatgatagcaccgttttaatggttttacatgttaaaatggttaagagaaacataaaaactacaataaatatggcactttacctttaaaaagacctgaagtttgcttttgaatatagtcatgggaaaagatgcctcttgtgagttactatgaaatggtggaaggacagttgcctgaaatctgagggaaagttaacaccagatgtggatggctgtggctggtaacataagagatgtactngagtagctgggagatgtttgaggtatatgttttatgtggtcctatgttcaggttgtggctggatgcanttttatttcatctgtctagtggtaaaatggcacataaagcaaatggggattcctgtggctcatggttgtgccc

SEQ ID NO: 40429 - DNA, 1065 bp, Macaca Mulatta
  misc_feature (1)...(1065): n = A,T,C or G
ggaagaaataatataaagcagggtcaattacaactctatcactttcattgtttccctctcttcttgcataaaatccatctcttgtgctgtttcagctgtagtataactttggtgtagtctccagttctaccctcttaagagtgataagctgattttgttcctagactcaaattacgatatttaggatattaagttttttcctttctgctcggactaaaatatgaaattggggtctacaaatttaactgtttaagatactattagactaactatgtgagttgagccaactaactttctcctgataaagactattccatagttttctaagctactgatctgacacaagttgctataaaggaccccaacgcgcataaagggcaataacaaatgagatgcttaaccaacaacaatctnnnnnnnnnnnnnnnnnnnnaaatgtaacggggatggggcacccaaagatcaccttaaacatatgacaaacttacagaaagattaacaaaaaaacaagcaaggtggagcacaaaaagaagagcccgtgtacacgacaaactactcttgctatgaagaaggtatgacgaacaaaattccccattagacacataaacccataggcacacaaagcaagttattaccgtgaggagggtaaattanttgtcnnagtagtatgtgtggttgtctgattatccccataaaaaagtttttatccggggtgcggccgcatatgcccaaaaaccaacccaaacaacagagggaacaaactctacggaggtaaacgttaaaaacaagagccacagcgggaacaatgtgcggcatagaggatgcacccccaagtgctggtagaattctaagatacacttagttagtcctctctactagagcatcaagtttgaagaaaacctgatccacaataatatataatacatagcgctatcgaaatcgaaaatattgctggccatagtcacattacacatcattcatcagtaaaacatataacggagaatatactccgagagaagtcaaaattaccatctcctgtccatcgggtcagatgcaggcgcgggg

SEQ ID NO: 40430 - DNA, 763 bp, Macaca Mulatta
aagtgtttccttaaaaggtaagcccaatttcccccccaaaattgggaaggaaaatttttgtaattagccaaggctctttaagaaattttttgcctattcactgtatagccagtttaggaggaggtggctgggtaagggaaaaaattaccttaatgtatacccagtcgagaaaagagtttaaggtggccaggattttaatagatccggtttaatccctagcattagtgattttgtgtaattgccaggatgtgacttggagaaattttattaaaggtatcctaattataaatagttggtattaaaaattggaaaaaggaaactattattgagtgtctaattatgttttagacactctattgagtgtctaattacgttttagacactctactgtgagcaatttgcaaatggtatctcttggaatcctcacagcatcccctgaggtaggtgttgatgtctattttataatcagaaacctcaggttatacatttaaccaaaagtcacatgggtagtgaaagagctggactcggatgaatctctcttttagtccaaagccttcatatgctaggaaaccctgaaattatcatgaaatctgagttctagtcccagttcttccataaactagatacaatgtaggtttaaatgacacctaatgtctttgggtctcaagcctttagaaaatgaaaatgtttttactacctgatatataagatccattccagttgtctgcttctattttaatgtccttccatcccatccctcccc

SEQ ID NO: 40431 - DNA, 237 bp, Macaca Mulatta
tgggaaaggggcatcccccattagattcaatactttgcacttctactaagcttgataggacaggagtgcaatctacaattatctaaagtgaattaccttccatccaccattctttatctttttcttgaataagaagatatctagcaaggatattacttgtgcctagagggtagcaattacaggatagattcatataaaatacggtattctgtattaatttaagagaataataccaaa

SEQ ID NO: 40432 - DNA, 543 bp, Macaca Mulatta
tgtgtcccattttgtgaataatttggtcttgggcatatactctgatatttttcctgatctgtaaaataaggttaaattagaggcctgaagtgctttctagctcataaagtcgatgttaataaatttcagagatttgcctataagacattctatttgtattctttttcccttaaatttaaagtgtgttttctttgctccccaaacttgatgtaaaagcttatatttcctttcactatccaattccaggtttcattgatttaaaacagccttcattccaaaggagagttataattaataagttttgtttgttgatgttttgttctaactgcagaaatgaataagattgtaccaatggtagaggtatacattttccatttaatcacattagctttgcatgttagtggcaaggagtagcagattctcaaacattgttttaatttgtatttaaaattttacaaagaatatctaattttatgtaattatatggcacatgcatagaagaaatcaaagtgacatagtgcatagagttgaatgatggtcagg

SEQ ID NO: 40433 - DNA, 235 bp, Macaca Mulatta
atgttcatcactgagtaatggattaagtgaaaatccaggagtttccacctgcagttgtgggctgaggtgacaatccttccaacatatttgttagcataaatattatgcctcaatttctgttgcaaattggtgattgtgaaatttccaaaagtgattttcttgtctctgtttctttgtttaattcttataatataaagcaataaatatggagagtcagtagtcttcttccacacca

SEQ ID NO: 40434 - DNA, 447 bp, Macaca Mulatta
cacacaaaacagggtccaggttactctcatcctcatgatcataactgtctctcctgctggttttaggggtggattctcagactgtggtgacccaggagccatcgttgtcagtgtcctctggaggaacagtcacactcacctgtggcctgagttctggcctagtctctaccagtaactaccccagctggtaccagcagaccccaggccaggctccacgcacgctcatctacagcacaaacactcgcccttccggggtccccggatcgcttctctggctccatccttgggaacaaagctgccctcaccatcacgggggctcagacagacgatgaatctgattattactgtatgctctacatgggtagtggcatttccacggtgatttaaacctatgaggaagtgcaaccaaaaactctttatatactcacaacagttcagcccttacaa

SEQ ID NO: 40435 - DNA, 774 bp, Macaca Mulatta
  misc_feature (1)...(774): n = A,T,C or G
gggggaatttttccatgtgttactgaatcagtgtgtctgtggggggaaggagggtccaggacttcctattctgtcatcttgctgacatcactttctccaaggcctttttttcgcttaaaactgaaaaagaacttaaatgaattacaggagaaacaatatacatgatggaccaggaatcaaaatggcataaggctcttcaacaacatctttggaagccagaacaaagcctttgaattattttcaacctagaattctgtactcaactaaactatccttatgagggtaaaataaagatgtttccagccacacaagaagtaaaataattgatgtcctatatgcagtttctgaggaaagcagtagaaaatgttctccacaaaaatgaggaagctaagaaaaagacttgggatctaggaaataaagggtccaacacagacaagaaaaattctcagtatgatgtaagaaattctcaggttggcagctgggtagccggcttggatggattagagaacagagagcattggaaaggatatttttaagaaaaagggaaaacatctatagattatctgatgtgattgattatattcaaaaaggatttgtagttctgtcagtttgtgatacaacagtgagaggtacttagcaaatgaagcagaagaaaaatgaaattaacctctaaggtataaaattgccctaagaaaggaaaattttatgttagtgccattaattattttaaatttgaatggggatactataaaatactataattaaattaaatgn

SEQ ID NO: 40436 - DNA, 750 bp, Macaca Mulatta
  misc_feature (1)...(750): n = A,T,C or G
ggatgccccagttagatacatcaacatgattcaccactattatgacgatgcttcccacactatatcttatcatgcagctaaagctactaaacacaaatcaccaccaaccaccccttacaaaaacccccacccttcagtctcacgatgtccgctgacannnnnnnnnnnnnnnnnnnnnnnnnnnnnnnnnnnnnnnnnnnnnnnnnnnnnnnnnnnnnnnnnnnnnnnnnnnnnnnnnnnnnnnnnnnnnnnnnnnnnnnnnnnnnnnnnnnnnnnnnnnnnnnnnnnnnnnnnnnnnnnnnnnnnnnnnnnnnnnnnnnnnnnnnnnnnnnnnnnnnnnnnnnnnnnnnnnnnnnnnnnnnnnnnnnnnnnnnnnnnnnnnnnnnnnnnnnnnnnnnnnnnnnnnnnnnnnnnnnnnnnnnnnnnnnnnnnnnnnnnnnnnnnnnnnnnnnnnnnnnnnnnnnnnnnnnnnnnnnnnnnnnnnctaggaccgggcacagtaatagtgggggcttcccctttaaaccaaagactccctagcccaagtcctggcgagaaggaacaccgacacctgctgttcctgggcctgtgaccgatcgaaagagagcagactacttaattcaacacaatggcgtcggagccgaacggaataacggggaaagctgcagaaagcgggagcatgcagcaaaaaaaacgctggaagcgggaagaaagtggaaaaaagaaaaagatgaaaacaacgagaacgga

SEQ ID NO: 40437 - DNA, 653 bp, Macaca Mulatta
  misc_feature (1)...(653): n = A,T,C or G
ctgatacctagagaggatcagcaggggttaggtattcatcagacatgtacactttgattaagcaccccatgaatttctgacctacacctcaaagaaccactgctccaaggagtcagctgcaaggccgtggaaaacatacaaggggacagttcagaggcccaggtctgctcactgagcattctttctaccagactccagtccaagggtcttttccttgtgattctaattgccctggaagagtagaaataaaaatccttcaaaaagagaaaaatgggccaggagtnnnnnnnnnnnnnnnnnnnntnnnnnnnnnnnnnnnnnnnnntgggaggatcacctgaccctnnnnnnnnnnnnnntnnnnnnnnnnnnnagtgagaccctgtctgtattgaaaatatatataaatgtacatgtggtcccacatctttagtaataaatatttaccattttccacccattcttcacaatgcttaagcccagatgcaatacaaacagttctaggatctaggcacaaagaggtaagacacagaatctatccttaaaggagcagcttgaaagaggtgggagttggagccacaagcaaacagctgattatataaagtggttaactgtttatctgaggggaaacaaaggtcaattgaagcatacag

SEQ ID NO: 40438 - DNA, 204 bp, Macaca Mulatta
tggtcagtctctggggagggaggggtgcgccaggactcacagcgtcgcaggcggatgggccatagcaggaggctgcagagacacagggcagcggccacacccacgccgcccgtcacggccaccatcgcggagaaaagaagctcacgcaggccctgcagcagagctccgagctgtgggaggaggtgggggataagtaggcaccgc

SEQ ID NO: 40439 - DNA, 379 bp, Macaca Mulatta
  misc_feature (1)...(379): n = A,T,C or G
tcggaggtagcagctactcccgctgctacagctttggttctggcggtggctatggcagcacctttgggggcgttgatgggctgctggccggagnnnnnnnnnnnnnnnnnnnnnnnnnnnnnnnnnnnnnnnnnnnnnnnnnnnnnnnnnnnnnnnnnnnnnnnnnnnnnnnnnnnnnnnnnnnnnnnnnnnnnnnnnnnnnnnnnnnnnnnnnnnnnnnnnnnnnnnnnnnnnnnnnnnnnnnnnnnnnnnnnnnnntgagaaggccaccatgcagaacctcaatgaccgcctggcctcctacctggacaaggtgcgcgccctggaggaggccaacactgaactggaggtgaagatccgtgattggtaccagaggcag

SEQ ID NO: 40440 - DNA, 278 bp, Macaca Mulatta
ggctggcccgggtgccctgcgcaagctggaggtggtgcacaatgtgcggctgcatgcgggccacgtgcaccagctgctggcccaggtgggcttcccccggctggcctcgctcaccctgcccaccaaggcctttgatgcaccccccgcctgcgcctccactcccgacggtgaggaccgcctcctcgcctccatcgcccgggagctcggcaagatgacgcagctcaccgagctcagcgtggccttctccaggctgaccgggaagatcccgacgctgcttg

SEQ ID NO: 40441 - DNA, 664 bp, Macaca Mulatta
  misc_feature (1)...(664): n = A,T,C or G
gcatacttacaacctttgaagtaagctgttgttcagttcatcttnaccagatgtgtctggcgaaatattcagggtttgatggactgctttactttcgtttggaagtgatagctaagtttattatactctatattaaacaactttgttcatttcactgaggaccttatcttccttatatttcagaacaaagaaacaacaagcatgaataaaaagacaaatgtatttgacttcctcnnnnnnnnnnnnnnnnnnnnnnnnnnnnnnnnnnnnnnnnnnnnnnnnnnnnnnnnnnnnnnnnnnnnnnnnnnnnnnnnnnnnnnnnnnnnnnnnnnnnnnnnnnnnnnnnnnnnnnnnnnnnnnnnnnnnnnnnnnnnnnnnnnnnnnnnnnnnnnnnnnnnnnnnnnnnnnnnnnnnnnnnnnnnnnnnnnnnnnnnnnnnnnnnnnnnnnnnnnnnnnnnnnnnnnnnnnnnnnnnnnnnnnnnnnnnnnnnnnnnnnnnnnnnnnnnnnnnnnnnnnnnnnnnnnnnnnnnnnnnnnnnnnnnnnnnnnnnnnnnnnnnnnnnnnnnnnnnnnnnnnnnnnnnnnnnnnnnnnnnnnnnnnnnnnnnnnnnnnnnnnnnnnnnnnnnnnnnnnnnnnnnnnnnnnnnnnnnnnnnnnnnnnnnnn

SEQ ID NO: 40442 - DNA, 895 bp, Macaca Mulatta
  misc_feature (1)...(895): n = A,T,C or G
tccctccnnnnnnnnnnnnnnnnnnnnttccaccagaagagggggccaagaagggggtttttaataccccccgggggggggatattaggtttttatttacacccacccttctctgggggaggggtgttctcacgcgttggggggaaaaaagtttattatataaataatacccaccccgtttttatttacaatttttcacccaccggtgggggggaggnnnnnnnnnnnnnnnnnnnncgcgcttgtgggacacccctttgttgtgggaaaccccccgaaaaagcgcccctggaaacacccctctctggggtttttctaaaaagaaaaccttgttatcccccccgccgnnnnnnnnnnnnnnnnnnnnnngtttccacacacgttttttttttgacacaggnnnnnnnnnnnnnnnnnnnnnnnggnnnnnnnnnnnnnnnnnnnnnngtgggcgcccgcgccccaaaaaaaattnnnnnnnnnnnnnnnnnnnnnnnnnnnnnnnnnnnnngcaaatttaaantntannnnnnnnnnnnnnnnnnnnnnnnnnnnnnnnnnnnnnnnnnnnnnnnnnnnnnnnnnnnnnnnnnnnnnnnnnnnnnnnnnnnnnnnnnnnnnnnnnnnnnnnnnnnnnnnnnnnnnnnnnnnnnnnnnnnnnnnnnngttttgaatagattttttagttttattgaaatcttacatgaacaagaaattggaaatacaatcacatcaaagaacaaattgtcacggcttttgacgtttaagccaaacaaattttgtagggcagatttcaaaaaggtgtgaagttataacaatttaaaaacacagttaacctacttctaggaatgcaaaacatacaatcataggttattttcaatacaagaaaacttcc

SEQ ID NO: 40443 - DNA, 470 bp, Macaca Mulatta
cgatagctacgattaagaaatacacaagcactgttttaagagtcaggctgaggcccataagcagctgtgtgatcccaggccaacctcactggggctcacttcccatgaaaacagccatccaaagggtctcttgtctttacagccttctttggtgtcagaccagcctgtgccatctcctggaatccgatcaaccctgggttggactgggatgcctttaaaaggcgccccaaggaaagccacagaaccctatgagagagcctgtgtctacaggtggagaaaaccactgcagatacaatctccgctgatttcccccttgggatgtattcttaaatgccttctaagtctcagggctttttctcctcagctttgtcacagaaagctcttaaagccagctccctatgtgtgggaataataaagaaaacatgcttgacaaccctctcctcctccaagccctaacaaagaacttttgc

SEQ ID NO: 40444 - DNA, 823 bp, Macaca Mulatta
  misc_feature (1)...(823): n = A,T,C or G
gggggacagagtgagaccttgtctcaagaacccnnnnnnnnnnnnnnnnnnnnnnnnnnncggcttaacagatacactttaaatatcagtttcccttgctaaagtaaaactcacctctatttgatcatctgtatgttttcattttccttttatttgctgatacttggccttgtatctaaaacatgttttacaaagtaataggacaatataaaataagaagaaataaggtataaacaggtgaggtgaaaggaaaagagtttattacatatgtaacctgactttacccctaatcactggggtgattacattgagactgagctagcccttcagtagcattcaccaatgtaatcagcggggtgaggttaggttacaaatgtaataaactattttcctttcacttcttttgcttagaataaaattagacttttagtgcctttaatctttccatgttctgctagctgtgcttggaagtttgcttgggaaaatagcagctttcatcccacaggctctctagccccttcccttcttaaacagtaccctgcaacccatgaaccccgagcttatagggaatccctttcatgtattcccctttcatgagtgcttcagggagcaatttataccactccgccagattttatgggtgttccaaatcggaaggtaagccccctcgatagccatttaaccaaatccctttcatttctgaactgggggtccggcccactaatttccaaaagttcctattaacccccacttcaaggcccaaaaaaatcctcttccccctttcaactgtttatgggccaccctggcctatttttacacaaac

SEQ ID NO: 40445 - DNA, 827 bp, Macaca Mulatta
  misc_feature (1)...(827): n = A,T,C or G
ggnnnnnnnnnnnnnnnnnnnnnnnnnnnnnnnnnnnnnnnnnnnnnnnnnnnnnnnnnnnnnnnnnnnnnnnnnnnnnnnnnnnnnnnnnnnnnnnnnnnnnnnnnnnnnnnnnnnnnnnnnnnnnnnnnnnnnnnnnnnnnnnnnnnnnnnnnnnnnnnnnnnnnnnnnnnnnnnnnnnnnnnnnnnnnnnnnnnnnnnnnnnnnnnnnnnnnnnnnnnnnnnnnnnnnnnnnnnnnnnnnnnnnnnnnnnnnnnnnnnnnnnnnnnnnnnnnnnnnnnnnnnnnnnnnnnnnnnnnnnnnnnnnnnnnnnnnnnnnnnnnnnnnnnnnnnnnnnnnnnnnnnnnnnnnnnnnnnnnnnnnnnnnnnnnnnnnnnnnnnnnnnnnnnnnnnnnnnnnnnnnnnnnnnnnnnnnnnnnnnnnnnnnnnnnnnnnnnnnnnnnnnnnnnnnnnnnnnnnnnnnnnnnnnnnnnnnnnnnnnnnnnnnnnnnnnnnnnnnnnnnnnnnnnnnnnnnnnnnnnnnnnnnnnnnnnnnnnnnnnnnnnnnnnnnnnnnnnnnnnnnnnnnnnnnnnnnnnnnnnnnnnnnnnnnnnnnnnnnnnnnnnnnnnnnnnnnnnnnnnnnnnnnnnngcccagttctcatagcccccttaaaacttttttctacccagcgccggacgaaacaagaccgcctatccgtactcctttttcggccctgcctcaggcccctacaaaaaagtcttctcagaacctgtttctttttgggccccccccgcgggcccccttatcggttaggggtggaaccactcgcgtcctctatctcctgt

SEQ ID NO: 40446 - DNA, 774 bp, Macaca Mulatta
  misc_feature (1)...(774): n = A,T,C or G
ggctttttggagaacataaggactatgagaatgcannnnnnnnnnnnnnnnnntttcctttatatctaaggtaccaaagcactgagtctaatttacctattaagggagactctttaaaatcaactttataactaattcatactataagacagataatagctaaaattttggaataatttatattaaaagccacaagtcttaaaaatccctggatgtgatataaaaaggatcttggcttcttttttgaagtatttaaaattaatcaccttagctctaccatatactagatctgtgaccgctacataaattgtttatcatctttgggtctctattgccttatttataaaataagtgtaagttgttcagcctacctcacagggctgttgtgaggaaatacaatgaaatggagtatatgaacttgcttcagcaacagcaaagtgctatgtaaatgtaaagtgttctttttagctaataatggatttaagtgtttggataattctagatgcatttactttgataaagtgtgtgcttaaagtggtatcaccagtgatttcaaacatgattttaaaaaaatcaaagaaaaccccaattaaaatgctctttaatattcatttaatttgtgcatgacttgtggcctttttatattttctcaagcctattactctagagctgtaaaagctctttttcacagcattggggtgtgtcagtggtagaaatagtggccataaaataaattgaattaaaggctaacattttcccatggcagggncattt

SEQ ID NO: 40447 - DNA, 1325 bp, Macaca Mulatta
  misc_feature (1)...(1325): n = A,T,C or G
ttgtagcaaacgggctcatcacagccgggcctggcattgagccatggttgctagaattatccacctagagggcccagccaggccttttgggtcatgcctctgcccctcaaggctgatggagatgtgttttcagggaggatggatggggtaatatgaggaaactgaggctcaggcgtgcagagcctgccccacctgctgcgtgaccttaggtcagccctgcccctctccgaagcctttagcaggtagacaacgggtgagagcagctccaagcaccctgcagctctgctctttgattgctccaagcctcattccctccacattcctgactcctgtgtgactacaggccaggcagtcttcccttgagcctctgatgtccaattctgtgtcatggggttatcagccctgccttcttggtcctgggctgggagtggaggctccatcctgacctggatgtggtggcagagaggtaggtgcccccatccctcacccctgcctctgccgccagtgtcgggactcttctgcctagtatgggcctggggtgaactgatggagaggctagagggagcatcctgcagggagaggcctcaaggaaggcaaggccagcacccccaccccaaagggcctctgtcccacccaggaggctccatcctcccagcaannnnnnnnnnnnnnntggggatggagtggagccgtgagtnnnnnnnnnnnnnnnnnnnnnnnnnnnnnnnnnnnnnnnnnnnnnnnnnnnnnnnnnnnnnnnnnnnnnnnnnnnnnnnnnnnnnnnnnnnnnnnnnnnnnnnnnnnnnnnnnnnnnnnnnnnnnnnnnnnnnnnnnnnnnnnnnnnnnnnnnnnnnnnnnnnnnnnnnnnnnnnnnnnnnnnnnnnnnnnnnnnnnnnnnnnnnnnnnnnnnnnnnnnnnnnnnnnnnnnnnnnnnnnnnnnnnnnnnnnnnnnnnnnnnnnnnnnnnnnnnnnnnnnnnnnnnnnnnnnnnnnnnnnnnnnnnnnnnnnnnnnnnnnnnnnnnnnnnnnnnnnnnnnnnnnnnnnnnnnnnnnnnnnnnnnnnnnnnnnnnnnnnnnnnnnnnnnnnnnnnnnnnnnnnnnnnnnnnnnnnnnnnnnnnnnnnnnnnnnnnnnnnnnnnnnnnnnnnnnnnnnnnnnnnnnnnnnnnnnnnnnnnnnnnnnnnnnnnnnnnnnnnnnnnnnnnnnnnnnnnnnnnnnnnnnnnnnnnnnnnnnnnnnnnnnnnnnnggccccaagtccaggtggcagctgtctagctggagcaggaactcggggatggatggggacactctcaccagcatgggtag

SEQ ID NO: 40448 - DNA, 790 bp, Macaca Mulatta
  misc_feature (1)...(790): n = A,T,C or G
ggggtaacaattcaatacaaatttaggaattttgtcaagtctttcacccacttataagttatacttgcattcctagtatcacctttttttgaggggggtaagggatctttacagtaatgatactgtaaagtatctttaagctactttctagcgacattagtctggctatagttgcatgttgtgaaaagcttggtttaagttgttaaaattacccataattgttacaatgagtctatataatagctttactttagtactaagttagccctgcctctgaagtatgaacccactggtctctactgaatactgttggggtttagtcaggtctttctactgggtagtcattggttttccagccctgtgggagcaatgggtctttggctgctgtagtaaagggacccctttatggattgttggagcnnnnnnnnnnnnnnnnnnnnnnnnnnctgtgtgtctgtgtgtctgtgtgtcccttttgtctggtactctgcctcaaaaattccagctgccctcaacctccctccaaaaattaatctttttgggtctccaactccagaagggttgttggctcccgtaattttggggttttctcccgtccccttgaaacgggggtttcttggcaaatttgggcccttggaagggccaaaaacagcttagggaaggaaagaaaaagggaacctcccaccccnnnnnnnnnnnnnnnnnnnntttttataacaaaggaaatttggccaaggggaataaacacttttgccccctttttttggccccacaagtgggcccaaaaaaa

SEQ ID NO: 40449 - DNA, 286 bp, Macaca Mulatta
gtgtgaaactgtgtattaatgtcataatcccactctgacccagatggatggctcaaactcactgtttctatgaaacacaatcacggatgatcggcatgcctcatgggagaatctgaatgatccgcagagagtgaaagtccctcgtgaaaatgtcgcctgggcctcataagtttggtggtttgtgcaaacgtgtccctggatattgtagcctttcagtggtctatgtgactccaattgctttatcaacactgatacccactcccagagatggtacagatggtgaaac

SEQ ID NO: 40450 - DNA, 931 bp, Macaca Mulatta
  misc_feature (1)...(931): n = A,T,C or G
gggttttcacgtttattagtttagttcattggcctgtgtgtatgtgaaataagggtccagtcctttgatgataaatatcacacattgttggatagatttgctgggtttgacattttaaagtaagactctgatcttctgttaggaaaacatttatttctttggtttttcttttttactttctatatcagtggaagcgatgagtttcggcttcatattcacatatttcagagttccactcccaaccctgctttccactagctttgtaacctttgcagtttgcttcatagtttggttcatagaaaatatgaactagattttctgcatctgcaaatagaaatcatatctattctttcttaatatagtctgtacaaaaagcaatattaagattatgcaatatgaagattatcgtaacaagatgagnnnnnnnnnnnnnnnnnnnnnnnnnnnnnnnnnnnnnnnnnnnnnnnnnnnnnnnnnnnnnnnnnnnnnnnnnnnnnnnnnnnnnnnnnnnnnnnnnnnnnnnnnnnnnnnnnnnnnnnnnnnnnnnnnnnnnnnnnnnnnnnnnnnnnnnnnnnnnnnnnnnnnnnnnnnnnnnnnnnnnnnnnnnnnnnnnnnnnnnnnnnnnnnnnnnnnnnnnnnnnnnnnnnnnnnnnnnnnnnnnnnnnnnnnnnnnnnnnnnnnnnnnnnnnnnnnnnnnnnnnnnnnnnnnnnnnnnnnnnnnnnnnnnnnnnnnnnnnnnnnnnnnnnnnnnnnnnnnnnnnnnnnnnnnnnnnnnnnnnnnnnnnnnnnnnnnnnnnnnnnnnnnnnnnnnnnnnnnnnnnnnnnnnnnnnnnnnnnnnnnnnnnnnnnnnnnnnnnnnnnnnnnnnnnnnnnnnnnnnnnnnnnnnnnnnnnnnnnnnnnnnnnnnnnnnnnnnnnnnnnnnnnnnnnnn

SEQ ID NO: 40451 - DNA, 104 bp, Macaca Mulatta
caggccacaccccctgtgaccattccaggatctgccaagttcacccccaatggcagcagcttcagcatttcctggcaatctcctccggtcactttcacaggcat

SEQ ID NO: 40452 - DNA, 620 bp, Macaca Mulatta
  misc_feature (1)...(620): n = A,T,C or G
gcatatgttgaaaatggcaatgtatagtctgagactggtgattaatttataatattggtacctaaagagatactgagatgaataacttattaatttccttcttaaaatcataattttggatctgtaaaggactnnnnnnnnnnnnnnnnnnagtattatacctgcattttataattgtggaaatagaggccagaaagaataagaggcaagttaggggcagatattgggtttggatcagctcttctgacgcctgattgtgtgacattacaaagcctgaaattcagctccaacatctattaaacatttacagaatatcannnnnnnnnnnnnnnnnnnnnnnnnnnnnnnnnngcctcggcctcctnnnnnnnnnnnnnnnnnnnnncaagctgccgcgcccagccaatttttaaaaacgttttatagagacgggtctcactatgttgcccaggctcatctcaaacccctgggcccaggcgctctcccaccttgtcctcccaaagttctggagtaacagatgtgagccaacacaccaggcccagactgggtaatttataaagaaatttacttctgcccgccccgctgcggctccccgcgcgggtggctgaggtgtagtgctg

SEQ ID NO: 40453 - DNA, 789 bp, Macaca Mulatta
ggtgaaaccaaaatgataaatagctttaagaatgtgctaatgataaatgattacatgtcagtttaatgtacttaatgtttaataacttatttgaataattacctgaagaatatatttttttagtactgcatttcattgactctaagttgcgctttttgcccccatactgttaacatctctgaaatcaggacatgtcttgaaagtaatcatttaacattgtgacaaagtttaattgacagttttttcccatatgtatatataaaataatgtgttttacaatcagtggcttagattcagtgaaatacagttatttcattcaattatggagatgatactatctttacagacattttaaaaagaagttatttttatatgctaatattctctgttcaaatgggatttagagacactgtgttctaattttaagagctgtttcagtgttactagattagtagtagggctgtcgatggggtctttcgaggtcctttgcctaccttaagaacagaggctgggtctgagccttgctccagattagctcttccccaggtctgggtggttaatcatatcacaattcatgtaaaccgctctgcaagtgtaatttaccagcgaaggaacagcccttctccaatgattgggaaaacctggggtcaccccatccggccttttctctttcccgcaattctgaaaataccctggggaaaacccattataaaagggggacttttggcggacccttaaaaggtcacaggggatacgggaaaaggggggcacacttcccaaatgtggcac

SEQ ID NO: 40454 - DNA, 779 bp, Macaca Mulatta
  misc_feature (1)...(779): n = A,T,C or G
gggcagaagattttaatttggataaagtccagnnnnnnnnnnnnnnnnnnnnnnnnnnnnngaagtctcactccgttgcccagactgaagtgcagtggcacnnnnnnnnnnnnnnnnnnnnnnnacctcccgnnnnnnnnnnnnnnnnnnncttcagcctcctctnnnnnnnnnnnnnnnnnnncagaccaccgcgtctagctaatttttatatttttagcagagagggggtttcaccatattggtnnnnnnnnnnnnnnnnnnnnnncctccagtgatccacccaccccagcttcccaaaatgctgggattacagacatgagccactgcccccggtcatgttatactgaatattttaagtatattttattatgcttaattttactatatttatatactatacttaattatatattatacttaattatactataattcattatattaagtatattaatattttaaattttaacaatttaaaataatatttttaattgtttggaggtgaggtatgaagaggcaccaaacagcacaaccttagaggctaacccagttacagcatattttttaaaggtgtcttcattgttttgttcttgctcttattttaaaactaataactcctcttaaaaactaactcagaattcagcagaaaagtaaagtccttcataattgaagggggtggggggggtgaaaattntnaaatttanntcttaaaattgaaatattaagtgaattttagtttagaaaaagaatttttatattttgttaaaagaatttan

SEQ ID NO: 40455 - DNA, 774 bp, Macaca Mulatta
gggcaagctgtgtgaccactgtagggaaatttgaatttgatttttttcccctaaaggtttgatcacttgagtctatgaaacaaactgctaatagattaacaggggaggaaaggcctacaaatgtattaatgtgcatatgggcacgggagtcatcaaactatgaaaactgaaagggccagatgcttgatgcttttataccatcttgaggttacaccagaataggggcttggaacatggttatgggagggcaacagaaagaagataatggggcaaagatggtctagttatgcagatgaaacttcatagatagcagctcctagaaagaataggcatgagcctgtgttaagttgctctgtcagaccttcctaggtgtcagaccttcagttaataatttcctaggtacggataagggggtggctccaagaaagcctggttgtttatttcaccagtgtagattttctctacagatacaagtctcccccacaaaaggcagctttttagggttattcctgtatgcgggaatatatcaaagaagtacattttgggggtgaaatactttcagtttccttgagtcccccattttaacatttcctttatttccttttattattttttactttatttttagaggtgggatctcactctgtcacctaagtcgcaatgtagtggtgcattcatggctcactgcagcctctacctcctggggctcagcaatccttcctgcctcaaccaactcctagtaggctggggaattaaaagaccccccaaccaccc

SEQ ID NO: 40456 - DNA, 115 bp, Macaca Mulatta
atgaaaagatactatcggactatgggacaacttttgttacagcatggaagaatactcacaactacagggtgtggaacagcaacaagcatccagcacttgcagaaataaatccaaa

SEQ ID NO: 40457 - DNA, 840 bp, Macaca Mulatta
  misc_feature (1)...(840): n = A,T,C or G
gggggctgtggggtggccaaggccaggagttggagatcagcccagacaacagagagagactgcatctttacnnnnnnnnnnnnnnnnnntctgagcctggtggcatgcacctgtagtcctagctagtcgggagactgaggtaagggggatcannnnnnnnnnnnnnnnnnnngttacaatgagcaatgattgccnnnnnnnnnnnnnnnnnnagcaacagagccaaacactgcctnnnnnnnnnnnnnnnnnnnnnnnnnnnnnnnnnnnnnnnnnnnnncagtatttatttttgttggctacttagtatacaaaacactcccatgggatagaaagggtcacagtaatacctgctggaagaactaccccacagagcagggagacaaaagtcacacacaactcaactgcaaatcaagtgtgaaaacagcgttgttaggactactatttttgcagttacagcctgaattccaatccttgcccaattttttcctctataaagaggaaagaatgataccttcccttgcaggagtggcggcaaagaagaaagggaaacccccgactgtagacttttagcctgggttgaaaccatcacgggaaaggttcctcaattgaccaaaccaagcggtgaatttttcttctactacctacctcccgctcctattccactaggacaagaatatgtcagcaagggctcccaccggggattttcaaccggaaaaggggaaccaggacccacctcccttgttcccctcgcgggagaaccctcacgccctaagattcaccctccccgcttccactcacgcatgtctggctggcccctctcttcggcactacaattac

SEQ ID NO: 40458 - DNA, 538 bp, Macaca Mulatta
ggctgtggcctcagccatggtcctcctggggcctgtagccttcaagcttgtccagcagaaccagctctagaaaggagacgccctggtggtggcccagctggctggagtccaggcagccaagctgaccagccagctgatccctctgtgccaccatgtggtcctgagccacgttccaggtgcagctggagctggacagcacgtgccatgccatggagatctgggcatcttgccagactcggggcccccaccagagtggaaacggaggccctgacctctggtgcagtggtcgccctcactctgtatgacatgtgcaaggctatcagcagggacatcatattggaggagatcaagctcattagcaagaccggcggccagcagggggacttccattgggcttagttcctgcccttctcacccatggcccagccaggtctggagatgggatgcaatttaagctgagggaaaaatatcagtttcctttaatcacagtcactgtttaccttgagcactaaacctgaagtcagcctgctctactact

SEQ ID NO: 40459 - DNA, 344 bp, Macaca Mulatta
  misc_feature (1)...(344): n = A,T,C or G
agcaaattgagtgtaaaatgtttcgccatgaagccattgcaccctctcccccaggaaacagtgcctaaggatgatgtcaagttacagccagtttgcgctgatcccccaggtcctaagaaaactgtgagtgcttcacatgcaaaggtagagctaccagatatggagaataacttggccatttatagcaaactgcctgactttggggtgagaaaccaagcaccctctaggtcctaggataggtgaattggaggtgcagctgctaaaagttctcattttctacatacttcaggagccagcgtgtnccattttgggtttgtaaaactttgctgtaagtattcacagtt

SEQ ID NO: 40460 - DNA, 796 bp, Macaca Mulatta
  misc_feature (1)...(796): n = A,T,C or G
ggcacaccagcttgggtgacacnnnnnnnnnnnnnnnnnnnnnnnnnnnnnnnnnnnnnnnnncaaaacgcaaaaacataaacttcttcccccaaaagattggaatctaattccagcatttccatttgccagtccattggctgagcaagattgcttcctttccctatacttcagtctatatctgtagagagaaattataatatctatctcctaatgttgttttgaaagtcaagaactagcatctaaaggcaggcctctgtaggatgccttttcctctgcagcgtggtgccattcttctcactgaggagtgaaagtagcagcagtactaattgcccttatgtttagggcaggcatagtggtgtggatgtggaacgaacactacctagtacctaaggtcctctttatgagcactcactggagaagtttctctcaagccttagtagaaaagaccttgcctctctttccttcttatatccagatattctcaactaaaactacctgcagttcctagaaaacactatggtttcttacgtctctgatttctattcaggtgccattttcctttgggaagccttcccagacctaaccctgatagagttaataaaatctttctcttttggggtccgtatagcacatttttaccactttctaagaactctgggattaaaaagtaattaattattatttttgaagaaagggatcttccctctggccaccttaaggctgggagtaaagtgggcatttgtcatgggctcaactgtcaccctttaaacccttcccggggctcaggtgaatc

SEQ ID NO: 40461 - DNA, 865 bp, Macaca Mulatta
  misc_feature (1)...(865): n = A,T,C or G
gggaactctagttatctattctgagatgccgtggggggtcagaannnnnnnnnnnnnnnnnntggagtttctctcattgcccaggctagatggcgatagtgtgatcttggctcactgtaacctccacctcccgnnnnnnnnnnnnnnnnnnnnnnnnntnnnnnnnnnnnnnnnnnnnnnnnnnnnatgccatgacgctnnnnnnnnnnnnnnnnnnnnnnnnnnnnnnnnnnnnnntctatgttggtnnnnnnnnnnnnnnnnnnncgacctcagatgatccgcccannnnnnnnnnnnnnnnnnnnnnnnnnnnnnnnnnnnnnnnnnctcaccagccaaagttaaactattattctgtgtccgaatctgtattaagtgtgacttgtctggttattcagtcctttatccctacataaataggacatcgggaattatcttgtgggccggagggatttagaatagacattgaggttttttttaaaaccccaaagctgttgggggcctaatgggggctaaaggggtttggagtttaaacgtttggtttgggaatttcttagccggggtcgaatattcgttcccgaaaactaattctcttaattgatggatttcttataggtagaattatgcctgggattccagaaaaacaatgtcttgaaaaagagatttaatggtttgtcnnnnnnnnnnnnnnnnnnnnnnnnnnnnnnnnnnnnnggatgcaatttttcccctggggaagtggggggctcgttttgtgaaattaataactatggggggggactaaaaacaatgatccttctcttttccggacgaaaaagaccgggaaggcgctgcgcccccttgagcgatcagtcggcatccg

SEQ ID NO: 40462 - DNA, 425 bp, Macaca Mulatta
atgacctcatctccccggggccggagggcggggaaagaggcgcacacagcagaaccatcttttcccccgccccaccccgctccgcaggcccggggaccgaaagagggcggggccgggcagagggcgctcgcaccgcgccggcgcgccctcagttggaaagaaagtcgatggacgcgcgcacggagcgattggtgctgacgtcgacggcggtgaccttaatttcggtgtcgccaaactgcatggcggcgcggatctcgcggcggccgggaggagcgccggcagcgtcctggccgcagtcggcgggctcaagctcgagactgagcgcgccgcatttgcgcacgccggggtcggtgatgaagcgcgcatcctcggtcgcgcagcagtacaggtagatgagcacgcgccgctggcccggacgcgccggg

SEQ ID NO: 40463 - DNA, 112 bp, Macaca Mulatta
ttcaccagcatctcaacatgcagcagcaccagccgctcaccatgcagcagcccctgggaaccagctccctatgcaggtccagtccgccttacactcacccaccatgcagcaa

SEQ ID NO: 40464 - DNA, 773 bp, Macaca Mulatta
  misc_feature (1)...(773): n = A,T,C or G
ttgttgaataacacaatatatatttggtgnnnnnnnnnnnnnnnnnnnnncaaacacacacannnnnnnnnnnnnnnnnnnnnnnnnaaacctatctgtctataataaattttaaagtcatttaaaagttaaaggctgtaggaaaggtcacacttcatattttaatgtagcggggattccatagaagcaggtagaggtgttagatatgtgtatgtgtgtatacacacacatgcacatttcaatatatacacgcacactcttactgtgaaaatattctaacttatgattaaaatacatactatatcttatctttgccttcttctcctgtcccttcctcctaaacttcaatcctggagctgtaaaattagtaaagcacacagttaggacaattccaagaaagtatacagatacgattgaggcaacagggataccggcttatgagccatatgaagtaatctattgtttatttatatttatatagcaccttcatttaggaagatcccaaactaagaacagctattattctcagctcaaatgccttagctggtgtcagggcacagcattctatgatccaacaaagagggaaaatgagggaccaagacagttcttctttccacccaagggtacctgatcatagtccttaaaatgatcaaatctaggagtctgtaggtaatagaacatcatcataataaaaattatctggttgattgtacttatgcttttgaagtataaaccttaagataacaatttttctgtgaaaatgatttgaaact

SEQ ID NO: 40465 - DNA, 776 bp, Macaca Mulatta
  misc_feature (1)...(776): n = A,T,C or G
gggctcaagcaatcctcctgccttagcctcccttgcagctgggactacaggcatgcacaactgcacctgtcttattgatattaataatcttaatagagttagtacccctgccttctaatagttttcaccaattgcaatattgttttaccatagannnnnnnnnnnnnnnnnnnnnnttagctttgcttttcggaaattgtccttagctgggtgcannnnnnnnnnnnnnnnnnannnnnnnnnnnnnnnnnnnnnncannnnnnnnnnnnnnnnnnnnnnnnnnnnnnnnnacttgggcatggtgatgttcacctannnnnnnnnnnnnnnnnnnnnnnnnttctcctcnnnnnnnnnnnnnnnnnnngcctgggaagtnnnnnnnnnnnnnnnnnnnnnnnannnnnnnnnnnnnnnnnnggggcaacagaacaagactttttctcaaaaatnnnnnnnnnnnnnnnnnnnnngaaaacatcatccttatgataaaggcaaaataatcaaactctgataaagaacacttggttaggatttttacttttcaaagtgttgtggcccatgtggatctaaacctgtttctgggcctgtctatcctatgcttttcaacagcaataaaatcattatcttggattccttttaacatagaagtgtgaataaataagattttgggagaaacataggttggttttggcactgtttaagggggaaagaaggattactaagtgggattaattgaatctttaaatttctcactaaggtcaacccctga

SEQ ID NO: 40466 - DNA, 795 bp, Macaca Mulatta
  misc_feature (1)...(795): n = A,T,C or G
taagccactatatcacctttgaacctgaaaatacatgtttttctcctccttaggatccaagaactaacttatttctctttgtatttcccaacagcacttgcccatattgctttacacatagcagatagtcaacaaatacatactaaataataaataaatatctaaaaattcataagggcaccagtgacacaatgttacaaatagagtgattttaactatttcattattccagcagatcctcaacaaatacctgtaaggcaagtaggggccaataattcctgttttatagaaactcaagatgtaaaaatgttattatttatgcacagagcatttttttgagtataatttagcctattaaggttcagtaactaactcaatgtcaccctgctgatctgtagtatatttctgctgaaatgattcttttcctcttactggactttcctttcagcttacttctgaatatctctagaacatgactccaactcagcagcctcctacaagggggaaaatacccatctgccctgcaatataaattaaagagtttgccatgcacnnnnnnnnnnnnnnnnnnnnnnnnnnnnnnnnnnnnnnnnnnnggttggatcacaagctcaannnnnnnnnnnnnnnnnnnnnnntatcgtgaaacctnnnnnnnnnnnnnncnnnnnnnnnnnnnnnnnaatggtggcacgtgcccgtagtcagagaatcgcttgaaccaggtaggcggaggttgcaggcgagattgtgccacttaactccaccctaggtgacagagcgagactccatccc

SEQ ID NO: 40467 - DNA, 785 bp, Macaca Mulatta
gggggtgatagcaaaggatttctcaggagatctaacggttttgtaaggggctcttccccctttgctcagcacttcttctcctgctgccttgtgaagaaggtgccttgcttctcctttgccttctgccatgattttaagtttgctgaggcctcctcagccatgctgaactgatagttcgacttggctgaagttggtctttcccttcctccacatggaagactagagcttgatgaagttgggtctcctcatttctccggtgtcattaaaggatacattattggtaacttctggaatggagcaaacaccgctatggcctgtgcaagatcagaatgtggtttcattcattcatatcagaatcgtattaaccaggctaaccaaactaaggacagcgttatcagattgagatgctggcagcttttctcaggtcacacaatcacaaaacaatggatgaggattacaacaaatcagcagctggctttgtagaagacctgaaaagtcgtatctgcatatgttatatgtaaatttcatgtcagctccaaaagagaatttcaataacttgcctaaggtaccagaaaaagtaagcaaacgatcttgaatttaaacttagaagagcctaactacaacttgtgtcaatgttcttcttcctggaacacaacagtttttctgttatttgatactttgctgctctcaacataaatgtctttggatggtggcaaagttatttgccccttatgagagtgttttatgatatttgaaatacctaaatgttttgaaacttatatgct

SEQ ID NO: 40468 - DNA, 738 bp, Macaca Mulatta
  misc_feature (1)...(738): n = A,T,C or G
ggtagtttgcttgagtgctatttggcatcttttaagataaatttcttatattatgcttttcagaaattctccatttaactttagtgtccgtttgtgaagtttcttcattaagtttgcttattgaaatttgttttacaggcaatttgaaaattgcaaggagggactttaagactacttctgatttgcaaagattgtgctctgagcaggctgaagtgactggatgagacacactgttggagaaataaaaatgacttcccattatgtgatcgccatctttgccctgatgagttcctgtttagccactgcaggtaagttgcataatataaattgcatgtttgttatatatttttggatacattttgtcccagtctctttagttgagaggaatttagcccatgtggtgttcatgcagaactttgaatatttatgttctttagggaaataaaatatttgactactgtgtagatacataatacattggtctgtgctatattttactaggttggtgctggcattgtcatgttagtgatgcagatacctggctaaccttggtggaggaaggaagagaacaaatacgctaatgaataatcccacctaattctgttacatgcatagattggttnnnnnnnnnnnnnnnnnngagatgaagtctcactctgttaacccaggctggaagtgcaaaggcataatcattggctttactggtagggcttgaaccttccctggggcataaagcca

SEQ ID NO: 40469 - DNA, 3529 bp, Macaca Mulatta
  misc_feature (1)...(3529): n = A,T,C or G
tcgtagcagacttctctgaatttgaggaagatcctcaagtatttaacacgctctttcccctccagacctatggtcccactttcttctagattcatggaaatctcagagacgagtgttggcatttctgccgaggtggatatgagtagcgttacagccacacaggttccccctgcccacggccgcctctctgtgccagcatcacttgatcctactgctggctcctcgtctgttgctgaaacccaagtgatgccatcccatgtgaccactgcatttttctccgtcatcaccagcattctccttgactcatctttctctgtcatagcaaacagaaacacaccgtcgcctgccgtcagagacccgagtgtttttatgcctttcagtctgcttccttcagtggagtcttcacgtttctctgaccaagaaccttccagtttttctgagcataaacccggaggtgctttggattttgcatccagcttttactcaacacccccgctggaactcagcggctccgtcccttcgccttcggaagcgcctgcgtctctgtctccgatgccgagtgacttgtctcccttcacgtctcagtctttctctaccttggttgagacatttacgttgttcaactctagtggtctgcagtcgtctcagctgtctcttcctagttcctcaaatcttgagttttcgcagctccagccaagctccgagctgcctttaaacactgtcactttcctacctagccgttctggggcgtcaccgtggtcaagcttcccttctgattctctcgagtttgttgaagcgtctgtggtttcactgagggattcagaagctcattttacctcagctttcactgaaactacctcctatcttnnnnnnnnnnnnnnnnnnnnnnnnnnnnnnnnnnnnnnnnnnnnnnnnnnnnnnnnnnnnnnnnnnnnnnnnnnnnnnnnnnnnnnnnnnnnnnnnnnnnnnnnnnnnnnnnnnnnnnnnnnnnnnnnnnnnnnnnnnnnnnnnnnnnnnnnnnnnnnnnnnnnnnnnnnnnnnnnnnnnnnnnnnnnnnnnnnnnnnnnnnnnnnnnnnnnnnnnnnnnnnnnnnnnnnnnnnnnnnnnnnnnnnnnnnnnnnnnnnnnnnnnnnnnnnnnnnnnnnnnnnnnnnnnnnnnnnnnnnnnnnnnnnnnnnnnnnnnnnnnnnnnnnnnnnnnnnnnnnnnnnnnnnnnnnnnnnnnnnnnnnnnnnnnnnnnnnnnnnnnnnnnnnnnnnnnnnnnnnnnnnnnnnnnnnnnnnnnnnnnnnnnnnnnnnnnnnnnnnnnnnnnnnnnnnnnnnnnnnnnnnnnnnnnnnnnnnnnnnnnnnnnnnnnnnnnnnnnnnnnnnnnnnnnnnnnnnnnnnnnnnnnnnnnnnnnnnnnnnnnnnnnnnnnnnnnnnnnnnnnnnnnnnnnnnnnnnnnnnnnnnnnnnnnnnnnnnnnnnnnnnnnnnnnnnnntgctggccagaagagctgtgcaggagtacatcattacagcaatcaaagaagtactgaggattcacttcaaccgtgcagtggaactgaaggtnnnnnnnnnnnnnnnnnnnnnnnnnnnnnnnnnnnnnnnnnnnnnnnnnnnnnnnnnnnnnnnnnnnnnnnnnnnnnnnnnnnnnnnnnnnnnnnnnnnnnnnnnnnnnnnnnnnnnnnnnnnnnnnnnnnnnnnnnnnnnnnnnnnnnnnnnnnnnnnnnnnnnnnnnnnnnnnnnnnnnnnnnnnnnnnnnnnnnnnnnnnnnnnnnnnnnnnnnnnnnnnnnnnnnnnnnnnnnnnnnnnnnnnnnnnnnnnnnnnnnnnnnnnnnnnnnnnnnnnnnnnnnnnnnnnnnnnnnnnnnnnnnnnnnnnnnnnnnnnnnnnnnnnnnnnnnnnnnnnnnnnnnnnnnnnnnnnnnnnnnnnnnnnnnnnnnnnnnnnnnnnnnnnnnnnnnnnnnnnnnnnnnnnnnnnnnnnnnnnnnnnnnnnnnnnnnnnnnnnnnnnnnnnnnnnnnnnnnnnnnnnnnnnnnnnnnnnnnnnnnnnnnnnnnnncttccagtatccacagctcaacttatctcagttgctgaagtcctcctgggtccgaacagnagttctcttgggcgtcgtggagaagcaactccagaatgaagtgtttcaagccgagatggaacgcaagctggcccagctgctcagcgaggtttccaccagaaggcggatgtggagaagggccactgtagctgcagggaacagcgtggtgcaggnnnnnnnnnnnnnnnnnnnnnnnnnnnnnnnnnnnnnnnnnnnnnnnnnnnnnnnnnnnnnnnnnnnnnnnnnnnnnnnnnnnnnnnnnnnnnnnnnnnnnnnnnnnnnnnnnnnnnnnnnnnnnnnnnnnnnnnnnnnnnnnnnnnnnnnnnnnnnnnnnnnnnnnnnnnnnnnnnnnnnnnnnnnnnnnnnnnnnnnnnnnnnnnnnnnnnnnnnnnnnnnnnnnnnnnnnnnnnnnnnnnnnnnnnnnnnnnnnnnnnnnnnnnnnnnnnnnnnnnnnnnnnnnnnnnnnnnnnnnnnnnnnnnnnnnnnnnnnnnnnnnnnnnnnnnnnnnnnnnnnnnnnnnnnnnnnnnnnnnagctgcagatcccaagtgtgaagggcttcgattttgctaagcagcatctgggtcagcacaataaagatgacatcttgattattcatgagccagcgccactgccaggacctctgaaggaccataccacgccctcggaaaatggggatgtgccaagccccaagtcaaagatcccttccaagaacgtccgtcacagaggaannnnnnnnnnnnnnnnnnnnnnnnnnnnnnnnnnnnnnnnnnnnnnnnnnnnnnnnnnnnnnnnnnnnnnnnnnnnnnnnnnnnnnnnnnnnnnnnnnnnnnnnnnnnnnnnnnnnnnnnnnnnnnnnnnnnnnnnnnnnnnnnnnnnnnnnnnnnnnnnnnnnnnnnnnnnnnnnnnnnnnnnnnnnnnnnnnnnnnnnnnnnnnnnnnnnnnnnnnnnnnnnnnnnnnnnnnnnnnnnnnnnnnnnnnnnnnnnnnnnnnnnnnnnnnnnnnnnnnnnnnnnnnnnnnnnnnnnnnnnnnnnnnnnnnnnnnnnnnnnnnnnnnnnnnnnnnnnnnnnnnnnnnnnnnnnnnnnnnnnnnnnnnnnnnnnnnnnnnnnnnnnnnnnnnnnnnnnnnnnnnnnnnnnnnnnnnnnnnnnnnnnnnnnnnnnnnnnnnnnnnnnnnnnnnnnnnnnnnnnnnnnnnnnnnnnnnnnnnnnnnnnnnnnnnnnnnnnnnnnnnnnnnnnnnnnnnnnnnnnnnnnnnnnnnnnnnnnnnnnnnnnagctcacggataaaacgttctcccaagcctcgccggaaacaccaggtcaacggctgtcctgccgacgctgagaaggaccggctcatcaccacagacagcgacggcacctacaggagaacacccggcgtccacaactcggcctacatcggatgccc

SEQ ID NO: 40470 - DNA, 754 bp, Macaca Mulatta
  misc_feature (1)...(754): n = A,T,C or G
ggaactcgagatttgtcttacttcatgttcttcacctatacactattattgaatccatgggtaaatacatgtatatatagcctggcatccctagcaatatgacccttaactgattattttttcctcacactcttcttttacctccttttactgtgatcctgtgccatagcacagtcccccacaattccagagaaccaggactggagaatggccttttccaacagaaaatgtggggagatggcaaaaaaagccataaccctcagagcatttagccctcgctaaacgaagaactgaggcaagtgcttccacagtttgacctgattagtgaaggacatcaattgggaaaaatacctgtgctccctcaggcctgctctgggaagaagtaaatgtggcccctttttgtcctctgtagacacttgggcaggaaaaaaaaggagaaacaagctctttccctccttcaccattcccctggctttatcaaaacaaaacagcttatccctctctcatcctcccctacccaattataaaagaaataccgatattccttgacttacagtgggattacantcctaaataaacccatcataaggttgaaaatattatgtcaaaaatgcatttaatacatccaacatttcgaacatcatagcttagcctaccttaaacgcgtgcagaacacttacattaatctatagttgggcaaaataatctaacccaagccctacttcaaaaataaagtggttgaataagctttact

SEQ ID NO: 40471 - DNA, 948 bp, Macaca Mulatta
cagccctcagctccggtagtcgccggtccggggttgtagccgtttggggcgagagctgctcggccccgccgccgtccccgtcgccgcctccgggtccaggccccacgggtcgcctgccgccgtcatgaggttgcgggtgcggcttcagaagcggacctggccgctggaggtgcccgaggcagagccgacgctggggcagctgcgcgcgcacctgagccaggccctgctgtgcacctgggggtacagttctgatacccgatttacaattacattgaactacaaggatgccctcactggagatgaagagaccttggcttcctatgggattgtttctgggggacttgatatgtttgattcttcaagatgacattccagcgcctaatttaccttcatccacagattcagagcattcttcactccagaataatgaccaaccctctttggccaccagctccaatgagactagcatacaggatgaacaaccaagtgattcattccaaggacaggcagcccagtctgatgtttggaatgacgacagtacgttagggcctagtcaaaattttgaagctgagtcaattcaagatattgaggatatggcagagggcacaggtttctatccctcagaacccatgctctgtagtgaatcggtggaagggcaagtgccacattcattagagaccttgtatcaatcagctgactgttctgatgccaatgatgccttgatagtgttgatacatcttctcatgttggagtcaggttacatgcctcagggcaccgaagccaaagcactgtccatgccggagaagtggaagttgagcggggtgtataagctgcagtacatgcatcctctctgcgagggcagctccgctactctcacctgtgtgcctctgggaaacctgattgttgtaaatgctacactgaaaatcaacaatgagattagaagtgtga

SEQ ID NO: 40472 - DNA, 821 bp, Macaca Mulatta
  misc_feature (1)...(821): n = A,T,C or G
ggnnnnnnnnnnnnnnnnnnnnnnnnnnnnnnnnnnnnnnnnnnnnnnnnnnnnnnnnnnnnnnnnnnnnnnnnnnnnnnnnnnnnnnnnnnnnnnnnnnnnnnnnnnnnnnnnnnnnnnnnnnnnnnnnnnnnnnnnnnnnnnnnnnnnnnnnnnnnnnnnnnnnnnnnnnnnnnnnnnnnnnnnnnnnnnnnnnnnnnnnnnnnnnnnnnnnnnnnnnnnnnnnnnnnnnnnnnnnnnnnnnnnnnnnnnnnnnnnnnnnnnnnnnnnnnnnnnnnnnnnnnnnnnnnnnnnnnnnnnnnnnnnnnnnnnnnnnnnnnnnnnnnnnnnnnnnnnnnnnnnnnnnnnnnnnnnnnnnnnnnnnnnnnnnnnnnnnnnnnnnnnnnnnnnnnnnnnnnnnnnnnnnnnnnnnnnnnnnnnnnnnnnnnnnnnnnnnnnnnnnngtcatctgtcgtgggctcccacctaaccagggtattgccgtcttatccttagggaggccgatcagctgtcgagtagcggccattcgtgcaagcgggaaaaacccccgccgagaggtatcgcgaaataacgaggagccccgaataatggtgggcggaaagaaagcggtaggtgcacggaggagtcccaggcagaagtcgtcccgcccaagacaaagggcgtagaggagggtgggaaggacacactgggcagggaaggagaaataccgggacccccgggaaggaagcttgagtaatgaaacgctgatgaacagagagggaaaaggccgatgcccgaagaacacgagaacaagagcgagagaaggaagatgagaaaagggt

SEQ ID NO: 40473 - DNA, 772 bp, Macaca Mulatta
gggacatgcaggaaagggccctggaccactacaaagccgcaaagaaaaattagacgtttcattttataacaactgctgctgctactactagataccatttgctcatttataacaatctcagttgataggatgaagcttaaacacttggcattcatcgtcttttttaatcctctcgccagtcttacagacttggaccttcagttgtgatgcttcatcagacttttttatgagacagggcctctcttggttgcccagactggagttctagtggcacactcgtagctcactgcagcttcaaacttctgaactcaaacgatcctcccgcctctgcctcctgggtagctgaaaccacaggtgcaagacaccacgcccagctaattacttttttgtagtgacggggttctgtcatattgcctggactggtctccaactcctgggctcaagcgatcctcctgcctcgccctcccaaagtgctttacatgactgagcctctgcgcccagccagacttggttctcaagttacttctggctgtttacaaaaactcattccaaagatgtgcagcgtattctcatagcatttccaaataagctccaagaaatgtttttggtaatggaagcagaaacaagcctgtagctcatgactgctttggaggagcaacatttatttggatttgtaaatgtagtgtgttaaaaatgactttatccagatatttggaatcctcccactgatttctgcatggctgggttgtttttcttcccctaagtcccaggt

SEQ ID NO: 40474 - DNA, 713 bp, Macaca Mulatta
  misc_feature (1)...(713): n = A,T,C or G
gggactctctttcattctctttcctgctgccctgtgaaggaggatgtgtttgcttaccctttcaccatgattgtgtgtttcctgaggcctcccagccaagctaaactcaagaaggcagctgtctgcaacacagtaagggagcctctaccagaattcaatgatactgacaacttctttttggactgctagcctccagaagagtgagaaaacaaatttctgttgctcaagtattttgttatggaagccctcgctgactaagacatcaatatatatttatatctaatggtgattttggaagtgttttctctcaaggttctacatgtcgaaagagagcacatgaccagaaatagaccttcaaagactcttttcagtgaacaatgcgtgagctccttctcaagcaggactaatcaataaaattaaagaaatgtgtgccaagcacacagaaggaatgaaatagctgctgatcttcggccatctgggaagcggacagtgacgtgtcctggaattctagttcctcctcctgccctaggccacttctgagggccactgcattcctctttgtgtccccattaaggctcaagaatctggagagttcctggagcctatcatcatcttacncaagattttgcctggggctaccaacattttcaagcttgtcttcacctccccataaacttgggtggtcccccaaagaaggggaaccctgccctaaa

SEQ ID NO: 40475 - DNA, 762 bp, Macaca Mulatta
  misc_feature (1)...(762): n = A,T,C or G
tagtttccgatcgaccccggtacccaagaaggggagtgcccgcggcaggtaacggagaagagggaggggtttctttccgctctcgaaattggaaaaagagacagagctgggatgacctatggggtagtcggcgcgctgaaaggatgggctaggctgggacggggttcaagtgggaaagattgatgattaaggtatagagttggacttacagatccgtttgggctcagagaggtgaacgctgaagagaaaccagagtttgttttcgttttccaaggagcgtggagttgggcagggttaacggaccctgcgcctcttggggcttcttaggttgggtgttgaaacttccctcctttggtcctgttcgtctctgattcaaaatagttgggtttggtacccagacagagctgggtgcagaaagccgaccctgttcttcggcttccaggtgggttgtggcctcgcnnnnnnnnnnnnnnnnnnnnnnnnnnnnnnnnnnnnnnnnnnnnnnnnnnnnnnnnnnnnnnnaagtggccgnnnnnnnnnnnnnnnnnnnnnncgcctcccgggtttacgcnnnnnnnnnnnnnnnnnnnnnnnnnnnnnnnnnnnnnnnnnngcccgccaccgcgcccggctagnnnnnnnnnnnnnnnnnnnnnnnnnnnnnnnnncgtgttannnnnnnnnnnnnnnnnnnnnnnnnnnnnnnnnncgcccnnnnnnnnnnnnnnnnnnnnnnnnnnnnnnnnnnnnnnnnnnnnnnnn

SEQ ID NO: 40476 - DNA, 766 bp, Macaca Mulatta
  misc_feature (1)...(766): n = A,T,C or G
ggctagnnnnnnnnnnnnnnnnnnnnnnnnnnnnnnnnnnnnnnnnnnnnnnnnnnnnnnnnnnnnnnnnnnnnnnnnnnnnnnnnnnnnnnnnnnnnnnnnnnnnnnnnnnnnnnnnnnnnnnnnnnnnnnnnnnnnnnnnnnnnnnnnnnnnnnnnnnnnnnnnnnnnnnnnnnnnnnnnnnnnnnnnnnnnnnnnnnnnnnnnnnnnnnnnnnnnnnnnnnnnnnnnnnnnnnnnnnnnnnnnnnnnnnnnnnnnnnnnnnnnnnnnnnnnnnnnnnnnnnnnnnnnnnnnnnnnnnnnnnnnnnnnnnnnnnnnnnnnnnnnnnnnnnnnnnnnnnnnnnnnnnnnnnnnnnnnnnnnnnnnnnnnnnnnnnnnnnnnnnnnnnnnnnnnnnnnnnnnnnnnnnnnnnnnnnnnnnnnnnnnnnnnnnnnnnnnnnnnnnnnnnnnnnnnnnnnnnnnnnnnnnnnnnnnnnnnnnnnnnnnnnnnnnnnnnnnnnnnnnnnnnnnnnnnnnnnnnnnnnnnnnnnnnnnnnnnnnnnnnnnnnnnnnnnnnnnnnnngtcccatcctgagcccccttaacggaatacgatagcgtgaccaattcgcccagatgaaccgttatgggggggtaacgataacgagggcgtaaacacggcctccgggaagaaggaagagtaaaataccccgtatgcccgaaaactccttcgggagaaccgaccaaggagccccgtggagagagtgagggcccatgcgagacagca

SEQ ID NO: 40477 - DNA, 805 bp, Macaca Mulatta
  misc_feature (1)...(805): n = A,T,C or G
gggcatgtcctctcccctcccaggccttgcttaacccttggttggaagatccaccctttttctgtggccagcactggctcctggcatccttctgcttggctttaggttttcagcacaaattcctgatctgattcaccaggtcctacttaatatgtattaccaaccctgtgttgacaatttcagaaaagctcagcgctgcttttatactcgttttcctctcggaatggtagccagcaaagggtgttcttagagatgggtggtcctgtgtcttactaattcccataaagggaaggggagtggtagaagaaaaaatacgtaggaaacgaaagtgtttagttatgtgtgtttgatagtggctcagtgggtttgcatattatgatagttatcaattccttagcactagatgctgggaatctaaatctatgtaagactcaagaagtggttttgtgtcttgcatgtgaactgtatctcagagctnnnnnnnnnnnnnnnnnnnnnnnnnnnnnnnnnnnnnnntcatgggagcaagggagagcaaaagccaaaggtgagttttatttgttgttgttatttaaagtaactggatcggccannnnnnnnnnnnnnnnnnnnnnnnnntagcactttggggggaccaaggtgtgcaaatcacttgaggcnnnnnnnnnnnnnnnnnnnnnnnnnnngtggcnnnnnnnnnnnnnnnnnnnntacaaaaagtttgccaaggcgtggtggcnccnagcctggtaatcctagctactcaggaggtttgaagcatganaatttgctaaagcccggaagg

SEQ ID NO: 40478 - DNA, 709 bp, Macaca Mulatta
  misc_feature (1)...(709): n = A,T,C or G
ggggactgtttgatgagaatatttactcataccacttggtataggttgttccaggctgtaaaattcattgctggatctgtgaatttatctatttggatgcttctcttcatagtactcaatgtgtaaccaacgaaataaaacagctgtaaattcgttatgcaacatgtggtctgaaaaagtttgaggctttcctcatttatgtcagattttccctgtcctgtattcagaaattgagtctgtaatctcagctcataaggtgcttgataattctaatataacaactaaaactgtcaaatgaagtctgttattctgagaaataataaatctttgtgactgtcataaaacaggaaaaactttttgtttgtttttagagacatagtctccctgtattgcccaggcttgtcttgaacttttgggctcaatggatcctcccttcctcctaagtagctgggattgcaggtgaattcctgagaaataattcttgctgctaatttagtctttctgtttgttatttaaaataaatatttagtctgttcctttagtaaattctcctataagtcatggaaagacagctactgtttggcaactggctgggaatgatgtacagaactggagaatatggaaaaacagaaaaactctgaaccnctgaaaaagtggatttggttcaacggtagggccaaaatggttgaatttttatcttttccccaaa

SEQ ID NO: 40479 - DNA, 836 bp, Macaca Mulatta
cacccatacccacaaacacacacacagtatttgatgtatatgtaagtttgtatcactcactttgttttagaaatattttgggatatcttctgtattgtgagcttttttgatgcaaagtttaccttttagccaccgggagctcccaatggggtgagcatagttcccagcaccctgataattgaaccttgcctttatgattttgcaatacttagtatatcaaagtaaaatcctaaaacttactgatattatttatagcctattctttgtaacatacgattaatctttacctctttaaatattttgtttaacaagggccaaatacatttgaagatgcaggaaactacatcaagaaccagtttctagacctgaatttaaaaaaagaagataaggaaatttattcccacatgacctgtgctactgatacccaaaatgtcaagtttgtgtttgatgcagttacagatataataatcaaagagaatctaaaagactgtgggcttttctaatcaaccattttctcttccactcttgctcatgtatgcttttcaaaatataaaagaaaaggtgctgtgtgatgtgtttagtttgaatagacagtaacttatttagacatataactagcattgtaaagcaaaaagttttcccacaaaaaggtttatatattatcatctgtatctggataagtttaaatttctgtggaacatggggaatgggagggccttcgatgtccttatatctaaaaacctgatatgttttggtaactgtatagaatgcatatcaatgacactgaattttcttggaaataaacttatacatgtggactatttttactcatagaa

SEQ ID NO: 40480 - DNA, 810 bp, Macaca Mulatta
  misc_feature (1)...(810): n = A,T,C or G
gnnnnnnnnnnnnnnnnnnnnnnnnnnnnnnnnnnnnnnnnnnnnnnnnnnnnnnnnnnnnnnnnnnnnnnnnnnnnnnnnnnnnnnnnnnnnnnnnnnnnnnnnnnnnnnnnnnnnnnnnnnnnnnnnnnnnnnnnnnnnnnnnnnnnnnnnnnnnnnnnnnnnnnnnnnnnnnnnnnnnnnnnnnnnnnnnnnnnnnnnnnnnnnnnnnnnnnnnnnnnnnnnnnnnnnnnnnnnnnnnnnnnnnnnnnnnnnnnnnnnnnnnnnnnnnnnnnnnnnnnnnnnnnnnnnnnnnnnnnnnnnnnnnnnnnnnnnnnnnnnnnnnnnnnnnnnnnnnnnnnnnnnnnnnnnnnnnnnnnnnnnnnnnnnnnnnnnnnnnnnnnnnnnnnnnnnnnnnnnnnnnnnnnnnnnnnnnnnnnnnnnnnnnnnnnnnnnnnnnnnnnnnnnnnnnnnnnnnnnnnnnnnnnnnnnnnnnnnnnnnnnnnnnnnnnnnnnnnnnnnnnnnnnnnnnnnnnnnnnnnnnnnnnnnnnnnnnnnnnnnnnnnnnnnnnnnnnnnnnnnnnnnnnnnnnnnnnnnnnnnnnnnnnnnnnnnnnnnnnnnnnnnnnnnnngaatgaggccccaccacctgttttacaagtcggtaatagaaacgtaagaacccaccgaagccctactttcccctgtccggccagctaataaaatccttttggccaatcccccccacgcgggggtggtgaaaaagtatttattataacctgtggccctccgccttaaccaacctttcacatgggggggggggataaacac

SEQ ID NO: 40481 - DNA, 852 bp, Macaca Mulatta
  misc_feature (1)...(852): n = A,T,C or G
ggggcctttcggccggaaccgccatcttccagtaatttgccaaaatgacgaacacaaagggaaagaggagaggcacccgatatatgttctctaggccttttagaaaacatggagttgttcctttggccacgtatatgcgaatctataagaaaggtgatatcgtagacatcaagggaatgggtaccgttcaaaaaggaatgccccacaagtgttaccatggcaaaactgggagagtctacaacgttacccagcatgctgttggcattgttgtaaacaaacaagttaagggcaagattcttgccaagagaattaatgtacgtattgagcacattaagcattctaagagcagagatagcttcctgaaacgcgtgaaggaaaatgatcagaaaaagaaagaagccaaagagaaaggtacctgggttcaaactgaagcgccagcctgctccacccagaaaagcacactgttgtgagaaccaatggggaagggagcctggagctgccgggaaccctattcccctatggaatttcatgggcataaataaagnnnnnnnnnnnnnnnnnnnnnnnnnnnaggaccttcctggggcttgaaaaaaaggttttcctccagttattggagataaaaaagtgtggggggttccttcctccccccaaaagaaaaatatctttaaaagcaaaaattttttagtttaggggatcccacaaattacctttatgggtaaatgggcctttttccacaatttccaaaattataaaaagggcaatttcccccttcggcctgcaaaaggaagagctaaaagggcaccagctctaatttttgggtggcaaacgcgaaaatatttactctacagt

SEQ ID NO: 40482 - DNA, 169 bp, Macaca Mulatta
  misc_feature (1)...(169): n = A,T,C or G
ggactgctgacattcagagatgtagccatagaatgctttctggcggagtggcaatgcctggatcatgctcagcagaatttatatagagatgtgatgtcagagaactacagaaacctggtctccctgggtnnnnntgtctctaagccagacttgatcacctgcctggagc

SEQ ID NO: 40483 - DNA, 267 bp, Macaca Mulatta
  misc_feature (1)...(267): n = A,T,C or G
ggcagcgtccggccctacggccctgttccggaacactaaggcagctggggcagccattggtggtgtcaagaacatgctcttggagtggtgccgagccatgacnnnnnnnnnnngcacgtggacatccagaacttctcctccagctggagcaatggcatggccttctgtgccctcatccacaagttcttccctgacgcctttgactacgcagagctggaccccacgaagcgccggcacaacttcaccctggacttctccacagcagag

SEQ ID NO: 40484 - DNA, 144 bp, Macaca Mulatta
  misc_feature (1)...(144): n = A,T,C or G
gtcccctgtgactcggaaccatgccgcctcagcactccctacaggttccccaaagaggcgaccagcccctggagacctctcggccactgngagcctgccacctgtttcccgagcacccaagaacccacaaagccttccatgccc

SEQ ID NO: 40485 - DNA, 79 bp, Macaca Mulatta
tgtgctagggctacggtaactaccggatactggtacttcgatctctggggccctggcaccccaatcaccatctcctcag

SEQ ID NO: 40486 - DNA, 781 bp, Macaca Mulatta
ggattcctgtgggttttctcttctaagcacaaaaaataaaagcgaatcaaactgccaagatgctctttgaatggggctggataacaaaaattcccccccaaaacaaaatactttatgcaaaatcttagtggggcaagcacatgcaaaaacctattttcttttgttttttctccttgcatttataactggagaacatctactcacttaatgccctgggagagaggtgtacggtcttctggtgtctcaacatgataagaaaataattctacaactgttactacacagatagagttatgtgttttgaaggttcaagttgcttcttctatgaaaatcaagtgacattcaaagtacttttgaaaagagattaacacagttctaatactaggaaactcatgtttatctaaatgtttctctttttttcagacgtgcttctaataacatttcaatgtatgtattcatctcctagaaaggcattaactaatacataatcttcatgtatttaatgttataatattatttatttaaaaatacattcaaacatgaaaatatgtataatatgctttgaaataactagtaatacctaataaaatattcttaattcaaattgctttatattagtgagaagagagacacagagacagagaatcaatcactaggctagtagttctaaacttgctacagtacctctcaaacttttatgtacatgcacacacacacacataatcacacccacacactttaatgcacaacgtacctgtgaatcatgtttattaataaatgc

SEQ ID NO: 40487 - DNA, 1119 bp, Macaca Mulatta
  misc_feature (1)...(1119): n = A,T,C or G
agacaggcaccttaacaagggatggcttggatctctggggagtcgtgtcctgtgataggaatgnnnnnnnnnnnnnnnnnnnnnnnnnnnnnnnnnnnnnnnnnnnnnnnnnnnnnnnnnnnnnnnnnnnnnnnnnnnnnnnnnnnnnnnnnnnnnnnnnnnnnnnnnnnnnnnnnnnnnnnnnnnnnnnnnnnnggaagctatatcagcaggttcctctcctttcaccgtccctcaaccannnnnnnnnnnnnnnnnnnnnnnnnnnnnnnnnnnnnnnnnnnnnnnnnnnnnnnnnnnnnnnnnnnnnnnnnnnnnnnnnnnnnnnnnnnnnnnnnnnnnnnnnnnnnnnnnnnnnnnnnnnnnnnnnnnnnnnnnnnnnnnnnnnnnnnnnnnnnnnnnnnnnnnnnnnnnnnnnnnnnnnnnnnnnnnnnnnnnnnnnnnnnnnnnnnnnnnnnnnnnnnnnnnnnnnnnnnnnnnnnnnnnnnnnnnnnnnnnnnnnnnnnnnnnnnnnnnnnnnnnnnnnnnnnnnnnnnnnnnnnnnnnnnnnnnnnnnnnnnnnnnnnnnnnnnnnnnnnnnnnnnnnnnnnnnnnnnnnnnnnnnnnnnnnnnnnnnnnnnnnnnnnnnnnnnnnnnnnnnnnnnnnnnnnnnnnnnnnnnnnnnnnnnnnnnnnnnnnnnnnnnnnnnnnnnnnnnnnnnnnnnnnnnnnnnnnnnnnnnnnnnnnnnnnnnnnnnnnnnnnnnnnnnnnnnnnnnnnnnnnnnnnnnnnnnnnnnnnnnnnnnnnnnnnnnnnnnnnnnnnnnnnnnnnnnnnnnnnnnnnnnnnnnnnnnnnnnnnnnnnnnnnnnnnnnnnnnnnnnnnnnnnnnnnnnnnnnnnnnnnnnnnnnnnnnnnnnnnnnnnnnnnnnnnnnnnnnnnnnnnnnnnnnnnnnnnnnnnnnnnnnnnnnnnnnnnnnnnnnnnnnnnnnnnnnnnnnnnnnnnnnnnnnnnnnnnnnnnnnnnnnnnnnggctctgaaaatggctcatgtgggcatctctttatcagagcaggaggcatctgtggcctcacctttcacttccaaaactccaaacattgagtgcgtacctcaccttatcaa

SEQ ID NO: 40488 - DNA, 588 bp, Macaca Mulatta
acaacccaaaaataaatgtcatagtcaagatttggtagataaatttaaaattaagatattctgcagatgagagtgaaatgtgatagcacatacattgatgttatgcatttaaagatggttataaaaatgtataggcagtataacacagcactactcaagaagccaaagaaacacttgtgcagtgctaagtgtcacatgtctgcttctgccagaggctgggaatagtgatcctgctataatgtgagaacccgaatcatgtttataaaataggaggctgggagcagttgcaggccacagtgaagtgtgttgcttctgtcactttatattcttatatttcctttccctcggacagtaaactgttgatactcgtaaaaagttgtaatgcaatttttagtactgttgtcaaagaaaagtttggaatccattaacatttgtactcagccttttaggttatacaccagagggggctgggaattttctctttgttcctataagtagatcttactgtaaaatagtaaatgtccattggaaagcaagtaatacaacctgtgctaattcggagcacttgaacaattttgttccattctg

SEQ ID NO: 40489 - DNA, 750 bp, Macaca Mulatta
ggaaggagtagttaaacaaaaatgcaggcaagaaaaataaaatacctagagagtctacaaagaaaaatatactgctcctttgctaacagaattgactcatcaagtgctatttgcaacctgcttgcatttatcacatacaggtttaattttactcagctaaaagaactgagaagtatttcttcttttcactttttaagaggtaataaagattgtattacagggattaaaaaacctgggtgaccattagaatgacatattttatcttaaaattatgcagattctgaaatgcacaatttcttaagcctttaaaactactctaagaaatctcctgtttgtttttattggtttctctgagaaagttatcacaagagggctgtaattaaatggtggtatttggtataactgcctgcgttctcttgtgtaacagttttgggggctccctaggtgagtaagttaactggcttgccaagtgagaaaaaaatagacaaatacagttatttttcatctctccaaaaatttttgaagtaccacctgggtaaacctccctaattatcattataaactctattaaaagacacactctctttttacaagacagttggtatttttctttcaagattttggcagtaattgtgacaatttgattccttttagtgccaagtgccccgcctcagaacgtctccctggaagtggtcaattcaagagtaagtttggctaaatgttcactattccattgccctatcatgatta

SEQ ID NO: 40490 - DNA, 698 bp, Macaca Mulatta
  misc_feature (1)...(698): n = A,T,C or G
gggcctttccgcgctacctacagaagggtccatacggcgttgttctggattcccgtcgtaacttaaagggaaactttcacaatgtccggagcccttgatgtcctgcaaatgaaggaggaggatgtccttaagttccttgcagcaggaacccacttaggtggcaccaatcttgacttccagatggaacagtacatctataaaaggaaaagtgatggcatctacatcataaatctgaagaggacctgggagaagcttctgctggcggctcgtgccattgttgccattgaaaaccctgctgatgtcagcgttatatcctccgggaatactggccagaagggccgtgctgaagttttgctgctggccactggagcccactcccattttgctggggccgctttcccttccctggaaaccctttcacttaaccccaaaatcccagggcaagccctttcccggggaagccccccggggttttctttgtggggggttaacggggacccccccagggggtgttggaaacacccccaaagcccttcttttcccgggggggggggcgcctctttttttgtgttttaaaaacccttaagcctcataacccgatttgggggccccctcccgggggggggttaaacacccccgcnnnnnnnnnnnnnnnnnnnnnnnnnnctggggaggggcgtataattagtagggggggc

SEQ ID NO: 40491 - DNA, 663 bp, Macaca Mulatta
caacgaagagaactcagaactggtatgaagctcagagggggttgcaggaggccgtgctaaagccttagcatattgctatggagctggcaactaaacaagaaaactaaaagggtgaggtacttttccttaagtgaaaaaagtttccttaacttctttaaaatgtaaactctgttttcagcttaactcttgaaatgagaagcctgaatccgtggtggtttcatgacctgcataatcacactatctgtttttctgtcacagattgccttctcccagcacagcaattttatggacctggtacagttcttcgtgactttcttcaggtaattttgcttgtacagactctctctgttcttttgatttaggcgctagatccattaataaagtatcagctcctaaaagataaaagaataatcctgtgtttccaccacagattaaatttacttcgtatgtgttcctgaaaagttagatgtcagttacaataatataaactcagtctagcatgataaagtgaaaacatttgttctgtatgttctggcttccggcggggggctttgcatgtatcctatattaattttgcatgtatcctatagataatttggctcttcatatggggagaatttgggactaaaacaacatttaattaataatggttactgatgtgag

SEQ ID NO: 40492 - DNA, 373 bp, Macaca Mulatta
  misc_feature (1)...(373): n = A,T,C or G
tttgctgggcaagttcttttattnnnnnnnnnnnnnnnnnnnnnacatggcactgcctgtgcccagccctcccatgggagatgcacaggtcggacacaattcccagccccacaggggcccagggtgggcataggctgtggccaggggctgcagtggagcccactgaactgcagctctccagggggatccttggaccaggactcatgtgggcccaggacttcctgaggctgcacggactaggcggactctctctgctctctgggtaggcccttgtttcccacatgctgctcccatgtctggtagaaaagcagggctctctttggttccagagagctacctgcagtggctggtcttgcacatccacttttagcac

SEQ ID NO: 40493 - DNA, 735 bp, Macaca Mulatta
  misc_feature (1)...(735): n = A,T,C or G
ggatgtgcaaaagccttttactatagctcttccttcactcgacacatgaggatnnnnnnnnnnnnnnnnnnctatgtttgtagagaatgtgggaaggcttttacccaacctgcaaattttgttcggcataagaggatccacactggagaaaaaccctttgaatgcaaagaatgtgagaaagccttctgtgacaactttgctttaactcagcacatgagaacnnnnnnnnnnnnnnnnnnctttgagtgcaatgaatgtggaaagaccttcagccacagttcatcgttcactcaccatcgaaagattcataccagagtttaaaagatacaggaaggacttttacaagtgtgttcgcctttagtgaactcatagtggtgacatacctttccttttgaatgtaactattgagggaaatcttttggctagagaaatgtcttagtatctgagaatttatactaacgagaaacaaaattgtccctgtgaaatctttttatggcaggtaatcacttatcatccaaagaattatattaaagattgacccagtttagagccttacactgtacctgagaataatagagacgagagacctggtggttaacatgcatttaggtaaaatgtcagcaacaactttcctctttataatactataaatccatctcaagcatattttaaaataatgagagatgggaagaaacaatctagtagggagaaaagaaaaaagacggtgtcataaca

SEQ ID NO: 40494 - DNA, 1507 bp, Macaca Mulatta
  misc_feature (1)...(1507): n = A,T,C or G
gcccctccaaacattgttgggccccgaggcccccgctttgtggtcggcctggccccggggcagctggtcctggagtgttcggtggaggcagagccagcgcccgagatcacgtggcaccgagatggcgtcgtgctgcaggnnnnnnnnnnnnnnnnnnnnnnnnnnnnnnnnnnnnnnnnnnnnnnnnnnnnnnnnnnnnnnnnnnnnnnnnnnnnnnnnnnnnnnnnnnnnnnnnnnnnnnnnnnnnnnnnnnnnnnnnnnnnnnnnnnnnnnnnnnnnncggtgcccaccatccggtcgggaccacctgcagtgaacgtctcagtgaaccagacagccctgctgccctgccaggccgatggtgtgcccacacccctcgtgagctggcggaaggacggggtacccctggatcccaggagccccaggnnnnnnnnnnnnnnnnnnnnnnnnnnnnnnnnnnnnnnnnnnnnnnnnnnnnnnnnnnnnnnnnnnnnnnnnnnnnnnnnnnnnnnnnnnnnnnnnnnnnnnnnnnnnnnnnnnnnnnnnnnnnnnnnnnnnnnnnnnnnnnnnnnnnnnnnnnnnnnnnnnnnnnnnnnnnnnnnnnnnnnnnnnnnnnnnnnnnnnnnnnnnnnnnnnnnnnnnnnnnnnnnnnnnnnnnnnnnnnnnnnnnnnnnnnnnnnnnnnnnnnnnnnnnnnnnnnnnnnnnnnnnnnnnnnnnnnnnnnnnnnnnnnnnnnnnnnnnnnnnnnnnnnnnnnnnnnnnnnnnnnnnnnnnnnnnnnnnnnnnnnnnnnnnnnnnnnnnnnnnnnnnnnnnnnnnnnnnnnnnnnnnnnnnnnnnnnnnnnnnnnnnnnnnnnnnnnnnnnnnnnnnnnnnnnnnnnnnnnnnnnnnnnnnnnnnnnnnnnnnnnnnnnnnnnnnnnnnnnnnnnnnnnnnnnnnnnnnnnnnnnnnnnnnnnnnnnnnnnnnnnnnnnnnnnnnnnnnnnnnnnnnnnnnnnnnnnnnnnnnnnnnnnnnnnnnnnnnnnnnnnnnnnnnnnnnnnnnnnngcctccccgatggtgaagccgctgccctttgtggttcgggcagtggcagaggaggaggtgctgctgtcctgcgaggcctcaggcatcccccggccgatcatctcctggcagaaggaagggctcaacnnnnnnnnnnnnnnnnnnnnnnnnnnnnnnnnnnnnnnnnnnnnnnnnnnnnnnnnnnnnnnnnnnnnnnnnnnnnnnnnnnnnnnnnnnnnnnnnnnnnnnnnnnnnnnnnnnnnnnnnnnnnnnnnnnnnnnnnnnnnnnnagtcccaccagtgatcgagaatggcctcccagacctgtctaccaccgaaggctcccacgcattcttgccttgcaaggccaggggcagtcctgagcccaacatcacctgggacaaagatggccagcctgtgtcaggcgctgaggggaagttcaccatccagccttctggggagttgctggtgaagaacttggag

SEQ ID NO: 40495 - DNA, 702 bp, Macaca Mulatta
aaaggtcacacaggcttgtcagtgattcttcaaatcctctgctctttctgctgccacctgctgggcctcttgagcagcatgaagggaggggctcactgtactttatagagagttgggaagcccagtcctctgagctgagcgtatttctatgaactgctttgggccaggacctgtaatgagccctggggagggacccagaggcacatctagctggcagcacaaggaggatgagaatttgcaactaaaggcctcacttggacaaaacactttggggtcacaatgcccaggactgaagacatgttcaaggacagcacgaggcatctttctactgggagacccatgtccttggtaagcatgcacacctggcttcctatcccctgagagcctgcccactgtccagatccagtgagttggtacttcaagaggatctggtgtagccttggccaaaagcatacagactgaagtctctgggcttgcttttcccatgggtgaggaccagaaccagactctgagcatccttacccctggccacccagattgttccaaatttgaggtaccccgttcccagagatctgggggtccttctttggagggcttactttgttctgatggccttcagaaaggaatcacatgaagtatacaaggacgggccccttggtcaccaagttttgggtccctcatacagatcggactccatccagg

SEQ ID NO: 40496 - DNA, 773 bp, Macaca Mulatta
ggaatccatttattgtttaaagttatactgaaactgatatttttactgttgccaaagcagtacctgacagtagataggtatccacagtcttatgttccttagaattatagaactatgcctctgaaaggggttttaatactttagtaaacctggcctaaactcttttatttctaagttgaagaaactgattgtcaagtacttttgacttgtccaatctcctacaactaactacagtacatttagagttagatctcagtatcaggtgtcccaattgtattctgctcaccattccacaatttcaatattgataaaacttccacactaacttttgaactgtggttattattaatttcattgattcatgtcctcttatttatttccttattcctccactgccttcttcataactgtccaccagatcaaagctatttgggtacctacactatcatttaaagtaaggggaaataatgaagttccttaaattctgtgtcatggactaagatacaataaagaaaaggaatttcacaaagtagggggaaattacatgttagtcttaatcattcctaagaaaaaactagtaaaagaaacttaagatttcccctaatttaatcttggactcaatttccaatagtggctatataaaaaaaggtatttaaaacaccaataatgccttcccttttaccataaaaaccaaagggtatcaaacttttcccctagttttggcattttaccacctgggcctaaatagaggaataaaataaaaataggcctgg

SEQ ID NO: 40497 - DNA, 2941 bp, Macaca Mulatta
  misc_feature (1)...(2941): n = A,T,C or G
ttctaaggatgctaataaatctctgccttctgctgccttgtatgggattcccgagatcagcagcactggcaagaggcaggaagtccaagggcgccctggagaggcaactggcatgaattcagcgctgggtcaaagtgtgagcagcggcggcagcggcaacccaaacagcaatagtaccagcaccagcacctctgccgccaccgcgggggcaggctcctgtgggaaaagcaaagaggagaagccaggtaaaagccagagcagccgaggcgccaagcgggataaggatgcggggaaatccaggaaggacaagcacgacctgcttcagggccaccagaatggcagtggcagccaggccccttccggggggcacctctatggctttggggccaagagcaatggaggtggcgcgagccccttccactgcgggggcactgggagtggcagcgtcgccgctgcaggggaagttagcaaaagtgccccggattcagggctcatgggaaactctatgttggtaaagaaaagaagaggagngaggaggagagccacaggcgaatcaagaaactgaaaactgagaaggtnnnnnnnnnnnnnnnnnnnnnnnnnnnnnnnnnnnnnnnnnnnnnnnnnnnnnnnnnnnnnnnnnnnnnnnnnnnnnnnnnnnnnnnnnnnnnnnnnnnnnnnnnnnnnnnnnnnnnnnnnnnnnnnnnnnnnnnnnnnnnnnnnnnnnnnnnnnnnnnnnnnnnnnnnnnnnnnnnnnnnnnnnnnnnnnnnnnnnnnnnnnnnnnnnnnnnnnnnnnnnnnnnnnnnnnnnnnnnnnnnnnnnnnnnnnnnnnnnnnnnnnnnnnnnnnnnnnnnnnnnnnnnnnnnnnnnnnnnnnnnnnnnnnnnnnnnnnnnnnnnnnnnnnnnnnnnnnnnnnnnnnnnnnnnnnnnnnnnnnnnnnnnnnnnnnnnnnnnnnnnnnnnnnnnnnnnnnnnnnnnnnnnnnnnnnnnnnnnnnnnnnnnnnnnnnnnnnnnnnnnnnnnnnnnnnnnnnnnnnnnnnnnnnnnnnnnnnnnnnnnnnnnnnnnnnnnnnnnnnnnnnnnnnnnnnnnnnnnnnnnnnnnnnnnnnnnnnnnnnnnnnnnnnnnnnnnnnnnnnnnnnnnnnnnnnnnnnnnnnnnnnnnnnnnnnnnnnnnnnnnnnnnnnnnnnnnnnnnnnnnnnnnnnnnnnnnnnnnnnnnnnnnnnnnnnnnnnnnnnnnnnnnnnnnnnnnnnnnnnnnnnnnnnnnnnnnnnnnnnnnnnnnnnnnnnnnnnnnnnnnnnnnnnnnnnnnnnnnnnnnnnnnnnnnnnnnnnnnnnnnnnnnnnnnnnnnnnnnnnnnnnnnnnnnnnnnnnnnnnnnnnnnnnnnnnnnnnnnnnnnnnnnnnnnnnnnnnnnnnnnnnnnnnnnnnnnnnnnnnnnnnnnnnnnnnnnnnnnnnnnnnnnnnnnnnnnnnnnnnnnnnnnnnnnnnnnnnnnnnnnnnnnnnnnnnnnnnnnnnnnnnnnnnnnnnnnnnnnnnnnnnnnnnnnnnnnnnnnnnnnnnnnnnnnnnnnnnnnnnnnnnnnnnnnnnnnnnnnnnnnnnnnnnnnnnnnnnnnnnnnnnnnnnnnnnnnnnnnnnnnnnnnnnnnnnnnnnnnnnnnnnnnnnnnnnnnnnnnnnnnnnnnnnnnnnnnnnnnnnnnnnnnnnnnnnnnnnnnnnnnnnnnnnnnnnnnnnnnnnnnnnnnnnnnnnnnnnnnnnnnnnnnnnnnnnnnnnnnnnnnnnnnnnnnnnnnnnnnnnnnnnnnnnnnnnnnnnnnnnnnnnnnnnnnnnnnnnnnnnnnnnnnnnnnnnnnnnnnnnnnnnnnnnnnnnnnnnnnnnnnnnnnnnnnnnnnnnnnnnnnnnnnnnnnnnnnnnnnnnnnnnnnnnnnnnnnnnnnnnnnnnnnnnnnnnnnnnnnnnnnnnnnnnnnnnnnnnnnnnnnnnnnnnnnnnnnnnnnnnnnnnnnnnnnnnnnnnnnnnnnnnnnnnnnnnnnnnnnnnnnnnnnnnnnnnnnnnnnnnnnnnnnnnnnnnnnnnnnnnnnnnnnnnnnnnnnnnnnnnnnnnnnnnnnnnnnnnnnnnnnnnnnnnnnnnnnnnnnnnnnnnnnnnnngacggaaagcccaaaaatggatgccaagctgggaaactagaggactccaagggggccagcaaagatttcctgggcatttttaaaggatcatctcaacaagaatgaagggctggcaaatggactgtccgagtctcaggagagccgcatggccagtatcaaagctgaggccgataaggtttacactntcacagacaacgctcccagcccttccatagggagcgcctcgaggatggaatgcagcactttggtgaacgggcaggcaccaatcgcacctctgcatgtgttgacccagaatggggcagagagttcagctgcaaagacaagtagcccggcctattcagacatatccgatgctgctgacgatggtggttccgacagcaggtcagagggcatgagatcaaaggccagttccccatcagatattatttctagtaaggacagtgtggtaaaagggcattcttcaactacagcacaatcatctcaactgaaagaatcccattctccctattaccacggctatgatccttattattctccaagttacatgcatcctgggcaggtcggcgcccctgcagctggaaatagtgggagcacgcagggaatgaagatcaagaaggagtctgaggaagatgctgaaaagaaagacaaggcagagcagttagattctaagaaagtggaccacaattctgcatccttacagcctcagcaccaatcggtgatcacacaaagacatcctgccctggctcagtcactttattatgggcaatatgcctatggactctatatggtccaga

SEQ ID NO: 40498 - DNA, 807 bp, Macaca Mulatta
  misc_feature (1)...(807): n = A,T,C or G
ggaaaagtatacaaatttatcagattcaaagatcagaaactatatactgaactacagaaatacaaaaccaaaagcaagattaagtatctagatttttcccagttttatagaccagctatatgaaacaaaggagtatggtatcttcttcacccagcaatcatttttgttagtttagtaattgccgtgtctgatgctgggaactttagtgtttaaaactaacataaacagcattcctgccctcaaagggtgtgaagcataaacaaatagtatgcaagaagttcaaatacaaacaaaattatgtacatattcaagagagttgcaactgtttcagaaatagacttcataaaatcagtaacatttggacatggaatgtgaatggggtaatattcaaaatacaagaggaagttgaatagctcaatagcaagaaaacaaataacctagattaaaaataggtaaagaacctgaatagacatttttcaaaaaaatcccatacaaatagccaagaggtatataaaaatatgctcaatatcagccggacgcgnnnnnnnnnnnnnnnnnnnnnnnnnnnnnnnaaggccgaggcgggcggatcctgaggttaggagatcgaggccatcccagctaacacgnnnnnnnnnnnnnnnnnnnnnnnnnnnnnnnnnnnntagccggggcatggtggcgggcnnnnnnnnnnnnnnnnnnnnnnnnagctgaagcangagaatggcgtgaacccaggaagcgnnnnnnnnnnnnnnnnnnnnnnnnnnnnnnnnnnngcnnnnnnnnnnnnnnnnnnnnnnn

SEQ ID NO: 40499 - DNA, 1196 bp, Macaca Mulatta
  misc_feature (1)...(1196): n = A,T,C or G
gggacattgtgttctccgcactgctgttactgaggtctccagcgccttctccctcctgtgtaaaatggcaactcttaaggaaaaactcattgcaccagttgcggaagaagaggcaacagtcccaaacaataagatcactgtagtgggtgttggacaagttggtatggcgtgtgctatcagcattctgggaaagtctctggctgatgaacttgctcttgtggatgttttggaagataagcttaaaggagaaatgatggatctgcagcatgggagcttatttcttcacacgcctaaaattgtggcaaataaagattattctgtgactgccaattccaagattgtagtgggtaactgcaggagtcccgtcagcaaagaaggggagaagtccgcttcaatccgggtgccccagaaaatgttaattgtccctcaaatattacattactttccctcaagaaaagtcaaaagtaaaaataccccggaaattggcatatcaataaactttgttgggattttcccaaaaacccacaggatgggaaacaaatttttcccttaacacattaaatgagtattaacacccctagtggttaaaaaaaaccctatacaggggttagcgggaatatatgtaccacccccccataacacgaaacacatccacccttccccccgtatgtgctggaaaataaattcggggaggaaatataaacgtacgtggcgggcataatttgtgtcctccaaactcaccacactgtgggggagaaaaaattntcttcctaggtgcgcagtactgagaaaaaattttttcttctgccgacttcacataacacccntcaatacaaaaagggcggggcccttgtagataaaacactcaaaccacctccatgagggaggaccatttattatagcggaatatacacatcacaggggtctaaatacatctgtggactncactaggggggtgacattgggcggaacattatctatatcacggggcgagtgtcaaaacacaaagtacgtgatggacatacctncatantnacgtcgagagagacagtcatacgagttattacgatcaaacgttgatgacttcttcccctaatatacttgagtcgccacaaagagggctctttctactctctctcccaccngaaagacttcacgtggatacacccacctatcgaacaatagtgtgtaagacg

SEQ ID NO: 40500 - DNA, 706 bp, Macaca Mulatta
acttttgcattgtatgtagcctttgaagtaaaaataaaataaataggaatgtcaggctcacgttaatatttctagtttctgtttatgatcatggaacatgactagcacacaaagtagatttttgccccagtgaacttctgcaactgtttctgaccctttagaaaataccaactgtgagaaggatttaatttgcctaatgttaaaaacctatcatctaaattactttcagggaggattttgtcagattttggtttggaaatcgttttaattgaatatttagtcataatagactttatgaactaagctgatttaatcagtttaaaaacctctcattaccttcttagattaaagaagctaatactcttttgagatagaaggaaatatttcgtgggacatgtgactttcgtgttaaggcagtttacccatcttggccgatgtggagaaagtgcaaacttcagtagaatcccggtcttttcatccaagtgcttgcaagtgcagcgttgtgctctgcaaggaaccatacagaaaccaaagagctcgctaaactcgtcttagtaattccttagggtctgtgatatatgccaggaaatctgattgaaactaatatgctttcaattctcccattattgcctaaattgtaatatcacaggcacttgcctacactgggaaagtaagaacaactaatgcccatataatgtaacttgcc

SEQ ID NO: 40501 - DNA, 848 bp, Macaca Mulatta
  misc_feature (1)...(848): n = A,T,C or G
gggatggatatcaaaaatagttgctgtgcaaaagttagtagtcttcttcaagaagaaaaccaattctttttctaataatacctgtgaaattgcnnnnnnnnnnnnnnnnnnnnnnngccaaatgtcagcagagtgctgctgcttttatctagtaattttgatatgtaagtattaatgcatttttaaaagatgtctacattgaaaaaatgttcatcccagtgtcctgcttatgatgttttgttcagattttttgtaagagaccagttagtacactgggggtgcgtgttgtgtacatgtgtcatttttgttagacattgttgaccaaatgtgattataaatgaagttgatgaacattaattttgttattagtgagtttttttgaattgtaagtggatttccagtttaccctctgttgttcacagctttttttaagatttgactaattggatccatctcattgtacagtgttttagttgcaaacagaaagtagaatttggtataaagcaggttatttctatattgaaaggagtacagttgaaattgtggatttaagattgttaaaatcatgacaattctaacttgtctattctaacctactgtgtacaatctgattttttaaaattgtaaacatgtatgatcttggtttcatgtgttttttgaaagtgttattgtttaaaaaatgaaaaaaagcatatctgctaaagagctgtcagttttcattactgactctgtaaaatacactggttcttgtggaaccgggtgttaatttggccagctgctgcaattaccccttcaaaaagtatttgggaaaccttagaatgaactacattttcttggaaaagaacatt

SEQ ID NO: 40502 - DNA, 359 bp, Macaca Mulatta
cagcagcgtgcacccgctgttcggcaccaacgtacaatttttgtatcttcagattccactagtatcttatagcgggttctactctgccaccaccaaaccagtatctgcacaccctgctgtcccacaatgggacgaactggatggactggggacagatctgtgctatgactctcctgttcgagcctgccaaaatttccaagaggatctctacctgccaccaagacttctatcaaagagcatagagtttcagagaatagacaactcataacctcaggtaatggtcaatgacaaacagtgttaccggtttgcccatcaactcccatcatgttacgtgaagtcggtgcaagtgtggtgggatg

SEQ ID NO: 40503 - DNA, 697 bp, Macaca Mulatta
gaggcagctgcagtgttgtcatgggtcctcaagcccacggtccctaaccatgatgggacacagtaatcggctgctggcacaccacttgcccagagctacaagtctggttctcgtgtggagttggtacagtttctgaatatgggaacttccctccccaagtggtgggaagttacagttaactacaacttaactatcactcacttccagaggtttagtgtttttaatatgggaaagaggagaaatctcaggtccaatcagggttctgcccatcagcttttcactgaaactttcaatcgtgttgttttttttcccatctttcagtttctagctgtgtttgcctcctccctccatgttgcctcctctttttttgcttttggtctcctttccagcttcatgtctccatgagttcagctgtacctcgtctcctgttaaatctgatcatgtccactttttcttactgaccttactcaaagctatggtagctgagggagttacagtgaaaagacatgtagcgtttgccttattcggagcctgaagagcccagaaactcatgctgtgaatcccaaaactcagcgctcctcaagagctgtgaaaatcatgatactttgtcacaattttgcctgaaagagtctttggcacgagctccagagctaacctgaggtccattccagatcccactctctgggcatgagactcc

SEQ ID NO: 40504 - DNA, 462 bp, Macaca Mulatta
ggaaaagacttcagagctacacctttcggtagaatgtggcacggatacattactcatcaaagagaatgtgaatttacctcctccttccgcgtcagccatagctgatacatttcaagagcaactggaagagaaaaattttgaagactccattgtaccagttgtgctttccgcagatccaggtacgtggccccgaattttgaatattaaacaacgggacattcttgttgaaaatgttccgcctcaagtaagaaattttaactttccaaaagataatacagggagaaagttttcagaaacttattagagcaaggattcttccaaacggtgaaaaaaccactagatcctggttactttattcgacctcaaaagattctgtgttttgtctatattgcagactctttggggaaggaaaaaatcaactgaaaaatgaaaatggtagcaaagattggcaacatttatcac

SEQ ID NO: 40505 - DNA, 808 bp, Macaca Mulatta
  misc_feature (1)...(808): n = A,T,C or G
gggccaatannnnnnnnnnnnnnnnnnnnnnnnnnnnnnnnnnnnnnnnnnnnnnnnnnnnnnnnnnnnnnnnnnnnnnnnnnnnnnnnnnnnnnnnnnnnnnnnnnnnnnnnnnnnnnnnnnnnnnnnnnnnnnnnnnnnnnnnnnnnnnnnnnnnnnnnnnnnnnnnnnnnnnnnnnnnnnnnnnnnnnnnnnnnnnnnnnnnnnnnnnnnnnnnnnnnnnnnnnnnnnnnnnnnnnnnnnnnnnnnnnnnnnnnnnnnnnnnnnnnnnnnnnnnnnnnnnnnnnnnnnnnnnnnnnnnnnnnnnnnnnnnnnnnnnnnnnnnnnnnnnnnnnnnnnnnnnnnnnnnnnnnnnnnnnnnnnnnnnnnnnnnnnnnnnnnnnnnnnnnnnnnnnnnnnnnnnnnnnnnnnnnnnnnnnnnnnnnnnnnnnnnnnnnnnnnnnnnnnnnnnnnnnnnnnnnnnnnnnnnnnnnnnnnnnnnnnnnnnnnnnnnnnnnnnnnnnnnnnnnnnnnnnnnnnnnnnnnnnnnnnnnnnnnnnnnnnnnnnnnnnnnnnnnnnnnnnnnnnnnncttaggcggaattcctcaccaaaaatggaataatccatcccccctattagaaaccacagtggctaggaataagataaaatggaaatttttatccacatgcataagaccctaaaatcggaatccaaaaatcttaacctataatttaacaacacatgtccattctaaggcaacaaaaaaatacccaatgcctaccccttcactgttatataccaaaagaatagcataagccttaaaaggg

SEQ ID NO: 40506 - DNA, 774 bp, Macaca Mulatta
ggtattaagactaagaaatgtaattacaataataattctgatgtcatgctgtgtggatctgacaaatccacaataaagtccatgtggaagaaagtaatgcgcaaaaataaaaacagcacagaaacttctgaaaagaaagaatgggaaaactgtcctacaagataccaaaccttactaataagcctactctatttaaaatagaaaaatcctgcacagtaataaacagatcagaacacagaaacatacccaattatctataatttaatgttaaaaaaaaaggtaggcagcagtttaaagaagttggaaaataatgggttatctaatatatgttataagcaattaacagaaaaataatgacatgcttacctcatactatacctcacagtatcacaagtagcattcatttctaaaattatgtattttagaaattcttactggttattatgggaaatcaaggtatgtattaaacacaaaaatacatgctgaacaatacatttggaaaaagaaattcccaatgtagtaaaatctaaagatagagttctgcattaggttaaactatataaaaattctcagtttcaatcattgaaattgatcaaatattggcaatttagtacaagtcaaactgaaaaaaagaattatggggaaaagtggcggtaacagggtttcaattccccttcaacgtcctctcataaaaatggagcaatgaagacagcaaaaccaaaaactctatgagaaaaaactttcaacaaactagattgaaaagcgggtcttcat

SEQ ID NO: 40507 - DNA, 394 bp, Macaca Mulatta
tgtgtcccgtggtgaggctgcaccacctgtggcctggccagctctgtctcctttgtgcaggatgcttaaaagaacagaacaaggtggccgtgcctctgggcggggggtaccgtccagcccttcatgggctccctaatggcgtaggtgggttggggaacgttgtgagaactaaccctgttcaatgctgaagtcgccctcaaaccaggcgggaggtggtaactgctcagtaagcacccagcagagcggcccggggatggcggcagggaggccaccccttgggcagtggacaggagggtgagagctcagccaggcaggtgggggcaggagagatgtgaggagccccacctcatttcaccctcaaatgccccacaacagcctcctgtgggccctcttc

SEQ ID NO: 40508 - DNA, 773 bp, Macaca Mulatta
gggttgacgtttgagtttacagcagaaacgttgggcaagggttaaggaatgatctctgagatggcagcatacctgatctactagctctttttcaccaggctattcagagtttgacatttatgttacatttataaaaaggtatattttaagtgtggtttttctttttgctttaagcaactgagacatgtaagtcaatttcagatattttctgctaaaccgtgtatctctttgaatgttcactatcaaggtgaattatacaaggggtgttagatccttttaacgtttcagagcaacctaaactaagtttgaatgtctcgtttaacactgtgagaggatgtatcttgtctgcatcttgtgtttcagttgtatttatcagtgaaatacgtcaggggaatattctgacttgcagtttaaaaagctaacaggcctaggggaatgctccacaaaatagtatattttgtatatggcatggtgttatagattaattagctattgtgctgcctggcaccatcttctgccttgtgctgtcttgtgctgtttctcaaggagtgattcctctttgtgttttagaatgatgtttctcactgcctacagatgatgtccatttggttgatttcactgtcatttcatacacagctgtttcaaactgcgtgggaatcctcagagaactaccctcccctttctgaacaaaacgtgcttccctgcatttttcttctttaaacttttatccctttcccccctttacaaaaacctttggtttaatcctttcctta

SEQ ID NO: 40509 - DNA, 558 bp, Macaca Mulatta
gcaatgtatagtgaatagcatggaacaatgaacagttccttggtttctcatatattaaatagagaatgtagggctggattgatggcaggtgggagacagaagaacccaattgttgctgagctgattcatatatttattttgtgcatatgtaataagtgctcttgaatacccagcatcccttatcacttgtatcatcccggacacctaaaaataaaacatccctacatttctcaaaacagataaccttggtctgatcctagagttctgatgatagaagatagaagctaccagcctttccctgcaagtactcattcaatacatcagaggagacttaggggttaaatcctattgaactccaagttttgaacacagagacatcaagtaatgtacaaaatttatctaaaaatctatgtattaaagcactatggaatcatactaaagttagaaatgtgggaattctcttttgtatgattcaaaaatttatttcgatcttcctttcattgtagagtgccctctagtgctcgataatttgttcccatttcaatttggagaatcatg

SEQ ID NO: 40510 - DNA, 1311 bp, Macaca Mulatta
  misc_feature (1)...(1311): n = A,T,C or G
ctcacccagacaaagctactggggggaaagtgtgaggaagggtgtgggcatagcccaggccctcatcttctctctgctgtaagctgatagggctgcacccccaactcagccgtgagaggtcattcttgctccagcacagactcctgagaggactcctcactcagaacaggactttgggaaaggtggtttctagaaatggatgagtaaataaatggacaattgaatatgcccagcatcctggggaccgcaggaggaactgtgtacagatggcttgaaggccagaggcttgggttattgtcctggccctgccactggccagctgtttgactttgaacaagtcagttccactctgtggacttcagggtcctctcccagaagaacagcagccgtacggtctctactgcctggtaaacaccctggctcactctcccgagatggtggttgtcatagtgtgtagtccacacaacacctgcattgcaaccactgggnnnnnnnnnnnnnnnnnnnnnnngatggagtctcannnnnnnnnnnnnnnnnnnnnnnnnnnnngtnnnnnnnnnnnnnnnnnnnnnnnnnnnnnnnnnnnnnnnnnnnnnngnnnnnnnnnnnnngnnnnnnnnnnnnnnnnnagggcctgccacctcnnnnnnnnnnnnnnnnnnnnnnnnnnnnnnnnnnannnnnnnnnnnnnnnnnnntnnnnnnnnnnnnngcctgatctcaagtgatctgcccacctcggccttccaaagtgctggggttataggcttaagccaccccgcctggccaagggaannnnnnnnnnnnnnnnnnnnnnnnnnnnnagcgcatgtttctgagcctcaattccagatcagctgagcctggagtttctgtagacaagggctagaaatctgcacttttaactcttgaaaaccactatgtgccttcatctaagctgcccctgcttctctcccctccatccctccagcctggccctgtcctcctcactctcccctgcaccctcccccaccccacactccccacaaacggccaaagcagcagtgtgaggcaatcgctctatccttgaccccttcctttgcacagtgagtgatggcatttttatctcctgatgatgatgcacagccttcagcggggggcatttaagacgcagaacaccaggtccaggctgcagctgcgggactcacaggcgaagcttgaggggctcaggaaggacaaagaaccacttcttgagagaagaggcagctgcagcagcggcagcgaccccaccactgccacatctgccaggaaacaatgctgctagcgaca

SEQ ID NO: 40511 - DNA, 3512 bp, Macaca Mulatta
  misc_feature (1)...(3512): n = A,T,C or G
agttgcagagctattttgctgcatgtgaggatgagacccctgccatccggaaccatgacaaggtcctgcagcgtctgtgtgagcacctggaccacgccctgctgtacgnnnnnnnnnnnnnnnnnnnnnnnnnnnnnnnnnnnnnnnnnnnnnnnnnnnnnnnnnnnnnnnnnnnnnnnnnnnnnnnnnnnnnnnnnnnnnnnnnnnnnnnnnnnnnnnnnnnnnnnnnnnnnnnnnnnnnnnnnnnnnnnnnnnnnnnnnnnnnnnnnnnnnnnnnnnnnnnnnnnnnnnnnnnnnnnnnnnnnnnnnnnnnnnnnnnnnnnnnnnnnnnnnnnnnnnnnnnnnnnnnnnnnnnnnnnnnnnnnnnnnnnnnnnnnnnnnnnnnnnnnnnnnnnnnnnnnnnnnnnnnnnnnnnnnnnnnnnnnnnnnnnnnnnnnnnnnnnnnnnnnnnnnnnnnnnnnnnnnnnnnnnnnnnnnnnnnnnnnnnnnnnnnnnnnnnnnnnnnnnnnnnnnnnnnnnnnnnnnnnnnnnnnnnnnnnnnnnnnnnnnnnnnnnnnnnnnnnnnnnnnnnnnnnnnnnnnnnnnnnnnnnnnnnnnnnnnnnnnnnnnnnnnnnnnnnnnnnnnnnnnnnnnnnnnnnnnnnnnnnnnnnagatggagacctcacagacacggtcagcggcccccgctccacagcctctgacctgaccaacagcaaggcctccaccagaaaccccacccagcgccagaaccccttcaacgaggagccagcagagaccgtgtcctcctctgacaccacccccgtgcacaccacctctcaggagaaggaggaggcccaggccctggacctgccagatgcctgcacggagctcgaggtcatcagnnnnnnnnnnnnnnnnnnnnnnnnnnnnnnnnnnnnnnnnnnnnnnnnnnnnnnnnnnnnnnnnnnnnnnnnnnnnnnnnnnnnnnnnnnnnnnnnnnnnnnnnnnnnnnnnnnnnnnnnnnnnnnnnnnnnnnnnnnnnnnnnnnnnnnnnnnnnnnnnnnnnnnnnnnnnnnnnnnnnnnnnnnnnnnnnnnnnnnnnnnnnnnnnnnnnnnnnnnnnnnnnnnnnnnnnnnnnnnnnnnnnnnnnnnnnnnnnnnnnnnnnnnnnnnnnnnnnnnnnnnnnnnnnnnnnnnnnnnnnnnnnnnnnnnnnnnnnnnnnnnnnnnnnnnnnnnnnnnnnnnnnnnnnnnnnnnnnnnnnnnnnnnnnnnnnnnnnnnnnnnnnnnnnnnnnnnnnnnnnnnnnnnnnnnnnnnnnnnnnnnnnnnnnnnnnnnnnnnnnnnnnnnnnnnnnnnnnnnnnnnnnnnnnnnnnnnnnnnnnnnnnnnnnnnnnnnnnnnnnnnnnnnnnnnnnnnnnnnnnnnnnnnnnnnnnnnnnnnnnnnnnnnnnnnnnnnnnnnnnnnnnnnnnnnnnnnnnnnnnnnnnnnnnnnnnnnnnnnnnnnnnnnnnnnnnnnnnnnnnnnnnnnnnnnnnnnnnnnnnnnnnnnnnnnnnnnnnnnnnnnnnnnnnnnnnnnnnnnnnnnnnnnnnnnnnnnnnnnnnnnnnnnnnnnnnnnnnnnnnnnnnnnnnnnnnnnnnnnnnnnnnnnnnnnnnnnnnnnnnnnnnnnnnnnnnnnnnnnnnnnnnnnnnnnnnnnnnnnnnnnnnnnnnnnnnnnnnnnnnnnnnnnnnnnnnnnnnnnnnnnnnnnnnnnnnnnnnnnnnnnnnnnnnnnnnnnnnnnnnnnnnnnnnnnnnnnnnnnnnnnnnnnnnnnnnnnnnnnnnnnnnnnnnnnnnnnnnnnnnnnnnnnnnnnnnnnnnnnnnnnnnnnnnnnnnnnnnnnnnnnnnnnnnnnnnnnnnnnnnnnnnnnnnnnnnnnnnnnnnnnnnnnnnnnnnnnnnnnnnnnnnnnnnnnnnnnnnnnnnnnnnnnnnnnnnnnnnnnnnnnnnnnnnnnnnnnnnnnnnnnnnnnnnnnnnnnnnnnnnnnnnnnnnnnnnnnnnnnnnnnnnnnnnnnnnnnnnnnnnnnnnnnnnnnnnnnnnnnnnnnnnnnnnnnnnnnnnnnnnnnnnnnnnnnnnnnnnnnnnnnnnnnnnnnnnnnnnnnnnnnnnnnnnnnnnnnnnnnnnnnnnnnnnnnnnnnnnnnnnnnnnnnnnnnnnnnnnnnnnnnnnnnnnnnnnnnnnnnnnnnnnnnnnnnnnnnnnnnnnnnnnnnnnnnnnnnnnnnnnnnnnnnnnnnnnnnnnnnnnnnnnnnnnnnnnnnnnnnnnnnnnnnnnnnnnnnnnnnnnnnnnnnnnnnnnnnnnnnnnnnnnnnnnnnnnnnnnnnnnnnnnnnnnnnnnnnnnnnnnnnnnnnnnnnnnnnnnnnnnnnnnnnnnnnnnnnnnnnnnnngggggagcagtgcggtggctgccggagagccaacaccacggatcggccccacgccttccaggtcattctctccgaccggccctgcctggagctgagtgccgagagtgaggccgagatggccgagtggatgcagcacctctgccaggctgtgtccaaaggggtnggtcatccctcagggcgtagctcccagcccctgcatcccctgctgcctggtcctcaccgatgaccgcctcttcacgtgccatgaggattgccagaccagcttcttccgctctctgggcacagccaagctgggcgacatcagcgctgtctccactgagccgggcaaggagtactgtgtcttggnnnnnnnnnnnnnnnnnnngcagctccttccgccctgggtcatctncctgannnnnnnnnnnnnnnnnnnnnnnnnnnnnnnnnnnnnnnnnnnnnnnnnnnnnnnnnnnnnaggtggacctcccccacacggcgatccaggaagcctccaacaagaagaaattcgaggatgccttgagcctcatccacagcgcctggcagcggagcgacagtctctgccgcggccgagcctcccgagacccctggtgctgaggcagagctggttggcgtccctggtgggcaggaaaggaaggcacgccaaccgacaggcacactgtcacggctgtcgtcatactgtcgggagcctacagcccacccctgccccgggcggtagaaaaaaccgagtgtggcttaagacagggtccctccactccaaggatccagatcaggtgcccggcacccctgggcctcctgcccgacaggtagcgaacggaggtcgccgggggcagagggtctgagccctgtgggctctgcggatgcacgccctcctcccgggcctctgcctcagtctgcagaatctctgccggttggcactgagaacagcatcgatctaaggaagaacaaaagaaccaggagggcgggagccccctcttcctctcctgggttgggggctggggccctgagtgcccagccatccttgtttgtgtttgaacactctcctggccgcgtggggaagcaggaacatggggtgtctgcgcatgcttcctcctcctagctccatcac

SEQ ID NO: 40512 - DNA, 861 bp, Macaca Mulatta
ttgctagaatacaattgcctgtttttaggattcagaatcctaattagagataaactatttggtggcagatagggagagaggcatttatctttcagtggcagtaggttagaaatggagtgaatagttagaaagattccctaagagccacaaacccatcctaggattgtgaaggtacattaccatatcagaagtggatttgaatgaagcattttctgttggaatctgttaaacacagacatgggaaacttaaccaactcaaccaacttccttgcaggagtgagtctgtgctgctgcacatgccgcagcctgtcaatccagagctcactgtagggcccatcactggactggtggacaggctcaaccgcttccgaggtgagtgtcaccctcttggtgggatcaacatgcaatgccttcatttatggttttctatgggcagctttaccagtgtaatcatctttcatctagaagaagagaatagtctgtgaataggtatttctatttatagtttcactatcatcaaactgaccagaataaataaaatctggtgaaatgtaataggaatcagccacataacaaatttcttagaaaaataaaacatgcagaagggccctttaggactttaggaagcattccctgatacaatttcatgtatacaattattacatgaaatatacagagctaaattaatttaggacatttccatttcaaatttagtgcagttaacaactgatttgagtgacagtgttttttaaaatacatttcgggtgaagtttcacagcatttataattttagtcacgtttttaatccacaaaagcatacatgagtaacttatataacagcgcaaaaactgagaatctgtg

SEQ ID NO: 40513 - DNA, 619 bp, Macaca Mulatta
gttggcaggctggctcaatgatatcctattttaacttggatatctgctattctgccaaaacacaatttctagagtagttttgaatgggttgatttcccccagtcccacaaactctgaagccagtgtctagcttactaaaaaaagagttgtacataatatttaagatgctgagtatttcataggaaagctgaatgctgctgtaaagtgctctttaagtctttttttcgtttttaatccccttctaatgaatgaaactaggggaatttcaggggacagagatgggatttgttgtatgataaactgtatgtagtttttagtctttctgtattgagaagcagtggttggggcattttttaagatggctggctactcttgttttccctcacgataatacatttgtcataactcagtaacatggacttgcccctagaggtagttgttgataattctgaagtattaaggtcttgccaagcttctgatgattcaaacctgtactactgattattaagcaggacagactgagctttatgttgcaaataccttggaggagaaagtaatttctaaatgtacagagaggtaacttgactatatatgttgcatcctgtgcctcccttcatat

SEQ ID NO: 40514 - DNA, 765 bp, Macaca Mulatta
  misc_feature (1)...(765): n = A,T,C or G
tcatgctatcttctcccagaaaagacaggggcnaggattaaacctagtatagctccctctaaagcctgtgctcccatcaccatgccagtggctggcctaggaatgaaccccaagtttcagaatcctggtcgaatgtattttctcctatcacaaatttagggtcntgagttaggcagattggggagttcatggaagcaaatggctttggataaactggccctccatcctggaatcaagagcagaccgattcttcatggacttcatgaggcttggtgagagcagccagaacttctagattcatttcttctattactttgacaaagaagtcattcccacctatttgatgtctaagactagtcattcagagctggttctgctgctggggagaaacagattcaagtccaagaaaccctccttaagatgggagggggagaaagagggtaggggtgcagttcgggaaccttctaatgcgaatgccgagcaggaggcatcccaaagggtaatgacggcctgaggctgcctattcagctccttgagtagtctgtgtaaacaccctgataccacccatgtgaccttctggaaacagggcctggctcctaaccccagggggatggagcacactactgaccacgtggtgggatgtgggggccaacggggtggtgatagagtcccaggtcccttgccatccacttccctggcagagaccacaaagtcaagagttcacagctagtttaggcaagggcagccacagaggaattagatgcc

SEQ ID NO: 40515 - DNA, 2836 bp, Macaca Mulatta
  misc_feature (1)...(2836): n = A,T,C or G
gaggtatgactgggatttgctgcatcctttaaaatagtatctgggcatttattttattgaaggccactatattttattagttatgttaggaattcaggtagaatcaacttctacttactaaaggttgaatttctgacactttgtagagaaatgaatagactggacactgtgtggtcagtgtttagatttgcccatgggtctgtttaaatctatatcatggatcctgagacacaaatataattaagacaggtctagagacaggagaagcagaaataagctgacccaggagtacagtctcaagtagttcatgaatgagaaagtggacatctggcaagagtcattttactttatcctggctgaaaatccaaatcttgttttattttttccactaaaagtaactaaaataataacgaatttcatttgttcttgggttcttttttcctttaatgattgtgctataacttaaaataatgatgttacttttgaacannnnnnnnnnnnnnnnttaaagcatatctgaaaacgattgatgtttataactctcttttggcttcaaaataagattgtgttatcaccattttggtagatgaggttgtctgatgacaatgatgcnnnnnnnnnnnnnnnnnnnnnnnnnnnnnnnnnnnnnnnnnnnnnnnnnnnnnnnnnnnnnnnnnnnnnnnnnnnnnnnnnnnnnnnnnnnnnnnnnnnnnnnnnnnnnnnnnnnnnnnnnnnnnnnnnnnnnnnnnnnnnnnnnnnnnnnnnnnnnnnnnnnnnnnnnnnnnnnnnnnnnnnnnnnnnnnnnnnnnnnnnnnnnnnnnnnnnnnnnnnnnnnnnnnnnnnnnnnnnnnnnnnnnnnnnnnnnnnnnnnnnnnnnnnnnnnnnnnnnnnnnnnnnnnnnnnnnnnnnnnnnnnnnnnnnnnnnnnnnnnnnnnnnnnnnnnnnnnnnnnnnnnnnnnnnnnnnnnnnnnnnnnnnnnnnnnnnnnnnnnnnnnnnnnnnnnnnnnnnnnnnnnnnnnnnnnnnnnnnnnnnnnnnnnnnnnnnnnnnnnnnnnnnnnnnnnnnnnnnnnnnnnnnnnnnnnnnnnnnnnnnnnnnnnnnnnnnnnnnnnnnnnnnnnnnnnnnnnnnnnnnnnnnnnnnnnnnnnnnnnnnnnnnnnnnnnnnnnnnnnnnnnnnnnnnnnnnnnnnnnnnnnnnnnnnnnnnnnnnnnnnnnnnnnnnnnnnnnnnnnnnnnnnnnnnnnnnnnnnnnnnnnnnnnnnnnnnnnnnnnnnnnnnnnnnnnnnnnnnnnnnnnnnnnnnnnnnnnnnnnnnnnnnnnnnnnnnnnnnnnnnnnnnnnnnnnnnnnnnnnnnnnnnnnnnnnnnnnnnnnnnnnnnnnnnnnnnnnnnnnnnnnnnnnnnnnnnnnnnnnnnnnnnnnnnnnnnnnnnnnnnnnnnnnnnnnnnncatctgatgaacataaggatctatgcatccagatattattttgtatacaaatatntaatttggtgattgataatctctctttggggtagtcacatggaaagctcttttaaatttaacttttgcctttggatcttttttgagaaaagccattgaagagcaaaactaatgtaaacgtcttgatcatttaaaaagcttacttgtcctcgaaaggaaacacgagtcatcagtgagtataaacgtagacagttaatttgtgaatgctgtcggcctcaacgtgcttgataatagattctactgatctagctggagtaacttgatcacttacttccttattaatactagatcacacagtgtctttcttactccttcttctttacttactggcatgagcacagagtcccactatctgaaagagaagggagagtttgggggattattggaggattcttaaaaacttggttggcnnnnnnnnnnnnnnnnnnnncctgtaatcccagcacttcaggaggccgaggtgggtggatcaactgaggtcaggagtttgagaccagcctgaccaacatggtgaaaccccgtctttattaaatacaaaaaattagccaggttggtggtgcacacctgtaatctcagctacttgggaggctgaggcaggagaatcgcttgaacctgggaggcggagattgcagtgagccgagattgtgccattgcactccagcctgggcaacaagagtgaaactccatcnnnnnnnnnnnnnnnnnnnnnnnnnnnnnnnnnnnnnnnnnnnnnnnnnnnnnnnnnnnnnnnnnnnnnnnnnnnnnnnnnnnnnnnnnnnnnnnnnnnnnnnnnnnnnnnnnnnnnnnnnnnnnnnnnnnnnnnnnnnnnnnnnnnnnnnnnnnnnnnnnnnnnnnnnnccagcatagtgatgatatgacaccagcatatcaaagtaactaacaaactagctacacaaacatcttggagtttggtttggttctcttttctcatcacagatctccgtgcagaatagtgctcatccttatttcttgtttgcctttctatttccttccaaattctacatgccaagaatttctctgtcttttaagtggccgtcaactcaataggcaaaaatttggaataatccagagaaaaaaacaatccaaatataaaccagctaggaacatgaatgcccctgaatattaatnnnnnnnnnnnnnnnnnnnnnnnnnnnnnnnnnnnnnnntacatatataggggtttggaggagaacagaaggtctaactcgggagttggacttggtgggggcgggcacaggttaaatgtgagctgtgaacacccagtttgggaggaaggaggaaatgggaaccaactgccagtcaagcagttgcagtc

SEQ ID NO: 40516 - DNA, 1566 bp, Macaca Mulatta
tggggggggtttttctagaatacacaaacaccatcgaaaaataccttgcccccctagtatctacccgtccccctcttttttatgttcctaatacgttatggtagtaaaaacaatccaacttgggagctctgtttttaagcttttaatatttccaatgtcccccgtaattagtatgaaccccaaaaagctgggtctttttttgggggggggcgcttttcaaaccaaaacattaaggctgtgtgcccaggaatcccaaattttaacaaatggggcaggatttcccccaggctttacaaggaatattatggggcccttttcatccaaattgttttttcccagatgcccggccaaacaaatttttattcccttcagggtttctggcaaaaacctttgtcatagaaaaattggtgaagcctgttgtgggccaatttccaaacaaacggggggcattaccccaggcccctttatttgggcctgggatggtttcacggataatccccctgagccagtgaaagcccagatacttcccattggaggggtcgtttttagctgtcaccagcaacgttgccacgacgaacatccttgacagacacattcttgacattgaagcccacattgtccccaggaagagcttcactcaaagcttcatggtgcatttcgacagattttacttcagttgtaacgttgactggagcaaaggtgaccaccataccgggtttgagaacaccagtctccactcggccaacaggaacagtaccaataccaccaattttgtagacatcctggagaggcaggcgcaagggcttgtcagttggacgagttggtggtaggatgcagtccagagcctcaagcagcgtggttccactggcattgccatccttacgggtgaccttccatcccttgaaccaaggcatgttagcacttggctccagcatgttgtcaccattccaaccagaaattggcacaaatgctactgtgtcggggttgtagccaattttcttaatgtaagtgctgacttccttaacaatttcctcgtatctcttctggctgtagggtggctcagtggaatccattttgttaacaccaacaattagttgtttcacacccagtgtgtaagccagaagagcatgctctcgggtctgcccattcttggagataccagcttcaaattcaccaacaccagcagcaacaatcaggacagcacagtcagcctgagatgtccctgtaatcatgtttttgactgaagtctctgtgtcctggggcatcaatgatagtcacataatacttgctggtctcaaatttccacaaggagatatcaatggtgataccacgttccctgatcagcttgtcagtttatccaagatcccaggcatacttgaaggagccctttcccatctcagcagcctccttctcaaatttttcaatggttcttttgtcgatgccaccgcatttgtagatcagatggccagtagtgccggacttgcccgaatctacgtgtccaatgacgacaatgttgatatgagtcttttcctttcccattttagcctttaggggtagttttcacga

SEQ ID NO: 40517 - DNA, 154 bp, Macaca Mulatta
gggaatacggagagaacggtctggcaataccactttcggacctggccggaccacggagtgcccagcgaccccgggggcgtgctggacttcctggaggaggtgcaccataagcaggagagcatcatggatgcagggccggtcgtggtgcactgca

SEQ ID NO: 40518 - DNA, 2317 bp, Macaca Mulatta
  misc_feature (1)...(2317): n = A,T,C or G
aagccacagccgaaggaaggtgggagctgcagcctcgcgggggctgatatcaagactactgtgtctcacatcccaggattgacatgtgataagagagatgagccgagggcaggagggaacgccctgggaggtgttgatgatgagttggggaggctcctagacgaactcgcccccatctactgactgtgccagtcttacattttcaggatggagtggccaagggatgatataaacaaagcctacgttactgtgggaagaagacagactgttttcttagctgggactttggcttttgtccagggtggctctggtgtgtgggagcaacaggtcccgttttagcaattctttgtcaatggtttgaannnnnnnnnnnnnnagatgggatgggagagaagaggctaattttcgcgtcatgttaatctcacttctctggcatgtaagggtgctggtatgcctgctgtctctccactcccagttctgtgttccaaaaattgagatggctccctgcctatgactatgatgaggagccttgcttcatttcagaatctaccttcagcctgctagggcaggtatcagaaattccaaagggcatttatatgaggcacctaattagagcctatcaaagtaggaaaggagagccatttgaaaggcatcatatttcaaacttttgctattatctgtgttatctttacagtcacagggaacactggcgctactgaaaagatacttatacaattttaagtgtctttaaaatttgtgtcccataatgggacatcacctattgtatatatgccatgtattctattttnnnnnnnnnnnnnnnnnnnnnnnnnnnnnnnnnnnnnnnnnnnnnnnnnnnnnnnnnnnnnnnnnnnnnnnnnnnnnnnnnnnnnnnnnnnnnnnnnnnnnnnnnnnnnnnnnnnnnnnnnnnnnnnnnnnnnnnnnnnnnnnnnnnnnnnnnnnnnnnnnnnnnnnnnnnnnnnnnnnnnnnnnnnnnnnnnnnnnnnnnnnnnnnnnnnnnnnnnnnnnnnnnnnnnnnnnnnnnnnnnnnnnnnnnnnnnnnnnnnnnnnnnnnnnnnnnnnnnnnnnnnnnnnnnnnnnnnnnnnnnnnnnnnnnnnnnnnnnnnnnnnnnnnnnnnnnnnnnnnnnnnnnnnnnnnnnnnnnnnnnnnnnnnnnnnnnnnnnnnnnnnnnnnnngtctcactctgtcgcccattttggagtgcagtggcgcaatctcaccttactgcagcctctacctcccagattcaagcgattctcctgcctcacccgccggagtagctgggattacaggctcctgccaccacacctggctaatttttgtagttttagtagagatggggttttgccgtgttggtcaggctggtctcaaactcctgacctcaggtgatgcgcccacctcggcctcccaaagtgctgggattataggagtgagtcaccgcgcctggccagactctggcattttaacaatcccaggtgatttgtgtgcatgtgaaaatgtaagtatcattggtctagatcctagactctttaagatatcaccatctgtaggtagaatatttaaaacataataagtatgactgatagattattttatccaaagttctnnnnnnnnnnnnnngttcacggattctcctgcctcagtctcccaagtagctgggaccacaagcacccaccaccatgcctggctaatttttttgtgtgtatttttagtagagatggggtttcaccatgttagccaggatggtctnnnnnnnnnnnnnnnnnnnnnnnnnnnnnnnnnnnnnnnnnnnnnnnnnnnnnnnnnnnnnnnnnnnnnnnnnnnnnnnnnnnnnnnnnnnnnnnnnnnnnnnnnnnnnnnnnnnnnnnnnnnnnnnnnnnnnnnnnnnnnnnnnnnnnnnnnnnnnnnnnnnnnnnnnnnnnnnnnnnnnnnnnnnnnnnnnnnnnnnnnnnnnnnnnnnnnnnnnnnnnnnnnnnnnnnnnnnnnnnnnnnnnnnnnnnnnnnnnnnnnnnnnnnnnnnnnnnnnnnnnnnnnnnnnnnnnnnnnnnnnnnnnnnnnnnnnnnnnnnnnnnnnnnnnnnnnnnnnnnnnnnnttcagcatagtagagccttttccccacccctctgtaacataatgccctgttttatttttactgcttttattttcatgctttgtgggtgtcctcactggagtgtaagccccatggtaggaagggctgacctgtgactgttttatctccagggccaacagcagtgttactgtataatatgtactcaataaatatttgttggctt

SEQ ID NO: 40519 - DNA, 188 bp, Macaca Mulatta
  misc_feature (1)...(188): n = A,T,C or G
taaaactcactctgtagactcttacagatttttacttcagcgttttgtgcaaggtattcattgtacagcctaacttaataaatgtgatttgtatannnnnnnnnnnnnnnnnnnnnnnnnnnnnnnnnnnnnnnnnnnnnnnnnnnnnnnnnnnnnnnnnnnnnnnnnnnnatggccgacagttttac

SEQ ID NO: 40520 - DNA, 1646 bp, Macaca Mulatta
  misc_feature (1)...(1646): n = A,T,C or G
ctccttttggagtcaaggaaagcctttctataagtaaattaagaaaaggtaggattataagatttctcaatgggaatgattaaattgtctcgtggaaaacttcagttaatgtcatgcatcagttttaacatatgaagtaaagtgttctatccagaattaaagtcaagtttacttatacaacataagaatatttcacttagatatgaagaaaggaaacactggtctccactcgaaatactgtcatggcaaatatttatcctttcgttaagtgctttttcaccctatagataagcatttatgtgccaatatgttgtcagaaattaatgtatgttcatctcctctgttcctgcttatattatgtatttcaacagaaggtctacggccattcacttcaattttgacctctgtcccatagagaagaacatttaaagtaatactaatggtcgaatatgaatgactttttaggatctgctttttgtctaacctgaaaaagtgccacatttggaagacaatttaatgatggtgaagaaataataaacctccctttacttgttaaaagggatatatatnnnntatatatgtctgcaataagggagaaataagatttgtgtttgaatattgtaggnnnnnnnnnnnnnnnnnnnnnnnnnnnnnnnnnnnnnnnnnnnnnnnnnnnnnnnnnnnnnnnnnnnnnnnnnnnnnnnnnnnnnnnnnnnnnnnnnnnnnnnnnnnnnnnnnnnnnnnnnnnnnnnnnnnnnnnnnnnnnnnnnnnnnnnnnnnnnnnnnnnnnnnnnnnnnnnnnnnnnnnnnnnnnnnnnnnnnnnnnnnnnnnnnnnnnnnnnnnnnnnnnnnnnnnnnnnnnnnnnnnnnnnnnnnnnnnnnnnnnnnnnnnnnnnnnnnnnnnnnnnnnnnnnnnnnnnnnnnnnnnnnnnnnnnnnnnnnnnnnnnnnnnnnnnnnnnnnnnnnnnnnnnnnnnnnnnnnnnnnnnnnnnnnnnnnnnnnnnnnnnnnnnnnnnnnnnnnnnnnnnnnnnnnnnnnnnnnnnnnnnnnnnnnnnnnnnnnnnnnnnnnnnnnnnnnnnnnnnnnnnnnnnnnnnnnnnnnnnnnnnnnnnnnnnnnnnnnnnnnnnnnnnnnnnnnnnnnnnnnnnnnnnnnnnnnnnnnnnnnnnnnnnnnnnnnnnnnnnnnnnnnnnnnnnnnnnnnnnnnnnnnnnnnnnnnnnnnnnnnnnnnnnnnnnnnnnnnnnnnnnnnnnnnnnnnnnnnnnnnnnnnnnnnnnnnnnnnnnnnnnnnnnnnnnnnnnnnnnnnnnnnnnnnnnnnnnnnnnnnnnnnnnnnnnnnnnnnnnnnnnnnnnnnnnnnnnnnnnnnnnnnnnnnnnnnnnnnnnnnnnnnnnnnnnnnnnnnnnnnnnnnnnnnnnnnnnnnnnnnnnnnnnnnnnnnnnnnnnnnnnnnnnnnnnnnnnnnnnnnnnnnnnnnnnnnnnnnnnnnnnnnnnnnnnnnnnnnnnnnnnnnnnnnnnnaacataactaaattcatttgatcatcagcacttgttagcaggatttcattttttacctttgccttgtttctctagcccataaagagtactcagcatactttcattaacaatttggcagaatatgataat

SEQ ID NO: 40521 - DNA, 384 bp, Macaca Mulatta
tctttcttatccatctcgtggtgatacactctgattttcaggctcctcatttatggctctgtgctacccctaggtagcgagagagaggctgggaaaagggtggacgtggccagagagggagagtagcagaggaaaggagcaatccatgcacaccctgtacagttgtttttctacggttcaacagtctgtttattgtacttccaatggttttattataatacagtatacgggacatatattttatttctttgtagatatttgtgttttattggtattgtaaacctgataattatttacatgtttattactgtaattttataactttatgcaattggtggtgcttcctttcttcaaaatacagattttaaaaaataatttctagat

SEQ ID NO: 40522 - DNA, 541 bp, Macaca Mulatta
cccagagacactgcagtccagaggtgtgtgtgagggtagtttgcttcctccgcacctctctggctgcctccctggctctcctccttgccccttccttggaatagttccctgttgaatagcaactacctagcccaggtgttcaggacccaattttagaatccatcccactattctcaggagcacctctgttcttgcctgaccattcttgcctgttttgggctctggaagtgtgatgcccccatggttggccctacctctctgctgttttcctctcatgttttgctgccagctgcctgggaggggtggctgtatccctgtcccacatcagaaactgatcctcaggacttgaaggcccagaaatggagagagaatgagacctggagacagagagcataattgttgaggaaatggatgacagttgaagctattcatatggagccatatactccattgttgaaatagaataaggaaataaaatgatacactcacatacctgcgtgggctctccaaaaacaccgtactgccttgtctaccaggagct

SEQ ID NO: 40523 - DNA, 408 bp, Macaca Mulatta
acccccaagcctggcgctctcaggaggctactccttggtccccagggacgttggctgccctgaccatgtccttcccctcctcccggggcctctgcttcctcaggagctgcccagactccagaaaagcttggagaaagggaggcaggaagaggagcactttagcgctctgcgggtcagttcagcagggtcataggattgtgaggtcatggatctgcaaaatgcacctttttaaagagtttcttagttccccagccccagctaatacccagccagtgccgtgtgcgcacaggcatgtgcacataaacatgcatgagaaccaggccgttccttccgttgtgcaagcggaagtggagacggggcagtgatctgcccagcagagatggggcttggcgcgaggcagggctccct

SEQ ID NO: 40524 - DNA, 649 bp, Macaca Mulatta
  misc_feature (1)...(649): n = A,T,C or G
nnnnnnnnnnnnnnnnnnnnnnnnnnnnnnnngggtggatcactcannnnnnnnnnnnnnnnnnnnnnnnnnnnnnnnnnnnnnnnnnnnnnnnnnnnnnncnnnnnnnnnnnnnnncgagcgtggtggtgcttgcctgtagtnnnnnnnnnnnnnnnnnnnntannnnnnnnnnnnnnnngggaagtggaggttgcgtgggccaggatcctgccactgcactccagtatgggcaacagagtgggactgtctcccctnnnnnnnnnnnnnnnnnnnnnnnnnnnnnnnngtactttttcatagtaaagtataagtactttattcatattcataaatattactgagatgaatatctgaaaatgttcaccaactgccaggaagaaaccagaatttatttcaatttattcaatttgtattaaaaaaaactatcttaatttctgtgagagccagatctatttcctttggcttcataaatgctgtatcctactgaatttcccaatggagcatattcattgtccccttctcccccaaaatgaaaattaaaaactcctgactttttggctgggcaccgtgctccccgctgtatcccggccctttgggagccaaggggggggatctccagtcggaattaaaattctccgccaaaggn

SEQ ID NO: 40525 - DNA, 1146 bp, Macaca Mulatta
  misc_feature (1)...(1146): n = A,T,C or G
gggggccagccggctctgctcagcatctggggacgctcttagctctcggcgcacggcccagcttccttcaaaatgtctactgttcatgaaatcctgtgcaagctcagcttggagggtgatcactctacacccccaagtgcatatgggtcagtcaaagcctacaccaactttgatgctgagcgcgatgctttgaacattgaaacagccatcaagaccaaaggtgtggatgaagtcaccattgtcaacattttgatcaaccgcagcaatgcacagagacaggatattgccttcgcctaccagaaaaggaacaaaaaggaacttgcatccaaactgaaatctaaccttatctagccaacctggaagacagtagatttttggtgcctaattgaaaatacaccctggcgcatgtaatgaacgccattcttgaagctaaaataagcctttccctagtaaagggggggcctggggtaaaacacaaacagaacggaaaataacctacatccaatctgtgaagaattcaattactctgagttcacaccgtgaatccccccgatcccctatgattaacctcacgtgtgtccagcgggaaaaagaatcttagaccccaatgaacaatattcccgtatctcaacaagtggcgaacacagaatatgaatgtcttccgaatgcttaaaaagagcagctaatctttatctggcagccaagatgtaaaagaggggaacatcaaatttgtgttttttattactgagtgcgcaagaaaatcaaaccgtcacctggcgagaagggcgaaaagtatagacncacgagagcgagagacctgcatgagaaaaaaagggggtgtgcggtgcccccttatggaggttcctttctactgtggaggttataattacagcctaggaatgccggggacaaaggacagagaggagcncctcccagcgtcacacacatgatatcagccatcctataacacacaacgcctcatattatgctaataccactnntgaagtaatggccaatcgtggggtgcagatctgttctgtgatatgagacaaccacctatatataaatatgaattctcaccgtgaaagaatggctgactctctccctagtgtctgctccctcatagacttgagaaccatcttaaca

SEQ ID NO: 40526 - DNA, 607 bp, Macaca Mulatta
agaatgaatgccccattctcattgaagagatgggataaccatagctcttagccaccacaatgtgttcagagcactgttcagggggaatattcatggtaccttcaaatattactgcctttaaaagtaatgcaatctccagctctgccagatcttttgtgtcatgagaaaaaaccaaaacaacttagtgcctgcccatccagggcttatctttgaagtaacaagaggagaatgaaagacttgaagaaaagagtagcactgggatacatttccacccacacaggtacttgttttgttttgactttgtgtgttctgtttatgtgcgtgcagtgtattttatatgggaaggttatgtctttgagttcaaaataatctcctttccgtatttgattcagcttccgtatttggttaccactgcagtagtgacagttgcttgactaatttttgcaatgcccagggctcgttgagattcttggaaagatgaaaaaccaccatatttactctctccaatgtcggctctgtttctgctatagcttttaaaagatgatagtttcttttattaagtcaatattttaacagctttgctgagatatattcatataccatgtaa

SEQ ID NO: 40527 - DNA, 710 bp, Macaca Mulatta
  misc_feature (1)...(710): n = A,T,C or G
aagtctcactttcaacttgtgtactctcagaccactgatgagtcatttnagtaaatcacaggcagatttaaaagctaaatgaagccttagtgccttgaaagttaagatacttgtgcaaagtggatttagcaagattcaggattggcaccagtgagctggctaggtacacatcacccgtgactgggaattcaaagtttagaaagcctaacaaatagtagctactaacttcatatggttcaatgtaaatcagttacttagtcattgactgtgacagatgacagctactttcactatattttcatgatgtggtatttttctctattttttctttttccaagtatgnnnnnnnnnnnnnnnnnnagttaagaaattaagtgtgagactttaaaatttagttttgttgtaaactagagattctagtgaacagtgttagttttatactgtagtacagggcacacactttaacctttagaaatatgtttaccatcagggatttatttttactatagaaatactaaatgtactgtgaagcttaaagacaggagaataaatgttggaggggtaatatacaaaaacaaaggcatatttgatgaagtaccctgtgttatgtgaacacaatttccccttcagttaagactataaactacactgtatgagtatgtgtactgcatgtttacctaaaacagtttaatttcgaaggattattttaa

SEQ ID NO: 40528 - DNA, 801 bp, Macaca Mulatta
cggctcaggtctcattagtcacaagagagttcacactggtgagaagccatacagatgtcacgtgtgtgggaagtgctatagtcagcgctcacatcttcaaggtcatcagagggtccacactggtgagaaaccctataaatgtgaggagtgtgggaagggctttggccgcagctcctgtcttcatgttcatcagagagtccacactggagagaagccctatacatgtgatgtgtgtgggaaaggcttcaggtacaactcagggctgcggaaccaccagagagtgcatttagatgagaacccttataaatagatgtacatagaggtttccatctgggacctggggctttctgtccatctgagagccaacacaggagaaaaaccataggaaagtgacatgtaggagggctataggagaaactgatgattttacatttatctcatagtctgcataggaagggaagacctggaagtgtgataagtaagcacttcagttacaaatttcagtgtttaagagtctgttgtgcagcagagcaggctttaaagaaacaatgcagcagtggtttcactaaaaatcctcactttcatcagaatctgcctgggagggagcttttacaatgtacaagtggtgagaatgtatccaaggtgtcaattatggacagattctttgtgtgcgttgtatagctatatcaataggacagtgtaggaacaagttttcaccttcctaaaaccagtgagtacataccttataaagatcactttataaaaacaaaaagaagcattaacagttatgaaacaagtcac

SEQ ID NO: 40529 - DNA, 169 bp, Macaca Mulatta
gatttacatagaaagacttgtaagttatgctgatattgacatttgtccaactaactggaagaggattgtcttgggagccattcttcttgcctccaaggtttggagtgatatggctgtgtggaatgaggactactgcaagctctttgagaacattacagttgaagaaatg

SEQ ID NO: 40530 - DNA, 303 bp, Macaca Mulatta
  misc_feature (1)...(303): n = A,T,C or G
acagcgtgtatttttcccacagagtctgaagcaagagcactggccaaagagaggcagaaaaaggacaatcacaacctgannnnnnnnnnnnnnnnnnnnnnnnnnnnnnnnnnnnnnnnnnnnnnnnnnnnnnnnnnnnnnnnnnnnnnnnnnnnagacatgcgctggaacaagggaaccatcttaaaagcgtctgtggactatatccgaaagttgcaacgagaacagcaacgcgccaaagaacttgaaaaccgacagaagaaactggagcacgccaaccggcatttgttgctcagaatacag

SEQ ID NO: 40531 - DNA, 501 bp, Macaca Mulatta
atgccgctagtggccccccgggaagccgcccaggctgcgagcaggccccgcagggcgcctgcccgagtgtggcccccgccctccccttcccttttcctgccctccgcagacgcgatctcctcgcttcaccgcacgcccgggccgcgttttgccggcgtcacgtttccctctcgggccctagtgggctcggagcgccagcgatcccgacggaggaagcccggatgggaggaggaaggagaagtgggtgcctgaggcagcagcccagggccgagatggggacgcgctgagtggaccagggctggggggcccgggtcgcccccgcagggtgtgtgtgtggacgccaggcacctgcagaggcgagcagggctcttcgtggcgctctcggggcctgcgcctggcagggactgtcggctgctgtcgcccctaccccagtcagactctgccctgggtctgtggtggaggctcagtcaccagctgcacagcgcgtgtcagggcgcaact

SEQ ID NO: 40532 - DNA, 181 bp, Macaca Mulatta
gcacaggttcacatttatgaagcagccagtaagaactcccagcctgagaggatcttgaaaccagaaggaattggaggagatttaaacaaggtgacccaaggaaagcacaagatctttctatgcattgaagatgaccaaatcaaagacaaaagtgctcgaccattatggcctatggcaaact

SEQ ID NO: 40533 - DNA, 785 bp, Macaca Mulatta
ggaccttaaacctggagatgccaagaaaaaattatttaaaggggatgggtttcattatttcggcagttttcccccatgtcagcaaaccttcctttgtacactttacaagtttgaagaaagttagtggctaaatgaatgaattatcaaaattgagtatcagaaatttctaaagttttgttctatggttgtcatttattggcacttaccccaacaaacaaatggttttagtttctcccggatggatagcccctattggtgtgtcagtttgaagtggattctttggaaaaggaggagaagtatggctaattaaaataaaatttatcatgtcctaagctaagcactgttctgtgtgccttaaatattcattcatttaattttgcaacagcctttgataagctccgtactgatcttatgcccattttcagaggtgtaaatagagacacaaagagattaatgacttgcttaaggtcacacagctctcatatggtagagctggaaattttaaccttgtcactctggctccagaacatatctctaaagcattatgctttgctgctccaggataggatcttcaattcatccagccttgtttctgttcttaagactagtggtccagatctgaatttttcacctctatttagaaaagttgttgtgcagtgtttaggttggaaagatttattttagctccagtccacagtggcttttactgtctgagagtgccagaagttctcataaaatagttaatcttctgtaagctctggcatacttgaacttctccccacccc

SEQ ID NO: 40534 - DNA, 239 bp, Macaca Mulatta
cagcaaatgcctgtccccaagccctgcctgctggcacatcatccagcacggacatccctgcaggacaactcagggtgctttctcactctgcagtcactaggagttcagatctatatcctttaaacatccaataaactgctcaacccagcacaaaaatagctgtcttggtatatttatctgtttatttccctctcgaaaaaggtggggggcatctgtggctgcactgggtcccctgggaa

SEQ ID NO: 40535 - DNA, 736 bp, Macaca Mulatta
gttgtacagctccacctccgtttcctgcttaagtgcattccgtgcaatcgtctggaacgcctgctccacgttgatggcctccttggcactggtctcaaagtagggaatgttgtttttgctgtagcaccaggcctgtgcccgctttgtggccacttgtctgttttcgaggtcaatcttgtttcccaacacaacaaaggggaagttttcaggatctcggggactggcctggatgagaaactcatctctccagctatctagggttttgaatgtgttgggggcagtcacatcaaataccagaacacagcagtctgcacctctgtagaaggccacaccaagagactggaaccgttcctgtcctgctgtgtcccatatctgcattgtgactagtctgtcatccaccatcacctccttggtcagaaagtcagctcctattgtggctttgtactgattgctgaatttcttattcacatactggttcatgagtgatgtcttcccgactccagaatctcccaggatgataaccttcagcaacactttcttcctagaggtcatccttcaaacgcggcctctgcgctgggggctctgggccgggcgcgtcgcgagggctcccgccgaggaggagactcaacggaggacagaagaggggaggtccaagttctggttccagggaactctgctgagctctccaagccgccaactccgccgctgccgctacctcaggctttatggccaagac

SEQ ID NO: 40536 - DNA, 448 bp, Macaca Mulatta
gcagagtggccagagttcgtgaggaactatgccccatggtgggccactcacacactggactggctcaagttcggcaagaaagtgctggtggttcactttgaggacctgaagcaggacctcttcatccagctgggccggatggtcaacctgctgggcgtggctgtcagggaggaccggttgctctgtgtggagagccagaaggatggtaacttcaagcgctcggggctccggaagctcgagtatgacccgtatactgcagacatgcagaagaccatctctgcctatatcaagatggtggacgcggccctcaaagggcggaacctcacgggtgtccccgatgactactacccaagatgatgcgtccacacagggggagggtagactgggagtcctgaccatgtaggccctgaggactcaagacccctggtgaggcacactcatctgtcct

SEQ ID NO: 40537 - DNA, 524 bp, Macaca Mulatta
ggctcctatggtggcaggctgggcacgaggaccatgctgggccggaccctccaagaagtttctgcggcactgaaacaaggccaaattacaccaacagagctctgtcaaaaatgtctctctctcatcaagaagaccaagtttctaaatgcctacattactgtgtcggacgaggtggccttaaaacaagctgaagaatcagaaaagagatataagaatggacagtcacttggggatttagatggaattcccgttgcagtaaaagacaacttcagcacgtccggcattgagacaacgtgtgcatcaaatatgctgaaaggttatataccaccttataatgctacagtagttcagaagttgttggactcagggagctctactaatgggaaaaacaaatttagatgagtttgctatgggatctgggagcacagatggtatatctggaccagttaaaaacccctggagttattcgaaacaatatagagaacagaggaagcagaatccccacagccagaatgaagattcag

SEQ ID NO: 40538 - DNA, 271 bp, Macaca Mulatta
ttatttagagatggagtctcgctctgttgcccaggctagagtgcagtggtgcaatctcagcttgttgcagcctccaccttccaggctcaagccattctcctgcctcagcctcccaagtagctggtattacaggtgcctgacaccacgccagctcatgttttgtgtttttagtagagatggggtttcaccatgttggccaggttggtcttgaactcttgacctcaagtgatctgcctgcctcagcctcccaaagtgctgggattataggcat

SEQ ID NO: 40539 - DNA, 888 bp, Macaca Mulatta
tcagggcctggtgaggctcctcggcttgactctgcccactagggtcagatgctcggtcccttcccctccgcccgcaggtcgcgacaagaaggaggggacgcggcgctggagggaagctgctgcccaacggcgcttcgttccgaagcgatctctggaactgcgatctgcaccatagtcacccagctaaaggccttgcctgggacgttcttcccccaaaaggagaaccctctaccggtcacccaccaagcaacacagggactgaagaaaaccgaggctgacaggcagtttggggtgtgggagcagtactgaggcgcgtgacttttggggcttcaaccccagaggcccaagaggctctcgcatctgtacgcagcagccccggtgcatcgggggtgaatggagatggtgatctagcgggcctaccatcctccaattaatgacagctgttggggaagaacgagaagagaatgggagtgcgggaagccggctgaagagccgggaacttgaggatggggaagttcacgaagagggacctgctctgagcctcctcctgtggggtttaaacatccccacaaggctgcgcccctgcggactccattaatccagaggagcgctcttttcccgccatgattgctctcctggaagtaggctctaccttccggtgcctttcactgttgtgcattttctctctttgtacagcacaggacctccaataaatacactaaacaagtgtgcgtgtggttgcgtgtgtgtaggccgttagaacatacatacgccattaccttgaaacaatttcgagttaaagtaaaaatgaagctcagaagtgctaggagaacaaaaccaattcagtcttggaggtaggtttcctaatttcttccttcacactcctct

SEQ ID NO: 40540 - DNA, 560 bp, Macaca Mulatta
  misc_feature (1)...(560): n = A,T,C or G
aacctcctccgaaagctccctcggaagacggcggtgcgcgtgggcgacacggccatgttttgcgtggagctggcggtcccggtgggccctgtccgctgggtgcggaaacaggaggaggtggtgaccgggggccgcgtagccatctccgcagagggcacgcgnnnnnnnnnnnnnnnnnnnnnnnnnnnnnnnnnnnnnnnnnnnnnnnnnnnnnnnnnnnnnnnnnnnnnnnnnnnnnnnnnnnnnnnnnnnnnnnngcccccaggaagcctcccctgcagccccctgtggatcctgtggtgaaggccaagacagagagttctgtgatcctcagctggtccccaccaccccatggggagcgccctgtcaccattgacggctacctggtagagaagaagaaacttggcacctacacgtggaccaggtgccacgatgctgaatgggtggctacacctgagctgaccgtggctgatgtggctgaggagggggacttccagttccgagtgtcagctcacaacagctttggtcagagtccctacctggagttcccggggaatgtc

SEQ ID NO: 40541 - DNA, 871 bp, Macaca Mulatta
  misc_feature (1)...(871): n = A,T,C or G
ggtggctgttatctgttgggaaggtggaaagaaaatagcaaaataggggtggcatacatctggactttgaggtgttttaaagtagatgaatcttaagcaaagtcttagtatgtctgttttgtttcaaatcagcatatgccctgactttctcattttgttgtgagcttccatttccttatctttgagcttagtacttgcaaggctcctaatttctttaagattgccgtataataccattcacttcattcttgttttggtttgcctttgaaacagctttaagaacaaaatatccctatagttgttatctttctgacttttaaacctttattggtagagccattcttttttctaattcttgcttttcattttcttccaggactatgattcctttacctctatctctcaatctatggcaactagctgcnnnnnnnnnnnnnnnnnnnnnnnnnnnnnnnnnnnnnnnnnnnnnnnnnnnnnnnnnnnnnnnnnnnnnnnnnnnnnnnnnnnnnnnnnnnnnnnnnnnnnnnnnnnnnnnnnnnnnnnnnnnnnnnnnnnnnnnnnnnnnnnnnnnnnnnnnnnnnnnnnnnnnnnnnnnnnnnnnnnnnnnnnnnnnnnnnnnnnnnnnnnnnnnnnnnnnnnnnnnnnnnnnnnnnnnnnnnnnnnnnnnnnnnnnnnnnnnnnnnnnnnnnnnnnnnnnnnnnnnnnnnnnnnnnnnnnnnnnnnnnnnnnnnnnnnnnnnnnnnnnnnnnnnnnnnnnnnnnnnnnnnnnnnnnnnnnnnnnnnnnnnnnnnnnnnnnnnnnnnnnnnnnnnnnnnnnnnnnnnnnnnnnnnnnnnnnnnnnnnnnnnnnnnnnnnnnnnnnnnnnnnnnnn

SEQ ID NO: 40542 - DNA, 247 bp, Macaca Mulatta
  misc_feature (1)...(247): n = A,T,C or G
ggctgttggttggtgtccaggtttgtggcactgttccaagaggccttacacacacacacaaatatataattttctatacatatatatcctctagcttgaaacttttgctcaagtttatttatgtcactggctggctggatccaaagtcatgtgtccacacattcataaataaaaattttacctnnnnnnnnnnnnnnnnnnnnnnnnnnnnnnnnnnnnnnnnnnnnnnnnnnnnnnnnnnnnnnnc

SEQ ID NO: 40543 - DNA, 724 bp, Macaca Mulatta
taatattgatatgtttgtttccttggttatctaataatctgtttccaaatagtgtattgctgtattttaaaacaagttattttttaaataggatgcatgtggtccatattccccggatgagtgcatctctttgcctgtttacacaagtgctgaaagggatcgtgtggttaccaatattgatgttccatgtgggggcaaccaagaccagtggattcagtgtggagcagctctattcctaaaaaatcagtagaatctaatgacaacaaaagccatcttcacaaaagggaacactgattctttaagctttaaatcaaacatgtggtcagtctacatttgaaatgttagttcaaaatattaacatattgttaccttacaatgttgatctcattgaaattttaatgtgtaaaagcagcactgtgcatcttttaaagtaattaatggagttattgttaaaacagagtattcttttgacaacattaaatatttctgtgaggaacttcacttttccagtggctcaaaaatttgttttaggtcagagattttaagtggtatattaaagtaatccataataaatattttggctgtcatttgtgtcataattatttaataaaatataagagcattcataattttttcagtcttcccatgactttttacatactgaagaatgtattataaagttatgaatgtataaaagtatcaatatgaatataattatactata

SEQ ID NO: 40544 - DNA, 684 bp, Macaca Mulatta
tgtggggatttcttatatggcaggaatgttaaatactttttttaagtggcgcgcctttgtaactcattaattcttaaaaagccaaagcaatatttttgtgttgctgatgcaggctctagggcagcatggactgtttcttttgttataaagttgcctgttcagaatggctgatcatttggtaaaaattatacttgggacaagtagaattcaaatcaaacaggtttatgttttgctgtagtgctggagaatgttcaccacaaagtgaaggatttatcaaggaatccgggagagaaacattttcacccttagaactttaagtctttttaacatcctgcttcccttttcattgtgcaagagcaacaggtcagggattgcctaaggcagtcttacaaattggcacctgcctttatgcctaagacctaaaggaagtggtggggaaacagaggccagggaaatttaataagtctgtgtctttccttgggaattgagctttgatgcctggggtgcaagagaggtgaagggccgtctcctgatgcgactgggagaggtattttctgcaggaagacaccagagcaggtgccaggagaggcagggagacacaggcctcgaggtgaacacatttctgtcccttaatgtttgtaaggcagtggataccttacaaggactttcacatgtattacttca

SEQ ID NO: 40545 - DNA, 681 bp, Macaca Mulatta
ctcagtgcttgcggtgctactaagaaagcaattccaaacagatgtatacatcgagagagagtggtattagaggtttcagtatatgtatttatttacatgagaggaaactggaatataatcccataaattatcacattttacgactggaaaatatttgccaatgaagaaatgctctgtaggtatttgtgttaagattttgggctgtttaataaaaatgtaactttatttaatgatttcttatagttgcctttataaagtttattgtctaaaatatttttgtatcatgtgcctttgaaatttgccagctgatttgggtgttggatttctgcccagacatttatcagtattaccattttattcagtagctggcaggtgtatagaccaacgagacttaggtaaggaatggaacctttcctgtggtttgattgcacattacaccagaagactccagtatccgtcattccagaatgaggaaacagtattttgcaaagaacctagtcacctatgtgaaatctatgggatggaaacagtgtggccttgggagtcaaatagtctcgcatggtggggagggtcatgatggaatatgtgaatttctacttctagaagttgtgaaataggccctgcacttttgcagaatgtccttccttaaaccttgcttattctacaactgtagctgataac

SEQ ID NO: 40546 - DNA, 1747 bp, Macaca Mulatta
  misc_feature (1)...(1747): n = A,T,C or G
ggcttacctgcgagccatcgatgtgaagatcctgcagcagctgatgaccttgaatgagggcatcgaagcagtgcgctggctgttagaggagcggggcacgttgaccagtcattgcagcagcctcaccagcagtcaatatagccgacaggcgnnnnnnnnnnnnnnnnnnnnnnnnnnnnnnnnnnnnnnnnnnnnnnnnnnnnnnnnnnnnnnnnnnnnnnnnnnnnnnnnnnnnnnnnnnnnnnnnnnnnnnnnnnnnnnnnnnnnnnnnnnnnnnnnnnnnnnnnnnnnnnnnnnnnnnnnnnnnnnnnnnnnnnnnnnnnnnnnnnnnnnnnnnnnnnnnnnnnnnnnnnnnnnnnnnnnnnnnnnnnnnnnnnnnnnnnnnnnnnnnnnnnnnnnnnnnnnnnnnnnnnnnnnnnnnnnnnnnnnnnnnnnnnnnnnnnnnnnnnnnnnnnnnnnnnnnnnnnnnnnnnnnnnnnnnnnnnnnnnnnnnnnnnnnnnnnnnnnnnnnnnnnnnnnnnnnnnnnnnnnnnnnnnnnnnnnnnnnnnnnnnnnnnnnnnnnnnnnnnnnnnnnnnnnnnnnnnnnnnnnnnnnnnnnnnnnnnnnnnnnnnnnnnnnnnnnnnnnnnnnnnnnnnnnnnnnnnnnnnnnnnnnnnnnnnnnnnnnnnnnnnnnnnnnnnnnnnnnnnnnnnnnnnnnnnnnnnnnnnnnnnnnnnnnnnnnnnnnnnnnnnnnnnnnnnnnnnnnnnnnnnnnnnnnnnnnnnnnnnnnnnnnnnnnnnnnnnnnntggcatgatctcaactcactgcaacctccgcctcctgggttcaagcgattctcctgcctcagcctcccagttagctgggattacaggcatgcaccaccatgcccagctaattnnnnnnnnnnnnnnnnnnnnnnnnnnnnnnnnnnnnnnnnnnnnnnnnnnnnnnnnnnnnnnnnnnnnnnnnnnnnnnnnnnnnnnnnnnnnnnnnnnnnnnnnnnnnnnnnnnnnnnnnnnnnnnnnnnnnnnnnnnnnnnnnnnnnnnntgactctaaaggattgacctatggcttttggtgtgaagtatctctcactgctcgccccagctaagtaagggtttaaggatttaggactccctggagttaacagatgaagagatgggggtataattacttcacccaaagtctagaagccttgacccttctcttggccaagatggaggattgaggagggacatggaccttcaggactaaccctctatggattggccctcccagaagcgtttgggctggtagacccaccccttcctacctgctgagtgatgtcatttcctgccaggatgggtagtcgtttgtacgggtccttggatggtggtaggtcatataggggtatctgagcccctgctgctaagtgagatcatattatttatcgtccatgccattacttcttgtgaacaggaacatgtcacccctcctggcaggaaagctgctcattgtcatgtttgtgcttcttttcagaaggttcttactttttaaatagagtgttctcattttatcctaggggatctcacttcctctgtggctccatccctgcatccctgtctgggccagcactcctgactctgcttttagggaaagaagctttcaggggcctccatttattgctctcaagtttgtttggcttaccctgccacggtcccctgtcttaccctgtccctgtgttgcccccattcctgtattcca

SEQ ID NO: 40547 - DNA, 383 bp, Macaca Mulatta
agtcaggcacagtcctttgtcttctgggagctcatggtccagaactgaggattcactcaacagttgtactttgagcgccgaggatctggcagccccttctcaggggtccggggcccactgatgttgcatgctgagggtagtttacttcgacacctgtggtgtgtctaggaaactgaggttttcctggtttcatacttgccatctttccccaggctgtgactgtccccagcctggatggataggtcggaaatccttcaaggtagctgttgcgtgagatctttttctggccccaggtcaatttctctttggttccatcctgagctcattacctcctggtgaatcatcacaccatttaatatttattggacacctacagcttgcta

SEQ ID NO: 40548 - DNA, 847 bp, Macaca Mulatta
  misc_feature (1)...(847): n = A,T,C or G
ggaacactttcagtaatctacccacaattactcaccaagaccttaagcctcccaaagtatacaacattctttatgttcctcactatacctctatagagtctaagggatgtaaggccttgttaaagtcagttttgaccagaagcagcaatgagtctattcctgtttgttctccgtgttaatgggacaaaaatgatactttcaaggcattgaaaattcacggattaatcaatccttagtctgaccccagtgttatctatgcaggtccacaaaacttttagtttactttatactcccttgcattcttttgactcacatcctaatggcagcaagtacttatatttttgctacttcagttctatttccataaaatatattttattatcttttctcataaatttgtgccctctatttttactcccagtttgtgtaagatgaaaatctataaacctactgagatctgacgagacagatcgcacactgttcaagcaactatgatctacaattgacgataannnnnnnnnnnnnnnnnnnnnnnnnnnnnnnnnnnnnnnnnnnnnnnnnnnnnnnnnnnnnnnnnnnnnnnnnnnnnnnnnnnnnnnnnnnnnnnnnnnnnnnnnnnnnnnnnnnnnnnnnnnnnnnnnnnnnnnnnnnnnnnnnnnnnnnnnnnnnnnnnnnnnnnnnnnnnnnnnnnnnnnnnnnnnnnnnnnnnnnnnnnnnnnnnnnnnnnnnnnnnnnnnnnnnnnnnnnnnnnnnnnnnnnnnnnnnnnnnnnnnnnnnnnnnnnnnnnnnnnnnnnnnnnnnnnnnnnnnnnnnnnnnnnnnnnnnnnnnnnnnnnnnnnnnnnnnnn

SEQ ID NO: 40549 - DNA, 164 bp, Macaca Mulatta
caacctgtatgacatctgcaaaaatgggcatatctctgctccggagttgaatctgaccccaacctattttccagtgaaaacacagctcaactccaggtcaccctcagtttggaggataacagttgaaggactcacccataagcctaggtctgctttaggtatgt

SEQ ID NO: 40550 - DNA, 621 bp, Macaca Mulatta
  misc_feature (1)...(621): n = A,T,C or G
tctccggcatttgtaatgttttttctttgttcacgcactgccaaatctgttttctccctggaagaaacccagggcagatgtggtcatctgtcaaactgaggcctggagaggcatggctgagtcactgcagaagcaaaatcaggacccagcatttctagctcccagcccagagtaagagagtagagcagaaccccttcccattctacctgaccaaggcagccctgccctgccnnnnnnnnnnnnnnnnnnnnnnnnctgccccagagatctccagttcacagtgttcatcagctgagatacttttggacccacaaagccagttttttgggagtctgctcactgtctacctgcagtgccaaagctttgctccagcagccctcttctgccccacctcccagctccatcccctatcgtgtgggcgctggctgcttctgcatgagaaggagcttcctctgatcacctgtagcatctttagtcccttcctccagctggcctgcaatcccattccccagagaggcttgggcagggcccngcagggcccacttgccacttggccctgtgcccagaaccttgggggcagatggcagccaggggaagaagggaggtgggaaagggctgcca

SEQ ID NO: 40551 - DNA, 1990 bp, Macaca Mulatta
  misc_feature (1)...(1990): n = A,T,C or G
accccaccgcgaaccctggcacagcctgccccgcctggccgccagaggcaccttccaactcncgaagcacatttttcaacacatannnnnnnnnnnnnnnnnnnnnnnnnnnnnnnnnnnnnnnnnnnnnnnnnnnnnnnnnnnnnnnnnnnnnnnnnnnnnnnnnnnnnnnnnnnnnnnnnnnnnnnnnnnnnnnnnnnnnnnnnnnnnnnnnnnnnnnnnnnnnnnnnnnnnnnnnnnnnnnnnnnnnnnnnnnnnnnnnnnnnnnnnnnnnnnnnnnnnnnnnnnnnnnnnnnnnnnnnnnnnnnnnnnnnnnnnnnnnnnnnnnnnnnnnnnnnnnnnnnnnnnnnnnnnnnnnnnnnnnnnnnnnnnnnnnnnnnnnnnnnnnnnnnnnnnnnnnnnnnnnnnnnnnnnnnnnnnnnnnnnnnnnnnnnnnnnnnnnnnnnnnnnnnnnnnnnnnnnnnnnnnnnnnnnnnnnnnnnnnnnnnnnnnnnnnnnnnnnnnnnnnnnnnnnnnnnnnnnnnnnnnnnnnnnnnnnnnnnnnnnnnnnnnnnnnnnnnnnnnnnnnnnnnnnnnnnnnnnnnnnnnnnnnnnnnnnnnnnnnnnnnnnnnnnnnnnnnnnnnnnnnnnnnnnnnnnnnnnnnnnnnnnnnnnnnnnnnnnnnnnnnnnnnnnnnnnnnnnnnnnnnnnnnnnnnnnnnnnnnnnnnnnnnnnnnnnnnnnnnnnnnnnnnnnnnnnnnnnnnnnnnnnnnnnnnnnnnnnnnnnnnnnnnnnnnnnnnnnnnnnnnnnnnnnnnnnnnnnnnnnnnnnnnnnnnnnnnnnnnnnnnnnnnnnnnnnnnnnnnnnnnnnnnnnnnnnnnnnnnnnnnnnnnnnnnnnnnnnnnnnnnnnnnnnnnnnnnnnnnnnnnnnnnnnnnnnnnnnnnnnnnnnnnnnnnnnnnnnnnnnnnnnnnnnnnnnnnnnnnnnnnnnnnnnnnnnnnnnnnnnnnnnnnnnnnnnnnnnnnnnnnnnnnnnnnnnnnnnnnnnnnnnnnnnnnnnnnnnnnnnnnnnnnnnnnnnnnnnnnnnnnnnnnnnnnnnnnnnnnnnnnnnnnnnnnnnnnnnnnnnnnnnnnnnnnnnnnnnnnnnnnnnnnnnnnnnnnnnnnnnnnnnnnnnnnnnnnnnnnnnnnnnnnnnnnnnnnnnnnnnnnnnnnnnnnnnnnnnnnnnnnnnnnnnnnnnnnnnnnnnnnnnnnnnnnnnnnnnnnnnnnnnnnnnnnnnnnnnnnnnnnnnnnnnnnnnnnnnnnnnnnnnnnnnnnnnnnnnnnnnnnnnnnnnnggttatggcaatacagtgaaagtctgttgtcttagatatacaaatacatagtgagaaattagaacaaactggagaccggcgtttgacacatggactctgcctagctgtgttagaaaaatatttctaaccaagccttaaaattcccaaatggagttggtgcttacctcattcacacaatcaaagagttcactgggtcctgaacctctaaagggaaaaggtctcccctggagcaggagtatcagggtttgctcgggggcataacataggtgagtgctgggctgagacaggctccactgacactgctagttgcaggagcactttacctttgtatcagttattaaaaacaaaatttgaatcctttggtcaggttccccgaaattattttgaggtagccatgtttaagtgcttgagcttttgtgttggcaaccccctgcccaaggttgctaatagggtattctgccccttgtttccatggctgaggcacagaaagtagcctcttttgtgaggagttgggagttaagtgtacatttatttttttgccgtgatttgttcaggaccacattttacaagataccttgttttctttattattgtttctggaaagtcctattcatattaatttatttgaatatagaacatagtnnnnnaaatgagggcttatgttgaaaaattctg

SEQ ID NO: 40552 - DNA, 338 bp, Macaca Mulatta
taaatgctggctaacaagtgtcaaaccattagagcgccctgtggttctttcagtggcaacagttccaggggccaggctgtgaaaacactccccatgggcagatgtggcccaggaggtgatgctcagcctggctggggggttgggaacaccaggcagacagggaacagtcagaggagccggtgactagaaaggagctgattactttaataggtcatgttgtggtctgtaagccgtggcctgcctctggctaattcccagcaaggtaatctgcctgcaactgctcattggttattttcattctattccaagccttacggtagccttttaaggacatctga

SEQ ID NO: 40553 - DNA, 636 bp, Macaca Mulatta
  misc_feature (1)...(636): n = A,T,C or G
gcccggccatggctgcggtggcactgatgccactgccnnnnnnnnnnnnnnnnnnnttagcatcgccgcccgccgcctccgcgccgtccgcccgcgatcccttcgccccccagctcggggacacgcagaactgccagctgcggtgccgcgaccgcgacctcggcccgcggccctcgcaggcggggctggagggcgcctccgagtctccctatgacagagctgttctgatcagcgcttgcgagcgtggctgccgcctcttctccatctgccgattcgtggccaggagctccaagcctaatgccacccaaactgagtgtgaagcagcctgcgtggaagcctatgtgaaggaggcagagcagcaggcctgtagccatggctgctggagccagcctgcggagcctgagccggagcagaagagaacggtcctggaggctccaagtggggccctctccctcttggacttgttttccaccctctgcaatgacctcgtcaactcagcccagggatttgtctcctccacctggacatactacttgcagactgacaatgggaaggtggtggtgtttcagacccagcccgtagtggagagcctcggcttccaggggggccgtctgcagcgcgtggaggtgacctggc

SEQ ID NO: 40554 - DNA, 532 bp, Macaca Mulatta
gaaagtgaaatgtccttttctttgtgccatgcataaggtgagtcaaaccaaacctcattaataatctccccttggtttcttttgaaaggaaatcggtatcttgcagttttgtgcactgaaggagacaaagtctctccagtaacgagtatgaactagtaattttggggatgtctctttaattctagtattttgacatgttataatacacaagtaaaataaaacaatagtttactcggctcatgttattattctccaacagatattgtgccaaattgcacataggaaagaaaatttaggaatacagtagcaaaacataaattaaaactcaaatgccgggacaacgtaaaacaacataccagatggagaggatgcccgtattttcatcttccattctaacattatccattgttagatgcataagcattttgatattgtgtaataaatgtggtatttgagaagataaatgaggtagttgatcagtattcctcctctatcatctttttagactttataaggtaaatatttggaataa

SEQ ID NO: 40555 - DNA, 953 bp, Macaca Mulatta
  misc_feature (1)...(953): n = A,T,C or G
ggcatgaccacgatannnnnnnnnnnnnnnnnnnnnnnnnnnnnnnnnnnnnnnnnnnnnnnnnnnnnnnnnnnnnnnnnnnnnnnnnnnnnnnnnnnnnnnnnnnnnnnnnnnnnnnnnnnnnnnnnnnnnnnnnnnnnnnnnnnnnnnnnnnnnnnnnnnnnnnnnnnnnnnnnnnnnnnnnnnnnnnnnnnnnnnnnnnnnnnnnnnnnnnnnnnnnnnnnnnnnnnnnnnnnnnnnnnnnnnnnnnnnnnnnnnnnnnnnnnnnnnnnnnnnnnnnnnnnnnnnnnnnnnnnnnnnnnnnnnnnnnnnnnnnnnnnnnnnnnnnnnnnnnnnnnnnnnnnnnnnnnnnnnnnnnnnnnnnnnnnnnnnnnnnnnnnnnnnnnnnnnnnnnnnnnnnnnnnnnnnnnnnnnnnnnnnnnnnnnnnnnnnnnnnnnnnnnnnnttactagtaatcctccctatccagtccttactaaataagccggctccatttaaccctcaaccacacttcctttaccaacacaaaaaacatctaatggacttccgtccttaccatccatggaaccccctacgccgataactatgaatttcacgcctcccacaccttgacccaggaaaccacacgccggagcccacccttttctgaatcctccatacaaaaggggccgcaattcccagaaaactatattaatctaggggcgttgttaaaaacgtgggtaaataaacgccccgtaagggtgtccaacgttcggcgcccctaatgtcccctccattaagccccgaaaaagacacacaagacatttccgacctacttaattatggagtgccgccccacaacaaaccacaggaaggacctttccgttacgagcacccattctcacaacccccggagtggccgatattcgcccacggtaacaccttttctcgcccaaatcacagcgcctttcccg

SEQ ID NO: 40556 - DNA, 777 bp, Macaca Mulatta
  misc_feature (1)...(777): n = A,T,C or G
gggctatagagaacttcaaaagtatagaaatgtgagatgaaggtaaaaaacattccttaaattcctgtaatgagaatcaaccaccggtatcatttgggcatatctccttctggtcttttttctgtgcatttttttatcttataaaaggtgattatttcagcctcccagnnnnnnnnnnnnnnnnnnctgagctgctgcgcttggccagttatgtttcctattataccatggcagtatagctttctgcatattttgattttttttccactagtcaagattcctgtaagtgaaactactgaatcaaagttccggatgctttaggactcttgatatgttgctaaccagtaccaatccggtttatccgccgctgaatgaatatgcatcttaatgtcctgtactgttaagcaatattagttttccctcttaaatttacaaataaggctgagtgtgnnnnnnnnnnnnnaannnnnnnnnnnnnnnagaggccaaggtgggcggattgcttgagcnnnnnnnnnnnnnnnnnnnnnnnnnnnnntagcgaaaccannnnnnnnnnnnnnnnnnnnnnnnntagccggttgttgtgatgtacgcctatagtcccagctactccagaagctgcggtgagaggatcgcttgaaccccgggagggcagagattgcagtgagcccgagatcatgcccagtatatttcagccctggggcaatacagncaatnnnnnnnnnnnnnnnnnnnnnnnnnnnnnnnnnnnnnnnnnnnnnnaaataaaaagac

SEQ ID NO: 40557 - DNA, 650 bp, Macaca Mulatta
acgcgggcttatacccatgtcggtgctggatgcgctttgggaggaccgggatgtccgcttcgacctgtcctcgcagcaaatgaaaacaagacctggagaagtccttattgattgtttagattcaattgaagacaccaaaggaaataatggagatagaggtagactcttggtaacaaatttaagaattctctggcactctttggcattatcaagagtcaatgtttctgtcggttacaattgcatattgaatattacaacaaggactgctaactctaaattacgaggccaaactgaagctctttatatactaacaaaatgtaacagtactcgttttgaatttatatttacaaatttggttcctggaagccctagactttttacttctgtgatggcagtacacagagcatatgaaacttctaaaatgtatcgtgattttaaattaagaagtgcactaattcagaacaagcaactaagactgttaccacaagaacatgtatatgataaaataaatggagtatggaatttatccagtgatcagggcaatttaggaaccttttttattaccaatgtgagaattgtatggcatgcaaatatgaatgacagttttaatgtcagtataccatatctgcaaattcgttcaataacgatta

SEQ ID NO: 40558 - DNA, 844 bp, Macaca Mulatta
aacccaaggggaaaatacccctgtcctggcattcttagtaacatatctcatcaccatcatggggaatcttggcctgattgctgtcatctggaaagaccctcaccttcatatcccaatgtacttattcctcgggaatttggcttttgtggatgcttttgttatcatccacagtgactccaagatgctgatcaacttcttagctaagagtaagatcatatctctctctgaatgcaagatacaatttttttcctttgcaattggtgtaaccacagaatgttttctcttggcaacaatggcgtatgatcgctatgtagccatatgcaaacctttactttatccagtcattatgaccaacagactatgcatccggctattagtcttgtcatttctaggtggccttcttcatgctgtaattcatgaaggttttttttacagattaaccttctgtaattccaacataatacatcacttttactgtgacattatcccattgttaaaaatttcctgtactgattcttctattaattttctcatggtttttattttctcaggttcaatacaagttttcaccattgggactgttcttatatcttatacatttgtcctctatacaatcttgaaaaagaggtctgtgaaaggtataagaaaagccttctccacctgtggagctcatctcttatctgtatctttatactatggccccctcgccttcatgtatgtgggctctgcttccccacaggctgatgaccaagatatgatggagtctctattttacactgtcatagttcctttattaaaccccatgatctacagcctgagaaataagcaagtcatagattcactc

SEQ ID NO: 40559 - DNA, 2366 bp, Macaca Mulatta
  misc_feature (1)...(2366): n = A,T,C or G
gtcattaacagctgaagagaagacgattacagaaaaacaccttgaattatcccctagacccaagcaagnnnnnnnnnnnnnnnnnnnnnnnnnnnnnnnnnnnnnnnnnnnnnnnnnnnnnnnnnnnnnnnnnnnnnnnnnnnnnnnnnnnnnnnnnnnnnnnnnnnnnnnnnnnnnnnnnnnnnnnnnnnnnnnnnnnnnnnnnnnnnnnnnnnnnnnnnnnnnnnnnnnnnnnnnnnnnnnnnnnnnnnnnnnnnnnnnnnnnnnnnnnnnnnnnnnnnnnnnnnnnnnnnnnnnnnnnnnnnnnnnnnnnnnnnnnnnnnnnnnnnnnnnnnnnnnnnnnnnnnnnnnnnnnnnnnnnnnnnnnnnnnnnnnnnnnnnnnnnnnnnnnnnnnnnnnnnnnnnnnnnnnnnnnnnnnnnnnnnnnnnnnnnnnnnnnnnnnnnnnnnnnnnnnnnnnnnnnnnnnnnnnnnnnnnnnnnnnnnnnnnnnnnnnnnnnnnnnnnnnnnnnnnnnnnnnnnnnnnnnnnnnnnnnnnnnnnnnnnnnnnnnnnnnnnnnnnnnnnnnnnnnnnnnnnnnnnnnnnnnnnnnnnnnnnnnnnnnnnnnnnnnnnnnnnnnnnnnnnnnnnnnnnnnnnnnnnnnnnnnnnnnnnnnnnnnnnnnnnnnnnnnnnnnnnnnnnnnnnnnnnnnnnnnnnnnnnnnnnnnnnnnnnnnnnnnnnnnnnnnnnnnnnnnnnnnnnnnnnnnnnnnnnnnnnnnnnnnnnnnnnnnnnnnnnnnnnnnnnnnnnnnnnnnnnnnnnnnnnnnnnnnnnnnnnnnnnnnnnnnnnnnnnnnnnnnnnnnnnnnnnnnnnnnnnnnnnnnnnnnnnnnnnnnnnnnnnnnnnnnnnnnnnnnnnnnnnnnnnnnnggcaaaaactgattattccaaatggaagttgccctgttattctgaatacttacttttgtgagaaagttgttgccaaagaagattcaaaaaaaacttgtgatgtgtactatccggacataccccttccaagaagaagcatctctttggcccagatgtttgtaattaagggtctaacaaataattcacctgaaatccaggtnnnnnnnnnnnnnnnnnnnnnnnnnnnnnnnnnnnnnnnnnnnnnnnnnnnnnnnnnnnnnnnnnnnnnnnnnnnnnnnnnnnnnnnnnnnnnnnnnnnnnnnnnnnnnnnnnnnnnnnnnnnnnnnnnnnnnnnnnnnnnnnnnnnnnnnnnnnnnnnnnnnnnnnnnnnnnnnnnnnnnnnnnnnnnnnnnnnnnnnnnnnnnnnnnnnnnnnnnnnnnnnnnnnnnnnnnnnnnnnnnnnnnnnnnnnnnnnnnnnnnnnnnnnnnnnnnnnnnnnnnnnnnnnnnnnnnnnnnnnnnnnnnnnnnnnnnnnnnnnnnnnnnnnnnnnnnnnnnnnnnnnnnnnnnnnnnnnnnnnnnnnnnnnnnnnnnnnnnnnnnnnnnnnnnnnnnnnnnnnnnnnnnnnnnnnnnnnnnnnnnnnnnnnnnnnnnnnnnnnnnnnnnnnnnnnnnnnnnnnnnnnnnnnnnnnnnnnnnnnnnnnnnnnnnnnnnnnnnnnnnnnnnnnnnnnnnnnnnnnnnnnnnnnnnnnnnnnnnnnnnnnnnnnnnnnnnnnnnnnnnnnnnnnnnnnnnnnnnnnnnnnnnnnnnnnnnnnnnnnnnnnnnnnnnnnnnnnnnnnnnnnnnnnnnnnnnnnnnnnnnnnnnnnnnnnnnnnnnnnnnnnnnnnnnnnnnnnnnnnnnnnnnnnnnnnnnnnnnnnnnnnnnnnnnnnnnnnnnnnnnnnnnnnnnnnnnnnnnnnnnnnnnnnnnnnnnnnnnnnnnnnnnnnnnnnnnnnnnnnnnnnnnnnnnnnnnnnnnnnnnnnnnnnnnnnnnnnnnnnnnnnnnnnnnnnnnnnnnnnnnnnnnnnnnnnnnnnnnnnnnnnnnnnnnnnnnnnnnnnnnnnnnnnnnnnnnnnnnnnnnnnnnnnnnnnnnnnnnnnnnnnnnnnnnnnnnnnnnnnnnnnnnnnnnnnnnnnnnnnnnnnnnnnnnnnnnnnnnnnnnnnnnnnnnnnnnnnnnnnnnnnnnnnnnnnnnnnnnnnnnnnnnnnnnnnnnnnnnnnnnnnnaggcactgtggttggcgtggacgagagcactgctttctcatggcctgtgtgtgacatgtgtggcaacgggagattggaacagaggccggaagacagncagaggcgccttttcctgtggggagtgctcccgggttgtcacatctcctattctcaagaggcacctgcaggtcttcctggactgccgctcaagaccccagtgcagagtgaaggtcaag

SEQ ID NO: 40560 - DNA, 793 bp, Macaca Mulatta
  misc_feature (1)...(793): n = A,T,C or G
ggatataatagattctcaaaaagatagctattgnnnnnnnnnnnnnnnnnnnnnaaatcaagtggccactgagcccagatttgattttttaaaattagatatttgacttactcaaatctctaaattttgatattctataaatccattttagtacctgacttgagagttctgacagagtctaagaattttgaaaatatgaatgttcttaaataatttatttttgctttagaggtttggtatgacattgagatattcctagattcatatgggtgtgtttttaagtccataaaataaagcttcatggtttgaagtaattcagggaatttgaaaaagatgcatgaacagtctatgctgcctgggaggaaaagtattttcaagctaaacttatttactgtagttacgatttatatatttaagaaaatgttcttcattgagatttgttcatatgtaatgtttacttgttttaatgatataaattggtttattactcctccaccttttattttgagaaataatttaaaccagttcttagatacaaaaactatgattgtcatgtagaatgatattattaacatcttaaaaatcacccgtgccaggcacggtggctcacacctataaccccaannnnnnnnnnnnnnnnnnnnngannnnnnnnnnnnnnnnnnnnnnncnnnnnnnnnnnnnnnnnnnggcannnnnnnnnnnnnnnnnnnnnnnnnnnnnttagcccaggcgtgggtggcattgcacctgntggtccctgggctacctcgggaaggnctgaagccaagac

SEQ ID NO: 40561 - DNA, 4193 bp, Macaca Mulatta
  misc_feature (1)...(4193): n = A,T,C or G
gagtgctgccagtcacctagtttcccaagatggcctgatgataactatgcacagtccaaagagatcggggaagattcctccaaaactccacaatcatatggtccatcgagtctggaaggaatgcatcctcaacagaacccagtccaagnnnnnnnnnnnnnnnnnnnnnnnnnnnnnnnnnnnnnnnnnnnnnnnnnnnnnnnnnnnnnnnnnnnnnnnnnnnnnnnnnnnnnnnnnnnnnnnnnnnnnnnnnnnnnnnnnnnnnnnnnnnnnnnnnnnnnnnnnnnnnnnnnnnnnnnnnnnnnnnnnnnnnnnnnnnnnnnnnnnnnnnnnnnnnnnnnnnnnnnnnnnnnnnnnnnnnnnnnnnnnnnnnnnnnnnnnnnnnnnnnnnnnnnnnnnnnnnnnnnnnnnnnnnnnnnnnnnnnnnnnnnnnnnnnnnnnnnnnnnnnnnnnnnnnnnnnnnnnnnnnnnnnnnnnnnnnnnnnnnnnnnnnnnnnnnnnnnnnnnnnnnnnnnnnnnnnnnnnnnnnnnnnnnnnnnnnnnnnnnnnnnnnnnnnnnnnnnnnnnnnnnnnnnnnnnnnnnnnnnnnnnnnnnnnnnnnnnnnnnnnnnnnnnnnnnnnnnnnnnnnnnnnnnnnnnnnnnnnnnnnnnnnnnnnnnnnnnnnnnnnnnnnnnnnnnnnnnnnnnnnnnnnnnnnnnnnnnnnnnnnnnnnnnnnnnnnnnnnnnnnnnnnnnnnnnnnnnnnnnnnnnnnnnnnnnnnnnnnnnnnnnnnnnnnnnnnnnnnnnnnnnnnnnnnnnnnnnnnnnnnnnnnnnnnnnnnnnnnnnnnnnnnnnnnnnnnnnnnnnnnnnnnnnnnnnnnnnnnnnnnnnnnnnnnnnnnnnnnnnnnnnnnnnnnnnnnnnnnnnnnnnnnnnnnnnnnnnnnnnnnnnnnnnnnnnnnnnnnnnnnnnnnnnnnnnnnnnnnnnnnnnnnnnnnnnnnnnnnnnnnnnnnnnnnnnnnnnnnnnnnnnnnnnnnnnnnnnnnnnnnnnnnnnnnnnnnnnnnnnnnnnnnnnnnnnnnnnnnnnnnnnnnnnnnnnnnnnnnnnnnnnnnnnnnnnnnnnnnnnnnnnnnnnnnnnnnnnnnnnnnnnnnnnnnnnnnnnnnnnnnnnnnnnnnnnnnnnnnnnnnnnnnnnnnnnnnnnnnnnnnnnnnnnnnnnnnnnnnnnnnnnnnnnnnnnnnnnnnnnnnnnnnnnnnnnnnnnnnnnnnnnnnnnnnnnnnnnnnnnnnnnnnnnnnnnnnnnnnnnnnnnnnnnnnnnnnnnnnnnnnnnnnnnnnnnnnnnnnnnnnnnnnnnnnnnnnnnnnnnnnnnnnnnnnnnnnnnnnnnnnnnnnnnnnnnnnnnnnnnnnnnnnnnnnnnnnnnnnnnnnnnnnnnnnnnnnnnnnnnnnnnnnnnnnnnnnnnnnnnnnnnnnnnnnnnnnnnnnnnnnnnnnnnnnnnnnnnnnnnnnnnnnnnnnnnnnnnnnnnnnnnnnnnnnnnnnnnnnnnnnnnnnnnnnnnnnnnnnnnnnnnnnnnnnnnnnnnnnnnnnnnnnnnnnnnnnnnnnnnnnnnnnnnnnnnnnnnnnnnnnnnnnnnnnnnnnnnnnnnnnnnnnnnnnnnnnnnnnnnnnnnnnnnnnnnnnnnnnnnnnnnnnnnnnnnnnnnnnnnnnnnnnnnnnnnnnnnnnnnnnnnnnnnnnnnnnnnnnnnnnnnnnnnnnnnnnnnnnnnnnnnnnnnnnnnnnnnnnnnnnnnnnnnnnnnnnnnnnnnnnnnnnnnnnnnnnnnnnnnnnnnnnnnnnnnnnnnnnnnnnnnnnnnnnnnnnnnnnnnnnnnnnnnnnnnnnnnnnnnnnnnnnnnnnnnnnnnnnnnnnnnnnnnnnnnnnnnnnnnnnnnnnnnnnnnnnnnnnnnnnnnnnnnnnnnnnnnnnnnnnnnnnnnnnnnnnnnnnnnnnnnnnnnnnnnnnnnnnnnnnnnnnnnnnnnnnnnnnnnnnnnnnnnnnnnnnnnnnnnnnnnnnnnnnnnnnnnnnnnnnnnnnnnnnnnnnnnnnnnnnnnnnnnnnnnnnnnnnnnnnnnnnnnnnnnnnnnnnnnnnnnnnnnnnnnnnnnnnnnnnnnnnnnnnnnnnnnnnnnnnnnnnnnnnnnnnnnnnnnnnnnnnnnnnnnnnnnnnnnnnnnnnnnnnnnnnnnnnnnnnnnnnnnnnnnnnnnnnnnnnnnnnnnnnnnnnnnnnnnnnnnnnnnnnnnnnnnnnnnnnnnnnnnnnnnnnnnnnnnnnnnnnnnnnnnnnnnnnnnnnnnnnnnnnnnnnnnnnnnnnnnnnnnnnnnnnnnnnnnnnnnnnnnnnnnnnnnnnnnnnnnnnnnnnnnnnnnnnnnnnnnnnnnnnnnnnnnnnnnnnnnnnnnnnnnnnnnnnnnnnnnnnnnnnnnnnnnnnnnnnnnnnnnnnnnnnnnnnnnnnnnnnnnnnnnnnnnnnnnnnnnnnnnnnnnnnnnnnnnnnnnnnnnnnnnnnnnnnnnnnnnnnnnnnnnnnnnnnnnnnnnnnnnnnnnnnnnnnnnnnnnnnnnnnnnnnnnnnnnnnnnnnnnnnnnnnnnnnnnnnnnnnnnnnnnnnnnnnnnnnnnnnnnnnnnnnnnnnnnnnnnnnnnnnnnnnnnnnnnnnnnnnnnnnnnnnnnnnnnnnnnnnnnnnnnnnnnnnnnnnnnnnnnnnnnnnnnnnnnnnnnnnnnnnnnnnnnnnnnnnnnnnnnnnnnnnnnnnnnnnnnnnnnnnnnnnnnnnnnnnnnnnnnnnnnnnnnnnnnnnnnnnnnnnnnnnnnnnnnnnnnnnnnnnnnnnnnnnnnnnnnnnnnnnnnnnnnnnnnnnnnnnnnnnnnnnnnnnnnnnnnnnnnnnnnnnnnnngtgctggacatcagcatgctctcctcccaggatgtggttcgtatgctgttgtccctgcagccctttctccaagatgccatccaaaagaagcgcacgggcaggacctgggagaacatccagcatgtgcagggaccactcacttggcagcagttccataagatggcaggacggggaacctacggnnnnnnnnnnnnnnnnnnnnnnnnnnnnnnnnnnnnnnnnnnnnnnnnnnnnnnnnnnnnnnnnnnnnnnnnnnnnnnnnnnnnnnnnnnnnnnnnnnnnnnnnnnnnnnnnnnnnnnnnnnnnnnnnnnnnnnnnnnnnnnnnnnnnnnnnnnnnnnnnnnnnnnnnnnnnnnnnnnnnnnnnnnnnnnnnnnnnnnnnnnnnnnnnnnnnnnnnnnnngatgtgtaggcttgggcagcacaagcccatctgcaaagtgctacgtgacgggatcatgcgcgtgggaaaaaccgtggcacagaagctgacagatgagcttgtgagtgagtggtttaaccagnnnnnnnnnnnnnnnnnnnnnnnnnnnnnnnnnnnnnnnnnnnnnnnnnnnnnnnnnnnnnnnnnnnnnnnnnnnnnnatttagccactctgcagcttgatagtagcctgttgataccacctaaataccagaccccaccagcagcggcacagggacaggctacgcctgggaatgctgggcccttagctccaaatggatcagcagctcccccagctggcagtgcatttaaccccacctcgaatagtagtactacaaatcctgcagcaagtagttccgcatctggttcctctgtgccaccggtctcatcgtctgcctctgctcctggtattagccagataagcactacctcttcttcaggattcagtggtagtgttggagggcagaaccccagcactgggggcatttctacggatagaactcaagggagcataggctgtggcggagacactgaccctgggcagagctcttctcagccctcacaggatggacaagagagnagtgttacagaaagggagagaataggttttcccccggagactgactctgcagacagccatgcccaccctccagccgttgtcatttacatggtagacccattcacttatgctgcggaggaggactccacttctgggaacttttggctgttgagcttgatgcgctgctacacagaaatgctggataatttacctgagcatatgagaagttctttcattctccagnnnnnnnnnnnncagtacatgctgcagacaatgaaggaagagcaag

SEQ ID NO: 40562 - DNA, 715 bp, Macaca Mulatta
ccagggcagaggaaccacgtggggctcagtcagcagtcggggtcaggcctggttggtggcactgaggaccctgaaggcttggccccgcctccgggagctggcttcctccatatgctcacagcaaaagtagggaccagagggggccagagacggggggccgcaccccaccctctcctcgctgctcccctcccccttaccaccctgtccagtggtgtccgcgcagatgggagggtgtgaggggcgtccacacctggcctgcagtggctgcccggcttcctgctagggagatggggccggtgctgatggggaacagctgttgtgggggcagccagaggaaaccacgttcccgcggggtgagctcatggtttacgcgttccctgccaaatccataacatcctggaggcagaagcgcagaggccaagcctgcccctgcctccactgagcctcgcctgctctgacacaagggccactcagccatcctcactcagcctgcacctcctgtcctgaagctccctcctccctccgcgtgctccccctgtcatttacgccccggccccgacccaccctgctcacccctgaagcttctctgggtcctggactccgttccgcaggctggatgccttctcaactgtccgtggcgcctgcctggtctctggggtgttcagtgaggggtgaccaggaagaacgtgttggagacagtggacagggaagcgtc

SEQ ID NO: 40563 - DNA, 753 bp, Macaca Mulatta
  misc_feature (1)...(753): n = A,T,C or G
catattctgcgccccgcctgcactgcgctcctcagaatcccaaattccgcctctgagactaccagcgggccagcgagagggggaaaacacacccatccaggggatcgccggaagcccaaccccgcccctcctcaagccgccagcgagacccaccttcctcttcctttagcagctgggaaattgggggcgtttatggcgccccgggaagaaggctcgcaggctgagagaaagtcacctctgaggcgctcttctctctctccctcttccctcacacatgcacaccttgagcccctcgctaacggtcgcagcccagctgctaagccccccttgtccacccgtcagccggctcccgacacccaaagcccccactttcgcctaaacacctcccctccccctccattaggagcagccccttcaatgcggaaatgtccctgccgcacagaccgacaggcgcagccaccagtcaggagccgaggcggacgcaggctctggccaatgaaatgtgcggaggtggcaaagggcggggcgttgcggcaattgggagctcgtcggagttgggcaatgaacagtaccctgggatcccgcgcttgggagcggcccctaacggggcgttgcggccagggaagactcgccgggatatctcagtaaagggagaggacntgaacacgacggggttattttccagtgcgggaaaatagttcccgctgagtaaggactgaagaaagctctgcagattaaggcggaactccccaa

SEQ ID NO: 40564 - DNA, 816 bp, Macaca Mulatta
cgggacatggccgctgactagaacatgggtattaaaaaaggaggctgtggaggatatgcccacaacggagggcgcattttttagaactaggggaggagatcccgacgccatgttaggttaacagccgcggggtctcctcataggggaaccaaggttatggaccaggggttaactgaatggaattgggcccggcggagcaaaacgggatggttttaaaaagttgtttcaaggggcgggggcacccgacaggtgggtgtaaagggaaggggcgggtctccggagtaggaccaaggtcttaacaagggtggtcaggctggtgttgaactcctgacgtcaggtgatccactcccctcagtgtcccaaagagtttggattacaggagtgagccaccataccgggcccatcacatatttgtaagtccttactctactgtttttccatgtgttttgtgaaaaattgacaagtcgtaaaagacactgtctgtgatctttcgaatttcaaatgtgggtaagtaaatatgtattatgtttgaggaaaaacaacaataacaaaagtcatgcaaaacccaaatatgagtgaccatgaagaaattcagatagaatctatacatggtaagggatgtaacacgagtggtaagattaccccaaaaaggctgtgtaggtgaagtgttataacgaacaaagaccatgataaacatagctatagtgattttcatacaacttccactgatgactgttacttctgaagtgtgaactgccagccatctattgaggttaaatgcctggtgctgcagtcagatcaccaggccccaccccc

SEQ ID NO: 40565 - DNA, 615 bp, Macaca Mulatta
  misc_feature (1)...(615): n = A,T,C or G
ctctttcatgccttgggatggttctttccccagatagctacatgatttgcttctcacattcttcaggtctctgttcaaatgtcactttctcagtgaagccttttgatccccttatttactttactctttcccacagaactccccactgcttggcagtccttatttttttcttagcatttttcacagtctgacaaactatatgttgtccttgttgattttctgtcttccactagaacataatgccataaggatagacatttttaggttttattcactctggcacctaaaactgtgcctggcacatcatgggccatccataacaagtgtttgttgaatgaataaacagtgaatcttttnnnnnnnnnnnnnnnnnnnnnnnnnnnnnnnnnnnnnnnnnnnnnnnnnnnnnnnnnnnnnnnnnnnnnnnnnnnnnnnnnnnnnnnnnnnnnnnnnnnnnnnnnnnnnnnnnnnnnnnnnnnnnnnnnnnnnnnnnnnnnnnnnnnnnnnnnnnnnnnnnnnnnnnnnnnnnnnnnnnnnnnnnnnnnnnnnnnnnnnnnnnnnnnnnnnnnnnnnnnnnnnnnnnnnnnnnnnnnnnnnnnnnnnnnnnnnnnnnnn

SEQ ID NO: 40566 - DNA, 733 bp, Macaca Mulatta
ggactccaacaattctcccacctcggcttcccaaaacactgacattgcgggtatgagccaccacacctgccagaaatcttgttattgattgatataaaacatcacaaagtgctgagtagacactgaatgccctgtaattattgctcactgattcctctttatcctctgtaatcaatcaacttgactttatttgatatagattaataattgatttctttctttctactgctgcttccaaattcttggtaccttgtgcctagattactaaattgatcactgttgactcactaccattatctagctccttactaaactactattttgttaaaaaatagtctacagtttcccagtgaggttctcaggagcagggggtagtgtatagtgtatattaagtaatgaaatatttgctgggtaccagaagaaatgctctttgtacatattttgagtacagttatgcaccacacaaggacattttggtcaatgatggactgcagatatgacagtgatcacgtaagattataatggagctggaaaatggcctattacctagtgacatcatagcacaattatatgtctgtggtgatactggtgtaaacaaacttactgcactgccatcatataaaagtatagcactaaaaggcctaatggtgggtggcttcattgccttgtaagtccccaagccacttttgggggagggcccaaaggccggggtgggaattcacccctggaagga

SEQ ID NO: 40567 - DNA, 784 bp, Macaca Mulatta
ggcagctcacaaatagaaatccagactttgagggggtgatttcaaaaggtaacctttaatctgttttaactgtcagccatcagtctgtaagaacaggaaatgtgctctatgtaattgaatcaccaccctgttttccatcctccatttctcttccccgataaagggcgtctcctcacactcccttatcttcacctaatgcctcacctctgagagaaggagccaggagcagtgaagagaattaatttggttgcaataatctgggggagaaaagcatgcaaatgaggttgaaggcaggaggttttgctttcagaatccaattgctattcacacctccttgtgcttttgtaagtgcttccaaatatcaaccttcagggtcaagggaggcggctgcatctgggttcaaaaatgtggtttcacacttggattctccagtctactccacaggggaatctggagttccaccaagccaggatgagacctccagacttgacaaatcccttcaaatgaatcctgggcgtggatgtgctcacagtctactgtctggtcgttttcagccttatcttataacatgtaattgatcacacgcgttaccatgctgcttgagaaatcagccgaggcctccctgagggagtgtcaggaatgggagggacagaaggggaagaactgcgctttcttggggagaattactcaatttcggaaatttggttttaggacacttcctcaggggaaaatcccacatcggggagaacccaacaacttagttggggaaccttaagctcttctg

SEQ ID NO: 40568 - DNA, 5110 bp, Macaca Mulatta
  misc_feature (1)...(5110): n = A,T,C or G
cctttccttctggcctgggattcagtngtggaagaaattgttcatgatacaattactaggaacctacatgctttttataatatgctacgggcatatgaccttggagacacagggctcattggccgaaataatttcaagaaaatcttgcacgtcttctgcccatttttaacgaatgcacatttcataaannnnnnnnnnnnnnnnnnnnnnnnnnnnnnnnnnnnnnnnnnnnnnnnnnnnnnnnnnnnnnnnnnnnnnnnnnnnnnnnnnnnnnnnnnnnnnnnnnnnnnnnnnnnnnnnnnnnnnnnnnnnnnnnnnnnnnnnnnnnnnnnnnnnnnnnnnnnnnnnnnnnnnnnnnnnnnnnnnnnnnnnnnnnnnnnnnnnnnnnnnnnnnnnnnnnnnnnnnnnnnnnnnnnnnnnnnnnnnnnnnnnnnnnnnnnnnnnnnnnnnnnnnnnnnnnnnnnnnnnnnnnnnnnnnnnnnnnnnnnnnnnnnnnnnnnnnnnnnnnnnnnnnnnnnnnnnnnnnnnnnnnnnnnnnnnnnnnnnnnnnnnnnnnnnnnnnnnnnnnnnnnnnnnnnnnnnnnnnnnnnnnnnnnnnnnnnnnnnnnnnnnnnnnnnnnnnnnnnnnnnnnnnnnnnnnnnnnnnnnnnnnnnnnnnnnnnnnnnnnnnnnnnnnnnnnnnnnnnnnnnnnnnnnnnnnnnnnnnnnnnnnnnnnnnnnnnnnnnnnnnnnnnnnnnnnnnnnnnnnnnnnnnnnnnnnnnnnnnnnnnnnnnnnnnngacccctattctgccttctttaanatagacactgacagggatggcataatcaacatgcatgaccttcacaaattgctcgggcacctactgtttaatctcagagacgacgannnnnnnnnnnnnnnnnnnnnnnnnnnnnnnnnnnnnnnnnnnnnnnnnnnnnnnnnnnnnnnnnnnnnnnnnnnnnnnnnnnnnnnnnnnnnnnnnnnnnnnnnnnnnnnnnnnnnnnnnnnnnnnnnnnnnnnnnnnnnnnnnnnnnnnnnnnnnnnnnnnnnnnnnnnnnnnnnnnnnnnnnnnnnnnnnnnnnnnnnnnnnnnnnnnnnnnnnnnnnnnnnnnnnnnnnnnnnnnnnnnnnnnnnnnnnnnnnnnnnnnnnnnnnnnnnnnnnnnnnnnnnnnnnnnnnnnnnnnnnnnnnnnnnnnnnnnnnnnnnnnnnnnnnnnnnnnnnnnnnnnnnnnnnnnnnnnnnnnnnnnnnnnnnnnnnnnnnnnnnnnnnnnnnnnnnnnnnnnnnnnnnnnnnnnnnnnnnnnnnnnnnnnnnnnnnnnnnnnnnnnnnnnnnnnnnnnnnnnnnnnnnnnnnnnnnnnnnnnnnnnnnnnnnnnnnnnnnnnnnnnnnnnnnnnnnnnnnnnnnnnnnnnnnnnnnnnnnnnnnnnnnnnnnnnnnnnnnnnnnnnnnnnnnnnnnnnnnnnnnnnnnnnnnnnnnnggggagtcagccggcatgataattccatcaattacctcgacttcctgagagcagtggagaacagcaagtcaacaggagctcagcccaaggaaaaggaagagagcatgccaatcaattttgcaacgctgaatccacaggaggttgtgaggaagatccaggaagtagttgagtcctcccagctggctttgtccacggnnnnnnnnnnnnnnnnnnnnnnnnnnnnnnnnnnnnnnnnnnnnnnnnnnnnnnnnnnnnnnnnnnnnnnnnnnnnnnnnnnnnnnnnnnnnnnnnnnnnnnnnnnnnnnnnnnnnnnnnnnnnnnnnnnnnnnnnnnnnnnnnnnnnnnnnnnnnnnnnnnnnnnnnnnnnnnnnnnnnnnnnnnnnnnnnnnnnnnnnnnnnnnnnnnnnnnnnnnnnnnnnnnnnnnnnnnnnnnnnnnnnnnnnnnnnnnnnnnnnnnnnnnnnnnnnnnnnnnnnnnnnnnnnnnnnnnnnnnnnnnnnnnnnnnnnnnnnnnnnnnnnnnnnnnnnnnnnnnnnnnnnnnnnnnnnnnnnnnnnnnnnnnnnnnnnnnnnnnnnnnnnnnnnnnnnnnnnnnnnnnnnnnnnnnnnnnnnnnnnnnnnnnnnnnnnnnnnnnnnnnnnnnnnnnnnnnnnnnnnnnnnnnnnnnnnnnnnnnnnnnnnnnnnnnnnnnnnnnnnnnnnnnnnnnnnnnnnnnnnnnnnnnnnnnnnnnnnnnnnnnnnnnnnnnnnnnnnnnnnnnnnnnnnnnnnnnnnnnnnnnnnnnnnnnnnnnnnnnnnnnnnnnnnnnnnnnnnnnnnnnnnnnnnnnnnnnnnnnnnnnnnnnnnnnnnnnnnnnnnnnnnnnnnnnnnnnnnnnnnnnnnnnnnnnnnnnnnnnnnnnnnnnnnnnnnnnnnnnnnnnnnnnnnnnnnnnnnnnnnnnnnnnnnnnnnnnnnnnnnnnnnnnnnnnnnnnnnnnnnnnnnnnnnnnnnnnnnnnnnnnnnnnnnnnnnnnnnnnnnnnnnnnnnnnnnnnnnnnnnnnnnnnnnnnnnnnnnnnnnnnnnnnnnnnnnnnnnnnnnnnnnnnnnnnnnnnnnnnnnnnnnnnnnnnnnnnnnnnnnnnnnnnnnnnnnnnnnnnnnnnnnnnnnnnnnnnnnnnnnnnnnnnnnnnnnnnnnnnnnnnnnnnnnnnnnnnnnnnnnnnnnnnnnnnnnnnnnnnnnnnnnnnnnnnnnnnnnnnnnnnnnnnnnnnnnnnnnnnnnnnnnnnnnnnnnnnnnnnnnnnnnnnnnnnnnnnnnnnnnnnnnnnnnnnnnnnnnnnnnnnnnnnnnnnnnnnnnnnnnnnnnnnnnnnnnnnnnnnnnnnnnnnnnnnnnnnnnnnnnnnnnnnnnnnnnnnnnnnnnnnnnnnnnnnnnnnnnnnnnnnnnnnnnnnnnnnnnnnnnnnnnnnnnnnnnnnnnnnnnnnnnnnnnnnnnnnnnnnnnnnnnnnnnnnnnnnnnnnnnnnnnnnnnnnnnnnnnnnnnnnnnnnnnnnnnnnnnnnnnnnnnnnnnnnnnnnnnnnnnnnnnnnnnnnnnnnnnnnnnnnnnnnnnnnnnnnnnnnnnnnnnnnnnnnnnnnnnnnnnnnnnnnnnnnnnnnnnnnnnnnnnnnnnnnnnnnnnnnnnnnnnnnnnnnnnnnnnnnnnnnnnnnnnnnnnnnnnnnnnnnnnnnnnnnnnnnnnnnnnnnnnnnnnnnnnnnnnnnnnnnnnnnnnnnnnnnnnnnnnnnnnnnnnnnnnnnnnnnnnnnnnnnnnnnnnnnnnnnnnnnnnnnnnnnnnnnnnnnnnnnnnnnnnnnnnnnnnnnnnnnnnnnnnnnnnnnnnnnnnnnnnnnnnnnnnnnnnnnnnnnnnnnnnnnnnnnnnnnnnnnnnnnnnnnnnnnnnnnnnnnnnnnnnnnnnnnnnnnnnnnnnnnnnnnnnnnnnnnnnnnnnnnnnnnnnnnnnnnnnnnnnnnnnnnnnnnnnnnnnnnnnnnnnnnnnnnnnnnnnnnnnnnnnnnnnnnnnnnnnnnnnnnnnnnnnnnnnnnnnnnnnnnnnnnctcagaaaatgcacagctacaggccctctctagttctcaaatgcatcaatgtcccattcccagagaataattcagattaaaacataacaccccccaaacacttacaaagcaactctgcctccctccttcctcctggttctgctcagtctcagcccagggagttccctgcagacactgcatggaaatgtcactcttttgcctccaaaactggaccattccaacctcttgtctcattttatcagagttgcagggtaaggtcttggaagtattcacagggaagcgtgatcattgcagtcacccctggccctactcacagctctgaactcactgccccaagaatgcattccgtaaagacattaagaatgtgactatcaggtttaatgttcctaaaatatcacctttctcaggcattttggtgtgatcatttttgctaagcaaaattcaaggctgtttccaaacgatcctgccccaccgcacatcaaagccgagcaagatctgtatttgcaaatacttctctcagcataaatgaaataagtcttggaaattaatacagttgcattgattattctatggggccaagtaatcaaggttttactaataaaggtttttttatttcatccaaatgagtaaaattttactctaattatagattgaaattaatgacacgctgacatatctggcattcatcacagagaatnnnnnnnnnnnnnnnnnnnnnnnnnnnnnnnnnnnnnnnnnnnnnnnnnnnnnnnnnnnnnnnnnnnnnnnnnnnnnnnnnnnnnnnnnnnnnnnnnnnnnnnnnnnnnnnnnnnnnnnnnnnnnnnnnnnnnnnnnnnnnnnnnnnnnnnnnnnnnnnnnnnnattagagaaatgcaaatcaaaaacacagtaagataccatctcatgccagtcagaatggcgattattaaaaagtcaggaaaaaatagatgctggtgaggatatagagaaataggaacacttttacactgtttgtgggagtgtaaattagttcaaccattttggaagacagtgtggtgattcctcaaggatctagaaccagaaataccactggacccagcaatcgcattactgggtatataccccaaggaatataaatcattccattataaagaaacttgcacgcacatgtttattgcagtgctatttacaatagcaaagacttggaaccaacctaaatgcccatcagtgacagactgtataaagaaaatgtggtacatctacaccatggaatactatgcagccataaaaaggaataagaggcccggcacagcggttcgcgcctgtaatcccagcattttgggaggctgaggtgggtagatcatgaggtcaggagttcgagaccagcctggccaatatggtgaaaccccgtctctactaaaaatacaaaaaaaattagctgggcatggtggcacgcatctgtagtcccagctgctccggaggctgaggtaggagaatcgtgtgaacccgggaggcagaggttgcagtgagccaagatcacaccactgcactgcagcctgggcaaaagagcaagactctgtctc

SEQ ID NO: 40569 - DNA, 3921 bp, Macaca Mulatta
  misc_feature (1)...(3921): n = A,T,C or G
attttgggggtggttggaggcggaggcggcggcggcgaggatggggaatttcctagtgcctccattcccgggaggggggagcggcgttggaggccaccgtttccagnnnnnnnnnnnnnnnnnnnnnnnnnnnnnnnnnnnnnnnnnnnnnnnnnnnnnnnnnnnnnnnnnnnnnnnnnnnnnnnnnnnnnnnnnnnnnnnnnnnnnnnnnnnnnnnnnnnnnnnnnnnnnnnnnnnnnnnnnnnnnnnnnnnnnnnnnnnnnnnnnnnnnnnnnnnnnnnnnnggattttctcattcagcatttacctttggtatagaaagccatatcagtcagtccaatataaatggtgccctcgtcccacctgctgcattgatttctatcatccagaaaggtctacagtatgtagaagcagaagttagtattaatgaggnnnnnnnnnnnnnnnnnnnnnnnnnnnnnnnnnnnnnnnnnnnnnnnnnnnnnnnnnnnnnnnnnnnnnnnnnnnnnnnnnnnnnnnnnnnnnnnnnnnnnnnnnnnnnnnnnnnnnnnnnnnnnnnnnnnnnnnnnnnnnnnnnnnnnnnnnnnnnnnnnnnnnnnnnnnnnnnnnnnnnnnnnnnnnnnnnnnnnnnnnnnnnnnnnnnnnnnnnnnnnnnnnnnnnnnnnnnnnnnnnnnnnnnnnnnnnnnnnnnnnnnnnnnnnnnnnnnnnnnnnnnnnnnnnnnnnnnnnnnnnnnnnnnnnnnnnnnnnnnnnnnnnnnnnnnnnnnnnnnnnnnnnnnnnnnnnnggtctggagactcaacagcaagaatatggaatcttagtgagaacagcaccagtggctctacacagttagtacttagacattgtatacgagaaggagggcaagatgttccaagcaacaaggatgtcacatctctagattggaannnnnnnnnnnnnnnnnnnnnnnnnnnnnnnnnnnnnnnnnnnnnnnnnnnnnnnnnnnnnnnnnnnnnnnnnnnnnnnnnnnnnnnnnnnnnnnnnnnnnnnnnnnnnnnnnnnnnnnnnnnnnnnnnnnnnnnnnnnnnnnnnnnnnnnnnnnnnnnnnnnnnnnnnnnnnnnnnnnnnnnnnnnnnnnnnnnnnnnnnnnnnnnnnnnnnnnnnnnnagcaccagcattggatgttgattggcagagcaacaacacctttgcttcttgtagtacagatatgtgcattcatgtctgtaaattaggacaagacagacctattaaaacattccaaggacatacgnnnnnnnnnnnnnnnnnnnnnnnnnnnnnnnnnnnnnnnnnnnnnnnnnnnnnnnnnnnnnnnnnnnnnnnnnnnnnnnnnnnnnnnnnnnnnnnnnnnnnnnnnnnnnnnnnnnnnnnnnnnnnnnnnnnnnnnnnnnnnnnnnnnnnnnnnnnnnnnnnnnnnnnnnnnnnnnnnnnnnnnnnnnnnnnnnnnnnnnnnnnnnnnnnnnnnnnnnnnnnnnnnnnnnnnnnnnnnnnnnnnnnnnnnnnnnnnnnnnnnnnnnnnnnnnnnnnnnnnnnnnnnnnnnnnnnnnnnnnnnnnnnnnnnnnnnnnnnnnnnnnnnnnnnnnnnnnnnnnnnnnnnnnnnnnnnnnnnnnnnnnnnnnnnnnnnnnnnnnnnnnnnnnnnnnnnnnnnnnnnnnnnnnnnnnnnnnnnnnnnnnnnnnnnnnnnnnnnnnnnnnnnnnnnnnnnnnnnnnnnnnnnnnnnnnnnnnnnnnnnnnnnnnnnnnnnnnnnnnnnnnnnnnnnnnnnnnnnnnnnnnnnnnnnnnnnnnnnnnnnnnnnnnnnnnnnnnnnnnnnnnnnnnnnnnnnnnnnnnnnnnnnnnnnnnnnnnnnnnnnnnnnnnnnnnnnnnnnnnnnnnnnnnnnnnnnnnnnnnnnnnnnnnnnnnnnnnnnnnnnnnnnnnnnnnnnnnnnnnnnnnnnnnnnnnnnnnnnnnnnnnnnnnnnnnnnnnnnnnnnnnnnnnnnnnnnnnnnnnnnnnnnnnnnnnnnnnnnnnnnnnnnnnnnnnnnnnnnnnnnnnnnnnnnnnnnnnnnnnnnnnnnnnnnnnnnnnnnnnnnnnnnnnnnnnnnnnnnnnnnnnnnnnnnnnnnnnnnnnnnnnnnnnnnnnnnnnnnnnnnnnnnnnnnnnnnnnnnnnnnnnnnnnnnnnnnnnnnnnnnnnnnnnnnnnnnnnnnnnnnnnnnnnnnnnnnnnnnnnnnnnnnnnnnnnnnnnnnnnnnnnnnnnnnnnnnnnnnnnnnnnnnnnnnnnnnnnnnnnnnnnnnnnnnnnnnnnnnnnnnnnnnnnnnnnnnnnnnnnnnnnnnnnnnnnnnnnnnnnnnnnnnnnnnnnnnnnnnnnnnnnnnnnnnnnnnnnnnnnnnnnnnnnnnnnnnnnnnnnnnnnnnnnnnnnnnnnnnnnnnnnnnnnnnnnnnnnnnnnnnnnnnnnnnnnnnnnnnnnnnnnnnnnnnnnnnnnnnnnnnnnnnnnnnnnnnnnnnnnnnnnnnnnnnnnnnnnnnnnnnnnnnnnnnnnnnnnnnnnnnnnnnnnnnnnnnnnnnnnnnnnnnnnnnnnnnnnnnnnnnnnnnnnnnnnnnnnnnnnnnnnnnnnnnnnnnnnnnnnnnnnnnnnnnnnnnnnnnnnnnnnnnnnnnnnnnnnnnnnnnnnnnnnnnnnnnnnnnnnnnnnnnnnnnnnnnnnnnnnnnnnnnnnnnnnnnnnnnnnnnnnnnnnnnnnnnnnnnnnnnnnnnnnnnnnnnnnnnnnnnnnnnnnnnnnnnnnnnnnnnnnnnnnnnnnnnnnnnnnnnnnnnnnnnnnnnnnnnnnnnnnnnnnnnnnnnnnnnnnnnnnnnnnnnnnnnnnnnnnnnnnnnnnnnnnnnnnnnnnnnnnnnnnnnnnnnnnnnnnnnnnnnnnnnnnnnnnnnnnnnnnnnnnnnnnnnnnnnnnnnnnnnnnnnnnnnnnnnnnnnnnnnnnnnnnnnnnnnnnnnnnnnnnnnnnnnnnnnnnnnnnnnnnnnnnnnnnnnnnnnnnnnnnnnnnnnnnnnnnnnnnnnnnnnnnnnnnnnnnnnnnnnnnnnnnnnnnnnnnnnnnnnnnnnnnnnnnnnnnnnnnnnnnnnnnnnnnnnnnnnnnnnnnnnnnnnnnnnnnnnnnnnnnnnnnnnnnnnnnnnnnnnnnnnnnnnnnnnnnnnnnnnnnnnnnnnnnnnnnnnnnnnnnnnnnnnnnnnnnnnnnnnnnnnnnnnnnnnnnnnnnnnnnnnnnnnnnnnnnnnnnnnnncaaatgattgcatgaggccatgtttatatgtgtgattaataaggcttgtcatgattaacataatccaggtatgtcatttctgaagagaatagtcatcaaatttatatctcaaagattttaattaaggaattgcttattgttgagcttagcaaattaataacactatttctgtcactaattattttgaggccttttagtactaaaattttaacctgtgttctaagtttaggtagaaactgatttaacccaagtaatgcagctttgattttcagcatttgttgctttgctatttttacaaaacagcattgattgaagcaagtcttcgttttactaaggtagggtagcatttgctattggtaaagagaataaatacacttaatttcacaatacattgttatatgtaccccagttgttgttagtggggactatgatactgtaataatatttttaaaaatttacatccagagaggcagtcattcacgatggttttgtgccagctctttttagggttttggatcacattagagatatttagaacatattaccatgtgacttacgtaggaaacctaatatgctgaatatctggcacttgaattcctgcttttattgctggaggtccacatctgtggttgacctctgtta

SEQ ID NO: 40570 - DNA, 405 bp, Macaca Mulatta
caggtcctctacaacagtgagccgacttccctctccaaaatacacggtgtttcctcccgtccttgtactggcacagagatacacggccgagtccccaagctctgcaggctggatcttgagagtggagtttactcctttgagcctctctgcagaaaatcgatccttaggcaactgtgaatcatctactatacccttattctgaaactgaaccagaagctctgggccctgacccaggatctgccggtaccagtaaagggtagcatggccagatataggatcacaccaaaaagccacagtctggcttttctctgtaatcttatatctgggggactgggcaactccagcttctgtgaattctgcccgcaggagacagacggccgcccagcagaggagcctggtgcccat

SEQ ID NO: 40571 - DNA, 700 bp, Macaca Mulatta
ggagaggggaggcgttttagggatatttatataagcgactgtctctgttgaaagtatatataagagctgtttaagattttcatgaatgttccccttaatccctggtgagaggggtccatgctctgtgcgctatactttaaggggccacatccttctttttctctggtttcaccctttctcaatgaggcagggtgttaatgggacctttctagaccctgaaatttcctgcccaaatgaccccagtctacttccacagcctgcctgcctgcgtggggcattttccccaatcttcttcctgagagtggcttgccccctggtgtgtacaatcctaggccacacatcagagaggacaagggacggctaagggacagctctttgagggagacgttgtggaaggaactttgatatggggctgtggagccgacatacgcacgtagtataggcttgccctgtgtccccaggttgcaggaccaaacttcctggatttcaggagtctaaatgtgaatctggcattcccgattgttttgcaggtttatttttccagggaggagaacagaacatgttttatcggtttgttggtttgatgataacttctcaatattagatacaattgtacttttgttctctgccttgcaaatggaggtggctggagagttttggtctgtactgtataatcaatactcaagtgaaaaattatact

SEQ ID NO: 40572 - DNA, 652 bp, Macaca Mulatta
  misc_feature (1)...(652): n = A,T,C or G
ggggacttcgggggaaggcggaaaagaggtcaaaatgcagatcttcgtgaagaccctgaccggcaagaccatcacccttgaggtggagcccagnnnnnnnnnnnnnnnnnnnnnnnnnnnnnnnnnnnnnnnnnnnnnnnnnnnnnnnnnnnnnnnnnnnnnnnnnnnnnnnnnnnnnnnnnnnnnnnnnnnnnnnnnnnnnnnnnnnnnnnnnnnnnnnnnnnnnnnnnnnnnnnnnnnnnnnnnnnnnnnnnnnnnnnnnnnnnnnnnnnnnnnnnnnnnnnnnnnnnnnnnnnnnnnnnnnnnnnnnnnnnnnnnnnnnnnnnnnnnnnnnnnnnnnnnnnnnnnnnnnnnnnnnnnnnnnnnnnnnnnnnnnnnnnnnnnnnnnnnnnnnnnnnnnagcaagcaacttaaagatgggcgccctctttctgactacacatccaaaaggaagcgaccctgcacctggtcctgcccctgaaagggggtttgcaaatttttcgggaaaccccggaccggaagaccctccccccggaggggggacccatggccccctccaaatgtgagggccaatcccgaaaaaaaagggctcccccccaacaaaaggttcttttttggggaaagtgggaaagggccccttttttgaaaaaaa

SEQ ID NO: 40573 - DNA, 745 bp, Macaca Mulatta
aagagggaggcagagggaagaaggtgcaggttgaccttgtaaagactttagcataactgtgagagactgtgtctaaaattaaactgatctagaagcagcaggtaggtattcagtaagtaattctgtgacttgcctcaattcccactggccaggggtcatctcaattgcacagtgaatcaagatgctggtgtcatccttcttggaaagaggaaatgttaactcatggttaaaactaagtacaatgattcccaagggatcactttcttatttttttaaatgacattaacgagaaactttaaaaaagcatcagagaaagacgtgtgcatgtgaagcaccctgattctgatgttacgagaacttaagtgaacaggacctgctgcacacagccccattgtcttctatccatttctctttatcattcaaagcaagcaacatgtgccctcctcgtgaacacacattcttctcctttgtcagtatgtgtctcccaacttagtgtcaggatactttcgattcataattatgtatgatccaatgtgtacataatttcatttaacgttatttaaagaaatagatccaattcctctcttgcaaccaaaaataaataaaatacattgcctcaatataaggtttgggttattctgtgtttctatagaggcaatctgtttttggtaaaatgtacttttaaggatccagtcatctaaagtattttatgtagagttagagatttcacaatattgactataca

SEQ ID NO: 40574 - DNA, 613 bp, Macaca Mulatta
  misc_feature (1)...(613): n = A,T,C or G
nttgatcattcaggaaaaaggggtcatcttgtcatctttttcagttttctagaaattctgaactcttgcacaagattattcagtttgctgacagacagtttggttctttcttgtgggaagtcatctatccactggttgtctccatttagaagcctattagctattgagtctgtgttgttggagctgacgtgcgcgtcccaggccaggaagatacttagtttgcaaaagtgttctggttcatcgtgaatttggtcttgtctcttcatgcatctccttatcctttcagtcccccatgccccttggatgggagggagaaagtggatggaaggatccttggaagttgcgtcttcacaggaggttgtgtcctcacagggggtgtcctcacaggggaaatagcccacagagaggctcaggttggaattggatttggagttgtagtcctctatgtcgctgttagaggatgaatatgccatggagttcaaaggcacaaatctctctcaactcaagaagatggaagaagtgctgctaactcctgaggcaaaaggggagacatgagaaatccttcacatcccgagtctctgtggctaaaagtccagctgtcagaagtctcccc

SEQ ID NO: 40575 - DNA, 238 bp, Macaca Mulatta
  misc_feature (1)...(238): n = A,T,C or G
ggaaatatcagtcgtcaagaagctgttagcatgatcccaccactacttctcaacgtccggcctcatcataannnnnnnnnnnnnnnnnnnnnnnnnnnnnnnnnnnnnnnnnnnnnnnnnnnnnnnnnnnnnnnnnnnnnnnnnnnnnnnntccagagggatttgttattgctaatgatgtggacaacaagcgctgctacctgctcgtccatcaagccaagaggctgagcagcccctg

SEQ ID NO: 40576 - DNA, 790 bp, Macaca Mulatta
  misc_feature (1)...(790): n = A,T,C or G
gggaggctgagtttagtctgtaagattcacctcgacagtttttttttaaaccttcattcggtgattacagtgtgttttaatgttcgttttggtttcatttatatgagnnnnnnnnnnnnnnnnnnnnnttcctacgctgtctgcccattacaaaagcaagattatcagcgtattttcttgtggttctcagcagcgggaggttttcaacgtgtgatcttcacaaaagcgacggtgtcgtaccgtttacgttgggccttcagcatatcagaagacgttacctcgccgggagaaggacaacaacccgtgtgggttccctcccagcaactgagattgcattataactccaaggatggtagaactctcagaaacaaaaggcaaagaaccgtcagaaagcaaagagcaaggtttgtcacctgacacataaactccatgacctcgacattacaaccaaatatcgccgtgtgacctacaacaccagtcattctactctaccaacatggggccagataaaagtcttatcacatcaaacagagaaattactacaagaagaaggaattccaaaaatgacgggtaatataattctggctgcctttatggtggtcagtgcagtgactcctcagtggaagtttacaccaataatagtgcattcacacgggtccccgatgatgacaggtttccagcctaaccagaagaagaagtctgcagatgtctccnngcacactgctaagnnnnnnnnnnnnnnnnnnnnnnnnnnnnnnnnnnnnnnnnnnnnnnnnnnnnnnnnnnnnnn

SEQ ID NO: 40577 - DNA, 888 bp, Macaca Mulatta
  misc_feature (1)...(888): n = A,T,C or G
nagcaaatgcggcgggagataacacgaaagagcaagtggatggaaatgctgggacaatgggagacatacaagaacagtaaaaangctgatagatcgagtatataagggcattcccatgaacttcaggggccaagtgtggtcagtcctcctgaacatacaggaannnnnnnnnnnnnnnnnnnnnnnnnnnnnnnnnnnnnnnnnnnnnnnnnnnnnnnnnnnnnnnnnnnnnnnnnnnnnnnnnnnnnnnnnnnnnnnnnnnnnnnnnnnnnnnnnnnnnnnnnnnnnnnnnnnnnnnnnnnnnnnnnnnnnnnnnnnnnnnnnnnnnnnnnnnnnnnnnnnnnnnnnnnnnnnnnnnnnnnnnnnnnnnnnnnnnnnnnnnnnnnnnnnnnnnnnnnnnnnnnnnnnnnnnnnnnnnnnnnnnnnnnnnnnnnnnnnnnnnnnnnnnnnnnnnnnnnnnnnnnnnnnnnnnnnnnnnnnnnnnnnnnnnnnnnnnnnnnnnnnnnnnnnnnnnnnnnnnnnnnnnnnnnnnnnnnnnnnnnnnnnnnnnnnnnnnnnnnnnnnnnnnnnnnnnnnnnnnnnnnnnnnnnnnnnnnnnnnnnnnnnnnnnnnnnnnnnnnnnnnnnnnnnnnnnnnnnnnnnnnnnnnnnnnnnnnnnnnnnnnnnnnnnnnnnnnnnnnnnnnnnnnnnnnnnnnnnnnnnnnnnnnnnnnnnnnnnnnnnnnnnnnnnnnnnnnnagcgcctcatgaagacgtccaggtctggcctgtgggcacggtttcggaaccagttctttcacacctgggagttggatgatgactctgtgctcaagcatcttagggcctctacaaagaaactaacaaggaagcaaggagacctgccaccccc

SEQ ID NO: 40578 - DNA, 126 bp, Macaca Mulatta
tggcctttgtcttgggccttttccagggtcatgctggggcggcacaatgtcaccgacgtggttttggcttttttctgggctacatgcagtacagcatcgtggactaatgctggctctcaccccata

SEQ ID NO: 40579 - DNA, 208 bp, Macaca Mulatta
  misc_feature (1)...(208): n = A,T,C or G
ttcttatatggaactacaaggggcccaagaggacctgggcatttccctctctagtccccggaagaaccatgaaaccaggccaggaagcaaggctaagagcaggagcagtgtctgtctccaggggtttgtttggnnnnngaggaaagctgaggctcagagcaagtgaacatctcacccagggtcactaacaagagctcagggattggaa

SEQ ID NO: 40580 - DNA, 637 bp, Macaca Mulatta
  misc_feature (1)...(637): n = A,T,C or G
ggggatcttctaggacatcacttgtttattgagtgccccaaacatacagctttgtagcacttcagagttcatccttgaagtctctcctggttcattcaaatataggctgtgtgagtctggtggttttctgtaattggtctaatgtgagctctttgaacagacagatctgacagtgaatgactcccctgcttctggcataattgctttgcctctgtctagtgtccaagcctcttagctggtcaagaggagagggcagcataacttcctgaccatcagtgtcagacgtcggagcattctggactcctgagaggcagtggcctcttaagtgaacaggggggggccagtagatgccccagatgcagagccatggctgcaaatccagcaggaataaggagggacaaccacagcgtcctcatctgtgtgtcatttccaagggtttgccttgtgtctcagctcattctggggagcctgtttgtcttctctccctagagatttgaaggattctggactcttgtacttggctgtacttgtacgtgactgtacttggctttatggagttgggtgcttttttctctctgncattacctgtcatagcattttgtgctcaccatggaggacggtctctgccttctcttgn

SEQ ID NO: 40581 - DNA, 723 bp, Macaca Mulatta
  misc_feature (1)...(723): n = A,T,C or G
gacgaggtggctgacactctccaccactgattttgtgaagcgatgaacacgggtaacataaatactggtcttaggtttatactgacagctgctatgcgcatatcaagagtgcagtgattttctgggaacttagggggtgctggaataaggtgaaataaaatgcccccgagttccatcctgatctgaactgccctggccatccagatgtgcccaccaggcaacccgctgagagttcacaaaaacatgagccactgcatttttttttttctggtttcaccatctaaaaatgtaacgggaagggtttgtattgtttccgttgtatgaaaaggtgatcagacctgcagtcaggcaaacaatgtttctgtcaatgacggaccacgcgatgatgctgtattttcactatacctttttatttcaatctgtcacaaacttgtttgctttcattacttttaattgacataattgtacatattgatggggtacattgtggtatttggnnnnnnnnnnnnnnnnnnnnnnnnnnnnnnnnnnnnnnnnnnccccctaaaaatataagcagccagtcatggtggtgggnnnnnnnnnnnnnnnnnnnnnnnnnnnnnnnnnnnnnnagattgcttggacccnnnnnnnnnnnnnnnnnnggagtcgagatcgcaccactgtactctnnnnnnnnnnnnnnnnnnnnnnnncatctcnnnnnnnnccagttaaaac

SEQ ID NO: 40582 - DNA, 822 bp, Macaca Mulatta
gctataaggactggcataaatctaagaagaaggcctttctcaagtactgcaagaaatggcagtatgaggatggcaagaagcagctggagaaggacttcagcagcatgaagaagtactgccaagtcatccatgtcattgcccacacccagaggcacccacttcctctgtgccagaaggcccacctgatggagatccaagtgaaccgaggcaccatggccaagaagctggactgagcccgagagaggctcgagcagcaggtacctgtgaaccaagtgtttggacaggatgagataatcgacatcattggggtgaccacaggcaaaggttacaaaggagtcaccagtcattggcacagcaagaggctgcccctcaagaccccctgaggcctgtgcaaggtgatctgcattagagcatggcatcatgctcatgcagccttccctgtggcatgcactggacagaaaggctaccatcactgtactgagatcaacaagaggatctataaaattggccagggctaccttatcaatgacatcaaactgatcaaggacaaggtctccactgactatgacctgacaaaagcatcaaccccctgggtggctttgtccactatggtgaagtgaccaataacttttgtcatgctgaaaggctgtttggtgggaaccaagaagtgagtgctcaccctccacaagtccttgctggtgcagaccaaacagtgggccctggagaagactgaccttaagttcattgacaccaccttcgagtttggccatgggcagttccagatcaaggaggagaagaaagtattcatgggaccactcaaga

SEQ ID NO: 40583 - DNA, 357 bp, Macaca Mulatta
ttaatttatctaaagttaagtatttaaattacctactggcaaatgttgctgaacagcctcggggttgaaatctgtcactgaggctacaaaatacctcttgcctgatttaaaagctctaccatggtgaagtataattcacatatcctttttttagccctcaatatacactttaaatgaactaagcaatcactaatgaccactcgcaaattgctgggaatttaaaaaattacatccttcaagattacaaaatagattattcatagtactagtggtccttacactatctaaattgacatcaatatgacaaagttctattgctgtattataatgaagacttaatcatcttaacgtaatact

SEQ ID NO: 40584 - DNA, 766 bp, Macaca Mulatta
  misc_feature (1)...(766): n = A,T,C or G
ggaaggtcttttaagtcaaatgtatttcagatccaagagtgcaagaacaatggtatactaggtcttatggtcttttggccctgccatttaaatataatatctgtacaagaaagtacctacaggagtagtctgtatattcctgttggctggctggtgggaaggtagctaaccttttgtttctttcttttttggtacactgctctaataaatggtaacagtgctttaataagtcccccggccatcatcgtacttatgatctccggatgaagaccactgtgtgagactggtatcctagaggttggnnnnnnnnnnnnnnnnnnnnnnnnnnnnnnnnnnnnnngcttgatttatagaccactgaagcccgatgaagtagtagggtgaaaatcacctacctttccagaggaaaaaaaatgtcaccatcaattccaagagggacttgtaaacccgaagctaacagccaatggtttaattcttttaaggtagaatttttaaaaacatttctagggcttaactctattctatctgggannnnnnnnnnnnnatnnnnnnnnnnnnnnnnnnnaaagttgtgggttttcctggggagaaccaaaacaaaaaataccccattatttgaaaaggccattctttcccaggaaatttnnnnnnnnnnnnnnnnnnnncccttttttcttatttccataggtggtccatttaaattcccttgaaaaaaaacctgccctaatattagggggaaaacacccggctgagggcaattttttac

SEQ ID NO: 40585 - DNA, 136 bp, Macaca Mulatta
acctttggcttttcattggcttgggatgggatatctgggatctacctcaaactgtctgaggaccataaagggaaatcatgtggcctatgtggaaactacaatgacattcaatctgatgatttcataattctgcaag

SEQ ID NO: 40586 - DNA, 650 bp, Macaca Mulatta
  misc_feature (1)...(650): n = A,T,C or G
tggtcactgggtttctgagaaaatatgataagccattctgtaatangctgtttgcatctcgattatctctagtactgaactaattaagtaataaaggatatgcttaagttctttctatggtcaagtgaagagtaatctgtgatagtatagagcactttgatattctgacatcatcctaagaaaaatgttacaaggtctcttatgcctaatatctatctattcctctacctgtgtctgtacctggtttcaaagtaattttcacagccaacctagctcttttcactaaaaagaggaaagacactgaattttaaaacaattagatattatttttacatgaaaaatattggttaaaattataatttggcctttgtatttttcaatgacatgcatatttgaattctgttttttcttgactacctaagaagtgactctggagacttagaaagagaaagaaagggtgtaggtttttgaaagtatgtcaaaagccttggggttcgtgtatgatcagaatttcaatggaggttgaaatgagtttaaatgcatagaaggcgaacataaaaatcttgtctaatttctgtcatgttgtacttttttgagtcactctgatgtcttattcaaatctgctttgctcttgagctttgtgctaccat

SEQ ID NO: 40587 - DNA, 426 bp, Macaca Mulatta
ctattgtcagaaattgtgagaatatcagcatcaagtaccactgttccggcaacgcacacttccacctcttctttgggcccagagagttatgtctcatcacagtcaaatgataagcacacatcggacacacatccaaccactcctagtgctcatgaagtttcggaattttctggtagaacccattaccctccagaagaggacaacagagaacgggtacaacttgtccatgaattctctgaactagtgatagcactcattatttttggggtgatggctggtgtcattggaacgatcctctttatttcttactgtattcgccgactgagaaagaaaagccaatctgatgtacaacctctccccccacctgacgcagaggtgcctttaagctctgttgaaatagaaaatccagaggaaactgatcaatcg

SEQ ID NO: 40588 - DNA, 618 bp, Macaca Mulatta
  misc_feature (1)...(618): n = A,T,C or G
ggatccggtttcatctctngcagcgaagatgtcatcncgtggaaccaacccccggatttacttttccattgagtatccttttctccacctttttgtactgtggggaggctgcatctgctttgtacatggttagaatctatcgaaagaatagtgaaacttactggatgacatacaccttttctttctttatgttttcatccattatggtccagttgaccctcatttttgtccacagagatctagccaaagacaaaccgctatcattatttatgcatctaatcctcttgggacctgttatcagatgtttggaggccatgattaagtacctcacactgtggaagaaagaggagcaggaggagccctatgtcagcctcacccgaaagaagatgctaatagatggcgaggaggtgctgatagaatgggaggtgggccactccatccggaccctggctatgcaccgcaatgcctacaaacgtatgtcacagatccaagccttcctgggctcagtgccccagctgacctatcagctctatgtgagcctgatctctgcagaggttcccctgggtagagttgtgctaatggtattttccctggtatctgtcacctatgggggcgacc

SEQ ID NO: 40589 - DNA, 164 bp, Macaca Mulatta
acaaactatagaatgggaggactgcaaactcatcacatgtattgatgccccttttgatcccagaacaagtattctcctggggagggctagggagggcgtatggataccagtttccttacacggtccaggggagtcttctccctctattcacatagtcaaggaag

SEQ ID NO: 40590 - DNA, 706 bp, Macaca Mulatta
  misc_feature (1)...(706): n = A,T,C or G
gggggccaacaggagctggtaatcaggatggcagtgaggcacacacttgcttgcagaagaacaggcctaggtttttaagaagccacaaaagtatctttggatgattaggatctaaggggccaacagctttgcaataacagcataaatattgtgggctggatggacaggcaccaaatggggacattccatcctgctgtgtgatgagaaagctgccacttttgaggccttccaaaacaaataaacactctgtatgccagaaggaaaagcccagtgaagacctattccaactggagatggtgaatgtcatttcttcaagaagctgagatccagctggtagtgccaggaatatgaagggagaatgaaacaaaactgctctgctcaggggacttggaaaggaaattgaaaagctaaagaaattgagacaaactacataagttgctgaanaatcacaggaataattagctgaggaagagcctcaaatctaccagaactgtctgacttttgatcctgagctcatgcgtatccagtgaggttgcatgggtttgtgaagactccaacagtatgattgcngacctcacttgccagcctctgcctggatccaggacattgcctgactgtatgattgcttnaagccgctagtctacaagatttccttttctcttccttataaacaaaatgactgcagctgaataaaggggcccattgc

SEQ ID NO: 40591 - DNA, 767 bp, Macaca Mulatta
  misc_feature (1)...(767): n = A,T,C or G
ggagagaatccactttatccatctttgcatctagctcatagcaagtgcttaataagtgatctggaataaagcaaaagagattttctctatcaagttgtgattgcccaggggcaatcacaaacagagaagtgctgccttctctgtttttttaggtgcaggtgtatttttgtctatataaccaagatcagtccttccgttcagagtagcccctctttgagtagcgctgatacctaatttttgatgttgataatttttctgctctggagtctgctgcctaccacccttcagacatattatgctaattaaattatggcatattttaccctagcacaccccagagtaggccctccgcagatatttgctaaatcaaatagttagattttagcatctggaagatttggtagacttcttggtcttataagcaacttttctttttaaatcttatttccaaactctggggatgtactttatttgtacaactcttgatagattacactatgtactttgaatacatagtatttgttttcattcaatttagatgcttttatccatttgatttcatgtgccagattnnnnnnnnnnnnnnnnnnntggagttcttgttcttctaggcttctcactatatattctagattctcagtctataatagaaaccttttaaaaattgtttttggggctgggtatgggtggctgacacttgtaaacccagcactttgggaaggccaagacaggtggaattgccttgagttcagggagtttgaagaccg

SEQ ID NO: 40592 - DNA, 393 bp, Macaca Mulatta
agctcctgaggtgctggccagtgcacccccactcccaccctcaaccgcggcccctgtaggccaaggcgccaggcaggacaacagcagcagcgcgtctccttcaggtgggagcagctctttgagggcacctcatttctggtgtgctctgtgcactcaggtggattttctgcgggtttgttcagtgatcagaaatcctcgattttttgaatagttcccatttcaaatatcttgttctacttggtccataaaatagtagttttcaagctgtagagctctggaattctcacctctagtgcgcagggagcctgaacaagtgaggctctgggttccccattcctaattaaaccaatggaaagaaggggtctaataacaaactacagcaacacatttttc

SEQ ID NO: 40593 - DNA, 497 bp, Macaca Mulatta
gggtgggaacacctttttcaggtcctctaggacagttaacttgagtgccttctccaaaatactggggctgattgcccccctgacggaagctgctggcacagaggtacacggctgagtcccccagctccaaggagctcatgttcagttcagaatgatagtcactgaactgttgagctgagaatcgatcagggatgcttcctttttctctctgcatcttttgataaaacgaaatgaggaactgggggccctgacctggaccctgctggtaccagtagacagtgtcgtgttcagggagaggatagcattgcagagtggctgtttccctcttttctttgatcaggtgccttggggactggatgactccagcagccactgaacctgctcccaggagacaaagcatgacatggcagaggagcctggtgttccaggcagagtcaggcaggtcaggaccaagcatctcccttctcagggcgccggtttcctggggtgagaaagcc

SEQ ID NO: 40594 - DNA, 990 bp, Macaca Mulatta
  misc_feature (1)...(990): n = A,T,C or G
tgaccttaatatcgtctttgaaaatgttaattgagaaacctgttaacttatatattatgaattggcacattgtattacttactgcaagaagatatttcattttcagcacagtgcaaaagttctttaaaatgcatatgtctttttttctaattccgttttgttttaaagcacattttaaatgtagttttctcatttagtaaaagttggtctaattgattatgaagcctgactgattatttttttccttacagtgagacattgaagcacacattttatatcacataaggtactatgttcttgaaatattggaatgaattcttttctgaaagtgtttatgatctacatatgatgtattaggtcacaaagcttttatctgaggtgatttaattaacttcctgattggagtgtgtaagctgagcgatttctaataaaattttagttgtactcttttaatagtcatagtgaagcaggtctagaaaataagcctttggcagggaaaaagggcaatgttgattaatctcagtattagttaaaccacattaatctgtatcccattgtctggcttttgtaaattcatccagttcaagactaagtatgttggttaataggaatnnnnnnnnnnnnnnnnnnctaaatgtgaaaaaataatcactgagctaattaatattggtcattaaatttaaaggatggaaatttatcatgtttaaaaattattcaggcactcttaaaaccacttaaacagcctccagtcataaaaatgtgttctttacaaatatttgcttggcaacactacttgaaataaataaaactttgttttttaggagaaaattattctgtaatttcagtgtcactaatttatattgggtctttccctctgatttttttcaaggttagtgattttttttgtatacgaatttaatcccaaatgttaatgacatttcagaaaatcatttgaaaacacgttagatatctggttataatagtggtgta

SEQ ID NO: 40595 - DNA, 113 bp, Macaca Mulatta
aggtgatcacagaagccagtgccggccaggaccaacacctcatccgcacacccttcgcaggagtggacgacttcttcattcccccaacgaacctcatcatcaaccacatcagg

SEQ ID NO: 40596 - DNA, 3104 bp, Macaca Mulatta
  misc_feature (1)...(3104): n = A,T,C or G
agctagaagaatatcagcagaggaacagccctgctgttccagcaggagcgaagacaaaaaagaagaaaactgtcagtagccctgagacaaccacttctggtggttgccactcacctggggannnnnnnnnnnnnnnnnnnnnnnnnnnnnnnnnnnnnnnnnnnnnnnnnnnnnnnnnnnnnnnnnnnnnnnnnnnnnnnnnnnnnnnnnnnnnnnnnnnnnnnnnnnnnnnnnnnnnnnnnnnnnnnnnnnnnnnnnnnnnnnnnnnnnnnnnnnnnnnnnnnnnnnnnngacaatcaacatcctcacattggaaaaggcagacttgaagaccaccctttaccatactaaacgtgccgccagacacttcgaagnnnnnnnnnnnnnnnnnnnnnnnnnnnnnnnnnnnnnnnnnnnnnnnnnnnnnnnnnnnnnnnnnnnnnnnnnnnnnnnnnnnnnnnnnnnnnnnnnnnnnnnnnngtcctcgaaccgcagtgaagcagtcctccagcggcagttacggcagaccttaaaggagcgggcgctgctgaacgcacacgtgacacaagtgnnnnnncaggtgacagagtcattgaaacaagtccagctgcagagagacgaatatgcccaacatataaaaggagagagggcccggtggcaggagaggatgcggaaaatgtcgatggaggnaggctcgcacattgaaggaggagaagaagcgtgacatacatcagatacaggagctggttaggagcttgtctgaactcaaaaaccagatggnnnnnnnnnnnnnnnnnnnnnnnnnnnnnnnnnnnnnnnnnnnnnnnnnnnnnnnnnnnnnnnnnnnnnnnnnnnnnnnnnnnnnnnnnnnnnnnnnnnnnnnnnnnnnnnnnnnnnnnnnnnnnnnnnnnnnnnnnnnnnnnnnnnnnnnnnnnnnnnnnnnnnnnnnnnnnnnnnnnnnnnnnnnnnnnnnnnnnnnnnnnnnnnnnnnnnnnnnnnnnnnnnnnnnnnnnnnnnnnnnnnnnnnnnnnnnnnnnnnnnnnnnnnnnnnnnnnnnnnnnnnnnnnnnnnnnnnnnnnnnnnnnnnnnnnnnnnnnnnnnnnnnnnnnnnnnnnnnnnnnnnnnnnnnnnnnnnnnnnnnnnnnnnnnnnnnnnnnnnnnnnnnnnnnnnnnnnnnnnnnnnnnnnnnnnnnnnnnnnnnnnnnnnnnnnnnnnnnnnnnnnnnnnnnnnnnnnnnnnnnnnnnnnnnnnnnnnnnnnnnnnnnnnnnnnnnnnnnnnnnnnnnnnnaacaacgagaacaaaagcacactgcagttggagcagcaagtaaaggagctgcaggagaagctnnnnnggagcacctagaagctgccaaccaggagaaccaacagctagagacccagttgagtctcatggctatccctggacaaggnnggagatgaaggaggacatcgagacagcgaggaggaggaggcacctcggcccatgccacacatcccagaggacctggagtgccaggaggccannnnnnnnnnnnnnnnnnnnnnnnnnnnnnnnnnnnnnnnnnnnnnnnnnnnnnnnnnnnnnnnnnnnnnnnnnnnnnnnnnnnnnnnnnnnnnnnnnnnnnnnnnnnnnnnnnnnnnnnnnnnnnnnnnnnnngggcagtgccaaacacttgccaccaggatatggaggatgtcattaggctggcccagaacgaggaggagatgannnnnnnnnnnnnnnnnnnnnnnnnnnggtgttgccgcttgtgggcgaccacgagggtcatggcaaattcttcgccactccccagaaccctgctgatgagcccgctccaggggctccagcccccgaggaacttggggctgcnnnnnnnnnnnnnnnttttctgaggtgagcctggacaacagcgtggagcccacaccaggagaggccaggaagggttctccccatgacaaccccactgcagagcagatcgtgcacctgcttcctgtaatgcaggacacccaggagcacccaggcttggccatcaaaccctgcatgccattcttttaccgggcatccgagaacagggagataaacatcatcatcatctaagagctggtcaagaaattgaaaaacaacaacaacaaaaagttatggcgttaatctcgtacacgattcatttacttcatctgaatgttagagccactcannnnnnnnnnnnnnnnnnnnnnnnnnnnnnnnnnnnnnnnnnnnnnnnnnnnnnnnnnnnnnnnnnnnnnnnnnnnnnnnnnnnnnnnnnnnnnnnnnnnnnnnnnnnnnnnnnnnnnnnnnnnnnnnnnnnnnnnnnnnnnnnnnnnnnnnnnnnnnnnnnnnnnnnnnnnnnnnnnnnnnnnnnnnnnnnnnnnnnnnnnnnnnnnnnnnnnnnnnnnnnnnnnnnnnnnnnnnnnnnnnnnnnnnnnnnnnnnnnnnnnnnnnnnnnnnnnnnnnnnnnnnnnnnnnnnnnnnnnnnnnnnnnnnnnnncagataaaatttgcttatgttctgctattatatttgatcgattcctaatcacagtgagctcttcattagctcaatatgtggtttgccctcaagtgcacactgtttcttactttgtaatatgccactgtgagtactgacatttagagttgtttaaaggccaagaactggaaacagcctttcccctattttctgtgtattggggatgggagtgataacattttggggagctttttaaatctcacagaagaggaaagtggcctgctctggcaggtgtgtgcaggatagagtgtgtttcatttgttctggtgccaggaatgagcgcggttctatggtagttcccttaggatttgtacgtgctctgggctcatgaagatatttcagcatgagctgcagcggttggactctttctcaatgacctaaaaagggattttttcctaggaatgaaaggctcccatcattgactgtggatgcggaaaaccttttctagcttagagcatttatatctactatacattttaaagtcacagttcatgttacctgttttaatcacatgactacatgtcccagtacacaaaagggcactgcttggcattc

SEQ ID NO: 40597 - DNA, 810 bp, Macaca Mulatta
  misc_feature (1)...(810): n = A,T,C or G
tnnnnnnnnnnnnnnnnnnnnnnctcaaaattaaatgttggngaaatttaattcannnnnnnnnnnnnnnnnnnnnnnnnnnnggccctggnttaaaagattaaaggattagctggttttaaccagcaacaaattccattagtttggctagatttagggcagttcccacattcaaaccttattttctagcattttgttttaaggaaggttacagaaaaaaatgttatccccattttgggagtagagaatttgagggtacaaaggaggttaaatggcttggtttaaaatcataatactagtaaagggaaatgctgacttcaaactctaaacaccctatcaaccaattaaaaaaatgggcaaaagacttcaacggtcatttctccaaaaacaacatacaaatggccgataaacacataacatgctcaacacatcactaatcattagagaaatgcaaaccgaaaacacagtaagataccacctcacacccataaaaatagnnnnnnnnnnnnnnnnnnngaaataacaagtgttgatgaggatgtggaaaaaatggaacacctctgcaatgcctttgggaatgtaaaatagtgcagccactatggaaagcagtatggaaattcctccaaaaattatacttcgaattaccatatgatccagcaattccacttctgggtatacacccaaaggaacttaaagcagggacttgatgagagatgtgcagaccaatgtttatagcagcattattcacaataaccaaaaggtgaaaacaacccaaataccatttacagattaatacataaacaaaatgcc

SEQ ID NO: 40598 - DNA, 945 bp, Macaca Mulatta
gggagcatttctcattgtaaagattgcctttgttctgtctaaagaagtctgtggagaaatcccaaagacttttcctacgtactaggcattttattttggttgacttacaaactcttcttaatcattactaatctcggtttttttgtggtgtagtggaaagagaaacagttctagtttctgcctctgattagccgcacagccttgaacaaatcacatttcatctttgaacttacctctactgttacactaggcgactcacatttgaggacttttctcgggtatcttgagggtttgtgatcctgaatccttaaacagtgtttttttgttacacaggatgcttttttcggggggtgaccagtacagatgtgccagttagttttattagtgggatcccaaatccagagcagtgcagtggtgattggtcagtggctcaccaggcagctaagaagtctgaggcagcagcccagacatgtgtagtaggggcagctagagggagaacggatgggaaagggagcaagaggcagacagctcagcaagggaagagcagactcggaaaaaggaggtctggctggaggagtgaggggcagcttaagtttggggagggtagaaacaccgtttccttggcaactggagtgcagtatgagctgggtatcacctgggctgtgaacatactggctttgcttgtaaatgcttgaaaaggcagtgggtacccttcattttacagctcagtaagccaagtacattttcttatttaaatgacaactttggtgctttaaaatgaggtaccacttttttaaagctagcctgtgtcaagtttaaagaaagaaatcagcacttttttttctcccagaaaaatgttattgtccaaacactaattcctttcccaatcctaaaggtttttacaggtggaaaaaaaatcaacctccctttgaaaaggaatgccga

SEQ ID NO: 40599 - DNA, 926 bp, Macaca Mulatta
  misc_feature (1)...(926): n = A,T,C or G
ggatgccccagttagacacatcgacatgattcaccactattatggcgatgctccctacactatatcttattatacagctaaagctactaaacacgaaccactaccaaccacctcttacaaaaaaccccacccttcaattccacaacatccgnnnnnnnnnnnnnnnnnnnnnnnnnnnnnnnnnnnnnnnnnnnnnnnnnnnnntttaaatcaacccgctacaatccccattatcctattccctaccctactaatcttannnnnnnnnnnnnnnnnnnnnnnnnnnnnnnnnnnnnnnnnnnnnnnnnnnnnnnnnnnnnnnnnnnnnnnnnnnnnnnnnnnnnnnnnnnnnnnnnnnnnnnnnnnnnnnnnnnnnnnnnnnnnnnnnnnnnnnnnnnnnnnnnnnnnnnnnnnnnnnnnnnnnnnnnnnnnnnnnnnnnnnnnnnnnnnnnnnnnnnnnnnnnnnnnnnnnnnnnnnnnnnnnnnnnnnnnnnnnnnnnnnnnnnnnnnnnnnnnnnnnnnnnnnnnnnnnnnnnnnnnnnnnnnnnnnnnnnnnnnnnnnnnnggcaacccactctcatccatgtatacatcgaacatcgctactatcaacagtactcgcgcatacgaatcgcgcctcacnncacgacgactaacacgcttacagcctctnnnnnnnnnnnnnnnnnnnnnnnnnnctcatcccttnnntgttntcggnttaacctatcatgcaaattgagaatgactctatcaattcactcacactatgtgatgtcggctctactccctcttattcgcacagacaacatcatcccgcctcatcaacaccacctaatctaaaatngattaaatnnntcatagacaccccatatataaaaatgcatcttaaactttaccgcaaaagaagttcatttttcgcccgc

SEQ ID NO: 40600 - DNA, 801 bp, Macaca Mulatta
  misc_feature (1)...(801): n = A,T,C or G
ggcgtggtggctcacannnnnnnnnnnnnnnnnnnnnnnnnnnnagtgggtgggtcacctgtnnnnnnnnnnnnnnnnnnnnnnnnannnnnnnnnnnnnnnnnnnnnnnnnnnnnnnnnnnnnnnnnnnnnnnnnnnnnnnnnnngcatnnnnnnnnnnnnnnnnnnnnnnnnnnnnnnnnnnnnnnnnccannnnnnnnnnnnnnnnnnnnnnnnnnnnnnnnnnnnnnnannnnnnnnnnnnnnnnntggggcaacaagagcaaannnnnnnnnnnnnnnnnnnnnnnngggggcagattcctagctctttcccgagtctacttcaaaagaacttgagtaaagcctgggcatgcatgcttaaggagtactccaggggattctgagcaggtggtctggagactacacttttttggaacattcttctggaaagctttcatcctttatcaagggagacacctaggttcaccagcttcttccagcaggattctttctcccttgtcttctatagtacactcgctgtgaaagcagggtaagttttgctgctgttgtttattcagggaaaaggggatgaggaagaaaccatatttaaaggagaaaaggaaaatgtggacatttttgaagagctccctccaattattaggttgcaatttaaagtatgaaaatctttacccttctttttaaagttgtgggactttagggactattaaccaccccaattatcccactaaaataaatgcccttttcttccacctgaaaaccccaaaagctccttttaagggttttctcaaaacctaatt

SEQ ID NO: 40601 - DNA, 6175 bp, Macaca Mulatta
  misc_feature (1)...(6175): n = A,T,C or G
caggagcttaccaggccggctggctctgagctgcggttactgtgtccaggctccgggttctcannnnnnnnnnnnnnnnnnnnnnnnnnnnnnnnnnnnnnnnnnnnnnnnnnnnnnnnnnnnnnnnnnnnnnnnnnnnnnnnnnnnnnnnnnnnnnnnnnnnnnnnnnnnnnnnnnnnnnnnnnnnnnnnnnnnnggttcgagaacaagaaagagatatcgccttacagataagagaagacataaaacagaggagaaatcaacaatttacacgtttggcagaggagctaagggcagaatgggaagaatcacaaactcagaaaatacagaacttggaaaaactgtatttggcccgtttgagaagtatgggagagggacatcgacaggccaaagaaaatgnnnnnnnnnnnnnnnnnnnnnnnnnnnnnnnnnnnnnnnnnnnnnnnnnnnnnnnnnnnnnnnnnnnnnnnnnnnnnnnnnnnnnnnnnnnnnnnnnnnnnnnnnnnnnnnnnnnnnnnnnnnnnnnnnnnnnnnnnnnnnnnnnnnnnnnnnnnnnnnnnnnnnnnnnnnnnnnnnnnnnnnnnnnnnnnnnnnnnnnnnnnnnnnnnnnnnnnnagaacattgaagtaaaaagaacttctgcagtcaaaaccaatagttctacctaccaccatcttcacacttttgtgagcagagagacagacacaaaannnnnnnnnnnnnnnnnnnnnnnnnnnnnnnnnnnnnnnnnnnnnnnnnnnnnnnnnnnnnnnnnnnnnnnnnnnnnnnnnnnnnnnnnnnnnnnnnnnnnnnnnnnnnnnnnnnnnnnnnnnnnnnnnnnnnnnnnnnnnnnaatcaggagaaactaatgaaagaactcaaacagctacagcaagaggacctggcacgtaggagacagactgtagcacaaatgccaccacaactagttgaacttccatacaaacgcagtgaactgaaagaagactggcagagagaactggaatttgcctttgaagatatgtacaatgcagacaggnnnnnnnnnnnnnnnnnnnnnnnnnnnnnnnnnnnnnnnnnnnnnnnnnnnnnnnnnnnnnnnnnnnnnnnnnnnnnnnnnnnnnnnnnnnnnnnnnnnnnnnnnnnnnnnnnnnnnnnnnnnnnnnnnnnnnnnnnnnnnnnnnnnnnnnnnnnnnnnnnnnngttcccttggtaatgaagacccaacagattccttcaaaagttctttttaaaaaattattaaataagatccgaagccaaaaatctctctggacaattaaatccatgtctgaggatgaaagtgaaatgattacgactgttagtgaaattgagagtaaagcaccaacggttgagtcaggaacaattgccagtgaagagagaacattatcctctgggcaggaacaannnnnnnnnnnnnnnnnnnnnnnnnnnnnnnnnnnnnnnnnnnnnnnnnnnnnnnnnnnnnnnnnnnnnnnnnnnnnnnnnnnnnnnnnnnnagaaataaatgagactctgcctatcacaactgtagctcagagttcagttctacttcatcctcaagaagaagcagccaggattagaatgtcagcaagacagaaacaggtaannnnnnnnnnnnnnnnnnnnnnnnnnnnnnnnnnnnnnnnnnnnnnnnnnnnnnnnnnnnnnnnnnnnnnnnnnnnnnnnnnnnnnnnnnnnnnnnnnnnnnnnnnnnnnnnnnnnnnnnnnnnnnnnnnnnnnnnnnnnnnnnnnnnnnnnnnnnnnnnnnnnnnnnnnnnnnnnnnnnnnnnnnnnnnnnnnnnnnnnnnnnnnnnnnnnnnnnnnnnnnnnnnnnnggttacacaggcagtctgttgaaacagccaggaagcgattacttgaatatcaaactatgttaaaaggaaggtgcccatcgatgtcagctccatcactgataactgattctgtcatatcagtgccgtcatggaaatctgagagaccaactgctatatcagagcattgggatcaaagtcagagactcaagttgagtcctgacaaataccaacccatacaacctgtacagacctccaaattagaacaagatcattttcaagtagcgaaacaaaatcactttccacaaagacaggtggaaacagcagaaacatcaggagcttcagatactttaaccaatcagtctttagaatcacaagaacatctgaggcaattctctcagactgaaacacaacagagagactataaattggtccccgaaaattctgagacactttcaagggctttgtcacatgacaggcggctaatatcacaggatgctagaaaaatatctgaaacatttagggcaacaacttttcaaagtttagattcccaacaattgttctcagagaatagtgaaaatatatcttcccatctaactgaaccttcttcatttgtaccactggtacctcagcattcttttagttctctgcctgttaaagttgaatcaggaaacattcaagaacccttttcagccatgagcaaaagtacagtttctacaagccattctataatcaatcaaatgtatgataggcctttactaccctcagagaatatcacagtccagcaaggtaatatgaaggctctccaagaacagttagacctacagaagaaagttcttcaggcaagacaggaagctcaggaacagttgcttttgtgcaaacagaaagaattggaacagcaaactggcctctcggtattccttcccttggtaactccagatttatctgctttattgccttctgccaaagcagatttggggagaacgaaggaatcttcaccaaccaagaataatactgcagtttcctcagaccatcatgtgatctcacaacttcaggataggcttttgagtctttcacagcctatcctatcacagcaaaataattttaaatttctccaagagcagttgaatattcagaaggatagccttcaggctaggcgagaagcccaggaagtattgtgtgtacataaacagagtgaattagatggaagagtatgttctgaacaggctgagccctcttctttcccatttcaggtagctcagcatgcatatacttcactaccatctactgatacgaaatnnnnnnnnnnnnnnnnnnnnnnnnnnnnnnnnnnnnnnnnnnnnnnnnnnnnnnnnnnnnnnnnnnnnnnnnnnnnnnnnnnnnnnnnnnnnnnnnnnnnnnnnnnnnnnnnnnnnnnnnnnnnnnnnnnnnnnnnnnnnnnnnnnnnnnnnnnnnnnnnnnnnnnnnnnnnnnnnnnnnnnnnnnnnnnnnnnnnnnnnnnnnnnnnnnnnnnnnnnnnnnnnnnnnnnnnnnnnnnnnnnnnnnnnnnnnnnnnnnnnnnnnnnnnnnnnnnnnnnnnnnnnnnnnnnnnnnnnnnnnnnnnnnnnnnnnnnnnnnnnnnnnnnnnnnnnnnnnnnnnnnnnnnnnnnnnnnnnnnnnnnnnnnnnnnnnnnnnnnnnnnnnnnnnnnnnnnnnnnnnnnnnnnnnnnnnnnnnnnnnnnnnnnnnnnnnnnnnnnnnnnnnnnnnnnnnnnnnnnnnnnnnnnnnnnnnnnnnnnnnnnnnnnnnnnnnnnnnnnnnnnnnnnnnnnnnnnnnnnnnnnnnnnnnnnnnnnnnnnnnnnnnnnnnnnnnnnnnnnnnnnnnnnnnnnnnnnnnnnnnnnnnnnnnnnnnnnnnnnnnnnnnnnnnnnnnnnnnnnnnnnnnnnnnnnnnnnnnnnnnnnnnnnnnnnnnnnnnnnnnnnnnnnnnnnnnnnnnnnnnnnnnnnnnnnnnnnnnnnnnnnnnnnnnnnnnnnnnnnnnnnnnnnnnnnnnnnnnnnnnnnnnnnnnnnnnnnnnnnnnnnnnnnnnnnnnnnnnnnnnnnnnnnnnnnnnnnnnnnnnnnnnnnnnnnnnnnnnnnnnnnnnnnnnnnnnnnnnnnnnnnnnnnnnnnnnnnnnnnnnnnnnnnnnnnnnnnnnnnnnnnnnnnnnnnnnnnnnnnnnnnnnnnnnnnnnnnnnnnnnnnnnnnnnnnnnnnnnnnnnnnnnnnnnnnnnnnnnnnnnnnnnnnnnnnnnnnnnnnnnnnnnnnnnnnnnnnnnnnnnnnnnnnnnnnnnnnnnnnnnnnnnnnnnnnnnnnnnnnnnnnnnnnnnnnnnnnnnnnnnnnnnnnnnnnnnnnnnnnnnnnnnnnnnnnnnnnnnnnnnnnnnnnnnnnnnnnnnnnnnnnnnnnnnnnnnnnnnnnnnnnnnnnnnnnnnnnnnnnnccacagcattcattcaccttatcacctcatactgaatctgaaagaaaccaagaaccatgttcaattaacagtgattatatcctatcctcaggtccctcagagataacattgcctgataggccgttgggcttatcacatcttgttttacctcaacaagataattcgattgcactcgaagaacacttgcatgcacagacagatttccttccttttattgagaaaacccagaaagaactggttttgtcacaaccatgtaaatttgaggaaaaggtatcttctgagcattttatccagtctcaccatggtgatttgcaggcacttcaacagcagttggttactcattaataaagccattcgctctatacatgaagtccaagaagaattgcttttgcaaagattaagtgaattggagaaaagagtatcatctgaacaagttagctcctcttcattcttatcccaggtagtactgcctgttgttgactctgaaagaacccagaagtctttcccaaccaaaagtaatgatactgttccctcaagtcatcctgagatcccaagattacaggatagacttttgagtttatcacagcctattctgcctcagcaagataatttgacagcacaattggatgcacaaagggaagtggtgtattcttatgagaaaccccaggaagaactgcctttaaacaaacaaagaaagttgaacaaaagtgaatctgctgagcatactatcccctctttgttgctacccaaggaaacagagcattcgtttattccactaccttttgcagaagctaaacccaacagcacttgcggaattggattcatcccagaatgaacatgcagctcccccaagtggtcctgtgatcccagggtttcaagatagacttctgagtttttcacagcctgtcttagctcagcaagataacttgggacttcagaagcagttggatctacaaagagaagttttgcattatagccagaaagcccaagaaaaattgcttgtgcagagacaaacagcattgcagcagcagatgcagaaacatgaagagactttgaaggatttctttaaagacagtcagnnnnnnnnnnnnnnnnnnnnnnnnnnnnnnnnnnnnnnnnnnnnnnnnnnnnnnnnnnnnnnnnnnnnnnnnnnnnnnnnnnnnnnnnnnnnnnnnnnnnnnnnnnttaggcatgcagataggaacaactctgatgatgatcatttggcttcagacgacactagtgccaagcaaagtggtnggtgagcatctggaaagagatctggggagaagatcctcaaaaccacctgtagcaaaagtcaagtgtggtttggacttaaaccagcatgaacttagtgcgatacaagaagtagagtcaccagcaagtggcagaacttctctactaggtaaannnnnnnnnnnnnnnnnnnnnnnnnnnnnnnnnnnnnnnnnnnnnnnnnnnnnnnnnnnnnnnnnnnnnnnnnnnnnnnnnnnnnnnnnnnnnnnnnnnnnnnnnnnnnnnnnnnnnnnnnnnnnnnnnnnnnnnnnnnnnnnnncagttaaggtgaaggaatctgttgttgaaaatcatgcagtgttaagttatgctgtggaggaagaacatacatatttgggtccggctaagaagccagatgataaggnnnnnnnnnnnnnnnnnnnnnnnnnnnnnnnnnnnnnnnnnnnnnnnnnnnnnnnnnnnnnnnnnnnnnnnnnnnnnnnnnnnnnnnnnnnnncagagtcattttcagagcacatggatgatagcaagcaagaatctactgccagtaaagaacaggaaacaaacataagttccatagttcctgcaacacaagatatttatcagtggcggaactcttcagacgttcata

SEQ ID NO: 40602 - DNA, 154 bp, Macaca Mulatta
aatgaaagaaaatgccctttatctttcaaatgattatagataaacataatattcttctttttttacaataccttatgattttgtatactaggctctagtattcagaattcattaaattatccatggtaaaaactaggtataaaaattatataat

SEQ ID NO: 40603 - DNA, 2976 bp, Macaca Mulatta
  misc_feature (1)...(2976): n = A,T,C or G
ggacacaaaggtcttgaaggccctaaaggcgaagttggagcacctggttccaagnnnnnnnnnnnnnnnnnnnnnnnnnnnnnnnnnnnnnnnnnnnnnnnnnnnagggagaagcaggtcgtacaggggcgcgaggccctgaaggtcctcaggggcagagaggtgaaactgggcccccaggtccagttggctctccaggtcttcctnnnnnnnnnnnnnnnnnnnnnnnnnnnnnnnnnnnnnnnnnnnnnnnnnnnnnnnnnnnnnnnnnnnnnnnnnnnnnnnnnnnnnnnnnnnnnnnnnnnnnnnnnnnnnnnnnnnnnnnnnnnnnnnnnnnnnnnnnnnnnnngggtgatccaggagttccaggtttcaaaggagaagctggcccaaaaggggaaccannnnnnnnnnnnnnnnnnnnnnnnnnnnnnnnnnnnnnnnnnnnnnnnnnnnnnnnnnnnnnnnnnnnnnnnnnnnnnnnnnnnnnnnnnnnnnnnnnnnnnnnnngggtgctcctggcaatcgtggttttccaggctctgatggtttacctgggccaaagnnnnnnnnnnnnnnnnnnnnnnnnnnnnnnnnnnnnnnnnnnnnnnnnnnnnnnnnnnnnnnnnnnnnnnnnnnnnnnnnnnnnnnnnnnnnnnnnnnnnnnnnnnnnnnnnnnnnnnnnnnnnnnnnnnnnnnnnnnnnnnnnnnnnnnnnnnnnnnnnnnnnnnnnnnnnnnnnnnnnnnnnnnnnnnnnnnnnnnnnnnnnnnnnnnnnnnnnnnnnnnnnnnnnnnnnnnnnnnnnnnnnnnnnnnnnnnnnnnnnnnnnnnnnnnnnnnnnnnnnnnnnnnnnnnnnnnnnnnnnnnnnnnnnnnnnnnnnnnnnnnnnnnnnnnnnnnnnnnnnnnnnnnnnnnnnnnnnnngggagaacgaggaaatcccggggaaagaggagaacctggaattactggactccctggtgagaagggaatggctggaggacatggtcccgatggcccaaaannnnnnnnnnnnnnnnnnnnnnnnnnnnnnnnnnnnnnnnnnnnnnnnnnnnnnnnnnnnnnnnnnnnnnnnnnnnnnnnnnnnnnnnnnnnnnnnnnnnnnnnnnnnnnnnnnnnnnnnnnnnnnnnnnnnnnnnnnnnnnnnnnnnnnnnnnnnnnnnnnnnnnnnnnnnnnnnnnnnnnnnnnnnnnnnnnnnnnnnnnnnnnnnnnnnnnnnnnnnnnnnnnnnnnnnnnnnnnnnnnnnnnnnnnnnnnnnnnnnnnnnnnnnnnnnnnnnnnnnnnnnnnnnnnnnnnnnnnnnnnnnnnnnnnnnnnnnnnnnnnnnnnnnnnnnnnnnnnnnnnnnnnnnnnnnnnnnnnnnnnnnnnnnnnngtgctacaggatttcctggttctgctggcagagttggacctccaggccctgctgnnnnnnnnnnnnnnnnnnnnnnnnnnnnnnnnnnnnnnnnnnnnnnnnnnnnnnnnnnnnnnnnnnnnnnnnnnnnnnnnnnnnnnnnnnnnnnnnnnnnnnnnnnnnnnnnnnnnnnnnnnnnnnnnnnnnnnnnnnnnnnnnnnnnnnnnnnnnnnnnnggtccagatggcccccctggtccagctggaacgactggacagagaggaattgttggcatgcctgggcaacgtggagagagaggcatgcccggcctaccaggcccagcggnnnnnnnnnnnnnnnnnnnnnnnnnnnnnnnnnnnnnnnnnnnnnnnnnnnnnnnnnnnnnnnnnnnnnnnnnnnnnnnnnnnnnnnnnnnnnnnnnnnnnnnnnnnnnnnnnnnnnnnnnnnnnnnnnnnnnnnnnnnnnnnnnnnnnnnnnnnnnnnnnnggtgatcgtggagaccctgggcctgcaggtctgccaggctctcagggtgcccctggaactcctggccctgtgggtgctccaggagatgcaggacaaagaggagatccgnnnnnnnnnnnnnnnnnnnnnnnnnnnnnnnnnnnnnnnnnnnnnnnnnnnnnnnnnnnnnnnnnnnnnnnnnnnnnnnnnnnnnnnnnnnnnnnnnnnnnnnnnnnnnnnnnnnnnnnnnnnnnnnnnnnnnnnnnnnnnnnnnnnnnnnnnnnnnnnnngtcctccaggcccagttggtccttcgggtaaagaaggaaaccctgggccacttgggccaattggacctccaggtgtacgaggcagtgtaggagaagcaggacctgaggnnnnnnnnnnnnnnnnnnnnnnnnnnnnnnnnnnnnnnnnnnnnnnnnnnnnnnnnnnnnnnnnnnnnnnnnnnnnnnnnnnnnnnnnnnnnnnnnnnnnnnnnnnnnnnnnnnnnnnnnnnnnnnnnnnnnnnnnnnnnnnnnnnnnnnnnnnnnnnnnnnnnnnnnnnnnnnnnnnnnnnnnnnnnnnnnnnnnnnnnnnnnnnnnnnnnnnnnnnnnnnnnnnnnnnnnnnnnnnnnnnnnnnnnnnnnnnnnnnnnnnnnnnnnnnnnnnnnnnnnnnnnnnnnnnnnnnnnnnnnnnnnnnnnnnnnnnnnnnnnnnnnnnnnnnnnnnnnnnnnnnnnnnnnnnnnnnnnnnnnnnnnnnnnnnnnnnnnnnnnnnnnnnnnnnnnnnnnnnnnnnnnnnnnnnnnnnnnnnnnnnnnnnnnnnnnnnnnnnnnnnnnnnnnnnnnnnnnnnnnnnnnnnnnnnnnnnnnnagtttgcttatggagaccaccagtcacctaatacagccattactcagatgactttcttgcgccttttgtcaaaagaagcctcccagaacattacttacatctgtaaaaacagtgtaggatacatggatgatcaagctaagaacctcaaaaaagctgtggttctcaaaaaggcaaatgacttagatatcaaagcagagggaaatattagaatggcggtatatcgttcttcaagacacttgctc

SEQ ID NO: 40604 - DNA, 398 bp, Macaca Mulatta
ggtaagcgccccgtaaaatccatttctgcacgatgtgtcctgaggggagaggcggagccctgtagatgggacgggggcatctcagcccagatatttggccaatctcagaatgttcctggtccctggagggagggagaaaaaaaaacagctcctggagcacggagagcactggcatcttgctctccattccctctgttggcctccggatatctcccttaggctcctggacatgccatcccaaacattcccttatcctggcatttttaacaacagctgtgttctgagcccatcacctgcacaagctagcatctgacacgtaccagaagtttgtaagctcttggggaatgggtgcccatcaggggtggccagaacgggtgactttccctcgctgggaagtc

SEQ ID NO: 40605 - DNA, 646 bp, Macaca Mulatta
aagcttctcctgtgagaatcagtctagcagagacgccgatgtcagcacagccctaagcagtaagtcatattggcatttccacgtgaccgtgtttctatcccgtgtacagagagatccagagccctacgcaccaggacctgggggctcgccgcacagaacctagaagcacctgctgacactctccaactgatttttaaattattgttgcttggagatgaaaattacataagggactttatgcctgcattctagtgcaaaacatctgaagagctgtacacccacaagggtgactatttcccctgagtggccgtgttgtcccagtgccctggatcagtgtctcctgagtggatgacaggtcttcattctctatcttgaatgtattatggttactaatagttttataatggaggtctaagaattgaagttttgtgggagtttcaggacaaaggaaggctaaaagtttgtcaagaagttgcgcatattttggttacctatgagaagggttgtgaccgcgtacagtggcagctgttggccgcgctgcagaaatgagctggagctcatgcgttttcagctacatttttcatcactttatagtacgtccatcttgagtaaattaagccacaatttggtacctagggtctcaaaa

SEQ ID NO: 40606 - DNA, 902 bp, Macaca Mulatta
gacaggaggcgtcagtggaggtgtccactgtacagatgtcacaaatgcaagtaggactatgcttttcaacattcattctttggaatgggataaacaactctgcgatttttttggaattccaatggaaattcttccaaatgtccggagttcttctgagatctatggcctaatgaaagctggggccttggaaggtgtgccgatatctgggtgtttaggggaccagtctgctgcattggtgggacaaatgtgcttccagattggagaagccaaaaatacgtatggaacaggatgtttcttactatgcaatacaggccacaagtgtgtattttctgatcatggccttctcaccacagtggcttacaaacttggcagagacaaaccggtatattatgctttggaaggttctgtagctatagctggtgctgttgttcgctggctaagagacaatcttggaattataaagacctcagaagaaattgaaaaacttgctaaagaagtaggtacttcttatggatgctacttcgtcccagcattttcggggttatatgcaccttattgggagcccagcgcaagagggataatctgtggactcactcagttcaccaacaaatgccatattgcttttgctgcattagaagctgtttgtttccaaactcgagagattttggatgccatgaatcgagactgtggaattccactcagtcatttgcaggtagatggaggaatgaccagcaacaaaattcttatgcagctacaagcagacattctgtgtattccagtagtgaagccctcgatgcccgaaaccactgcactgggtgctgccatggcggcaggggctgcagaaggagtcaacgtatggagtcttgaacccgaagatttgtctgcagtcacaatggagcggt

SEQ ID NO: 40607 - DNA, 543 bp, Macaca Mulatta
  misc_feature (1)...(543): n = A,T,C or G
agggattacatcccgatttacaggtttgcagaacgtgggacacgtgggggggcaggcagagacggccggcagagccgggagggatggattctgtttnaagggcccactttggctgcagtggaaccagattatcgtctcacagtaattcagactttacattctttttttcattttcctatcacccagaaagacgttaaattcttaatgtaaatatgttcatttaactccctcttggtattttggaaaatggccgttttgaagtatctaactctaaacttaagaatttaagaactaaaacctaaatactaaaattaggtcctgcaatattcgtacagtcaaaatctcaagcagctattcccaataaggaatagctttctgaaggggtcccttctgcccacggacagcaaaacaggcttttctcaacgtaaggagggggcagacagaccgctgctcatctagggctacatttctgagtggaggggaagaggaagatggtgtgtcccagagtaagtactacagcaaacacgaatgaacgggaagtca

SEQ ID NO: 40608 - DNA, 242 bp, Macaca Mulatta
ttgctgtccacaaccaatcagactgatggtgggagagtctccgtttgcataatagtataattttgtaacttcaccctggcctctgattggttgctttctgcaaccactcagactgattgtgggctaccacttcagttacactgagtaagcataaagtgaccaatgggaaacttctagggggtatttggacccaagaagattctgtatctgggccctggagctgctgtgtgggtctgcttccc

SEQ ID NO: 40609 - DNA, 781 bp, Macaca Mulatta
  misc_feature (1)...(781): n = A,T,C or G
aaaaagagagcccatctagttgaaactaagtcccaagcttgttcaaacgtgggccacatgtggcccaagaacagctttgaatggtggcccaaccacaaattagtaagctttcttaaaatattatgagattttttgcaatattttttcnnnnnnnnnnnnnnnnnnnnnnnnnnnnnnnnnnnnnntgcttnnnnnnnnnnnnnnnnnnntgatgtcggttcactgcagcctccactcccagggttcaagtgattttctggccttagcctcctgagtagcttggattataggcacccgctaccatgctnnnnnnnnnnnnnnnnnnnnnnnnncgatgggatttcgccatgttggctnnnnnnnnnnnnnnnnnnnnncttcaagtgatctgcctgnnnnnnnnnnnnnnnnnnnnnnnnnnnnnnnnnnnnnnnnntatgccaggnnnnnnnnnnnnnnnnnngctcatcagctatcattagtgttagtgtattttatgtgtggcccaagacaatttttcttgcaatgtggcccagggaagccaaagattggacacccttgacttagtcaataaaaaataaattgttgctgttttaaacaactacattttggagtggtttgttatgcagcaatagataattaagacaaccattatgttttatattacttatgggttatgtcattgttctacatgtaagaactgtaacagaaaaaaactaggcaaagttctacattttctctggatttatcaattattggttaaaatgcaagtaggttggcc

SEQ ID NO: 40610 - DNA, 1598 bp, Macaca Mulatta
  misc_feature (1)...(1598): n = A,T,C or G
gccctgctatggatggaagccggaggacccccgctccctgagcagccccctcctctcccctggtgctgatcagaggtcctcgggcggcatcggtcaaagcaagggagcactcactttggagtcgctcacgaccaggacgcagagaagcaggtgtgccagcagggctctcatggtggtgaggtcggggcgctagacggcggttctgcaaaggaaagagaagtcagggcaagaggcggaggagcgggaaggcgggccaggctggcgactgcagcgcaagggaggtgcccgcggtgaccaggctccccagccccggctgtctctctcctctctgggctccggactcccgggcagcctggaccggcacccgcgggggacgcccgggagcggccgcggtgactccgtgtagccgccagggagccggggcagcccggagctggagaggcagatgctcgggaactggggccaccacgcatccggcccggggatctcgataccgcgacactcaccgctggctgcggcaggaaggcgcgagccggcgctgcggggacaggtggaccctgagctggggtccggggctgcagtctccgcggcgtcctgcgacccgcggcgcctgctctatatcagggnnnnnnnnnnnnnnnnnnnnnnnnnnnnnnnnnnnnnnnnnnnnnnnnnnnnnnnnnnnnnnnnnnnnnnnnnnnnnnnnnnnnnnnnnnnnnnnnnnnnnnnnnnnnnnnnnnnnnntctccagcggaggggacccaacagcgtctgtactgaggaattgagaggcttgtaaattctccgtgcttcctcccatgaacctggcccggggcccgccccagtgcacggagtccccgaattgcagagaggagagaaggcgcacgggagactctctacctcgcccagctctgaagcctcctggggtcccctaatcagttcttctccaacctctccctgctgggccccaacttgcctaagagggcctcagacccccttgcccgcagctgatggagctgtgaagtcttcatcaacgcgacaaatgtaggaggcacactctcccagaaacacagacacaaaaacccctgcctgccggggctccctctgcgcctctctgttcagtggcagtccctagattagatatcaccaacacaaccagtggatggaacaaagccggacttactgctttcggcagtaagggagtttgatggtgctatcagagaggaggaaaggcaagaccagattactgaaaatttgcagtttgatttaaagtccgtttttgacagggcttgataaggattggattaggtgtcctgatatgatgttacaggattgtgggaacaaagtcctacggcataaactgttggtgcttcctattgaagtgttaatgggtcttttgggaagttttcataataaacagttcatttatttgtgcgggcaagaataaaagtaaagacaatggaaacatgtagacagttaactgtggagattctggagggtgtggaagttctgttctcacctctgagtagaggaattggaagactggaggacaaaataagaggaagatttatttttcactgtatgtccttttacactct

SEQ ID NO: 40611 - DNA, 170 bp, Macaca Mulatta
ttgtatttttattgtttcttttttcaaatattcagcctcattcagttgaatctgaagatgtggacctgctcatgaagagggctgactgtgtctaacttagggtctttcatgcagctggcacttaataccttttattgactgttttagctaacattcaacagacaattccc

SEQ ID NO: 40612 - DNA, 202 bp, Macaca Mulatta
  misc_feature (1)...(202): n = A,T,C or G
tgcgggagccgaggagccggcgccccggaggtgctgctgcagcccgggcgcctggagctgggcgacgtggaggaggaccaggtggtggccgtgttcgtggtcaccttcgacccccgctcggggaacatggtagaatggtgcttacctcaagatattgacctcgaaggtgttgagttcaagtctatggccagtgggtcccatn

SEQ ID NO: 40613 - DNA, 931 bp, Macaca Mulatta
ttgtttaaagtagcacacagacctcgtggctgccattccattggcatttttgacagagtatccctggtgtaagaatagagctagcttcataaatttgttagttggtctggtatgtttatcaaatatctgttgcctgaactcaggagtctaacgaattcaatatgacttaaccatgcaattccattcctgtgaatgaattaacaacagttggtcagccttgatttctgagactggcaaaacatcatatcgagatgtcatttttataggtaccttgatggtatagcaaattttggatacagactagttggtcttgcccaaatgacatcttttcctttcattacatacatgccttaaattctagaccatctcaatgttctcatgaaggctctcagacccacataactttgggaaaatgttcccttttctgaattcatagcaattactgtctgtaacacttctttggaattaattatgtacaagcagaccccaaattatggcaggcttgtcattgaaaagtttacttgtactttcattgtttagaacttggaataaatggtggttggatttccagctggcccacggaagcctctttaacctacaatgtattattagccctgtcgttgttcctcattgttttcaaggaaaacgtgtcctgacttccaagctggactttcggaagctgggaagaaatctttctctggagttcaagcctctgggggtggcatgtgacttggcatgtccccttctctcctccctgactcacaaggagatattgtcactctggatgtgacaagaagagcatccctgggcatcaccaaagccaaaagaaatatcaagtgtgaaattctatgattgtggttgtttctcaaaaacaggtattcagtaggcgtttgtaactcagaagcttcctgtacttaactgtgacaaagct

SEQ ID NO: 40614 - DNA, 827 bp, Macaca Mulatta
  misc_feature (1)...(827): n = A,T,C or G
ggaggtggatatgtacacttttgtccatccattcatctgttacaggcattgggtggttttcacttttggctattacgaataatcatgctgtgaacatatgtgtacaggcctttgtgtggacatatattttcatttctgttggatgtatatctaatagtgaattgctgggtaacatggtaacttcatgtttaactttttgaggaactgctaaactcttccaaattggcagcgccattttacattcctcccaacgacgtatgaaggttctaatttgtccacatcctcaccagcccttgttattttagccatccttgtgggtgtgaagtagtatctcattgtggtttttatttgcatttctgtgggttttcttttcactttcttgatagtcttatttgtagcacaaaattttaaattttgaccaattccaattctgttttttttggtcagttacttttggtgtcataatctaagaaatctttccctgacccacggtcatgaagatttattcctctgttttcttcaaagagttttatagttctcagtctgacatttttaggtctgtgatgcgtttaagttaattttcgtgtatggtgtaagaaagggctccactgttattttttgcctgtagacatccacttgttttcagccccattgttgaacagactgttttctccccctgaattttggcgccctgtcggggtcnacttagcntaggaatcgggtcgggnataanaanccagccgttgctcggcggnggaacacatccaacttgcggcaggcacccggctagaaaccaggggcgtcactcctatgaaaaaaggaggaca

SEQ ID NO: 40615 - DNA, 293 bp, Macaca Mulatta
  misc_feature (1)...(293): n = A,T,C or G
agtttgatgttattctggcagatgcccttaatccctgtggggagctactggctgagctatttaacataccctttgtgtacagcctccgcttcactgttggctacacatttgagaagaatggtggaggatttctgttccctccttcctatgtacctgttgttatgtcagaattaagtgatcaaatgactttcacagagaggataaaaaatatgatacataagctttattttgacttttggtttcaaatccatgatataaagaggtgggaccagttttacagcgaagttctaggn

SEQ ID NO: 40616 - DNA, 350 bp, Macaca Mulatta
gccgccatcatgttctcctcctcactcagggtggctgtggtgtgtgtgagcaacatcaacaggagcatggaggcccacagcatcctcaggagaaaagggctgagtgtccggtctttcggaacggaatctcatgtgaggctaccgggaccaagacccggtcatcctgtagtttatgattttgcaacaacatataaggagatgtacaatgacctcctcaggaaagatagagaatgttacacctgcaatggaatcttacacatcttgggaagaaatgagagaatcaagcccggtccagaaagatttcaggagtgcactgatttctttgatgtcatcttcacctgtgaggagag

SEQ ID NO: 40617 - DNA, 739 bp, Macaca Mulatta
gggtgaacggtgtggagggcagtctggtgtccactccgttgtctctgcttgaggactgaatgagatggtttgcatggggaggtagcacagtgtgagcgcgagttcctgccatccttctacagctctaaattccttctgcttgttgtttcacacaagagtcgactaggaagagcagattctgggaaacctgcaaggactgtgcgagcaaatgttttatagtgagagaggacaccttgcaaagggattcttcccctgtggatggtcagtgtcagtatttcctgtacgctgagagttgggaaggtcaacagccatatcccacctgaaaacaaaattgaataagatagcaaggtggcctggctgccggtgaggatgatctgttgtgtggaagggattctttccgtagtgacttttaaactcctgaagtcctcattattatgacactgttatattacagaaacaagtttctctttggaagttttacagattaggaattttttctcccaattttcaaataccttgcattcaaatcggagtaccaatgagaattcctgtaaaaaatgcagtgtagttctgctacattttcccattggtttttgtaatgaccttgttaatgctaactttacagtataaaacaaaagcattgttttgtatgacttcacacatgtaatggaataacaagatttttggacacaatttacctattgaagaagacattataaaactatttcttttaacaata

SEQ ID NO: 40618 - DNA, 794 bp, Macaca Mulatta
tgtaggatccaaacctttttgaaagaattatcctgggggagaaaggtgcaccagatgactgagccaggccccctggatctcctcccttaccctcctctgctgggaacctagcacgcctgaatcagtccagtgccttatttctgtcaccaaggggatagtccttcctagtatcgtggtgggggaggagcctctggtttccctaaactgcagcctctctggctggtcttcactttcttcagttgatataaaattctgtgccttggccatgacatccttggattccatctctaaagggaccatctgccgcagttaccatggcaactgacctgagcggcaccctggtctgtggagatggactcaggatccagtgacatgattctgaacttttgtggagtttgacatcttgttccagaagctacccttcaaactgcacatctacacacaaacaaactatgcataggattccaaggctttaaagctgagagactctggcctcaagttatttcatgaacacagaggggagccatgtgtggtcactgtagatgacttgaggtgaaatgggggcaggaaagccacatcctgctctgcatttataaagaccgtacaaactgagatccttggtacccctaaaaggattgccagtttccttcatctttgccatatggaggactgtgacagactaggacactggcctctgagttcccctgtagttttcacattttgagatttagtgtcttttaaactggaaaaccttctagcatgttgggttattgttatagggtatatctttgtct

SEQ ID NO: 40619 - DNA, 307 bp, Macaca Mulatta
cggccagcttttcttgctcatctcttttgaaggacacttaaatttggcaaacctgggttccatttctctcctgtctttcccccattttccagccactttgggagggagagattggccaaattgtaacctctttgtatcagtttcctgatctaagagggtgaggacggtaatgttcttctactccacagctggttgggtagctcagggggaaataaagtgtcttgaggctgtggcggtgcttgattggttctgctgtgtgtacacaaatggtttctacacatggaaacagagttgtgagtcccatgct

SEQ ID NO: 40620 - DNA, 627 bp, Macaca Mulatta
gatagcaaatactggaagatgctccttacttaatctatcccctgaaaagccacagaagtagaagggaagtcaatgaagctgagaaatttagatagaataataaaggtagctgagtcctggtacagagctaatagttgaaagcataggataatatttttgcattttttggaatataagtcttttaaaacaagagctcaaaaacaaactgtagggtaaacgttgatagaattgaacttatcaactgttccatgaaggatatcacaaagttaatagacaactgattgggtgaagatatttgtaatacccaaaactctcaaggagttaatatctaaacatataagaactgaaaattaacaaaacagagacaagaaacccaaagagaaaataggaaaagggtttgaataaccatttggtttttttccttttctgaagtcccctaaaagtaaatgaagagacaacctcactagtgatcagagaaatgcaaattaaacaatgagatatcactttacactcattaaatttgcaaaaagtaggaaacaggataacatcaaatgttaatgagaatgtggagaaacagaaactttcaggtactcactccctgtgagaatataagcagtcagaacattc

SEQ ID NO: 40621 - DNA, 347 bp, Macaca Mulatta
  misc_feature (1)...(347): n = A,T,C or G
agcttcctcctgcaagtacccccggcatggtggagggaatgccggccggcctgctgagtccatgcatgagggagtcagttctttcctgnnnnnnnnnnnnnnngtgggcctgtcggacagcattgcttctgaggacagctgtgtgcccatgaacccaggcttccctaccctggtggctgtggagcaagcaggcagtgattctcagggtgtctgcaccgctgtgggctcatgtcctgtttgctttgacctgcttggcttcccactcacggagctttctgtgcaccaagacgtcagccagggacatgaggtccagctgccccctgtcaaccgcagcctcaagcctaacc

SEQ ID NO: 40622 - DNA, 752 bp, Macaca Mulatta
  misc_feature (1)...(752): n = A,T,C or G
gggtcatttcagcgtgcctttcctcccactgttttcagcctctttactccttgaggaccccaaccatgcctcacctggatccctctgggtgtcagaggttactgtgaggagtgagctgtggcatttttctgtcattaattttagtaatcactctcagggatggtagaagttggtatatatcaacagcaaatatgaaggaaacatcagctgaaaatgtgatttaaacctgaagcaaggtcagtggaacctctccccttccctgactggtactgagtgtcctgtggcagctcatcctcctgtaagcggtgttttacgtgttatcatactaatgagctctgcccaggccccttttactctacgttcactccctaggtgatttccagtctcctctgcccaggcttcaggcatggaatgttaagaatccccagacttccagttccagcctagacttgtctaagcttagctgcctggttgttctaagtatttggatgactcaaagatacctctcctatgttgtcaatgttgaatgtgttctgtcctcccaacatggcccctactcggtgctcttggtcagtgcagagaaagtagcttggacagaggcaagagattttgtggtttatatactccatgcctaagtaggctctcaggtatttgaataaaaaaatggtggatgagtcacacatcagatcttcttgcaccncccccttgccttcctaggaacttccctcctttggtccagaacccgtcaccta

SEQ ID NO: 40623 - DNA, 1943 bp, Macaca Mulatta
  misc_feature (1)...(1943): n = A,T,C or G
gggagaagcangtcctacaggngcgcgaggccctgaaggtcctcangngcagagaagtgaaactgggcccccaggtccagttggctctccaggtcttccnnnnnnnnnnnnnnnnnnnnnnnnnnnnnnnnnnnnnnnnnnnnnnnnnnnnnnnnnnnnnnnnnnnnnnnnnnnnnnnnnnnnnnnnnnnnnnnnnnnnnnnnnnnnnnnnnnnnnnnnnnnnnnnnnnnnnnnnnnnnnnnnnnnnnnnnnnnnnnnnnnnnnnnnnnnnnnnnnnnnnnnnnnnnnnnnnnnnnnnnnnnnnnnnnnnnnnnnnnnnnnnnnnnnnnnnnnnnnnnnnnnnnnnnnnnngggtgctcctggcaatcgtggttttccaggctctgatggtttacctgggccaaagnnnnnnnnnnnnnnnnnnnnnnnnnnnnnnnnnnnnnnnnnnnnnnnnnnnnnnnnnnnnnnnnnnnnnnnnnnnnnnnnnnnnnnnnnnnnnnnnnnnnnnnnnnnnnnnnnnnnnnnnnnnnnnnnnnnnnnnnnnnnnnnnnnnnnnnnnnnnnnnnnnnnnnnnnnnnnnnnnnnnnnnnnnnnnnnnnnnnnnnnnnnnnnnnnnnnnnnnnnnnnnnnnnnnnnnnnnnnnnnnnnnnnnnnnnnnnnnnnnnnnnnnnnnnnnnnnnnnnnnnnnnnnnnnnnnnnnnnnnnnnnnnnnnnnnnnnnnnnnnnnnnnnnnnnnnnnnnnnnnnnnnnnnnnnnnnnnnnnngggagaacgaggaaatcccggggaaagaggagaacctggaattactggactccctggtgagaagggaatggctggaggacatggtcccgatggcccaaaannnnnnnnnnnnnnnnnnnnnnnnnnnnnnnnnnnnnnnnnnnnnnnnnnnnnnnnnnnnnnnnnnnnnnnnnnnnnnnnnnnnnnnnnnnnnnnnnnnnnnnnnnnnnnnnnnnnnnnnnnnnnnnnnnnnnnnnnnnnnnnnnnnnnnnnnnnnnnnnnnnnnnnnnnnnnnnnnnnnnnnnnnnnnnnnnnnnnnnnnnnnnnnnnnnnnnnnnnnnnnnnnnnnnnnnnnnnnnnnnnnnnnnnnnnnnnnnnnnnnnnnnnnnnnnnnnnnnnnnnnnnnnnnnnnnnnnnnnnnnnnnnnnnnnnnnnnnnnnnnnnnnnnnnnnnnnnnnnnnnnnnnnnnnnnnnnnnnnnnnnnnnnnnnnnnnnnnnnnnnnnnnnnnnnnnnnnnnnnnnnnnnnnnnnnnnnnnnnnnnnnnnnnnnnnnnnnnnnnnnnnnnnnnnnnnnnnnnnnnnnnnnnnnnnnnnnnnnnnnnnnnngtgctacaggatttcctggttctgctggcagagttggacctccaggccctgctgnnnnnnnnnnnnnnnnnnnnnnnnnnnnnnnnnnnnnnnnnnnnnnnnnnnnnnnnnnnnnnnnnnnnnnnnnnnnnnnnnnnnnnnnnnnnnnnnnnnnnnnnnnnnnnnnnnnnnnnnnnnnnnnnnnnnnnnnnnnnnnnnnnnnnnnnnnnnnnnnnggtccagatggcccccctggtccagctggaacgactggacagagaggaattgttggcatgcctgggcaacgtggagagagaggcatgcccggcctaccaggcccagcggnnnnnnnnnnnnnnnnnnnnnnnnnnnnnnnnnnnnnnnnnnnnnnnnnnnnnnnnnnnnnnnnnnnnnnnnnnnnnnnnnnnnnnnnnnnnnnnnnnnnnnnnnnnnnnnnnnnnnnnnnnnnnnnnnnnnnnnnnnnnnnnnnnnnnnnnnnnnnnnnnnggtgatcgtggagaccctgggcctgcaggtctgccaggctctcagggtgcccctggaactcctggccctgtgggtgctccaggagatgcaggacaaagaggagatccg

SEQ ID NO: 40624 - DNA, 821 bp, Macaca Mulatta
  misc_feature (1)...(821): n = A,T,C or G
cctatttctgggaaaaatatcctgcaatttgtagccatcaaaaggaaggactgtggagaataggcaatcccagggtgggtggtagatccaggagagaaaatgagtgctacattggagagagaatttggctaggaagccatgaagtctttatagaaatctagggaagaaatgcaggagttggagaaacaattgcacaaattcttcagccaggaacattttgtggtctataaaggctatgtggatgattctcggaacacagataactcctggatagagacagaggctgtgaactaccatgatgaaaccggtgaaataatggaccatcttcctctggaagctggcaatgatgccaagaaagtgaaatgggtggacattaatgataaatttgagctttatgccagccactcccaatttattcaacttgtgtctgagaaacaaggtgcccaatggagtgaggacatgtatcctgattgccagggatagtggcttggagtctcgtgtgagccaaaggccttcaaatgatcaagagtgggtgagaggcaaacagcacataactcccactaaataggacagggagggtcacctctttggtgattaattccaaaactgtgctatatgaaggctttgtattagggaataatattagacaaatatggggaaatgggatcacagaagttttggctttcctgttagaagaatatactcacatgctgtatatattgtatacatggtttaaactaacttacacaactaaggctctttggagaattgtaagaaaaacaantgacatcttcatgaacaaccatagcctctacttttca

SEQ ID NO: 40625 - DNA, 1966 bp, Macaca Mulatta
  misc_feature (1)...(1966): n = A,T,C or G
gttgagaatgaaaatcattgtgattttgtgaaacttcgagagatgctgatccgggtgaacatggaggacttgcgagagcagactcacacccgccactacgaattgtaccgacgctgtaagcttgaagagatggggttcaaggacactgaccctgacagcaaacccttcannnnnnnnnnnnnnnnnnnnnnnnnnnnnnnnnnnnnnnnnnnnnnnnnnnnnnnnnnnnnnnnnnnnnnnnnnnnnnnnnnnnnnnnnnnnnnnnnnnnnnnnnnnnnnnnnnnnnnnnnnnnnnnnnnnagcttcatgagaagtttgaccttctaaagcggacacacnnnnnnnnnnnnnnnnnnnnnnnnnnnnnnnnnnngagcttgaggaggaggtgaacaacttccagaagaagaaagcagcggctcagttgcttcagtcccaggcccagcaatctggggcccagcaaaccaagaaagacaaggataagaaaannnnnnnnnnnnnnnnnnnnnnnnnnnnnnnnnnnnnnnnnnnnnnnnnnnnnnnnnnnnnnnnnnnnnnnnnnnnnnnnnnnnnnnnnnnnnnnnnnnnnnnnnnnnnnnnnnnnnnnnnnnnnnnnnnnnnnnnnnnnnnnnnnnnnnnnnnnnnnnnnnnnnnnnnnnnnnnnnnnnnnnnnnnnnnnnnnnnnnnnnnnnnnnnnnnnnnnnnnnnnnnnnnnnnnnnnnnnnnnnnnnnnnnnnnnnnnnnnnnnnnnnnnnnnnnnnnnnnnnnnnnnnnnnnnnnnnnnnnnnnnnnnnnnnnnnnnnnnnnnnnnnnnnnnnnnnnnnnnnnnnnnnnnnnnnnnnnnnnnnnnnnnnnnnnnnnnnnnnnnnnnnnnnnnnnnnnnnnnnnnnnnnnnnnnnnnnnnnnnnnnnnnnnnnnnnnnnnnnnnnnnnnnnnnnnnnnnnnnnnnnnnnnnnnnnnnnnnnnnnnnnnnnnnnnnnnnnnnnnnnnnnnnnnnnnnnnnnnnnnnnnnnnnnnnnnnnnnnnnnnnnnnnnnnnnnnnnnnnnnnnnnnnnnnnnnnnnnnnnnnnnnnnnnnnnnnnnnnnnnnnnnnnnnnnnnnnnnnnnnnnnnnnnnnnnnnnnnnnnnnnnnnnnnnnnnnnnnnnnnnnnnnnnnnnnnnnnnnnnnnnnnnnnnnnnnnnnnnnnnnnnnnnnnnnnnnnnnnnnnnnnnnnnnnnnnnnnnnnnnnnnnnnnnnnnnnnnnnnnnnnnnnnnnnnnnnnnnnnnnnnnnnnnnnnnnnnnnnnnnnnnnnnnnnnnnnnnnnnnnnnnnnnnnnnnnnnnnnnnnnnnnnnnnnnnnnnnnnnnnnnnnnnnnnnnnnnnnnnnnnnnnnnnnnnnnnnnnnnnnnnnnnnnnnnnnnnnnnnnnnnnnnnnnnnnnnnnnnnnnnnnnnnnnnnnnnnnnnnnnnnnnnnnnnnnnnnnnnnnnnnnnnnnnnnnnnnnnnnnnnnnnnnnnnnnnnnnnnnnnnnnnnnnnnnnnnnnnnnnnnnnnnnnnnnnnnnnnnnnnnnnnnnnnnnnnnnnnnnnnnnnnnnnnnnnnnnnnnnnnnnnnnnnnnnnnnnnnnnnnnnnnnnnnnnnnnnnnnnnnnnnnnnnnnnnnnnnnnnnnnnnnnnnnnnnnnnnnnnnnnnnnnnnnnnnnnnnnnnnnnnnnnnnnnnnnnnnnnnnnnnnnnnnnnnnnnnnnnnnnnnnnnnnnnnnnnnnnnnnnnnnnnnnnnnnnnnnnnnnnnnnnnnnnnnnnnnnnnnnnnnnnnnnnnnnnnnnnnnnnnnnnnnnctatactgttcctttctgatgcttatcttttcatctgtgtgattgtttttttcccctctactaacaagatcctcccagctttctctctacatgtagaaaggataacattgctcatgaacccacttcccctccacattttcctcactggtta

SEQ ID NO: 40626 - DNA, 823 bp, Macaca Mulatta
  misc_feature (1)...(823): n = A,T,C or G
gggctggggatatgaccttggggaagccacaccccccatgctgtgcctcaggctccattttgtaatatgggtttaatcttaacccacaaggtcgctggggaatgaaatagtgaatacattaaaaatgcttagagtagtgacggacgcctagtgagcactgaaaaagcattaggtagtattagtttctattactagcttttactaattataataaaatatttgagagtccctttagtgtaggacatttgtaatagatatttttacatcattttcacgtgggtgcttccaacttctttgaaaaaacaatttatgattccccatttttaaaaaagtccccccgggggaaaaaaagggcccccaaacccgttttggagtctgggaacccgggcccttttttttcccctttttccaaaatttgggggaaaannnnnnnnnnnnnnnnnnnnnnnnnnnnnnnnnnnnnnnnnnnnnnnnnnnnnnnnnnnnnnntttttttgtggggccccctttgggcnnnnnnnnnnnnnnnnnnnnnnnnnnnnnnnnnnnnnnnnnnnnnggggcgcggggggggccccnntnnnnnnnnnnnnnnnnnnnnnnnnnnnnnnnnnnnnnnnnnnnnnnnnnnnnnnnnnnnnnnnnncgcgnnnnnnnnnnnnnnnnnnnggcggggggnnnnnnnnnnnnnnnnnnnnnnnnnnnnnnnnnnnnnnnnnnnnnnnaggaaacaaaaaaatttgtttttttattataanaaacccccccggccnnnnnnnnnnnnnnnnnnagagagagaaaatcctcctttggggaggatact

SEQ ID NO: 40627 - DNA, 601 bp, Macaca Mulatta
  misc_feature (1)...(601): n = A,T,C or G
agttcccnntaagcaaggaattgcgaaaacccatgtaaatgttgtctacccagaaattggtgcccaggatttttattgcgggctaaccatgtagacaccctctgtctagcatgcaccaaaaatccagactttgagatggaaaaccggtgttctctatcatgttgtttgtacagggctggcacagtgagctcctcagcagttatgggaatcttgtttctagatgccagccaagggcaaacctaataagaaagtctttctaagagtagcagtctcaggcctgctgtatcaactcttgtctctacaaaacctatgcaaatccctggcataacatagattaagacaaacatatttaccatatcaacgaatgtaagtggattaaatgcgcctattaggagaaaattctattagattttgttaaagaaatatatttaaaaaataattggagaagttcaaaatacagttaggaattgctaaggcaataaagtacaataattcaggttttatttgctttaaattcctacttctatcgcataatcttggaatactttatcctatactttatctcttctttttgtgaactcagtaactaacactaaagtta

SEQ ID NO: 40628 - DNA, 891 bp, Macaca Mulatta
  misc_feature (1)...(891): n = A,T,C or G
ggttaactctacaaggtagatattactagtatctgctttctgggttttgttgttgttgttgctgcnnnnnnnnnnnnnnnnnnnnnnnnnngatgaagtttccctcttgttgcccaggctggagggcaatggcatnnnnnnnnnnnnnnnnnnnnnnnccttcctgggttcaagcaattctcctccctcagcctannnnnnnnnnnnnnnnnnnnnnncncgccaccacnnnnnnnnnnnnnnnnnnatatttagtaannnnnnnnnnnnnnnnnnnnnactaggctggtctttgacctctgacctcaagtgattcgcccgcctcggccttaccaagcgctaggattaccaggcttgagccacctgcatcagcgagacacagcaacggtaaatacaattaccatgatcataaatagtataaggtaattccctctaccgttacgtgtccccaacttttttctctttcaaactaaccaacaagtaaactcacagccccggagaagaaataggggtcattgcccaaaagagccggccaatcccgttgagcatgggtaaacacgcaatacagggattttccccccccacaaagcatcccatttgttccttgatcaatattttgagtttaacatgttatgtttgtttttggcgcaccatatcacattttgcacgccaagaccaaaggataaattatccgtttattttcccattttatatcctattttaatctagacacccagatgagggaagaaacaacaatgctagtaagcctattaggtccctttattacacgggtctcagcttggttgcacacaacactatattacgccatatgtcgcgaagcaatgtgttacatagttgtcatatccgccagtgtgatattagactccgcac

SEQ ID NO: 40629 - DNA, 182 bp, Macaca Mulatta
attgaaaccagccaacttcaagttcaggttttctttcacttgagatccatccctctatcccaagccctttaataaatgtttcctaccttaattgtaatttaacttaaatgctaaactttcaacattgagttttagggtcattcatggtcttattaccttctacacagaaaatattactcagc

SEQ ID NO: 40630 - DNA, 770 bp, Macaca Mulatta
  misc_feature (1)...(770): n = A,T,C or G
ggnnnnnnnnnnnnnnnnnnacaaagcatggtctgaaaaacctgaagctgtggcaaagagacctactgtctttcaccagaatcttcaatttttgacagaaacatgggcataatcccaattgctaaccctgactgcccccatcacagctgccgtctccagccttgcttcctccttgccccggctccaagcctggaggggctctgcagagatgtccgtagtgaatgagctgttgtctcgggctttaaacggtcactcatgctctttcttccacctctggggaggccacattggactgtgacattagtgagaaacaaacatttcttattatgctgagccactgagatttgggggttgtttgttaccacaacatagcctacttcaccctgactactaaactgcccaatgtcctcaccagtgaagctagcctcgttggtgaggaataaactctatagcgcctcactcttaaacatagatgcataagcaagaaccatcagatatttgaagaaagggttcacatgagaaacggactcttgataagtcaggagcaaagaaacccctagggaacagagacaatgcgagcgaataaaagaaagatattgtgtttttaaaagccccgatgccggggggctcccccccgggaaacccccgcagctgggaaggccagggtggagggagccccctgaagagaaggggaagtttgaaaaacggccctagggccaaaccaagaagaaaacgcgatcctgcgagggggaaggaagaccaaagagggg

SEQ ID NO: 40631 - DNA, 420 bp, Macaca Mulatta
aggttggatgcccaggtggcagaagccaatggagcaaaaagcccgtaagaaacaggcgtttcttcctgggatgatctgattcacatcctttccagtcctgcttcagatacacattcaaggccataactatgagattatcagatagagttatagcagttgcttcatttttatctcccattcttcctcattttctctggcagtgccatgaggtgatgataaccattgatggtgaagaaggtatcccagtgcaggtggatggggaggcctggattcagagaccaggccttatcaagattagatacaagaattctgctcagatgctgacaagagatcgggtaagggggaaaaacttgtcttgggctcctatactgcctcatccatagtcacttgagtactgaatatttccactcaagcagaatt

SEQ ID NO: 40632 - DNA, 967 bp, Macaca Mulatta
  misc_feature (1)...(967): n = A,T,C or G
agtgatggatgcagctcctctgttgatagctggtaatgaatcttgtcctcagcctcagacgtctgaacacctggctgctatagagatcatgaaactgaagcatattttgattctacaaaataaaattgatttggtaaaagaaagtcaggctaaagaacaatacgagcagatcgttgcatttgtccaagctacagtaccagagggtgctcccattattccaatttcggctcagttgaaatacaacattgaagttgtttgtgagtacatagtaaagaaaattccagtacccccaagagagtttacttcagagccccggcttattgttattagatcttttgatgtcaacaaacctggctgtgaagttgatgaccttaagggaggtgtagctggtggtagtatcctaaaaggagtattaaaggtgggccaggagatagaagtaagacctggtattgtttccaaagatagtgaaggaaaactcatgtgtaaaccaatcttttccaaaattgtatcactttttgcagagcataatgatctgcaatatgctgctccaggcggttttattggagttggaacaaaaattgaccccactttgtgccaggctgacagaatggtggggcaagtacttggtgcagtcggagctttacctgagatattcacagaattggaaatttcctatttcctgcttcgacggcttctaggtgtacacactgaaggagacaaganagcagcaaaggttcaaaagctgtctaagaatgaagtgctcatggtgaacataggatccctattgacaggagggagagttagtgctgtcaaggccgatttgggtaaaattgttttgaccaatccagtgtgcacagaggtaggagaaaaaattgcccttagccgaagagttgaaaaacactggcgtttaattggttggggtcagataagaggagtgacaatcaagccaacagtagatgatgactga

SEQ ID NO: 40633 - DNA, 746 bp, Macaca Mulatta
  misc_feature (1)...(746): n = A,T,C or G
ggggacctgactctctgaggctcattttgcagttgttgaaattgtccccgcagttttcagccatgccccctgttttagaaaattggtgtatccttttgtttccttcacgtaattcaccaatggattccctggcctaaaatagtaccaactacatgataggaacttaatgctgttttgtttaatgaatgaattaaatgagacaacagctcatcagtggatttataagtctgaaccaatcagagtccttgtgactggagcagctggtcaaattgcatattcactgctgtatagtattggaaatggatccgtctttggtaaagatcagcctataattcttgtgctgttggatatcacccccatgatgggtgtcctggacggtgtcctaatggaactgcaagactgtgcccttcccctcctganagatgtcatcgcaacagataaagaagaggttgccttcaaagacctggatgtggccattctcgtgngctccatgccaagaagagaaggcatggnagagaaagatttactgaaagcaaatgtgaaaatcttcaaatcccagggtgcagccttagacaaatacgccaagaagtcagttaaggttattgttgtggggtaacccagccaataccaactgccctgactgcgtcaagtcggctccatcccatccccaaggagaacttcagnttgcttgactcgttttgaatcaccaaccgagctaaaggctcaaatttgctccttaaaactga

SEQ ID NO: 40634 - DNA, 2537 bp, Macaca Mulatta
  misc_feature (1)...(2537): n = A,T,C or G
ctcagagagcagcattgcctacgagaaacgcaaagcgaaggaggccatgtagaacgaaaagaaaaaggtgcaagacctggagaatcgcttaaccaagcagaaagaggnnnnnnnnnnnnnnnnnnnnnnnnnnnnnnnnnnnnnnnnnnnnnnnnnnnnnnnnnnnnnnnnnnnnnnnnnnnnnnnnnnnnnnnnnnnnnnnnnnnnnnnnnnnnnnnnnnnnnnnnnnnnnnnnnnnnnnnnnnnnnnnnnnnnnnnnnnnnnnnnnnnnnnnnnnnnnnnnnnnnnnnnnnnnnnnnnnnnnnnnnnnnnnnnnnnnnnnnnnnnnnnnnnnnnnnnnnnnnnnnnnnnnnnnnnnnnnnnnnnnnnnnnnnnnnnnnnnnnnnnnnnnnnnnnnnnnnnnnnnnnnnnnnnnnnnnnnnnnnnnnnnnnnnnnnnnnnnnnnnnnnnnnnnnnnnnnnnnnnnnnnnnnnnnnnnnnnnnnnnnnnnnnnnnnnnnnnnnnnnnnnnnnnnnnnnnnnnnnnnnnnnnnnnnnnnnnnnnnnnnnnnnnnnnnnnnnnnnnnnnnnnnnnnnnnnnnnnnnnnnnnnnnnnnnnnnnnnnnnnnnnnnnnnnnnnnnnnnnnnnnnnnnnnnnnnnnnnnnnnnnnnnnnnnnnnnnnnnnnnnnnnnnnnnnnnnnnnnnnnnnnnnnnnnnnnnnnnnnnnnnnnnnnnnnnnnnnnnnnnnnnnnnnnnnnnnnnnnnnnnnnnnnnnnnnnnnnnnnnnnnnnnnnnnnnnnnnnnnnnnnnnnnnnnnnnnnnnnnnnnnnnnnnnnnnnnnnnnnnnnnnnnnnnnnnnnnnnnnnnnnnnnnnnnnnnnnnnnnnnnnnnnnnnnnnnnnnnnnnnnnnnnnnnnnnnnnnnnnnnnnnnnnnnnnnnnnnnnnnnnnnnnnnnnnnnnnnnnnnnnnnnnnnnnnnnnnnnnnnnnnnnnnnnnnnnnnnnnnnnnnnnnnnnnnnnnnnnnnnnnnnnnnnnnnnnnnnnnnnnnnnnnnnnnnnnnnnnnnnnnnnnnnnnnnnnnnnnnnnnnnnnnnnnnnnnnnnnnnnnnnnnnnnnnnnnnnnnnnnnnnnnnnnnnnnnnnnnnnnnnnnnnnnnnnnnnnnnnnnnnnnnnnnnnnnnnnnnnnnnnnnnnnnnnnnnnnnnnnnnnnnnnnnnnnnnnnnnnnnnnnnnnnnnnnnnnnnnnnnnnnnnnnnnnnnnnnnnnnnnnnnnnnnnnnnnnnnnnnnnnnnnnnnnnnnnnnnnnnnnnnnnnnnnnnnnnnnnnnnnnnnnnnnnnnnnnnnnnnnnnnnnnnnnnnnnnnnnnnnnnnnnnnnnnnnnnnnnnnnnnnnnnnnnnnnnnnnnnnnnnnnnnnnnnnnnnnnnnnnnnnnnnnnnnnnnnnnnnnnnnnnnnnnnnnnnnnnnnnnnnnnnnnnnnnnnnnnnnnnnnnnnnnnnnnnnnnnnnnnnnnnnnnnnnnnnnnnnnnnnnnnnnnnnnnnnnnnnnnnnnnnnnnnnnnnnnnnnnnnnnnnnnnnnnnnnnnnnnnggcggagcaaagtgtccgttgagatgtaccagtcgcaggtggcaaagctggaggatgatatctacaaagaggccgaagaaaaggccctgctgaaggaggccctggaacgcatggagcaccagctgtgccaggagaagaggatcaacagggccatccggcagcagaagnnnnnnnnnnnnnnnnnnnnnnnnnnnnnnnnnnnnnnnnnnnnnnnnnnnnnnnnnnnnnnnnnnnnnnnnnnnnnnnnnnnnnnnnnnnnnnnnnnnnnnnnnnnnnnnnnnnnnnnnnnnnnnnnnnnnnnnnnnnnnnnnnnnnnnnnnnnnnnnnnnnnnnnnnnnnnnnnnnnnnnnnnnnnnnnnnnnnnatgctgcccatgacccgtgctgcccataacccgtgcacctgatctcctgggtgagtcctgcctcagaaccggtagggtctacacactggaaagtttccccaaaccaagtcacgtatgagcagcacccaggtggcttctgaagctccctgaaagctgccagagaggctttcctgtctgctctgcagtttacatattcatcatccactcctgcagtccacaaggcactggaacagcaacttctaaatagagctggactctccctttccttcactcttgcctaaggcggatcagatcccaaggctggggttaggcaagtaagggaaagagccacagccaccgtctcttcatgaccgtctccaggccagggactgggctcatctgagctttgcaggcgtgatagggcttctaatagcctctaatagccatgcctggtacgatgatccctattttacagatgaggaaactgtgcctcagagagttaagagacgcccaagtgcacacagtggctggtaaggagagctgggacctgaccccagatccctctgaccccagttctcctgctctctgtggggttggccctgagtcccctccttgtaactgtcagctttt

SEQ ID NO: 40635 - DNA, 280 bp, Macaca Mulatta
  misc_feature (1)...(280): n = A,T,C or G
gaacaagcgtcgcgtttctcaggagaaactctaggtgagaattcccagagtgacgatggctacctatagtctggcgaacgagagactacgcgccctggaagacattgaacgggaaatcggcgccatccttcagaatgcaggtngcaggtactgtcatcctagaactgtccaaggaaaaaaccaacgagcggcttctagaccggcaggcggcggccttcaccgcttcagtgctacacgtggaggcggagctgtcggctcagatccgctacctcacccaggt

SEQ ID NO: 40636 - DNA, 686 bp, Macaca Mulatta
tgtcactttaaactaagatcgtagaaatatgtcaaatgtagagatattagagcacaaagcttgaggacagccacccaggaagcacagattccaaaaattggaagtcagtattccaaagtgtagaagtttggggttgtttatatagacaaggtttagggaagcttaacaaaatttcaacacctttctacataaggtttaatgcatagttacagtgatctgattgggcaaggtggtctttttctttctggaaaggtatatttagcattccacaccgaaggtgtcaccatcatgaggtcttttgtaccatctggtctgagttaggtacaggacaataaaggaggtggttaatctataacaaaggtcagagattagaagggcaggaggtctgatctttggtgtctcctagtcatttacagaacaagaacaatgaggaggagaattaatctataagaagcagaagttgcaactacatgctacgtgactcagatcaaggtcacatctctctcaagatttaaagtgtataggggattccaatagcttttaaattttatttatttccatacctgcaaagcgtagaatatgtactgttaggcccttaaaaaaaaacgtataaactgatttaagcattgattatagacattgcctgagagctatggttgatttgttcatgtacttgaaattagcaa

SEQ ID NO: 40637 - DNA, 340 bp, Macaca Mulatta
ttttggatgtcttcctggtgtctgttccaatcccaaaattcattgtcaacaacctaacccacaacaattccatttccattctaggatgtgccttccagctacttttaatgacttccttctcagcaggtgagatatttctcctcactgccatgtcctatgaccgctatgtagccatctgctgtcccctgcactacgaggtagtcatgaatactggcgtctgtgtgttaatggcaagtgtttcctgggccgttggagggctctttggtactgtgtacacagctggcacattttccatgcctttctgtggctccagtgtgatcccacagtttttctgtgatgt

SEQ ID NO: 40638 - DNA, 645 bp, Macaca Mulatta
gagcacatctgcagccgtcgcagagggttcctttggcgtgtctgaccagcagcagtggaagcctgggagaagctgaccgggaagaggggacccccctgacctggtactacagccactggcgcaagctgcgtgaccgggagatccagctggagatcagtggaaaagagcggatggaagacctgaacttccctgagatcaaacgaaggaaggtggcggacaggaaggatgaggacaggaaggaatttaaagacctctttgacctgaacagctctgaagaggacgacgacactgagggctactcggagagagggatactggggcccctgagcactcggcatggggtggaagaggacgagacgctggggcccctgggcactcggcatggagtggaagaggatgaggacgactcggagggtgaatggtcttgcgatggagacccagacgcagaggcggggctggcccctggggagctgcagcagctggcccaggggccggaggatgagctggaggctctgcagctctctgaagaggactaaggcagcccatctgggggcctgcaggggctgctgtgctggtagccagtgtacccagctctctggcagtcaggcccagaggctgccgtctgtgcagctgggggaggcagta

SEQ ID NO: 40639 - DNA, 319 bp, Macaca Mulatta
  misc_feature (1)...(319): n = A,T,C or G
gatggacttatggattcatctaggccaagcaattcatttgctgctcagccatggcatagttgtcataaactcatttatgtacgacctaactctaaaactggtgttcctgttggacattggccaattccagaatctttttggccagatcagaatttaccttcactancctccacgaacatctcatcctgttgtgaggttctcctgtatagattgtgagccaatggtaatagacaaacttccttttgacaaatatgaacttgaaccttcgcccttaacccagtatatcttggaacgaaagtctccccatacctgctggcag

SEQ ID NO: 40640 - DNA, 747 bp, Macaca Mulatta
gggtgagggcctctaggctagcggttgcatttgtggtctgtgctaacacttcgtggttctatatatcagcagcaagtgtgcaaagtaaaggacctgttaactcagatttctggatattttggtggtagcttctagtcccagaatctgtgtttttaaaatactacatgtcattctgtctattcagtcacctggtggtcatctttcttgtactaattaactgttgataagcattttggatattctaggagaaagcctataatttcatatagtttctctttttcacataactgtaacctaaatgtattacttctgataaaactacatatcaaatgtcactgcaaattagttttatatctatcttgtgaggtttgtcttacttattttccttttggttgccatgtaagttatcaccctgaaaatcgtctccctccccttctcttgctgtacagcatgcgttccttttttgtggttgctggctgggtactctgtttaatgaagtagagaatagcacttgcaaaaatacagtcttggtacctagagactgtcatgcagatagtataatttggtatatgtgctaatgcactgagtagaggattattttaacacactattttgcttttgtattttagttaaaataatcgattgggatgtgtagccccctgtgtgaggatgacatcacccacatttctagttttcatggaacctcaagaggtcctggggtccctgtgtccgcctagaatgggcccc

SEQ ID NO: 40641 - DNA, 799 bp, Macaca Mulatta
gggcaaattgagttgatggatttaagataagcctttggggttctgtcagttttctgggctctgaggaagggttgggcctccttcattctcagtattttgagtatttttcaaatgtttgtacgttgtcttgcactgctctaataaaaatgaaagctctctgtcaataaatggttttggatggttggaagatctgggggaagaaaaataagtacacctgagaccttcagttagtcttttatttatttagaataaaaaatagtttgataacctaccagagttagtgcttctttaaaaacactcccgggaaagatggggactgtcccttaggaaagccataaaagtgattcccaatactttgcaattgcttttgatatttagtcctttggaacaaatgtgtgacgttatgtctgatgttgtgtttttagagctgtgaaaagtctgagaaatttcaaggggtattatttaaatgatgattatctggctgaattatgtgtgagctaaaatccagggtagctgtccacttctttttctgttgtcctgaccgtaaaacaaataataagcccatgtcttgaaagtgaatttgcttgtttcctaaccgacatctaaagaaattcagcctttctctttgggcaaaccctgggggatactccccccttgcaccctaaccttaattaatggttttttttaaaacaaagggctaaaacccgaatggacccctaacctaaaccaataacttgtcacgggcctcaaaatacccaacttggcttacaaagaaaaaaaacttggtttttctaaattt

SEQ ID NO: 40642 - DNA, 771 bp, Macaca Mulatta
gggcaatctgaagttactagtttagtctttttaaaaagattatctttttagggaattgaatttgatggctttactaataattgaaatactgtgattaaccaattactttattatttttgtttttaattttgataaaatatgcatgccaattattttaacatctgaacatacctattaagtctaataaatagaatatgtcttgtgtttagatgaagtgctctattccatgcctttacatcatacctaggaaacccatagctcataaaggctgctggaacatacaggcccatgtcagaattaaaccaatagagggtctctgaaagttgaattttcatcttggtgagtcttctggggttatttcttcatgtgttcttgctccaaatgcctgcttctttttttaaagcttttattgggtgaacgacagcataataattctatgtatttaaatgcaactgatatcatacataatggggcagaactgtaaactcttatgccctctgaaaacattgtaaaggctggaatgaaaacgtaaatgcaggcactcatgtagttataaaggtcgaactttcaaaaattgaaatagtcttctcttcagaaagatgctcagtgattggtgcgcaagatagggctggaacaagggactccctgactatcaggggactccgccagattatttggtaattccccctgggtgttggatcaaaataatgaaatggtaaaaagacgggataattatattcctgtgggaaaagccctccactggtaatttta

SEQ ID NO: 40643 - DNA, 265 bp, Macaca Mulatta
  misc_feature (1)...(265): n = A,T,C or G
aagaataatccactctcctggaccattattgctggggaccatgacagaaacctgaaggnnnnnnnnnnnaggtgagaagggccaaacacataatggcgcatgaagactttaacacacttagttatgactctgacattgccctaatacaactaagctctcctctggagtacagctcggcagtgaggccggtatgtctcccacacagcacagagcctccgttttcctcagagatctgtgctgtgaccggatggggaagcatcagtgn

SEQ ID NO: 40644 - DNA, 829 bp, Macaca Mulatta
  misc_feature (1)...(829): n = A,T,C or G
ggaactagcttctgaaagggtttagataaatccctgggaatatatttatgccacattattacgcaaaactaaggatactcagaagacatcccttggcttctttacnnnnnnnnnnnnnnnnnnnntgggtctcactnnnnnnnnnnnnnnntnnnnnnnnnnnnnnnnnngagtggtcctcctgcctctgcctcccaaaggnnnnnnnnnnnnnnnnnnnnnnnnntcgcctggcccccttggcttctgatgcccaaaccagctttcctggacccccaggccactcaaagtgcccagccctgtgctctgtgagtctccctcccaccacacagagcacattcctctactcatccatctctcacactcaggtgtatgcaagagtggtgtcacctaagcctatcaaaggaccttacaataaatttgggaccaaactaaacattgataccagacatttttccccacaaaatgctctaagatctttcttataatcttgttatttctcttcaaagctgcccctagaaagaagctcaagatgttcctcctggggcagagcagctcccctaccactcttgtgtctggattctgtcaatttccatggtgctactgacttggattacctgatgcctttgtcacaaaagtggccaggaagtgggccaaaggttggtttttaaaaatgtcctttcctcccccccaggtgcaaccccaaccatttttccaaccagcctattgagtgttggggttttcactggcagcccctggaaacagattgtctgaatttggaatcctagcttccaccaaatgccccccctcccatgaccttggggacagt

SEQ ID NO: 40645 - DNA, 574 bp, Macaca Mulatta
  misc_feature (1)...(574): n = A,T,C or G
ggtcccagagcctgtagaagaaacacaacccttttaacaccttgattttagttcggtgagacccatttcagacatgtgatctgtagaactgtaagatgataaatgtgtcttgttttaagctaaaaaagaaaaataattctagttctgcgtttgttataccatacttcaatttttgctgtttacttatttgaattgccaactagatagagggggtttcttgtgactagaaaggtttgtatcttcagagcccagcaccacaaccagtgcagtgtaggtgtaagctgcaaggccgttgaattgagaagtgcaagagttgtcttttgaaactttcaaaaaagtctgtcttgtgcttaataataacttctttatgtggagaaaatgaatagcagcattttaattaattgtgtattcaggcattanattagtaaaatagcagtagtttttgaaaatcatctgaagccaatgctataaaacgaatccttagaaggaaagagcatggattcaagtaatatgacnnnnnnnnnnnnnnnnnnnnnnnnnnnnnnnnnnnaaaannncanaanaaacatgtcgg

SEQ ID NO: 40646 - DNA, 671 bp, Macaca Mulatta
tgctctgagaaacattccacttacatgcccaagcaaatgagctgcatctttcctgtattttacaatttagtacaacagttttaggcctcaatcttaacatcactgttattttaaatttggcaatgaatatgaaattacttttgacttacagactgattatattattactttgaaaatgcattaatttcttagaaaagtttggagcctctatctttttttgagttaatatttaagttctcattacttatattaatagcctgtactaagtgaaaatattattcatgcaagtaaacaagtcactataggctttcaagacttttctttaattttagattttgtcatcattgaggtttaaattttttacctactgtccacttaaaatatatataaacaatttgtgaagtgaaatagttttaagtatgatgtatgatgcacctgcatataaatgaaaatggcgtgcacaaagacactttactatgggaactgtactggaagatttatgaaagcatgtgaaattgcacctaaaattgtgttattagtgactatgagcaacaatgctaaatttattgtacttgatgaatgaatgtatttagtctagtcacagttactttggtttaaatgtataaatgtctttagggtttacttctcaatgtgtatgtaatttgtactat

SEQ ID NO: 40647 - DNA, 1617 bp, Macaca Mulatta
  misc_feature (1)...(1617): n = A,T,C or G
atgggaataaagaagaattctcctgcagaggaatacaacttgcggtggattggtttctagataaaggccataaagatattactgtatttgtgcctgcgtggagaaaggagcaatcccgccctgatgcaccaattacagnnnnnnnnnnnnnnnnnnnnnnnnnnnnnnnnnnnnnnnnnnnnnnnnnnnnnnnnnnnnnnnnnnnnnnnnnnnnnnnnnnnnnnnnnnnnnnnnnnnnnnnnnnnnnnnnnnnnnnnnnnnnnnnnnnnnnnnnnnnnnnnnnnnnnnnnnnnnnnnnnnnnnnnnnnnnnnnnnnnnnnnnnnnnnnnnnnnnnnnnnnnnnnnnnnnnnnnnnnnnnnnnnnnnnnnnnnnnnnnnnnnnnnnnnnnnnnnnnnnnnnnnnnnnnnnnnnnnnnnnnnnnnnnnnnnnnnnnnnnnnnnnnnnnnnnnnnnnnnnnnnnnnnnnnnnnnnnnnnnnnnnnnnnnnnnnnnnnnnnnnnnnnnnnnnnnnnnnnnnnnnnnnnnnnnnnnnnnnnnnnnnnnnnnnnnnnnnnnnnnnnnnnnnnnnnnnnnnnnnnnnnnnnnnnnnnnnnnnnnnnnnnnnnnnnnnnnnnnnnnnnnnnnnnnnnnnnnnnnnnnnnnnnnnnnnnnnnnnnnnnnnnnnnnnnnnnnnnnnnnnnnnnnnnnnnnnnnnnnnnnnnnnnnnnnnnnnnnnnnnnnnnnnnnnnnnnnnnnnnnnnnnnnnnnnnnnnnnnnnnnnnnnnnnnnnnnnnnnnnnnnnnnnnnnnnnnnnnnnnnnnnnnnnnnnnnnnnnnnnnnnnnnnnnnnnnnnnnnnnnnnnnnnnnnnnnnnnnnnnnnnnnnnnnnnnnnnnnnnnnnnnnnnnnnnnnnnnaccagaaggcctctttggagcatatggccagcatgcagtatcctcccatcctggttaccaacagctttgggacccctattagctatgctgagcaatacccaaagtttgaatccatgggggaccatggctactattcaatgttaggtgacttctccaaactgaacatcaacagcatgcataatcgagagtattacatggctgaagtagaccggggggtgtatgcccggaatcctaatctctgtcctgacagccgtgtgagccataccaggaatgacaactattcctcttacaacaacgtgtatttggctgtagctgatacccatcctgaaggcaatttgaagctgcaccgctcagcatcccagaaccgacttcagccttttcctcatggttaccatgaagccttaacacgagtgcagagctatggcccagaggattctaagcaaggcccccacaaacagtcagtcccccacgtagctctgcatgcccagcacccagcaactggaacacgttccagctgtcctgcagactaccccatgcctcccaatatccatcctggggcaaccccccagccaggccgtgccctggtgatgactcggatggatagcatttctgactcccgcctctatgagagcaaccccgtgaggcaaagacgacctcccctgtgccgggaacagcatgccagctgggacccgctgccctgtgcaactgactcctatggctaccn

SEQ ID NO: 40648 - DNA, 227 bp, Macaca Mulatta
ccatgcccactccctccaggccaaaggaacccctccacccccacagaggagagggagtgacagaaaggggttccccagccccctcttcattcaggacgcccagagggcctcgagaaaaaccagggctcactgtgttgtcccctaaagcgggtcaagaagcacatactagaaatataaaccgggtatttaaaaaaggaattttaaagaataacccctcctccgccaga

SEQ ID NO: 40649 - DNA, 641 bp, Macaca Mulatta
caccctctgtccctcagtcatccataggctctgtcacgtctggggagaaggtggactatgtccaggtggatctggagaagacctgggccctgcagaagaccatgcatgaacagatgtgcctgcggcagtccttggagcctccccggggtgccaagctgtgacttgggccaccaaaaccagagcggggccaggacagtgcttcagagctgctcctccacactctacagctctgtggtatcagggaccgcatcccttatccagagagcagaggcctgatccaggcacatcctctgcctactcggggcccacgtctgcctttggctggctgtggtccccaccttcacccccttgctaggagcggttgccagcaagcatcctcagtctcttcctgctcctcagacccaggctcccaacagatttccacactcacacttcgctcacggtcctcagcctcttccctctagcctttgggctgttgccctcaatcctggaacatgaggagctaccctgctgaccctgggacccaaggcccgcaggccacagtggacatggaccttttcagccctggcattttttggtcaggggagaggcaaggccatcagacgttgagagatagttgagaaggaaggttaaaggtggtc

SEQ ID NO: 40650 - DNA, 224 bp, Macaca Mulatta
tgggcggcgaaggggcggacgacgcgccgctcggcccgggcggctgctgcgccaagtgcaagaagcgggtgcagttcgcggacacgctggggctgaccctgaccagtgtgaagcacttcagcgaggcggaggagccgcaggtgccgcccgcagtgctctcgcgcctccgaagcttccctatgcgtgccgaggacctggagcagctcgggggactgctggccgcg

SEQ ID NO: 40651 - DNA, 822 bp, Macaca Mulatta
  misc_feature (1)...(822): n = A,T,C or G
ggnnnnnnnnnnnnnnnnnnnnnnnnnnnnnnnnnnnnnnnnnnnnnnnnnnnnnnnnnnnnnnnnnnnnnnnnnnnnnnnnnnnnnnnnnnnnnnnnnnnnnnnnnnnnnnnnnnnnnnnnnnnnnnnnnnnnnnnnnnnnnnnnnnnnnnnnnnnnnnnnnnnnnnnnnnnnnnnnnnnnnnnnnnnnnnnnnnnnnnnnnnnnnnnnnnnnnnnnnnnnnnnnnnnnnnnnnnnnnnnnnnnnnnnnnnnnnnnnnnnnnnnnnnnnnnnnnnnnnnnnnnnnnnnnnnnnnnnnnnnnnnnnnnnnnnnnnnnnnnnnnnnnnnnnnnnnnnnnnnnnnnnnnnnnnnnnnnnnnnnnnnnnnnnnnnnnnnnnnnnnnnnnnnnnnnnnnnnnnnnnnnnnnnnnnnnnnnnnnnnnnnnnnnnnnnnnnnnnnnnnnnnnnnnnnnnnnnnnnnnnnnnnnnnnnnnnnnnnnnnnnnnnnnnnnnnnnnnnnnnnnnnnnnnnnnnnnnnnnnnnnnnnnnnnnnnnnnnnnnnnnnnnnnnnnnnnnnnnnnnnnncctgaacaatcttaatcccacggcaattccttctaactcctcctctctaaccattccctagccccctgggcattcccctgccaactaaaaaaaattgccaacccccaataacaaccttttcttttgaaccctgttttgaaggggggagatatccaatccctaatatccaacccccaatttttgggatctctaggggcaccccccaaaggtttacaatcctttatattctcccccgggcttccgaaaatgatttcccca

SEQ ID NO: 40652 - DNA, 581 bp, Macaca Mulatta
ttaggggatcagaggtgagggaactcatggtttggctatttctcattctttctgcactgtttcaaatttttacaagtgtatgttattgtatttttaaaaagattagcttggcaacaagtctagcctgaaatgggtgctattttgactagtctgagtgaaaagggaggatttcaatgaagtaacccctaaactcagccagtcccaatttttttaacacttggaatatctaattccatttatactgcattcttcaaatgtaattttcaaagatgccttttgcctcatcccttgcttttaagtattattatagccttttggagactcacaaaacaagcagccctaaactctcgcctaggaaagtctctcggaataaatggtttttgagaaccttgagagtgtatgttctatgaaatggaaggaacaagaactagacagagtcataaatgctgttggtcacggacaatctctgccatccataaggtaaatataatacatacggcagcctgctgagtaggctgccagcaggtgaggaaggaactttgaactctcacaagcttgtttcttcatttcccagagagaaa

SEQ ID NO: 40653 - DNA, 378 bp, Macaca Mulatta
ctatataccaaaaatatagtgggcttcctcaaggagatgggctcacatggctatcagggtgaatgcatcagtcagctcatctgccagctgaacaagacccagaatatttgaaagcacggtgcagtggaagcatgtgtttttgcttttgggggaattattatcaggtatctttagagaagattattccttgccttatcttcaaaaattagaaacgaagagtcaaagaaaataccgtagcttatgttcatggcaagcacctctcatcacagtccagttctaaggaaaaattccagtgttttctatattggctgctgcctcgtcagaaatcagcacatgccatgaaagaaggagtcctgctttgttgcattttctatccta

SEQ ID NO: 40654 - DNA, 928 bp, Macaca Mulatta
  misc_feature (1)...(928): n = A,T,C or G
tagcctgcatgctggctcagaaaatgaaagtgaacagttaaaagaactacatgcactaatgaaagaagacctgactcctacggaaagagtctattgagaaaaagcattgagcagcataaagtgaggacaaatagnnnnnnnnnnnnnggtttgagtgtgaaaagctgattcttgttggagatcccaaacagctacctcctactattcagggttctgatgcagctcatgaaaatggattggaacnnnnnnnnnnnnnnnnnnnnnnnnnnnnnnnnnnnnnnnnnnnnnnnnnnnnnnnnnnnnnnnnnnnnnnnnnnnnnnnnnnnnnnnnnnnnnnnnnnnnnnnnnnnnnnnnnnnnnnnnnnnnnnnnnnnnnnnnnnnnnnnnnnnnnnnnnnnnnnnnnnnnnnnnnnnnnnnnnnnnnnnnnnnnnnnnnnnnnnnnnnnnnnnnnnnnnnnnnnnnnnnnnnnnnnnnnnnnnnnnnnnnnnnnnnnnnnnnnnnnnnnnnnnnnnnnnnnnnnnnnnnnnnnnnnnnnnnnnnnnnnnnnnnnnnnnnnnnnnnnnnnnnnnnnnnnnnnnnnngctttgtcatttactcagtgctgtggactttggccatcctgatattaaaactgtgcaggtgtccacagtagatgcttttcagggagctgaaaaggagatcattattctgtcctgtgtaaggacaagacaagtaggattcattgattcagaaaaaagaatgaatgttgcattgactagaggaaagaggcatttgttgattgtgggaaatttagcctgtttgaggaaaaatcgactgtggggacgagtgatccaacactgcgaaggnaaggaaggaaagatggattgcaagatgcaaaccagtatgaaccacagctgaaccatctccttaaagattattttgaaaaac

SEQ ID NO: 40655 - DNA, 469 bp, Macaca Mulatta
  misc_feature (1)...(469): n = A,T,C or G
ggggggtctatgtcttaaccactcatttgaaagacttattgggagtcaatgcagatatggattggggtaatgccagtgagtagtttaaggaaaggacagctctgaggagggcacttgagaaggtttgctaccacagtgagagaaataataggccgggcctggtgactcacactnnnnnnnnnnnnnnnnnnnnnnngcannnnnnnnnnnnnnnnnnnnnnnnnnnnnnnnnnnnnnnnnnnannnnnnnnnnnnnnnnannnnnnnnnnnnnngnnnnnnnnnnnnnnnnntgtggtggtgcccacctgtaatcccagcttcttgggagactgaggcacnnnnnnnnnnnnnnnnnnnnnnactgaannnnnnnnnnnnnnnnnntgnnnnnnnnnnnnntagcctgggctacaaaatgagatgctgtctttnnnnnnnnnnnnnnnnnnnnnnnnnnnnnnnnnnnn

SEQ ID NO: 40656 - DNA, 573 bp, Macaca Mulatta
ctatgcctctcacgcgaatgagactggcaaaggcaaaatgagaaaccgtcgccgtatccagcgcagggggccatgcatcatctataatgaggatagtggtatcatcaaggccttcagaaacatccctggaattactctgcttaatgtaagcaaactgaacattttgaagcttgctcctggtgggcatgtgggacgtttctgcatttggactgagagtgctttccggaagttagatgaattgtatggcacttggcgtaaagccgcttccctcaagagtaactacaaacaagagtcttgctcgctctctcccacgctggagtgatctcggcttactgcagcctccacctcccgggttcttctgtctcagcctcccgagtacctgggaatacagtcttcccatgcacaagatgattaatacagatcttagcagaatcttgaaaagcccagagatccaaagagcccttcgagcaccacgcaagaagattcatcgcagagtcctaaagaagaacccactgaaaaacctgagaatcatgttgaagctaaacccatatgcaaagaccatgcgccggaata

SEQ ID NO: 40657 - DNA, 803 bp, Macaca Mulatta
ggattaatgtttggaaattgtgactcatcttgttagagaaggaaaaggaaattttattctcttcattctccctccctttcaaattaagtattaaataaaaagtggctgatgttccacttggtgcggtaagaagcatttaaatacattcccggccctcataattggtggcttcttgcagaaaggtacttattagaagaaaaacatttccctatgtgttggtgttcggccttctcgttgatgcaattacacggtgagttggtgagcgaatctaccttccccctttttgaaggtatttgtggcagctcctgttgtacgaatcgggggagaggagccacttctcttttagtaagaaatgcgaagagtggcctctccaccttcagagtttcgaaatgagttcactcgggtggtgagtaatgatgtcttaagctgacttattaaaggccgaggaataagatgttctcgctttacctcacgtaccgaatatacataaggcgctggatcaacagggcctcaagcccgtgccaagaacacagtcgggcctggcgatgtcgggtttgtctcacaaagttgaagggtttaaagggaaagcacagccgtttgcttttaacggttttcctctgggaaaatcccacactcgcacaaaaaaaaaggattttgttcactttctcacgtttcccaaggttgaaaattatgggttgggaagtttttccattttgccctttaaaattccccttgaaggggaagcaaagccgggcccaaaatgtccaaaggctctttggttgctggaaaaaaccagttaactt

SEQ ID NO: 40658 - DNA, 1579 bp, Macaca Mulatta
atgaggacagtcacgtttatttgaagacgagagagcaacatagaaatcacaacaaatttttataaggtttactgataacagaagactgaaaaatcgtctgaggggaggtggaacagcatgagggaaggtggaacagcatgagtctaagtgccgtgttaagacggagcctcttgtatgtttggaattgtgagttcctcagtgtgactgcattctcaagtaggactaggaagcaagccagttagtttggagaggtgggcagggatcaagtgaagtggagaattgtgggctaagcaaaggagtgcattttctttccagcaggcagtgagaacctcagacattggcaagcaagacagagccacgttcagattcgtggtgtgaggaagagcaatgccctaagatgcagagtcgagacttcagattccaactgctggtacattggaactgtcaagccggttttgagacagggctgttgtctccctagaagaccccctccaggcctgtctgtggtgctcgtgggcaggagacaacgatctgggctcagcatttggaagttctatgtacacgctggtatctgttgggggtgtcttgggcctctgagaagggcgagtgatttttccccgtgtgaaaacgcagtgatccaactgtgcgtatgtcacctcctgagggtcttgttcatcagagtcctccctgttcactgttctgtcccccgcaggctctgggtccattacagcagcattctttttgtcggagcaccagcaacgaaggagaaagaagaggaggatggtgaggaagatggtggccaccgagtacctaatcacaacaggcaggtgtctggcgataccagttttgaagcttggttcagtgggtgaaggccaactacttgaagggtttcctgtgacagaaacgggcagtgggtcactcgggtctgaccactcgtagggagagtcacggagagagccgaagcatctgtagttccctccgtgggtggcagggcccagagggaagtcagcctggaatgttccattgacgctcggcactgcagggagcctaagttcatgggcctccccctccctggatagatggtacatgtcaaaggagcgccgggaactgcaggacaaggtcatgttctctcctgtgggaaccgtggggcccggctgggctgagagagaaggtttctcatatagacctgtgaccatgatcaccagggggttgctgggtgccgaccactcagtgggggagtgcggatgaaaaactcgacatctgtaggtccctgcatgtgctgcagtcacagggctaatgaggaaactgttccagaatattcttttgtagagctcagggacaggcaccccgtcttccttgtacagcgtgaagatgttaaacccaggacgatagtgacaccaaagagtcacgtgtcctccctgaggcaccacagcgctgggccaggcagagcagaagggcttgtcctgaccacccacatgtgaccgcaccctctggtccaagaagaacccaagacaggccaggatgacgaccatgggcgacatggacttggtgcagcttctgctgccaggatgcagtgact

SEQ ID NO: 40659 - DNA, 84 bp, Macaca Mulatta
tgtgcaagacattgtagtggtggtgtctcgtaccaccgtgaatacttcgagttctggggccagggcgcctggtcaccgtcttca

SEQ ID NO: 40660 - DNA, 207 bp, Macaca Mulatta
  misc_feature (1)...(207): n = A,T,C or G
aggctcactcatctctttaacgctaatatttctggcaaaatcccatgcttgggtttttgtcactaaccctgttaacgcttgcaatcccaataaagcattgaaannnnnnnnnnnnnnnnnnnnnnnnnnnnnnnnnnnnnnnnnnnnnnnnnnnnnnnnnnnnnnnnnnnnnnnnnnnnnnnnnnnnnnnnnnnnnnnnnnnnncac

SEQ ID NO: 40661 - DNA, 891 bp, Macaca Mulatta
  misc_feature (1)...(891): n = A,T,C or G
aatttgtgttctgcacattgctgggtctataaatatgataagcaagtggtgacagaattatagtataaggtgatgtactacatgcagatcataaaggatttggttttaagacttaagtagaaaatccctcttgtagcttattacccaacaatattcagataatgagcttttggagaatatttttttcctatcactagaaagatttacctgggaactgtctaaagtctatacacatatttccaaagcctttaaataccaactgcagcatggagagagaggggtggcagaagctgaaatgcctcaaaagccatttaagtgttacgttgcaggattttcagtccttcttgttatgtaaaagtagataaatatagacgttattctcaactctaccctatagtatcacagtggtccaaatgccagagcttacagataatgtcgtcacagtgcctagaaactcgaactgtattataccgtagcattttcttggtgtttcttaaagtttctttccacaatacaaggtcctctctgcctcttgtttcttggagagttcaccccactgatgagtcttccttccctgttggactcagtcatttggggacgctatacctatcacagagactctgaacatgcatgcagctgaaacagnnnnnnnnnnnnnnnnnnnnnnnnnnnnnnnnnnnnnnnnnnnnnnnnnnnnnnnnnnnnnnnnnnnnnnnnnnnnnnnnnnnnnnnnnnnnnnnnnnnnnnnnnnnnnnnnnnnnnnnnnnnnnnnnnannnannnaaaaanannnnnnnnnnnnnnnnnnnnnnnnnnnnnnnnnnnnnnnnnnnnnnnnaaanancannaaannnnnnnnnnnnnnnnnnnnnnnganaataanaaaaaaaaa

SEQ ID NO: 40662 - DNA, 647 bp, Macaca Mulatta
  misc_feature (1)...(647): n = A,T,C or G
gggnnnnnnnnnnnnnnnnnnnnnnnnnnnnnnnnnnnnnnnnnnnnnnnnnnnnnnnnnnnnnnnnnnnnnnnnnnnnnnnnnnnnnnnnnnnnnnnnnnnnnnnnnnnnnnnnnnnnnnnnnnnnnnnnnnnnnnnnnnnnnnnnnnnnnnnnnnnnnnnnnnnnnnnnnnnnnnnnnnnnnnnnnnnnnnnnnnnnnnnnnnnnnnnnnnnnnnnnnnnnnnnnnnnnnnnnnnnnnnnnnnnnnnnnnnnnnnnnnnnnnnnnnnnnnnnnnnnnnnnnnnnnnnnnnnnnnnnnnnnnnnnnnnnnnnnnnnnnnnnnnnnnnnnnnnnnnnnnnnnnnnnnnnnnnnnnnnnnnnnnnnnnnnnnnnnnnnnnnnnnnnnnnnnnnnnnnnnnnnnnnnnnnnnnnnnnnnnnnnnnnnnnnnnnnnnnnnnnnnnnnnnnnnnnnnnnnnnnnnnnnnnnnnnnnnnnnnnnnnnnnnnnnnntaaaccttacaactgatgttgatcggacttccaatgggcccaccttcaaggttctttgttcacattaaagcccccggatttgattcaaccggacatccggtcggtctttaattgaattttcccnnnnnnnnnnnnnnnnnnnnnttccaaacccttn

SEQ ID NO: 40663 - DNA, 782 bp, Macaca Mulatta
gggtcatttttttttcacaaggaaatgtgactccctaaatgggtaaagggaaggtaaagtcaaaatagtagcaatgtattgtggtttatagcacatgtgaaaataaaatgtatgacaattacaatgtgagacatgaggtggactaattgagaatatattaaggttctcacaccagatttgaagtgatacaatattatttgaagatagattataattgggtattatagactctagtgtgactaagaatatttttaaaagagaggtactaatttaagtcattagtggagatcaaatgaaataaaaataaatttagataaatcaaaagcaggcagaacaaggggaaaagagaacaacaaacagactgacaaaatcaaaccattaagtcgttgttacagtttgggaacttaggtgacatggacaaatttcttgtaagaaacaaaacatcaaaactcacccaagaagaaatagataaataagaaatagtgttttatttattaatggagttgaatttgtaaacaaaagtctttccagtgtaaaactccaggcccagatgctgtcattggtgtattgtaaatttcagtattatgatgtaaaatgttaaaggaagaaattatagcagttctacctaaatactttcaaaaaattaaaggtgaaaggaacacctcccatttcattgcatggggccagcataaccctgatactcaaacttcgcaaagacattataaaaaaggaaaactatagactagtattcatcatgaatatacatttcaaaaaatcttcca

SEQ ID NO: 40664 - DNA, 707 bp, Macaca Mulatta
cctgggcattgagtccagtgggatccatgagacaacctttaactctatcatgaagtgcgatgtggatattcgcaaggatctctatgccaacaccgtgttatctggaggcagcaccatgtacccgggcactgctgaccggatgcagaaggaaatcataaccctggcacccagcaccatgaaaatcaagatcatagctcccccagagcggaagtattctgtttggattgggggctccatcctggccagcctgtccactttccagcagatgtggatcagtaagcaggaatatgatgaggctggtcctcctatcgttcacagaaaatgtttctgaatgggcttccatattcgtgggcttacattttcccttttcctaggtcacagtgatggtactgcttttatccactttcagtagaatacatcactcttcctagcgtaaaccagcaaacctatctctccatccaagtatcctgggcttttacccagataatcacatctggatctctggcaagtacaggtgaattctaataccatattctattttctttgtctatactgttcaaagatatgtagaccagcttaaatacatataagtgacaaggagtaaaatcatgagaaatgtcatttcagaatggataactataattatcaagctttaaaacctagttctcgctaaaatatttaacaagaacaggctatataaacttgtt

SEQ ID NO: 40665 - DNA, 738 bp, Macaca Mulatta
  misc_feature (1)...(738): n = A,T,C or G
ggaattatccttttcccatggaataacttacaaatttcatcaaatattctctctgtccttgaaaaactcttgcctactgtagatactcttgatactgaagctgcttgaaataatgtttttggaattacatattttatttcccatgcccctttttggtagtaagtagaaatattacctgtcaaaacttttactgaaaaaacatgttcacacacacagaaaaactgtatgggaatatttataatagttttattcataatggccacaacacagaaacaaccaaaatatccttcaatgggtcaatggataaacaaaccatggtatattcaaattatcaaatactactcagcaataaaaaaatgaactgatacacaagtcaatgtattatgctatgtgaaaggatcctgattcaaaaggctatatacaaaatgatccaatgtatctgacatttggaaataggcaaaattaaagagactgacaaaagatcagttgttgcaaggaggttgggataggggaatagggaggagataactacaaaagagcatgagggaacttttgaaggtgatggaagtgttcttaattatggtggtggtgacacaactgtatgtgtttgtcaaaacacagaactgtagccggggcgcggtgnnnnnnnnnnnnnnnnnnnnnnnnnnnnnnnnncccaanacnggtggatcacgaagtccaggagatcgaggacctcctggcctaacacggttgaaa

SEQ ID NO: 40666 - DNA, 609 bp, Macaca Mulatta
  misc_feature (1)...(609): n = A,T,C or G
atttcctttgggttattaggcagataaacacttgtcattagtaatacttaacactgtccaaggtgaaaaatgactgccantgtgttgcacatacatgagaagattgcatcttacttcaaagtctggtttgtttccttccttcgtttgactttgacttactattttgctatggtcacgtccttaatatctgtggtacatttcatatatacatggggtgggggcatacttgccattcccatgtgtctcaaggaagcttaatgaggaaactaatgagttaatatttattcttctgaagaaagctgacattttaggagtgttaagtcatctataataaggagcagcaggaatatattatgattgtatcacatgttccagagagcattaccccttacatagaaagctccttggagatttcatggtgttgcatgaacatcagtttatccttatacatccctatgaactataattatcctcatttgatatttgaggaaactgaagtgacttgctccaaagtgactttacagaaacattgcagtttgaggcttaggttgtaatcagataattttgatcttgtacagtaagggaaaatccataagcatacataacaca

SEQ ID NO: 40667 - DNA, 761 bp, Macaca Mulatta
gtggaatgccatcctactggtggccatgctcctgtgtaaggcctcgtggtccaggcccagcggcaggcgtcgcggcagagccagcgggagctcggaggccaggtgagagccagccccagggagccccagagcccttagcccttgggcctgcaagaccgtgcctgtcctctccccacaggtggacctgtttaagcgccgcgtggtgcggagactggcatccctcaagacacggcgctgccggctgagcagggcggcgcagggcctcccggagccgggtgttgagacctgtgccgtgtgcctggactacttctgcaacaagcaggctagtgccctgggtagagaccagccatcagctcacctgtgatgcctcccaccttactcccaggaccttggaaccacccccaccaggcccttctccttcagcccccagggctacagagcagaatttcagtggggtgggggaagcggtgaggtttcagttccccagctgaggcaaggggcatgggaccaggcacccccatgtggagtcctgcttcagtggcctgagaccttcctctcccacccctgtagtggctccgggtgctgccctgtaagcacgagtttcaccgagactgtgtggacccctggctgatgctccagcagacctgcccactgtgcaaattcaacgtcctgggtgagcaccaggggcaggggcccttggcctactccgcctgctcctcacctgatgcctccctccctgttcttcttcctctcccttgcaa

SEQ ID NO: 40668 - DNA, 672 bp, Macaca Mulatta
  misc_feature (1)...(672): n = A,T,C or G
tgagccgcatctaccacgacggcgcgcttcggaacaaggcggtgcagagcgtccggctaccaggggcctgggacccctccgcccaccaggggnnnnnnnnnnnnnnnnnnnnnnnnnnnnnnnnnnnnnnnnnnnnnnnnnnnnnnnnnnnnnnnnnnnnnnnnnnnnnnnnnnnnnnnnnnnnnnnnnnnnnnnnnnnnnnnnnnnnnnnnnnnnnnnnnnnnnnnnnnnnnnnnnnnnnnnnnnnnnnnnnnnnnnnnnnnnnnnnnnnnnnnnnnnnnnnnnnnnnnnnnnnnnnnnnnnnnnnnnnnnnnnnnnnnnnnnnnnnnnnnnnnnnnnnnnnnnnnnnnnnnnnnnnnnnnnnnnnnnnnnnnnnnnnnnnnnnnnnnnnnnnnnnnnnnnnnnnnnnnnnnnnnnnnnnnnnnnnnnnnnnnnnnnnnnnnnnnnnnnnnnnnnnnnnnnnnnnnnnnnnnnnnnnnnnnnnnnnnnnnnnnnnnnnnnnnnnnngattcactggccaaaaatgaggctggaacagtgacaaagtgtaatttcgctggtgatggaaagacaggggcatcctggacagacaacatcatggcccaaaagtgttcggagcgggctgcagcggagatccgagagcagggggacggggcagaggacgaggagtgg

SEQ ID NO: 40669 - DNA, 605 bp, Macaca Mulatta
ggggatttttgagtagggctaattaaagatgtctgatgtcactgtctacaccggtgctcacttgaaccgtatgtttaataacgaaagtacggaagacagcgtcttgaaacaaaataattcttcctaaagctcggaaactttcccttacttacctttttgcctttatcgaagatggctgaaacagagtcagtatctgctctagctgccggaagtgactgtgcctctatgatccaaaaggctcttttgcgttgaattttcgacgacttccggcggctcctctcgcggggattggctgttagcggcgtttgtggcaagctcgtgttactggccgcgtggtctctaccacttgctctaaaaaaatttctcgtcaagtttcacctctttctgttgcgtctctttattgtagttcttacctatatttattttttattgaaactttttaaactttcgtgacttttttcttttttatttcttctctccatatctctttaatacatttatctcttccttgtttcctcctcttcctctattccttttttttttgttattgatatattctttcccatctttcctctctcctttctccctttcattcttttcttcta

SEQ ID NO: 40670 - DNA, 234 bp, Macaca Mulatta
tggagctgcagctctcccgggagcagggaaccaccctgcgcgggagcgctgaaatcgtggccgagttcttctcattcggcatcaacagcattttatatcagcgtggcatatatccatctgaaacttttactcgagtgcagaaatacggactcaccttgcttgtaactactgatcttgagctcataaaatacctaaataatgtggtggaacaactaaaagattggttatacaagt

SEQ ID NO: 40671 - DNA, 790 bp, Macaca Mulatta
  misc_feature (1)...(790): n = A,T,C or G
ggcacgannnnnnnnnnnnnnnnnnannnnnnnnnnnnnnnnnnnnnngggcaaatggnnnnnnnnnnnnnnnnnnnnnnnnntgnnnnnnnnnnnnnnnnnntcccnnnnnnnnnnnnnnnnnnnnnnnnnnnnnnttgtggtggcggaannnnnnnnnnnnnnnnnnnnnnnnnnnnnnaataggaagattgctcaaacccaggagaacgaggctgcagtgagcaccactgtactccagcctgagcgacagagtaaaannnnnnnnnnnnnnnnnnnnnnnnnnaaagatcactggataaacacttcaccaccctccccaacacacaaaaaatgttgagaataaatgtaaaagcgtaaagaaaactttcagctatcttgaggttcgtttttggcactttgatctgtaagcaatcaaaactggagaaacgctatctcaaagaggaaagtctgtaggaaccatacaaggattctcccacatgactccgccaggcaagccaatacctactgcacgggagggtgtgatggtggcccaccaagtactgagtgaaggagcccaggggcccaaggctctgaaaaaggaaactccaaggcccaaagaacacttaatgtgaagcagtccagccccagggacggtgaatcagcaagggcaaggggtctggctggaacaaaaataagtggcaccctgcccctgctgggcttctgactttccctgatccgtaaaaaaaccccaaacttaaaattgggttggggaaaccaccccccaaatcctggtttaaagaaaaagcct

SEQ ID NO: 40672 - DNA, 725 bp, Macaca Mulatta
  misc_feature (1)...(725): n = A,T,C or G
tgggttcagtggntcagaacactggcgggctgccatcccagttcagaaccaacagaagagggtttcaagaacaaagcatcgcaatgaggacctaaggcctgggcagtgatgctctgttcgctgagtcccagctagactggaccttcacggcccactcctgcctccctgcctttttagtgtctcatatgcaaatcattatgaatagcaagttacaagaagggtgtgagaggggctgagggacccaagaaggccctgactctgcgtgatgggatctgatgcagctctcagaggatgggccattttacctgggccttgaggcatgagtaggagttcaagaaaaattccttccagttggaggaaatactatgtgcaaatgcctggaggtgtatttagaagtggtttggggctgggcacggttnnnnnnnnnnnnnnnnnnnnnnnnnnnnnnnnnnnnnnnnngcnnnnnnnnnnnnnnnnnnnnnnnnnnnnnnnnnagtccaacttggtgaaaccccgtttctatnnnnnnnnnnnnnnnnnnnnaggcgtggtggcggnnnnnnnnnnnnnnnnnnnnnnnnnnnnnnnnnnngagagaatcgcannnnnnnnnnnnncnnnnnnnnnnnnnnnnnnnnnnnttcgnnnnnnnnnnnnnnnnnnnnnnnnnnnccgagactcccgtctcaaagatagaagagaagtagagaaacaaaactcgaggg

SEQ ID NO: 40673 - DNA, 579 bp, Macaca Mulatta
gagctgcccgggctaatgttgtttcagagtgcacctctagaagcatgcaatgttcttttctctaattggtcatgttaattttgatctcttagtcaaggtgttatctgatttctccactcttctgtttttttctcccccttggtctgtgaggaggcactgtaagatcatgtaaatatcctgctttttattaaaagaaaaatgtttgttctagatttaacatccattgatgattcttgccagatttcatctttactgtgatggttgcgaaataattattttccaactctagccctccctccagtcagttcttggcattctacaacaagcaagagacttcctgtctctcccatttgtttgtttgcttatctgttgtctctatgggctcatgaatttttcccccagtgttttataactcaggactgaatttcattattttggtgttcaaactggcatttccttgtgcttcctggcaaaactgagggtttgtaggtcaactgtgtccatagattacttggattctctccaaagtcagaaaaccttacaaagaaatatattcatgttgtgttcttctgtatccct

SEQ ID NO: 40674 - DNA, 828 bp, Macaca Mulatta
  misc_feature (1)...(828): n = A,T,C or G
ggnnnnnnnnnnnnnnnnnnnnnnnnnnnnnnnnnnnnnnnnnnnnnnnnnnnnnnnnnnnnnnnnnnnnnnnnnnnnnnnnnnnnnnnnnnnnnnnnnnnnnnnnnnnnnnnnnnnnnnnnnnnnnnnnnnnnnnnnnnnnnnnnnnnnnnnnnnnnnnnnnnnnnnnnnnnnnnnnnnnnnnnnnnnnnnnnnnnnnnnnnnnnnnnnnnnnnnnnnnnnnnnnnnnnnnnnnnnnnnnnnnnnnnnnnnnnnnnnnnnnnnnnnnnnnnnnnnnnnnnnnnnnnnnnnnnnnnnnnnnnnnnnnnnnnnnnnnnnnnnnnnnnnnnnnnnnnnnnnnnnnnnnnnnnnnnnnnnnnnnnnnnnnnnnnnnnnnnnnnnnnnnnnnnnnnnnnnnnnnnnnnnnnnnnnnnnnnnnnnnnnnnnnnnnnnnnnnnnnnnnnnnnnnnnnnnnnnnnnnnnnnnnnnnnnnnnnnnnnnnnnnnnnnnnnnnnnnnnnnnnnnnnnnnnnnnnnnnnnnnnnnnnnnnnnnnnnnnnnnnnnnnnnnnnnnnnnnnnnnnnnnnnnnnnnnnnnnnnnnnnnnnnnnnnnnnnnnnnnnnnnnnnnnnnnnnnnncccaatattctctggcccattggatggaggattccttcgcaccctgtaccttcccggccgaccccaggttttgggcccgcattcttgtgacagtcgcttgatacgaacgcgcgctgagcccggtgtccgggggcgcccccccccggcccctcttcggaagaaacgccttcttctaaagaccaaatttttcgttggttggggggcgggcccgg

SEQ ID NO: 40675 - DNA, 663 bp, Macaca Mulatta
  misc_feature (1)...(663): n = A,T,C or G
gtccttacccataaggagggctctttcagggaaaacatagagaccagctcttgggacgtggaggctttgggtctagtaattggtattctagtccctgcaatggcatctttactcagcgccctgttctatggtttctgtagcggaggaggcgatgactcggctggtcaacattctgatcctgtcagtcagggatgcacgagactggttgatgaaaacagaggcccgcttaaagaaggaaggtgttgttcaggaagatgattatgaaaatgaagttgaagactttggtgagcttcgtcctagaaggcgttctcggaaatgtggaaagcagagaaaatactaatgtccatacagctgctgcctcctcatccttcggaacattccattctgacttagaattctgagtgctgtggcagaggacaaaaacaatgtgacttagcattttaaaaagtaggggagtctaataacatcattgctttttgttctcattacttctctttcagtggcttaggatctggttgctccctcanctctaaagtgtttccaagtagagtctagcagtattagttccccccacaagcaagttcaggtagaggagttgtagttaaagggaatgttgggactcctcactgcatggtccctggggtgcctggctcatccccatca

SEQ ID NO: 40676 - DNA, 844 bp, Macaca Mulatta
  misc_feature (1)...(844): n = A,T,C or G
ggctctgggactgcttacagacaaatagcttttattacccctcatacctcgtgagctttattttatagtagaggaaggtcagtgtttcataagcatgggtttgttaagtggttaagtacagtgtgtcccccagtgtgctggatgatcggtcctaagacaccccactggtaccaaaatccagggatgctcaagttctttgtacaaactgacatatttgttggctgggcatggtggctcatgtctgtaatcctggnctgnnnnnnnnnnnnnnnnnnnangatnnnntnnngnttgnnncttcnnaccnncctgngcnacntnntgngaccccctctcttccnaaaattaactgggtgtggtggtgtgcgccgatagtcccagcttacttggggagactgaattgggaggatcactgaacctcaagacttggaagcatgcagtgaactatgactgcccccattgtaactcccataccaacctgggggacaaggtgaaaaccacacccttgttctcctaacaaaagaatgacaactttgcctaaccattcatgccacggcaaaattgttctaatcctttcgaaaagaaaaagggcctccatgttgcaagcccccaggctatgcccttaatgaaagctccccaatcttgtattgacaccatttttttcgcctagtctaactaccagtagggttaagtatatcaagagccgttatacaccaaaccttnaatcaagctacgttcaaaataacatgcacatactagcctatgtccgcataagaccaccaccctgacacgccataattcacatatttgctgtacttactaccccgtccactggtaatagaca

SEQ ID NO: 40677 - DNA, 766 bp, Macaca Mulatta
ggatctttagctttcttataatagcttaaagtgaattctgagtggagagagaatgaaggccaggccttagtaactgcaagaatcataccaaaatgggttggatgggttttaacagtgaccgataagcattacgacctcactctctgttagttcagttggctcgatgctgtctcatcatctcatttagggtacaatatgctgaggaactgaccagggtccctgaacagcgagagatagggaagagcagaaatccattcctgtaccaagtgtctaacacttaacataagtgagagctggcgtgagattatctgtgctgtggaaaactaagggcctatcgatacctctaagtatataatcactgccttgtcacattttaattagctccttgaggctatagaaagaagttcgcttcttatcccccaaattaagcatcacttctacaaacaatcaatgtttcatttcaaaacccaaagtagagcaatgtttgattttccttactttctgactttgagaatgtgtttcatttttagaaatatgttataggaatgtaaagtaactcttgtttccccaataaccacctccttattatctgttcccctaagctgaatccttccaaaggaaattttgtcttcaggctaagtttagtggctgatggaaatcagcattatatcaggtgggccattgcgtcagtggaaaagcccagaccaccccccacacagaacttttttctccaaacaaccaaaaccaacatgttcacaaaagcttc

SEQ ID NO: 40678 - DNA, 722 bp, Macaca Mulatta
cggggggctttttaaaagagtttttccctcaaggggggaggcccaaaaaaaccggggtttttccctttgggtttcttttccctgggaaaggccccttttcaaaacccttaatttcttttccccaatttaccccaaaaaggggaaggttttccaggaaaaacttttccctccaattttccgattgtgaccctttttggaccattggacccaggttggctggttagggggtggaggggcagcccacggggccagaaacccggatgggccattattggttttttggggttggtgttccactttctaacgattggccaaacgggcggccagggtttttgggttggtggcaaaacatttcgggcctcccacggacaccatgttttccaaaaagcacccctggccagagcgggtgagtccccaccacctcgaactctgggaattcgagcccacagctctgccagtaccccaagactcagcactggtctgatgacctgctaattcactgacagcgtagggctgtctgttgtttttgcgcaggttggtgtgaacaaagttcacaatatctggtcgaataggagccttgaatacagcaggcaaagtgacatttttgccagatgactcccccttttcggagtacaccgatatcagtgggcgagcacacgccatggcggagagaggagaaaaccacgttcctctcaccccggatgctgctacaggaaaagccc

SEQ ID NO: 40679 - DNA, 866 bp, Macaca Mulatta
  misc_feature (1)...(866): n = A,T,C or G
gggtgaactggtgatgggtgatggagggttcagagaggagtgatcgtcagatgtgtgaatggatggtttaagtgaaaataatcaactgcatagttcccacgcaagctgggcaatgagaatccttggaaacattggtgatgctatcagttttatagctttattacttaagggggtagggaaaattagttcccattctttcaacccccttaactgtattgctcttttcctagaatagtgatgcaaatctgcatgaacaactaattgtaccatagtgttcattgatacaatcatagcattgtctgtttttctcttcatatttatatgggggggagggcactggatgcaaaagttgaagatcgtgacgctatgatgttagttttccttagctgattttgagggtttttaaaaataaagcaagattgactaacctacggccaaaggaaccagagactgtggtttcaaccaccattataaacatgctttgttgaaaagaagtatggcatccttggtacactggccctgaagttttgaaactacctaacaaatcgtgctatttgcctggccttccccgttcccctttctctttaaaagaacaattttctgcagggtggcaagggtgaagccaaccccaggaagaaatgctggcaattccttggggggggtgggtttttaaatttaatttaattttttttggncaaaatagaagtgttgggatttcgttttttaggggggcttagttaaggcccaaagaaggcgcaatgtggtttgggggacctgggttggttttgcaaacgcaaggaaaatgaattcccacaacccactttcccccccaatttcccgggggtgggcagaaatttgtggacatt

SEQ ID NO: 40680 - DNA, 1390 bp, Macaca Mulatta
  misc_feature (1)...(1390): n = A,T,C or G
gcaggatggcatagtcaatccaacaataagaaaagatttgaaaactgtaccgaaattctactgttgtccaatcgaaggctgccccagaggccctgacagaccattttctcagttttctctcgtaaaacagnnnnnnnnnnnnnnnnnnnnnnnnnnnnnnnnnnnnnnnnnnnnnnnnnnnnnnnnnnnnnnnnnnnnnnnnnnnnnnnnnnnnnnnnnnnnnnnnnnnnnnnnnnnnnnnnnnnnnnnnnnnnnnnnnnnnnnnnnnnnnnnnnnnnnnnnnnnnnnnnnnnnnnnnnnnnnnnnnnnnnnnnnnnnnnnnnnnnnnnnnnnnnnnnnnnnnnnnnnnnnnnnnnnnnnnnnnnnnnnnnnnnnnnnnnnnnnnnnnnnnnnnnnnnnnnnnnnnnnnnnnnnnnnnnnnnnnnnnnnnnnnnnnnnnnnnnnnnnnnnnnnnnnnnnnnnnnnnnnnnnnnnnnnnnnnnnnnnnnnnnnnnnnnnnnnnnnnnnnnnnnnnnnnnnnnnnnnnnnnnnnnnnnnnnnnnnnnnnnnnnnnnnnnnnnnnnnnnnnnnnnnnnnnnnnnnnnnnnnnnnnnnnnnnnnnnnnnnnnnnnnnnnnnnnnnnnnnnnnnnnnnnnnnnnnnnnnnnnnnnnnnnnnnnnnnnnnnnnnnnnnnnnnnnnnnnnnnnnnnnnnnnnnnnnnnnnnnnnnnnnnnnnnnnnnnnnnnnnnnnnngattcagaggcttgctctcttaaggagagcctacctcttttcaaaattgctaatcctgttgctgttgagccaataagtactggtgttcaagtgaacttgggtaaaagtccatctaatcctttacaagaactggggaacacatgtcaaaagaacagcatttcttcaatcaacgtgcagacagatctctcttacacctcacaaaactttataccttctgcacagtgggccaccgctgattcctctgtgtcatcttgttctcaaactgatttgtcgtttgattctcaagtgtctcttcccattagtgttcacactcagacatttttgcccagctctaaggtaacttcatctatagctgctcagactgatgcatttatggacacctgtttccagtcaggtggggtctccagagaaacccaaaccagtgggattcaaagtccaacagatgaccatgtacagatggaccaagctagaatgtgcggagacatttttgagagtgttcattcatcatataatgttgctccaggtaacattataagtaacaatttagtagcagagacagtaactcatagtttgttacctcagaatgagcctaagactttaaatcaagatattgagaaatctgcaccaattataaacttcagtgcacagaatagtatgc

SEQ ID NO: 40681 - DNA, 1426 bp, Macaca Mulatta
  misc_feature (1)...(1426): n = A,T,C or G
ggtagcagtgttattctacactttttaaaagaagcgtcctccttttgcccatgaatcatgtttaccccatacccagtggcagaggtgttctttaaagacttgaatatatgaatgtgtgtgtgttgttacttaaaggttattcctctttgtaataggaaactatatgagatgaacacttttaaactttccaacacaactttcattactaaccttctgacacgacttccataactagaaggtggaaaccaaaaccctcatggtagtatttcctctggcagctggtgctgtgggcaactgttttgttcaatcgggtttcttttctttttgcctctaatgcagaaatcaacagaatcactcacacatacaagtacactcacatgaactaattatttctctggatatcgttctgtgttccatgtaaatttatttaccaacatctattgtcaacatgtacatctaccttagtgtggtctgcattctttctctgagagtacctcacagggctcctgcctgatcttcgtagtttgttcattcatccatctacctgttcatttgttcatccatgtattctaacatttgtgtgtagtgtgcaactgtaatgtcatgcttttgaagagagaatagctgcccatagcagccatccgtctggataatagcaaaacactctatagataagttattttgcactttcttatgtataaagttggtagaaacttatttttgctttgtatcatttaaatacattttgttttggtaaatgaactgtgtataaaatatttatgccgttaaaactgtttttagaaagtatttttaatttcagcaagtttggttacttgttgcatgactattaacacagctgactttttgtgtcagtgcaatgtatattttttgtcctgttattaacttgtaagccctagtaatggccaattatttgtacagcaacagaagtaaattgaagatactggctaagactggattgattgtggacttttatactatattgcagaaaccaatatgtttcttggttatgtaaaagacctgaagaattactatctagtgtgcaatctgtgatatctgaatgttcattgaatacttgtctctgatgcaaaaatgtagagtaccccaattaccatacatgattaaatgcaataaccccggccactgacgggagatactgccattttngaactttgtcggccgcctcgggcccttcnnnnnnnnnnnnnnnnnnnttcgttttgggcccgccggggcccctcctaggggaaacggaaccgtgggcccataaccgggttccccaagggaaaaatcccgcggncctttgaactaatgggcctctgggaatctcttcccccacaaattaaaaaacacggcccccggcgtggggcaaacaccggagaccgtttttcggagaaatacaatttcc

SEQ ID NO: 40682 - DNA, 784 bp, Macaca Mulatta
  misc_feature (1)...(784): n = A,T,C or G
ggggctcacgnnnnnnnnnnnnnnnnnnnnnaaggccgaggtgggcagatcacctgaggtcaggggtttcagaccagcctgtctctactaacaatataaatattacctggaagttgcagtgggnnnnnnnnnnnnnnnnnnnnnnnnnnnnnnncnnnnnnnnnnnnnnnnnnnnnnnnnnacgnnnnnnnnnnnnnnnnnnnnnnnnnnnnnnnnnnnntagcctcggcgacacagcaagactgtctcaaaaacaacaacaaaaagcgggacgtgagacttctacctgctcactcagaatcatttctgcaccaaccatggccacctttgtggagctcagtaccaaagccaagatgcccattgtgggcctgggcacttggaagtctcctctcggcaaagtgaaagaagcagtgaaggtggccattgatgcaggatatcgccacattgactgtgcctatgtctatcagaatgaacatgaggtgggggaagccatccaagagaagatccaagagcaggctgtgaagcgggaggacctgttcatcgtcagcaagttgtggcccactttctttgagagaccgcttgtgaggaaagcctttgagaagaccctccaagacttgaaactgagctatccgggatgtctatcttaattcactggccacaggggaatcaagtctgggggatgaactttcggcccccaggatgaataaaggtaatattcatcggtgggaaaaaagcagccacttttccagattgagaaaagcttcttgaaacaaacttgggactc

SEQ ID NO: 40683 - DNA, 171 bp, Macaca Mulatta
cttggtctggttgaaatattttttagtcctgtttttccactctagttttaaatatttttttaattgaggtctgattgataaacaaaaaggtgcgcatatttactttacacatacagcacaatctatgccataacaaacccataatttctaaaagtttacttcctccctcct

SEQ ID NO: 40684 - DNA, 934 bp, Macaca Mulatta
tcctagagacagcatgctttatttctcaaaattccatatgtgactatgagtgtatggagaaatcgtttgttgtttgatttttaaatgtattgtttaatttgtccttggtaggcaatctccttcaaatattattagcaaaatcagacatagatcaaagtatttatttgcatcttctgactgaaattaagcagtacttggtttcaaatgttttaaaaataacaccttttaaactggagttgatattgaagatcatgtaaaattgttctttatagactttgtattctaaatatgaagtttattgttactacttattagttaattccatggcagattttcattactattgaatatattatacgtagaaactagggtcttaaataattaagttgacttttcctgttagttattccttaagataaaattatgctggtgatgggactgttgaatttctcaagaaattaaactctttagaggcataagtaatcgaaagactgtttcccctgaataagtacaaataccaataagccaaaactcatataaagattttcgtattataattccatactgtaagacataaaattatgaaaaagccaaaacattttcctgaaaatgctccctagaaattgtaattccatcttaactgctccaaagatctagatttacatggaaatataaagagtccttctgagaaaaggaaatgctgtgaatagtggaaatcgtctgggccttctaatgatgccttaatcactaccaaagagtgctttattcattcatgcttgttttcatgtgaccacatattcaattcatgctttgcccatttaaaaaccgtgatatgttttagcttatgccacagtgttactaagctaattgtacaatgctgtagtttaataaatactctgctgtttctttcacccctaaatcttcatgggtgtcc

SEQ ID NO: 40685 - DNA, 648 bp, Macaca Mulatta
atctgagtccctgcttgagtttacacatcatcttgcccctgcctcttcattcatgactttccttccacattggccccccatgagtcccttgctcccccaagctgctttcccctttaaggtctctgtattgttccttcttttgtctagaacatccttcgtggacttgttctttctcactctgaaggtctcatttctgatgtcgcctttctgagaagtcttccttgactatataaaagtcgtccccagttactctttggaataagccccctcattactctctttactaccccctgcttatcgtgactctgtagtatgcttccctccatttctcattagtctctggaatagcctcctgttaatcgttactgcctgtaatacctcattttcactctcggtaatacccccctcctcgatgtgtttcctttgtgaccccatcacaatatgtgtctgcttccttgtctttgcttctctttccccattacagtagaagctcttgagggtcagcgccatctttgttttgttcttctcagactcttcaaggtggagcatggtgcctgggtcattgaaggggcccaggatgtggttgttgaacaggtgaatggaataacaaaagcctcattgtgtgccattagactaccagagtacacg

SEQ ID NO: 40686 - DNA, 967 bp, Macaca Mulatta
  misc_feature (1)...(967): n = A,T,C or G
aggccctgagctcaagcgctccttnnnnnnnnnnnnnnnnnnnnnnnnnnnnnnnnnnnnnnnnnnnnngcacctggcaggagtaatttctcagtgcatctctgacggggaggttaatgaggaaaggacacctggtttgaaggcttctccgtgtctgtccgcgggcgctgctgatctgagccaaggcaccattccgcaggcatgcctgaaatgactcccgtggctgtcgtggtgccatctggagagcatttgctcactgtaacggtcccgtcacacttacctgatgaggatctgttggttgactttgacagtgataaatgaacacagcctacctgggtgtttttgcatttacagtttgggggtttgaagtgctggctagaagctgacggagtatgtgtatgcaagtgtgcatgcaaatgtgtctgtgcttgcatacaagagtgtgtgtttggagaattggatttgaaaattctagctcagctctttggggtagtgtttgatctgaactcagtgaaaggcagagggccctggactttcctgggatgatgggagctgggcaccccggatgaggcttgggtgtgagtaggagcgggatgggccactgaagagaagacagagtgggtctgtagggccagnccgaggtacccacagtggaaggtctgcnagctgatttgggaagtggcgtttatacctgtgtcacttctattctgatagatttccctctccttagagaaactgcaggaagaacgacggccagatactggtaacaaacggtgtccccgctgcggtgcccccggttccggaagctggggggcacaacaactcttccggccgaggagagccngaggaaaatttctgtagancaaaaggggttctccatcaagactctctcttctctctctgtctccactgccgcctgctccgccctcccacgcgagaagacnnnnnnnnnnnnnnnnnnnnngaa

SEQ ID NO: 40687 - DNA, 211 bp, Macaca Mulatta
gcaagcatgaaatgtaaagtatttatttaaataaaaagaaaacctctaaattggtaattgaattacctccctgtagcttatagtttgtgacatttcttgaccttgctagttctttcattagatctgtgcagatctagtcatctggttaaggatttaagcagatgcaactataaacccaagaaactgtattactccttactggttggtcata

SEQ ID NO: 40688 - DNA, 388 bp, Macaca Mulatta
  misc_feature (1)...(388): n = A,T,C or G
ccatagggagacaacacaacaaagctgctgggctctacaatgctgttttatttatttgtctctacttgtcatttattggattagtaaactgaggtgatgcaagtaattgtgaatttggaatttgttccaatttaatgacttggtgtaccaccattgataaaaatcagcaccaaacattcctagttttcaaacactatggcatatatcattgaacattgctgcacgtttcttgtatcataaatcacgtcagatactacagtgctctttgaatattgtctgctannnnnnnnnnnnnnnnnnnntttaaagttctggattacatgtgcaggatgtgcaggttcgttacatgggcaaatgtgtgccattgtggtttgctgcacctatcacc

SEQ ID NO: 40689 - DNA, 1827 bp, Macaca Mulatta
  misc_feature (1)...(1827): n = A,T,C or G
gaggagtttggcatgtctcatgaatcatcagaggacttgtttcatttcaacgtagggggctggcatttctcggttcccagaagcaaactctctcagtttccagactccctgctgtggaaagaggcttcagccttgacttcttcagaaagccagaggctatttattgacagagatggttccacatttaggcacgtgcactattacctctacacctccaaactctccttctccagttgtgcggaactgaacttgctgtatgagcaagcattgggtttgcagctgatgcctttgctgcagnncagactctagataatctgaaggaagggaaacaccatctacgcgtgcggcctgcagacatacctgttgctgagagagcatctctgaactattggcgtacatggaagtgtattagcaaaccctcagaatttccaatcaaaagcccagcctttacagnnnnnnnnnnnnnnnnnnnnnnnnnnnnnnnnnnnnnnnnnnnnnnnnnnnnnnnnnnnnnnnnnnnnnnnnnnnnnnnnnnnnnnnnnnnnnnnnnnnnnnnnnnnnnnnnnnnnnnnnnnnnnnnnnnnnnnnnnnnnnnnnnnnnnnnnnnnnnnnnnnnnnnnnnnnnnnnnnnnnnnnnnnnnnntgaattttcttcgctcacagaagattttactaccggataatttctccaacattgatgtattagaagcagaagtggaaattctggaaatccctgcactcactgaagccataaggtggtaccggatgaacatgggtnnnnnnnnnnnnnnnnnnnnnnnnnnnnnnnnnnnnnnnnnnnnnnnnnnnnnnnnnnnnnnnnnnnnnnnnnnnnnnnnnnnnnnnnnnnnnnnnnnnnnnnnnnnnnnnnnnnnnnnnnnnnnnnnnnnnnnnnnnnnnnnnnnnnnnnnnnnnnnnnnnnnnnnnnnnnnnnnnnnnnnnnnnnnnnnnnnnnnnnnnnnnnnnnnnnnnnnnnnnnnnnnnnnnnnnnnnnnnnnnnnnnnnnnnnnnnnnnnnnnnnnnnnnnnnnnnnnnnnnnnnnnnnnnnnnnnnnnnnnnnnnnnnnnnnnnnnnnnnnnnnnnnnnnnnnnnnnnnnnnnnnnnnnnnnnnnnnnnnnnnnnnnnnnnnnnnnnnnnnnnnnnnnnnnnnnnnnnnnnnnnnnnnnnnnnnnnnnnnnnnnnnnnnnnnnnnnnnnnnnnnnnnnnnnnnnnnnnnnnnnnnnnnnnnnnnnnnnnnactgctgtccaaccctcagagagtgtactggatcacatatggacaaaccctgctcatccacggggatggccagatgttccgacacattctcaacttcctgagacttggcaaactctttttaccatctgaatttaagnggaatggcccctcttctgccaggaggtggaggaataccacattccatccctctcagaagcccttgcacaatgtgaagcatacaagtnnnnnnnnnnnnnnnnnnnnnnnnnnnnnnnnnnnnnnnnnnnnnnnnnnnnnnnnnnnnnnnnnnnnnnnnnnnnnnnnnnnnnnnnnnnnnnnnnnnnnnnnnnnnnnnnnaccacagcctacatgcctgtggactttgaagactgcagtgacagggctccatggaacaaggctaagggaaacctggccaggtccaaccagatggaggaggctgagcagtatacccggcccatccaggtgtccctatgccgaaatgccaagagggctggcaaccccagcacatactcacacaaacctggcttatgtaccaaccccggacactgggggagccaccctgagagcccccc

SEQ ID NO: 40690 - DNA, 583 bp, Macaca Mulatta
  misc_feature (1)...(583): n = A,T,C or G
cctttctaatttattcaaaaatatagttgaggcttactgagtagggtccagttcatttctaaagttatttcctcccaattaaagtggtgagcaactggagattgacgtgctagaccagccagatctcaatattattgtttacttatccagcattctaaaaacctcaaatcactttctaaaacttaactttataaactttatattttgccatataaactataacacaaactgaagaattgttaaaatctatctaaataaagctgtttgcnnnnnnnnnnnnnnnnnnnnnnnnnnnnnnnnnnnnnnnnnnnnnnnnnnnnnnnnnnnnnnnnnnnnnnnnnnnnnnnnnnnnnnnnnnnnnnnnnnnnnnnnnnnnnnnnnnnnnnnnnnnnnnnnnnnnnnnnnnnnnnnnnnnnnnnnnnnnnnnnnnnnnnnnnnnnnnnnnnnnnnnnnnnnnnnnnnnnnnnnnnnnnnnnnnnnnnnnnnnnnnnnnnnnnnnnnnnnnnnnnnnnnnnnnnnnnnnnnnnnnnnnnnnnnnnnnnnnnnnnnnnnnnnnnnnnnnnnnnnnnnnnnnnnnnnnnnn

SEQ ID NO: 40691 - DNA, 636 bp, Macaca Mulatta
gggcagacacaattcatttccttatggaaacaattaaatatttttcatttaactctttcttaacaattaaatatttcttaattaaatatttcttatttaattgtttcttaacaataaagggcgacacatacaatggcagaataaaaacggtatcctatgtaatgcatcagagaattcagggatgttcaccttgagagagtgacattaaggctgacatctgaaggataaagaggagttaatctaccagtttcactgccccttcccaactccccccggtctgttcatgcccccctcctctctctcctacaccccacccgtggaggtcctggtgagcgggaagccacatgtgggccccaccgtgctgcctgccacctctacacccccttctcccgataattattccagccccggttcttacgctttagggtaccggggttactctggcacctgaacctccctttcttctccccttcattactacggcttttggccgcttttctccctccttccttgtgtcccagcctctaactattttgggacacaaactctctgtcaacaattagagctgctcattgggactctattttcttcaaacactgtttttaatccacttctatacctttcttgaacattcta

SEQ ID NO: 40692 - DNA, 739 bp, Macaca Mulatta
  misc_feature (1)...(739): n = A,T,C or G
ggggccatgttctctgtgtgtctttgtcttttgtgtgttctttcattctccaccacccccggcatggaccccaacaagtggcgcagtgagcagggtcagcacggggccacataacaagtccctaaaccagcatatataaatccatctatgctttgccatagttcctgaagacatcctttgtacaaagattcaggaggtacatgtgcaggtttgttacgctggagtgcaatggcgcgatcttgannnnnnnnnnnnnnnnnnnnnnnnttcaagtgactctcctgcctcagcgtcctgaatagctgggattgcaggcacccaccaccacaccctnnnnnnnnnnnnnnnnnnnnnnnnnnnnnnnnnnnnnnnnnnnnnttaggctggtctccnnnnnnnnnnnnnnnnnnnnnnacttnnnnnnnnnnnnnnnnnnnnnannnnnnnnnnnnnnnnnnnnngtgctttgcctgtatctttatttattgtattatctttagccactaattgtagccataattgtttctgacaagggtggctttatgtgcagcatgtgtgtcaggaggcacagcaggccatctggctcttcagtggcttcactactgtgcagaaagcagcatgcatggatgcactaaaccatggacacattaacttcttccctgaagccagaatgacaaggccctgccccctgtgggaatttacatcaaaagcctgaagagaagaaaataagtgaaaaaga

SEQ ID NO: 40693 - DNA, 397 bp, Macaca Mulatta
aacagaaatggcatcaagaaacccctatgtcaaagatgtaaatcccttaaaagggtgggcccaagttcctgaggaacatgcactttgccaagaagcacaagaagggccggaagaagatgcaggtcagtgatgtcaaggccacgagtgaatcaactgaggctatcagggcccttgtgaagtccaaggaggtcaagcccaagatcccaaagggcattaagtgcaaactacttgcctgcactgaccactccaagctcaggaaatgtgctcatccctgcatcatcaagggtttcaggctctgccagccaaaatcaaagaccagggctcaaactaagcacaggatgtggctctgtctccagctcaggctcccaaatgtggccaggcctccaccagagctcca

SEQ ID NO: 40694 - DNA, 674 bp, Macaca Mulatta
gagctgcgctcccgcccacgccggctatgacgcgggcctcgtcagccggtaacggggagcagaggtgggagttagggaggcgaccacgaaaacagtgaaggtcggaaccgacagcctccgccgaaaagggcaggagctgggaggaggcggcagcggcggcggcaggagcagcagcggcggcggcggcggcagctgggaggaggtggtgacggtggcaacggcagcgtcggggacgatggcgcgactggtggcagtgtgcagggacggggaggaggagttccccttcgagaggaggcagattcccctctacatagacgacaccctgacggtgagcgggccgggccgggctgggcccgccgctcccctggcagctgtttcccctcctccccctcccccaggccgagcgctgcgcactggagaaagagtgtgttgcaactcctaggcgaggccttctctccagcaggccccacaaactcgcctttgcagtgggtggctcggtaacctctgtcggccgcaagcccagagctccgtacgcactccctctttccagatgttcctttttttggaacctttttccttgaccctttccctttaggagacgctgcttttgccgaagcacacgtctcagaggggttgaaggatcttgggcgtttagggcctaacccttacagaaa

SEQ ID NO: 40695 - DNA, 626 bp, Macaca Mulatta
gattagaaaagcaaaaaactaaacttaaacctaggcagtttgcctactatctccatgtctccatgcttcagatctcatctgaatctgtggacagcaccattcaaccaatctgaggccttggcttgcttgtaagatgattctcagagatcggctgagttaaaaaagatgacgacttgattaccaaagaaagtagggccaactttgacaaacctggctctgctgaccctgtcattcccagatgtagcatagactcctaaacagaacctcaagtctgattgaggataaggccttctcctgagctgaaagttctttggcagatgagcaagaaactgaaagctgatatacctgactggctctgtaagatcagaaaactgtatccagaataagccctatggattaacccctgagtacccagggtaaaaactaatttacagagcttccttgttgatctgcctgttcttccagatcatattctggctattggtatggctggcctttctgaagctgccctgcttgtctattttcgtgactcagctcttgcctgcccttttcacatgttgctgcagttagactcactgaccttgagaagactacagccaattttagtctatcttgtgcccaataca

SEQ ID NO: 40696 - DNA, 788 bp, Macaca Mulatta
gataaaattaaagtgactcaagtagtcgcccatgtggcatctcagtggtggtgacagaagctatgtgagccagaagttttagctctttcgaataccctctgttttagttcaattaaatagaacaaaattgatttcctataatgagaattttttaaaacctgggagatgattggcaatacctaagaggtcaccaaactaagattagaagtcatagtggttgtatcacaacttagcttgagtacgttgctgtagcctaacaactgcaggttctgagaaggatcctgtggaatcctggaagtagccaaattttcctaatagggaaagatgatttttttgtgtgccatgtatttgttaaaggcctatatatagatataaaatattgtggaattgttctcagggagacccgcaactagtataagcttataaaggatctaaagatccatccaccatttaaagttgtctggtaacgagagataacattgtatccccagagaggccaaatcagggtccccagccagcgttcttgatcagccttcatttcaagagaaagccaaggccctcatctactggggagtgtggttttcagccccagcgagtgtcgttttgaactttccctttgcttttttctctcttcttcctccccacccaaccttgctccttgatctggtgagtttgttatggagtgaaaactaaagtcaagcagagacttgttccccatgcaacattagtacacaagctcatgctagttacacattattcctgccgtttgtgtcctcagtgtgcttcaa

SEQ ID NO: 40697 - DNA, 712 bp, Macaca Mulatta
  misc_feature (1)...(712): n = A,T,C or G
aaagagtttccaagtaatcctagtgttttaagtagaatcttaatcttggattgttaaactcaatgaattctcatttcagatttgttcttgcctcgaaacttcagtctgattggatgttgatgctgtattttgcacatactcatttgactgtgacagtcaccatcgggttgcttttgattccaaagnnnnnnnnnnnnnnnnnnnnnnnnnnnnnnnnnnnnnnnnnnnnnnnnnnnnnnnnnnnnnnnnnnnnnnnnnnnnnnnnnnnnnnnnnnnnnnnnnnnnnnnnnnnnnnnnnnnnnnnnnnnnnnnnnnnnnnnnnnnnnnnnnnnnnnagctgaaaaaactctatgcccaactggaaatatataaaagaaagaagatgattacaaacaaccctcacctccagaaaaagcggtgctcaaagaagggcctaggtcgttccatcatgagacgcattaccgagatcccagagacagtcagcaggcagtgctctaaagaggacaaggagggcaccgaccatggcacagccaaaggcactgccctcatcaggaagaaccccccggagtcttcagggaacacagggaaatccaaggaggagaacctgaaaaaccgagtcttctcactcaagaaatcccacagcacttatgaccacgtgagagaccaaacggaagagtccagtagcctacccacagaaagccaagaggaggag

SEQ ID NO: 40698 - DNA, 3219 bp, Macaca Mulatta
  misc_feature (1)...(3219): n = A,T,C or G
caggcaaagatgcaccatccagctgcgtggcatacccatcctcctcccaggagagtgaaannnnnnnnnnnnnnnnnnnnnnnnnnnnnnnnnnnnnnnnnnnnnnnnnnnnnnnnnnnnnnnnnnnnnnnnnnnnnnnnnnnnnnnnnnnnnnnnnnnnnnnnnnnnntgaccttccattctgattctgtggcagcaacactcaagggaaggaaaaccctggctttgaggcctcgtcacctgccnnnnnnnnnnnnnnnnnnnnnnnnnnnnnnnnnnnnnnnnnnnnnnnnnnnnnnnnnnnnnnnnnnnnnnnnnnnnnnnnnnnnnnnnnnnnnnnnnnnnnnnnnnnnnnnnnnnnnnnnnnnnnnnnnnnnnnnnnnnnnnnnnnnnnnnnnnnnnnnnnnnnnnnnnnnnnnnnnnnnnnnnnnnnnnnnnnnnnnnnnnnnnnnnnnnnnnnnnnnnnnnnnnnnnnnnnnnnnnnnnnnnnnnnnnnnnnnnnnnnnnnnnnnnnnnnnnnnnnnnnnnnnnnnnnnnnnnnnnnnnnnnnnnnnnnnnnnnnnnnnnnnnnnnnnnnnnnnnnnnnnnnnnnnnnnnnnnnnnnnnnnnnnnnnnnnnnnnnnnnnnnnnnnnnnnnnnnnnnnnnnnnnnnnnnnnnnnnnnnnnnnnnnnnnnnnnnnnnnnnnnnnnnnnnnnnnnnnnnnnnnnnnnnnnnnnnnnnnnnnnnnnnnnnnnnnnnnnnnnnnnnnnnnnnnnnnnnnnnnnnnnnnnnnnnnnnnnnnnnnnnnnnnnnnnnnnnnnnnnnnnnnnnnnnnnnnnnnnnnnnnnnnnnnnnnnnnnnnnnnnnnnnnnnnnnnnnnnnnnnnnnnnnnnnnnnnnnnnnnnnnnnnnnnnnnnnnnnnnnnnnnnnnnnnnnnnnnnnnnnnnnnnnnnnnnnnnnnnnnnnnnnnnnnnnnnnnnnnnnnnnnnnnnnnnnnnnnnnnnnnnnnnnnnnnnnnnnnnnnnnnnnnnnnnnnnnnnnnnnnnnnnnnnnnnnnnnnnnnnnnnnnnnnnnnnnnnnnnnnnnnnnnnnnnnnnnnnnnnnnnnnnnnnnnnnnnnnnnnnnnnnnnnnnnnnnnnnnnnnnnnnnnnnnnnnnnnnnnnnnnnnnnnnnnnnnnnnnnnnnnnnnnnnnnnnnnnnnnnnnnnnnnnnnnnnnnnnnnnnnnnnnnnnnnnnnnnnnnnnnnnnnnnnnnnnnnnnnnnnnnnnnnnnnnnnnnnnnnnnnnnnnnnnnnnnnnnnnnnnnnnnnnnnnnnnnnnnnnnnnnnnnnnnnnnnnnnnnnnnnnnnnnnnnnnnnnnnnnnnnnnnnnnnnnnnnnnnnnnnnnnnnnnnnnnnnnnnnnnnnnnnnnnnnnnnnnnnnnnnnnnnnnnnnnnnnnnnnnnnnnnnnnnnnnnnnnnnnnnnnnnnnnnnnnnnnnnnnnnnnnnnnnnnnnnnnnnnnnnnnnnnnnnnnnnnnnnnnnnnnnnnnnnnnnnnnnnnnnnnnnnnnnnnnnnnnnnnnnnnnnnnnnnnnnnnnnnnnnnnnnnnnnnnnnnnnnnnnnnnnnnnnnnnnnnnnnnnnnnnnnnnnnnnnnnnnnnnnnnnnnnnnnnnnnnnnnnnnnnnnnnnnnnnnnnnnnnnnnnnnnnnnnnnnnnnnnnnnnnnnnnnnnnnnnnnnnnnnnnnnnnnnnnnnnnnnnnnnnnnnnnnnnnnnnnnnnnnnnnnnnnnnnnnnnnnnnnnnnnnnnnnnnnnnnnnnnnnnnnnnnnnnnnnnnnnnnnnnnnnnnnnnnnnnnnnnnnnnnnnnnnnnnnnnnnnnnnnnnnnnnnnnnnnnnnnnnnnnnnnnnnnnnnnnnnnnnnnnnnnnnnnnnnnnnnnnnnnnnnnnnnnnnnnnnnnnnnnnnnnnnnnnnnnnnnnnnnnnnnnnnnnnnnnnnnnnnnnnnnnnnnnnnnnnnnnnnnnnnnnnnnnnnnnnnnnnnnnnnnnnnnnnnnnnnnnnnnnnnnnnnnnnnnnnnnnnnnnnnnnnnnnnnnnnnnnnnnnnnnnnnnnnnnnnnnnnnnnnnnnnnnnnnnnnnnnnnnnnnnnnnnnnnnnnnnnnnnnnnnnnnnnnnnnnnnnnnnnnnnnnnnnnnnnnnnnnnnnnnnnnnnnnnnnnnnnnnnnnnnnnnnnnnnnnnnnnnnnnnnnnnnnnnnnnnnnnnnnnnnnnnnnnnnnnnnnnnnnnnnnnnnnnnnnnnnnnnnnnnnnnnnnnnnnnnnnnnnnnnnnnnnnnnnnnnnnnnnnnnnnnnnnnnnnnnnnnnnnnnnnnnnnnnnnnnnnnnnnnnnnnnnnnnnnnnnnnnnnnnnnnnnnnnnnnnnnnnnnnnnnnnnnnnnnnnnnnnnnnnnnnnnnnnnnnnnnnnnnnnnnnnnnnnnnnnnnnnnnnnnnnnnnnnnnnnnnnnnnnnnnnnnnnnnnnnnnnnnnnnnnnnnnnnnnnnnnnnnnnnnnnnnnnnnnnnnnnnnnnnnnnnnnnnnnnnnnnnnnnnnnnnnnnnnnnnnnnnnnnnnnnnnnnnnnnnnnnnnnnnnnnnnnnnnnnnnnnnnnnnnnnnnnnnnnnnnnnnnnnnnnnnnnnnnnnnnnnnnnnnnnnnnnnnnnnnnnnnnnnnnnnnnnnnnnnnnnnnnnnnnnnnnnnnnnnnnnnnnnnttctctggacccttttacagctgaacgcatctgggcttcgtgttttcccgttttcagcgaaattactctgagctcccagttccatcttcatccatggccacaggccctgcctgcaacgcactagggacgcccaccctgctgctgctggggaggggcagactgctggagccgccctctgagatgcccgggatggtcatgcctctgatgccagccctgatggctgtgggctggggtgcatgggactattgtgtggaagaacatggcgcctccaaggggcaggaggagcactaggggctggggcaggaggctcctggagcgctggattcctggcacagtctgaggccctgagagggaaatccgtgcttttaagaactaattcattgttaggagatcaatcatgaattaagggccatcttacctatctcccgacgttcacattttaatagagacttcctgcctttattccctcccagggagaggctgatggaatggaattgaaagcaccattcggagggttt

SEQ ID NO: 40699 - DNA, 158 bp, Macaca Mulatta
tacgccagaaaagatcaactttcagcatgccagaaggtcttccctagcttttccaagcagcagtttgaatcttatatagaacattccataaccacggaacatttggttcgcgatgccaatttcttgaggatgaggagaaacacaactgcctccgccaa

SEQ ID NO: 40700 - DNA, 900 bp, Macaca Mulatta
  misc_feature (1)...(900): n = A,T,C or G
atgagggaaatcgtgcacctgcaggccgaacagtgcggcaaccaaatcggcgccaannnnnnnnnnnnnnnnnnnnnnnnnnnnnnnnnnnnnnnnnnnnnnnnnnnnnnnnnnnnnnnnnnnnnnnnnnnnnnnnnnnnnnnnnnnnnnnnnnnnnnnnnnnnnnnnnnnnnnnnnnnnnnnnnnnnnnnnnnnnnnnnnnnnnnnnnnnnnnnnnnnnnnnnnnnnnnnnnnnnnnnnnnnnnnnnnnnnnnnnnnnnnnnnnnnnnnnnnnnggtcagagtggggccggaaacaactgggccagggggcactacacagaaggcacggagctgatggagtcagtgatggacgttgtcagaaaggnnnnnnnnnnnnnnnnnnnnnnnnnnnnnnnnnnnnnnnnnnnnnnnnnnnnnnnnnnnnnggtctgggatgggttcccttctgctcagtaagatccgttgaggagtacccagacaggatcataaacacgttcagcatcctgccctcgcccagggtgtcagacacggtggtggagccctacaacgccaccctctccgtccaccagctcatataaaatgcagacgagaccttctgtatagacaacgaagcgttatacgacatctgttccaggaccctgaaactgcccacgcccacctacggtgacctgaaccacctggtgtctgccaccatgagcggggtcaccacgtgcctgcgcttcccaggccagctgaatgctgacctgcggaagctggccgtgaacatggtcccgtttccccggctgcatttcttcatgcccggctttgccccactgaccagccggggcagccagcagtaccgggccctgacggtggctgagcttacgcagcagatgtttgatgctaggaatatgatggc

SEQ ID NO: 40701 - DNA, 647 bp, Macaca Mulatta
  misc_feature (1)...(647): n = A,T,C or G
gggattgttaaaacttgaggcagttaaaaggtaatgttcccagaccatgattactctcgataaactaagcagaaaataataccagcttcaaagactctcttgcctttgatatgagtgagtgaccatagcaactggctctgagtgagtgagtgagtgagtggtgagcagcctctgcatggtagacaggctgagctctggtttgaacttaagaaatatctgggggagtgggaagtataacgagtgcactggagctggaagcttatgggatttgaagaatgtctgcatgaacaggataggagaggaatgtttataagtgtatgttcagaatgcagagccatgatgacaaaaatagagtattttttgtgaccatattttaactcctctgttgaccaaacaggatattccaccatatatcctgaagggcgaagatgaanattctttcttcctngnatttccagggtccaccacaaagcaaattgaccttttttctttaccgaataaaccctacccttgcccttttttctgggattgggttaaaaaaatttttttccccaccagtgtggggattggggttttcccctgaaaattttcccggaactgaaccccccttaaaatttgacaatggggggtttttgggagcctaattt

SEQ ID NO: 40702 - DNA, 2664 bp, Macaca Mulatta
  misc_feature (1)...(2664): n = A,T,C or G
cccagcccaggcctcactgcttgcactcccagccagccccagcatgggggatacaccagtgccgtttccctgctcagaatacaaccagttaccggagaaaaccttacccctccaaccgctttccaaggtgccaggacagagaagcccttcactggcccacccagcgcagttgacagagggatgccctccttggaggggagcctcacctctacccacagggctgcggtcttgtcctggattctcacctgggcagtcacatctggatggaggtatcccatgtcagccagttctttggtggaagtcacatagtctgaaatgacccgtggacagtccaggctgagccacaaaagccgggcctgggtggctttttggtgcctgctctgacttgagttggattcatgccacagannnnnnnnnnnnnnnnnncacatacagccaccaacacaagagccagccacacactgagcagagaaagtccctgttgcctcaccacccaaaaactccagctttgcggagaccaaggttcttctctaccttcacagaagcctctgcgaccaaacacagagctcgtccttctgaggcctctacatttctccaggtgtttttcagaggacttggtttaaatttgttcacccttaatgtgatctttcccaggtcatgaaatgatctgccccaaaggtgaatctgagtctccccagtcatatgagactgaaactgcttataacatttcggtgacctagtaagttttccaaaaatatagggtattaagaagagtttagtgacattaaaaagtttagtcgaatatatcgtgattcaggtatatttagacatttgcttcatgccccattgccactgtgatcagaaacacaccccaagcacactaatgcctaggcatttcaaacccatatctgcctacacattcttaaaaatacatatactgagaagtctatatacannnnnnnnnnnaattagcttggaaaagagcagttgtattctgtttgaacagctgctaatgtcaactcctgtgggtagaaagaccaaagaacatggagttacaccaagaattttaaaacaaagacgctgtccctttcctgagcactgtgcagccaagacagagagatcaatcagacctgtgattaaggagcgttttgtacgtagcatataattacagagccacacaagtgggccattactctgttgagtgctttatgattgaggtattttcatgttccagctttacattaaagtgtttattaaaacaggaaaaatccacgagcaggattgacactatccatattagatcatcacaaaattatatatatagcacagtcataaacaatgagaaacagtcttcccacacttgctttaaatggccatgacctagtgtttagggaaagcagtaaaatcatcgaggagctcctgggaaaaatgagacaggccctgcgggggtgactcatgggccaagaagggccgcacaggtaccgggccgctgcgtcctctcctgcctctcgctctctggacgctggacttcctttactgcctccgttctgacatttcgtaggcatcagnnnnnnnnnnnnnnnnnnnnnnnnnnnnnnnnnnnnnnnnnnnnnnnnnnnnnnnnnnnnnnnnnnnnnnnnnnnnnnnnnnnnnnnnnnnnnnnnnnnnnnnnnnnnnnnnnnnnnnnnnnnnnnnnnnnnnnnnnnnnnnnnnnnnnnnnnnnnnnnnnnnnnnnnnnnnnnnnnnnnnnnnnnnnnnnnnnnnnnnnnnnnnnnnnnnnnnnnnnnnnnnnnnnnnnnnnnnnnnnnnnnnnnnnnnnnnnnnnnnnnnnnnnnnnnnnnnnnnnnnnnnnnnnnnnnnnnnnnnnnnnnnnnnnnnnnnnnnnnnnnnnnnnnnnnnnnnnnnnnnnnnnnnnnnnnnnnnnnnnnnnnnnnnnnnnnnnnnnnnnnnnnnnnnnnnnnnnnnnnnnnnnnnnnnnnnnnnnnnnnnnnnnnnnnnnnnnnnnnnnnnnnnnnnnnnnnnnnnnnnnnnnnnnnnnnnnnnnnnnnnnnnnnnnnnnnnnnnnnnnnnnnnnnnnnnnnnnnnnnnnnnnnnnnnnnnnnnnnnnnnnnnnnnnnnnnnnnnnnnnnnnnnnnnnnnnnnnnnnnnnnnnnnnnnnnnnnnnnnnnnnnnnnnnnnnnnnnnnnnnnnnnnnnnnnnnnnnnnnnnnnnnnnnnnnnnnnnnnnnnnnnnnnnnnnnnnnnnnnnnnnnnnnnnnnnnnnnnnnnnnnnnnnnnnnnnnnnnnnnnnnnnnnnnnnnnnnnnnnnnnnnnnnnnnnnnnnnnnnnnnnnnnnnnnnnnnnnnnnnnnnnnnnnnnnnnnnnnnnnnnnnnnnnnnnnnnnnnnnnnnnnnnnnnnnnnnnnnnnnnnnnnnnnnnnnnnnnnnnnnnnnnnnnnnnnnnnnnnnnnnnnnggctgttatcccttgaccccattccagtacctagagacctgcttcannnnnnnnnnnnnnnnnnnnnnnnnnnnnnnnnnnncttagtgattaactcaggcactctgcagggacatcgggctgggaccagcctgttcactgctataaacagcgctgcgggggataccctcgcataagtatcatttggtccatgtgcaggtgtgtctggaaga

SEQ ID NO: 40703 - DNA, 389 bp, Macaca Mulatta
ataaagaagaaatttaaaatcagcccccagtgcacttttgtttagcaccgatatgtctggccaggtgttggatcccgctcccggaaggagacgaggtctggtgtttcttagaaatgttctctaactgaactgggctgcatcccagttcagttcctaagagctcctcctcccctcctgatagggacttcctggtgggggatttgggatgagctgacccccatgttctctttaattttgtggcattgatcccttcacctctctgtcacactggctttccttgctctgttctgctactccttcttctcatttcaaccaaggttggggaaactgtttcattcctttaccctgcttctccaaggtcgggtcttagtcactgttgaaaatacaag

SEQ ID NO: 40704 - DNA, 3403 bp, Macaca Mulatta
  misc_feature (1)...(3403): n = A,T,C or G
ggctgatttgaacaccagcttttctggggtggatgaacatgcaccaataagctctgaggactttgtgaactttcctggtattcaccactctaatgaggagtatttcaagaaagtagaagagttgaaggctgcccacctagaaactatggcaaaattagagaaaatgtaccaggataaattacatttaaaggaagttcagccagtggtcatcgagagaagcctctcttagtnnnnnnnngatctgtgtcagaaaagaactcctatcaccctgtctcattaatgacatcattttcagagcctgatttaggccagtcttcctccttgtatgtgtcctcctctgaagaagagttacccaacctagaaaaagagtatgctagggaaaacagaatgatggcctatgctaaggagcttatcaacaacatgtggaaagacttttgtgttgaagattatattcgctgtaaagatactggcttccacacagctgagaaaacaaggaagaaacgaaaagaatgggtgcccacgattacagtaccggagccttttcaaatgatgataagagaacagaagaaaaaagaagagtccatganatctaaatcagatattgaaatggtagataaactgctcaaaaaacaagaagaggatccagagtgtaagaagaaattccgagccaatccagttcctgcatctgtctttctccccctttaccatgatttagtcaagcaaaaagnnnnnnnnnnnnnnnnnnnnnnnnnnnnnnnnnnnnnnnnnnnnnnnnnnnnnnnnnnnnnnnnnnnnnnnnnnnnnnnnnnnnnnnnnnnnnnnnnnnnnnnnnnnnnnnnnnnnnnnnnnnnnnnnnnnnnnnnnnnnnnnnnnnnnnnnnnnnnnnnnnnnnnnnnnnnnnnnnnnnnnnnnnnnnnnnnnnnnnnnnnnnnnnnnnnnnnnnnnnnnnnnnnnnnnnnnnnnnnnnnnnnnnnnnnnnnnnnnnnnnnnnnnnnnnnnnnnnnnnnnnnnnnnnnnnnnnnnnnnnnnnnnnnnnnnnnnnnnnnnnnnnnnnnnnnnnnnnnnnnnnnnnnnnnnnnnnnnnnnnnnnnnnnnnnnnnnnnnnnnnnnnnnnnnnnnnnnnnnnnnnnnnnnnnnnnnnnnnnnnnnnnnnnnnnnnnnnnnnnnnnnnnnnnnnnnnnnnnnnnnnnnnnnnnnnnnnnnnnnnnnnnnnnnnnnnnnnnnnnnnnnnnnnnnnnnnnnnnnnnnnnnnnnnnnnnnnnnnnnnnnnnnnnnnnnnnnnnnnnnnnnnnnnnnnnnnnnnnnnnnnnnnnnnnnnnnnnnnnnnnnnnnnnnnnnnnnnnnnnnnnnnnnnnnnnnnnnnnnnnnnnnnnnnnnnnnnnnnnnnnnnnnnnnnnngaaagagcgaaaaggaaaggatnnnnnnnnnnnnnnnnnnnnnnnnnnnnnnnnnnnnnnnnnnnnnnnnnnnnnnnnnnnnnnnnnnnnnnnnnnnnnnnnnnnnnnnnnnatggcagcagaaaagcattattctaataccctaaaagcactaggaatatctgatgagtttgtttcaaagaaaggccaaagtggaaaagtacttgagtacttcaacaatcaagagacaaaaagtgtcactgaagacaaagaaagnnnnnnnnnnnnnnnnnnnnnnnnnnnnnnnnnnnnnnnnnnnnnnnnnnattttattgataccaacagccaggattcttacaaggaaaaagatgaagccaatgaagaaagtgaagaagagaaatctgttgaagaatcacactgaatcatcaaggtctcctctctatgcccaaggtgttgtttgcagcgtcagggtgtcagcagctgcatnnnnnnnnnnnnnnnnnnnnnnnnnnnnnnnnnnnnnnnnnnnnnnnnnnnnnnnnnnnnnnnnnnnnnnnnnnnnnnnnnnnnnnnnnnnnnnnnnnnnnnnnnnnnnnnnnnnnnnnnnnnnnnnnnnnnnnnnnnnnnnnnnnnnnnnnnnnnnnnnnnnnnnnnnnnnnnnnnnnnnnnnnnnnnnnnnnnnnnnnnnnnnnnnnnnnnnnnnnnnnnnnnnnnnnnnnnnnnnnnnnnnnnnnnnnnnnnnnnnnnnnnnnnnnnnnnnnnnnnnnnnnnnnnnnnnnnnnnnnnnnnnnnnnnnnnnnnnnnnnnnnnnnnnnnnnnnnnnnnnnnnnnnnnnnnnnnnnnnnnnnnnnnnnnnnnnnnnnnnnnnnnnnnnnnnnnnnnnnnnnnnnnnnnnnnnnnnnnnnnnnnnnnnnnnnnnnnnnnnnnnnnnnnnnnnnnnnnnnnntggtggctcacgcctgtaatcccagcactttgggaggctgaggcgggtgaatcacgaggtcaggagatcgagaccatcctggctaacatggtgaaaccccgtctctactaaaaatacaaaaaattagccgggtgtggtggcaggcgcctgtagtcccagctactcgggaggctgaggcaggagaatggcatgaacctgggaggctgagcttgcagtgagccaagatcgcgccactgcactccagcctgggcaacagagggagactccatctnnnnnnnnnnnnnnnnnnnnnnnnnnnnnnnnnnnnnnnnnnnnnnnnnnnnnnnnnnnnnnnnnnnnnnnnnnnnnnnnnnnnnnnnnnnnnnnnnnnnnnnnnnnnnnnnnnnnnnnnnnnnnnnnnnnnnnnnnnnnnnnnnnnnnnnnnnnnnnnnnnnnnnnnnnnnnnnnnnnnnnnnnnnnnnnnnnnnnnnnnnnnnnnnnnnnnnnnnnnnnnnnnnnnnnnnnnnnnnnnnnnnnnnnnnnnnnnnnnnnnnnnnnnnnnnnnnnnnnnnnnnnnnnnnnnnnnnnnnnnnnnnnnnnnnnnnnnnnnnnnnnnnnnnnnnnnnnnnnnnnnnnnnnnnnnnnnnnnnnnnnnnnnnnnnnnnnnnnnnnnnnnnnnnnnnnnnnnnnnnnnnnnnnnnnnnnnnnnnnnnnnnnnnnnnnnnnnnnnnnnnnnnnnnnnnnnnnnnnnnnnnnnnnnnnnnnnnnnnnnnnnnnnnnnnnnnnnnnnnnnnntaaaaacaatcagcatcattttaaaaggatgaactaatacaggtgtatgtaatagcagtgtttcccaactggcaatttatgctttaaattaaaaagtaaggtcgtttttctccattagaggcaaatgtttactcgtaattttctccctacagtttgtgttaaattgcttttcactattattatattgtaaactccttgggagttggcaccacttaaaaattcatctttgtattcccttaatatttggcacaggattgtacatatggtaggtacttaataaaggttcgaatgaatgtgtagatgaat

SEQ ID NO: 40705 - DNA, 807 bp, Macaca Mulatta
  misc_feature (1)...(807): n = A,T,C or G
gggtacaattcaaacaaaaaaagagtaagtcatcattataaatattagcagatgagatactgctacatctctatttaaagtaaaataaaaccgattttaaagttcctgaaaccacagtcatattttgacatttcacaaagaatggttctagtctactagagtacatttggctaagttgataacttagctaaatttgcttcaaagctaagtcacaagtaaacatatttatgtttaaaacatagaaataaataacttaagatttttatctaagcggtcagtgctgtattggaaagattataaataaactatttgaannnnnnnnnnnnnnnnnnnnnnnnnnnnnnnnnnnnnnnnnnnnnnnnnnnnnnnnnnnnnnnnnnnnnnnnnnnnnnnnncggcccccccgccccccaaaaacctttctaaaccattctttgggcccgggggcccattaggaaagggaacagggccatacctgttcccaagaaaacccgggccagaacaagggctggaatcctcaccaaaaaaaaaccccggggggaaaccgagctttctaaaaaattccaaatggagttctaaggcctttccgggatctttcaaagggagtccangccggaccccaaaaatcaaatttcccccccgccctggcccactattcggaaaaagggttggaaattccatttaaccctttccggcccaaattgggaaacccccttccaaaaagcggccagtgaatggaaacccttgaatatcccccgggcgggggaatttcaaaccaccctttgtgttcccccccttgtgcagaaa

SEQ ID NO: 40706 - DNA, 158 bp, Macaca Mulatta
ctagtatttcagcttcaggtcatctgtgatgtgtgtgggcgtctcctatgtttggcactaaaattgctgtatctgacaaagcccctgggcgttgggttttcccacattgcttcagattgagtcagttccctacagtataaatgcttctggttttacaa

SEQ ID NO: 40707 - DNA, 717 bp, Macaca Mulatta
  misc_feature (1)...(717): n = A,T,C or G
gggaaatactggactgtattttgaccacagcactggtttctattatgattctgaaaatcaactgtattatgatccttccactggaatttattactattgtgatgtggaaagtggtcgttaccagtttcattctcgaatagatttgcaaccttatcagacttctagcacaaaacaaagtaaagataaaaaatnnnnnnnnnnnnnnnnnnnnccagattcttctgcaacaaatgaggaaaaggatttgaactcagaggatcaaaaagccttcagtgttgaacatacaagctgcaatgaggaagaaaatattgcgaatatgaaaaagaaggcgaaaataggcattcatcacaaaaatagtctccccaaattcactgttccagctagtggaaatactatagagtctcctcttcatgaagacatctctaattcaacatcatttaaagatgagaaaatcatggagactgatagtgaaccagaggaaggtgaaattacagactctcagaccgaggatagttatgatgaagacattaccagtgaaggcaatgtaactgcagaagatagtgaggatgaagacgaagacaaaatttggcccccatgtattagagtaattgtcattagatcacctgtgttgcagacaggatcactctttatcattactgctgtaaaccctgctacaatttggaagagaaaaagatatgggagcaatactctccgaaa

SEQ ID NO: 40708 - DNA, 158 bp, Macaca Mulatta
gcatcttcctcagctggagccgctgggcaacagcccaaggggcctggagagagctggcttcccactgggcctgggatcggagctgcagggcggggctgggcctgtggcgtcggcggctgctgcagttgcggctggtggagaggtgggcccaggagcgg

SEQ ID NO: 40709 - DNA, 540 bp, Macaca Mulatta
tgaatggattttctaaatatattctcagataatgttgccaaaacataaccaggtatgctcataaaaatgagaaaaaagtcacatggggtcaatggaatagtaagaatacatacatgtatatgtgtatatatatttgtgtgtgtatgcatacatgtatgtaacatttaataaagtataacataacaggcattattataatataccctacataagaggatacacatgcacgcatgtgtggttttgaagaactcaagtatccttgcttcccctttcagtgggaaatctagatctatacatagtttgacaacagaggaccataagaaatgttgcaatatgaggtggtattgctatgctcgacctgcttgccttctcagtctgagatgtgcaggaaccggtaccctctgtatgccatgggtatgctcactgtccctcacctccttacaagcttatctacccacttatatcagatttgaaatcccttctacataactttcaatccagtagtatctgtaaaacttgctaagatgctcctttacagaa

SEQ ID NO: 40710 - DNA, 573 bp, Macaca Mulatta
atgcagacaattaagtgtggtgttgtgggcgatggtgctgttggtaaaacatgtctcctgatatcctacacaacaaacaaatttccatcggaatatgtaccaactgtttttgataactatgctgtcacagttatgactggtggagaaccatatactcttgggctttttgatactgcagggccagaggatggtgacagattatgaccgctgagttatccacaaacagatgttatttctagtctgtttttcagtgctctctccatcttcatttgaaaatgtgaaagaaaagtgggtgcctgagataactcaccactgtccaaagactcctttcttgcttgttgggactcaaattgatctcagagatgacccctccactattgagaaacttgccaagaacaaacagaagcctatccctccagagactgctgaaaagctggcccgtgacctgaaggctgtcaagtatgtggcgtgttctgcacttacacagaaaggcctcaagaatgtatttgacgaagcaatattggctgccctggagcctccagaaccgaagagccgcaggtgtgtgctgctatg

SEQ ID NO: 40711 - DNA, 270 bp, Macaca Mulatta
gaaaacatccccgacagcctcgctgagccttgaaacatttgcagaccaagcaggctcaagtgcccgtgtttgcaggcggttttgtagaacgtgtcatttatctattcatgtacccttgaaagcccgagaggaagtgtggtcgtgtggggagctctgtgcaggcaacatgagagtctgtattgtcttcctagctctgccccggttgtcagaggagtgcatctgggccacaggggtgaggggccgtcacccctgccttttggttagccagtg

SEQ ID NO: 40712 - DNA, 1206 bp, Macaca Mulatta
  misc_feature (1)...(1206): n = A,T,C or G
ggnnnnnnnnnnnnnnnnnnnnnnnnnnnnnnnnnnnnnnnnnnnnnnnnnnnnnnnnnnnnnnnnnnnnnnnnnnnnnnnnnnnnnnnnnnnnnnnnnnnnnnnnnnnnnnnnnnnnnnnnnnnnnnnnnnnnnnnnnnnnnnnnnnnnnnnnnnnnnnnnnnnnnnnnnnnnnnnnnnnnnnnnnnnnnnnnnnnnnnnnnnnnnnnnnnnnnnnnnnnnnnnnnnnnnnnnnnnnnnnnnnnnnnnnnnnnnnnnnnnnnnnnnnnnnnnnnnnnnnnnnnnnnnnnnnnnnnnnnnnnnnnnnnnnnnnnnnnnnnnnnnnnnnnnnnnnnnnnnnnnnnnnnnnnnnnnnnnnnnnnnnnnnnnnnnnnnnnnnnnnnnnnnnnnnnnnnnnnnnnnnnnnnaactagatattactctggcaatccgagaagttaaccaagattacctggagactctatacacagcttcctcactaacaaccaacgaaacgcggagaaagctcaagtaaattccctaagcgccaccataatatcacttacatgtaaattcccgttaacacttcgagagcaatgcccgtgaattttgttcacactcacgccgtaatctctattgcactcgagatatccctcgaccctgccgcaaaatttaaagactcgtttttctttgtcaacccaaggagcactgaaccgcccgccactttaactagaaataaatactcacaattaccaattgccacacaaaaaaaattggcggggacatatattacacgttgagaaccgggggaaggatttccacgaataaacctgtaatttttcctaataattaccaagaatgtttaaactcacctaacaaacatagaggtgagaccttatgtacccagcattataaggggtgagacagtattaaaaggagagtggaagatatcgtatatactcggtaaacgactagggggataataactgtccagtaataaattaaatgatccccgtcacataacatttatgggaagtactcttagccaacactacccacaaaataaccaaacacttgtactccaatagtagaaggacaagtacgatgtcacgaggaatcaaaggcggcgtatttgaaccgcggtatggggtagggtaaagtacacgaattaacacggtctaattttttactcgacggtgaccttcccctccaaaancagatcgccgn

SEQ ID NO: 40713 - DNA, 629 bp, Macaca Mulatta
  misc_feature (1)...(629): n = A,T,C or G
ggggaccccatttggagcgaactgccttgttctttgctgtgtggaaggttctatccccacagctaagctccagttcctccccaagcatcctggcctcagaaatcctggcttccccaagttagtgctgtctgacctgagccaggccaccgcttggtgcctctgcaggccactgtgcatgttgataatcgcccaaaaggattagtgaagctcctgaccctggcaaggccgtaatgaacactgaagtgcacaggccaagggatgtaattgaaaggcatttatttttgtgaagacgctataaaattagcatttaaatatcccattcccttctcttggcctcctcctatccccctatggtattgctcctcctctcctcaaggccaggctttttgtgaaaggcattggctcacctttgtcagcgtggtcccgatgctcacttctgggctgctggagaggactgagagatgtgtgatttggtaggaaggaggtgtgtggggggggnnnnnnnnnnnnnnnnnnnnnnnnnnnnnnnnnnnnnnnnnnnnnnnnnnnnnnnnnnnnnnnnnnnnnnnnnnnnnnnnnnnnnnnnnnnnnnnnnnnnnnnnnnnnnnnnnnnnnnnnnnnnnnnnnnn

SEQ ID NO: 40714 - DNA, 796 bp, Macaca Mulatta
  misc_feature (1)...(796): n = A,T,C or G
ggtctacgagacaatgacagatgtgagtttcctcctccttcactctttctagggatgttgattctctcataatatttcaatgtcccatttctgtgtttcttctccctccaggggctgatttacaattacatgagtcttgtcacaataatttcctcctaaaatagaaattccaaaagaaaagattatttgttcaggcaggtgcttagcaatttcacaattttcacaagcttctgttcagctcaccatttcagtggattaatgtgtcatttacaaagaagtctgaaatgagaagctgagtctgaacaggcttagccattattcacctcaaattggaccttattatgactcaaattgaaatactaaaaggtataatacatgattgtgtaagcggcatgccttaacaatgtgattctttacaacagagtgctctgagagaactctagctgaatgtcaggtactgtgtttttgtttctacaccaacaaaactgactaacccaattaaagcaacagccatgaataatactggccctgaccttgctgaattcaaaaacaaggttaattggagaccctaccataaattaaaactgagtgttttgaaggaccatgggcatttcctggcgaaaagctggagaatgttttctagaaacagatgatatttcctggggttatgggggcttcaaatttaaaacggttctgagtttctgttagcaaatgcaaatttttacactggacnnnnnnnnnnnnnnnnnnaaactttggttgtttgggcttttttccggcaaaagggtttggtttg

SEQ ID NO: 40715 - DNA, 676 bp, Macaca Mulatta
gcgcaacttccccttcaccatcgcctgcgatgcggccctcctgtgcctctcggcctccatcatctaccccatcacctacgtgcagttcctatcccacggcccttcccgcgaccacgctgtcgccgccactgtcttctctggcatcgcgtgtctggcttacgccaccgaagtagcctggacccgggcccggcccggcgagatcactggctacatggcctctgagccggggctgctgaaggtgctggagaccttcgtggcctgcctcatcttcgtgttcatcagcagcccctacctgtaccacaactggctggccctggagtggtgcgtggcggtgtacgccctctgcttcgtcctggcagccctcactatcctgctgaacctgggacactgcaccaacatgctgcccatccccttccacagtttcctgttggggctggccttgctgtccgtcctcctctatgccactgcccttgtcctctggcccctctaccagttcaacgagaattatggtgtccagtcctggcaggcgagagatgtgagctgcagcgacagaaacccctaccttgtgtgtatctgggaccgccgactggctgtgaccatcctgacagccgtcaacttgctggcctatgtgggcgacctggtgtactctgcccacctggtttttgtcaaggtctaa

SEQ ID NO: 40716 - DNA, 467 bp, Macaca Mulatta
gtatatctttaagaccgcatgttctgtaggaaaaaaaaatctagtgtcatgtcataatatccccactgcctacctccatataccttttccttcttagagctcaaagactgtttcctaacatactgtgccttttgctatttcctgatttactaactggtttttttctccccatgaatttttaaaacgctgatgccctgtattcctacaaaacaaattcgttgtgattacaaaacttttatgtcctcagtgaagcctcagagtacaaaatgaaatttttccttgttttgtgacactttaccttgtacgtatttctgtcattgcatctgtaaaacctactaagtgcatgtatttacatgtatgcccctctcttagcctgtaacttctcatgagcagggtcagggtttaattcatttaggtctaccaggcaaccagtcacattcagggacaagtagtgtgatctcagtatg

SEQ ID NO: 40717 - DNA, 771 bp, Macaca Mulatta
  misc_feature (1)...(771): n = A,T,C or G
gggtgatattgtaggaggaagaattgacagtgtcacaattggcaagtgattgcctttgggggcaagtttgataccttaggccactgatgttcaaatgggttagaagggcagcaggctgtggtctgattcccagtgatctacctcatggtgtgtttcaagacctcactgtcctattgaaacatgaaccacctggatttgttcaacaaattaataaagcttagaggttccagctgcgttaatgcaagccatgaccttgtttatgtctaaccttaacatttatgattatatgccttaggctctctgtaaactaatacataataacatgcttacttgtaagcataatggaataaatgagacaaaaatcagagtaaatgaccaagatgatcatcatcaagtagctcttattaagaaccattaaatgcctggctcaggtttccacngcgcaggtccctttaacaaactcggtttatatcatatgctcttgactagagaagcttgactcactgcagttgtttaaaccctaaaaaccagacatttcaaagccagggccccccggccccaccactgggactcctactgcataaagcttttcctggttaccatttgctactataaaaaatttagttttgttttccgaacgaatgcatttttaacttttgtgggtgggggagacccccatttttgttaatatttttgaaacccttgtgttgaaccccccaggggaaaagaaaagggtaacacccctttgggcgcttttaaaagaggggggaa

SEQ ID NO: 40718 - DNA, 607 bp, Macaca Mulatta
  misc_feature (1)...(607): n = A,T,C or G
tcccaggtgaggagaccgtcccggagccacggctccctctattggaccatcagggcgcgcattggaagaacgcggtgggcttctgngctgctgggcctttgcaacaacttctcttatgtggtgatgctgagtgctgcccatgacatccttagccacgagaggacatcaggaaaccagagccatgtnnnnnnnnnnnnnnnnnnnnnnnnnnnnnnnnnnnnnnnnnnnnnnnnnnnnnnnnnnnnnnnnnnnnnnnnnnnnnnnnnnnnnnnnnnnnnnnnnnnnnnnnnnnnnnnnnnnnnnnnnnnnnnnnnnnnnnnnnnnnnnnnnnnnnnnnnnnnnnnnnnnnnnnnnnnnnnnnnnnnnnnnnnnnnnnnnnnnnnnnnnnnnnnnnnnnnnnnnnnnnnnnnnnnnnnnnnnnnnnnnnnnnnnnnnnnnnnnnnnnnnnnnnnnnnnnnnnnnnnnnnnnnnnnnnnnnnnnnnnnnnnnnnnagctatttcttgttgctcacatctcctgaggcccaggaccctggaggggaagaagaggcggagagctcagcccggcagcccctcataagaaccgaggccccggagtcgaagccag

SEQ ID NO: 40719 - DNA, 736 bp, Macaca Mulatta
gtcttggccataaagcctgaggtagcggcagcggcggagttggcggcttggagagctcagcagagttccctggaaccagaacttggacctcccctcttctgtcctccgttgagtctcctcctcggcgggagccctcgcgacgcgcccggcccagagcccccagcgcagaggccgcgtttgaaggatgacctctaggaagaaagtgttgctgaaggttatcatcctgggagattctggagtcgggaagacatcactcatgaaccagtatgtgaataagaaattcagcaatcagtacaaagccacaataggagctgactttctgaccaaggaggtgatggtggatgacagactagtcacaatgcagatatgggacacagcaggacaggaacggttccagtctcttggtgtggccttctacagaggtgcagactgctgtgttctggtatttgatgtgactgcccccaacacattcaaaaccctagatagctggagagatgagtttctcatccaggccagtccccgagatcctgaaaacttcccctttgttgtgttgggaaacaagattgacctcgaaaacagacaagtggccacaaagcgggcacaggcctggtgctacagcaaaaacaacattccctactttgagaccagtgccaaggaggccatcaacgtggagcaggcgttccagacgattgcacggaatgcacttaagcaggaaacggaggtggagctgtacaac

SEQ ID NO: 40720 - DNA, 235 bp, Macaca Mulatta
gcagcttaagggaccacgacccatgaggattgaaggagacgggaggctgcggcgtggacggggaaaggggctggggctcggcgggaggcaccccgcaggcgccccgggaggagcgcgcccagcagctgctggacgcggtggagcagcggcagcggcagctcctggacaccatcgcaagctgcgaagagatgtttccgggagctggggcgccggcgcccggagaccgctggtggcg

SEQ ID NO: 40721 - DNA, 646 bp, Macaca Mulatta
gggggggcttcagtgccacacaggcattgtgtgccactatggagcctgcctttcagctgatcctggggaagtcacaacaagtggtagcagagctgcttccagatgacatgaggctaggcattgactacagtagtctccagtggaagtcagtggtgtgtgtatctgttattggctttttggtgggcctctcatatttgttcagacttatgcattaggttaggagctgacttttgggaaagaaaatggaggttgtgcaaatactggctgcaccagttctgatgaagcatccatttcttgacatacttagttctgatcaaaaggaatatttagatactgagtaatttttagaagataccagcctagaataggagtcataaaagatacaaagtctcgtggacacatatgtaaaattgaagagaccaactcagtcctgaaggaggaagtaatttcttttgtaaaagaagtaaataaggagagatctagaccctcaagactagaggggatgatgactgaaatagtaagaatgattcatttaccagaagatgatgtaggaaccatcacatcacaagattttccaagcactgcagtggctgggtcattctccaggggtctgaaatagaaccgtttcttctattcagttgtgtct

SEQ ID NO: 40722 - DNA, 600 bp, Macaca Mulatta
cgcaggaaatagacatgtgctttttaatgcaggacactttgagtgttataaaatctgtagatctggcagtaggggcatgattttgggaagggtatagtgccctaggttggtgacagaagggacagacacttatgcacaggtgtctttggtgatggggtatatttttataactgcgtaaaaaaaatgtatatggaattctgtctcttggtaaagctcaaagccaggctagcctgagttggcacagggctctccttcctgtcccttcgacctccttgagaattaaaagctggcagctgccgatggtgtttcctgaccccctcgcttcccatgacgatccccagcttcagatcctcatggggaggggagggcgtgttcttacacgtgggcacaggagggccttcccttcccctctctgtcagagttttcactgccgtctcttcttgagaaagctgtttgaattccctccgccccaaagtttggaccgtgtagatataactggatatacggatttctctctttgtgtggcaggcttctttatgccattggtatacagggcaggaaagcaagggcgaataaagggaggagcagtttggaaaccat

SEQ ID NO: 40723 - DNA, 798 bp, Macaca Mulatta
aggccagggcgcaaagggctttttcaatttggacggaatttgggtggttaggatgccagtcccagaggcctcaaggccggcgtgttttcccactgggcattgcccatccttaaggggtggactttcccatcccttgaacccaaggccatgtttagcatttggttcccagcatgttgttcaccattccaaccagaaatgtaagtgctgatttccttaacaattttcctggtatctcttccggctggtagggtggctcagttgaatccatttggttaacaccaacaattagttgtttcacacccagtgtgtaagccagaagagcatgctctcggggtctgcccattcttggagataccagctttcaaattcaccaacaccagcagcaacaatcaggacagcacagtcagcctgagatgtccctgtaatcatgtttttgatgaagtctctgtgtcctggggcatcaatgatagtcacataatacttgctggtctcaaatttccacaaggagatatcaatggtgataccacgttcccgctcagctttcagtttatccaagacccaggcatacttgaaggagccctttcccatctcagcagcctccttctcaaatttttcaatggttcttttgtcgatgccaccgcatttgtagatcagatggccagtagtggtggacttgcccgaatctacgtgtccaatgacgacaatgttgatatgagtcttttcctttcccattttggcttttaggggtagttttcacgacacctgtgttctggcggcaaacccgttgcgaaaaagccc

SEQ ID NO: 40724 - DNA, 707 bp, Macaca Mulatta
cctgagagcacactggggctctgggacttcgcctgaccccgctgctcctgtgccaagcgctctgtctcaatgtctccctgagtcttggcccacgagctgtctgagaaaccagggagaacccctgggcattggcccggtcactctcccttcacttttcatcctggaatctccatccctgaactggactccctgcctcccactccttacctgtcccactggactcttctagaaaaaaactcaccccacggagcttggtgccagagagtgagcttgctctgggaaagaagccgacgcctataacccagggatggatcagacattgtagaggaagagtttatttcttctttctgaaggctccatcagctggagtttttgtcctgcgatgtagagaggagactttgcttcaagatggatttagcacaccagccggattgcgagatatggagtctacattgcaaaggacaagtcttcatctcctcctagtttgaactcatcagtaatagctgggagaagggtgccagaagccttgtgtggggctcgcaacgccccgttgcagtgatcccattctctgcaccccaaggacctctccttcagggaccatgttggtcccaccttccaactggaaggagaggaaggagaagtctgaaggcttcggatcctccctagcgcgcctttttctctgccatttatctgagtgtccttgcctc

SEQ ID NO: 40725 - DNA, 389 bp, Macaca Mulatta
tgtcagctccctcctctctacctacctctgaccttgttgtgggtgagggtagccatgcttatggccgtcttaaaactggagaggcggagaactacttaggagtctgtagaccacgtgttgtcttccatggcctcttttctcctgctgtctgggtgagtgagcctgcagtgcaatgcccacgagagtaaatgcctcctgacctaccctgctcagcactgttctagtgtcttggccttgaaagaaaagcctgacttcctgctgaaacatgtggtagtggcatggcagctatgaggcacctcctacatctgttttctggctgtggtgacttgggatttttaaccttatatatctttttcctttactcaaaacaaaacaatttttagcacact

SEQ ID NO: 40726 - DNA, 279 bp, Macaca Mulatta
atcgctctgagattaccactcaataactgtacgatagagtgtaagagaatccttttatctcttagcagaaaacatgataatattattttaattatttgtaaatgcagccttattatgcatgtgtttaaacaaagaaaatgtagcgtttctattaaatctttggattaaatatgcttgtgtaatgaagtaaatgtcatgtgtacacacttaacattctaaaaatttgtttcttttactttagaaaattcatagaaatgggtttcattgatgaaaaaaaaa

SEQ ID NO: 40727 - DNA, 815 bp, Macaca Mulatta
ggtattggtcagtagatggaaaaactgaacactggggaaaattgtcctggcaatcttgggcaagtacaggaccccgctggcgataggccactgcacctgtttaaaagtttctatcaaagagacttcatggtttcattgaggctgaggggtgatttacagagactttaggaaattaacagaccacaatcatttagaaaccaaacgagggaaaccagcagaagacgagcaaacaggacccaacagtgtccctgagggctctgtccacttggataaattgtatcttattcttatttccatgggttacctttcaatcaccaagctttgctctacaggactgtgttcccctgaggaggcgcctctttctactttgcacagagaggctgaataggttccagctgcccctgtaagcgaaacaggtttcattccttttcccagactcacccatcagctcactcttttcttccatgatgaggagtgggcaaggggattatggggaggcagacggtattccttctatattttctcctccctgggctgtgcagttaaaatcctttctacctttctcttacacatgaagaaattccctatggtggaattcccacctggtaatcatcttatgtaagttctgaacaccacttggggggtattccctacctccccatttaaaaaacctgtgggtaaattctgccctgaaaaaatggaagccgccaggaaatcgactaacccatttttgaaatttttggaatgaaaatgagaaaaaaattttgagggtgcaaagatcaaaaaacttgtttttttaaagggaaaaaactttg

SEQ ID NO: 40728 - DNA, 782 bp, Macaca Mulatta
  misc_feature (1)...(782): n = A,T,C or G
ggnnnnnnnnnnnnnnnnnntaccgcgcccagccaaaaattttatttttcatatgtctttcatgcatcttttaaagcatatttgnnnnnnnnnnnnnnnnnnnnnaaactttgctgctctcaggtagatgatatttttttccagtacttttagaataagatattggtggaatataagaaatccttgttttcatggacctgacattcttgtaatgggcctctcattgtgctagtttttcagttgattcttttgcattttccataaaccttatgttatctataaatcattaatttttagacaatcatttatgatcctgcagcagcaacattcctcaggaacttgttagcaatgcaaattctctagaccgatcccacaggaactgaaggagaaactctttacagcaatttgtgcttcacatgtctccaaactctgatgtatgctcaagtttggagaccactgatgtaaacaataattttatgctgtcttgcttatattttcatttctcacttttttaaaaaaattgcaagatgtgtgtgtatcagggctcaatggattacatagaatgagcactgactgaataggctgagacacatcgctatcatccatgggtaagatgggaggggaatgatgagacatgaattattccttaatttcttaattccttaattaagtggataaggaaaaagtaaatcnnnnnnnnnnnnnnnnnnnnnnnaatttagtatacaatttaggggtgagggattttagtggtttgacagaaggggaaacctggatttcaa

SEQ ID NO: 40729 - DNA, 846 bp, Macaca Mulatta
  misc_feature (1)...(846): n = A,T,C or G
ggtgtaatttgttttttaagtcagttggccaagatttgatgagatttatattattctagaatggttatgttgcacctagagtagaattcagtttgaaaaaccacatattgagaaagacatggaaaatctagagtgaaacttcagaagaaagactctgaaaactgcgctacaagagtgattaggagatggaagtgattagatccagaaagaaaaatcctggaaggttctctgaaatctgtagtgctgttatttggagaagggtggatgttgattttaccttacgccccaaaaagaattcactcgttcatttatacgagatttatgatcatctagggcagtaatctggggacttggattaagtgagaggaaccttagtgagagaagattggcttggaatagatgatgtaaggccttctaagtcaatgtaggcacttttagcctgaatgacatgagatgcccactgcaggggttttgagcagaagagtaatgttatctgggatacttcctttggcttcttcttgatgttgggttaagaaagactgggcagagacaaacctaccaatggggaagaaaaaggcaggggagcctttgggcccgtaaaatccaaaagggtgggtagttaactttgccccctgggaagtcaccaggtgaccattaacgcattttgggttatgttaaccccccaataaaaaaataaaaaaatgggcctaatccctatattataagggcctctcaagggtcagaaaaggtgttttggaacccacggtaaaatataagttttttgcggannnnnnnnnnnnnnnnnnnagagaatttttccctgtctctctaaaaccgaattccccc

SEQ ID NO: 40730 - DNA, 728 bp, Macaca Mulatta
tactacatgcatataaggtcagatgccacacgctggttacttaagattgtgtgtgttgattagtcacaatgatagactatagaaggagacaatacaatgttacatttttggaccatattaaaactgcaagaagacaggggtcttattgaagatcttttagaaaacttaaatcctgtcacaggacatttagacatgtgtagaatgtagctcaatttttaaaaagtaactgacctagagggtgaaagttgaaactgacacattttcaaattaagattatgcttattttgtacagaaaacaatgtttaaacacaagcagatctgttgtatgtaataagtaacacagagttttaaaacaaattaattatttagctttattgaagtttgtttttttctttccgaacctggagtatcatattataaacagcagtctcacaccagaatagcagtgccctttctttttgtacatattgattggacctttctttactgttacgtggacactttctatgttagttttgatgcataattctttgaatccttttatacaaactagaatgtacgtgtcagaattcctgtccctgcaatgtagtaactacaaacttatctttaaataactagaagacttgtttttctaagctatttgtagaggctcatgattcattaatcgggacccaaggttcttggggcaaccctaaagcccttaaccgtattccacaactgctaacaag

SEQ ID NO: 40731 - DNA, 263 bp, Macaca Mulatta
  misc_feature (1)...(263): n = A,T,C or G
gggcatcaaggacaagtggctgtcactgtgagcagatggccattcagaaaagcagtttatgttggttctccagggagggattgttggccacagctcagctcatgcaggccctggcctacaccaagctctgccttggccatcttgacttctccatcaagctggngagaagtttggagtggagagggagatgctattccatttccacaccccgggatatccttcccttggccactccagccacattatcttaagtgtggaagaat

SEQ ID NO: 40732 - DNA, 1095 bp, Macaca Mulatta
cactgctgaggctgccttgggaagaagatgatcctaaacaaagctctgatgctgggggccctcgccctgaccaccgtgatgagcccctgtggaggtgaagacattgtggctgaccacgttgcctcttgcggtgtaaacttgtaccagtcttacggtccctctggccagtacacccatgaatttgacggagacgagcagttctacgtggacctggagaggaaggagacggtctggcggttgcctgtgttaagcaaatttggaggttttgacccgcagggtgcactgagaaacttggctgtagtaaaacacaacttgaacatcatgactaaacgctacaactctaccgctgctaccaatgaggttcccgaggtcacagtgttttccaagtctcccgtgacactgggtcagcccaacaccctcatctgtcttgtggacaacatctttcctcctgtggtgaacatcacatggttgagcagtgggcgctcagtcacagaaggggtttctgagaccagcttcctctccaagagtgatcattccttcatcaagatcagttacctcaccttcctcccttctgctgatgagatttatgactgcagggtggagcactggggcctggacgagcctcttctgaaacactgggagccggagattccagcgcccatgtcagagctcacagagactgtggtctgcgccctggggttgtctgtgggcctcgtgggcattgtggtgggcactgtcttcatcattcaaggcctacgttcagttggtgcttccagacaccaagggcccttgtgaatcccaccctgaaaatgaaggtacatcaccatctacaggagcagaagagtagacttgctacatgacttaggactattctgtggcctaatttatcatatcccttttctcctctaaatgtttctcctctcactttttctctgggacttaagctgctatatcccctcagagctcacaaatacctttacattctttccctgacctcctgattttttttcttttctcaaacattacctactaagacgtgcctggagtaagccacccagctacctaattcctcagtaacctttatccaaatctcca

SEQ ID NO: 40733 - DNA, 915 bp, Macaca Mulatta
  misc_feature (1)...(915): n = A,T,C or G
gagaaacttctgtccccagggggtgccctgacacaggacatcactgcccacttctnnnngggcctcctgaacgcctgtctgcggagcagagacccctccctgacggtcgacttcatattggccaagtgccagacaaaatgccccttaattttgacctctgctctggtnnnnnnnnnnnnnnnnnnnnnnnnnnnnnnnnnnnnnnnnnnnnnnnnnnnnnnnnnnnnnnnnnnnnnnnnnnnnnnnnnnnnnnnnnnnnnnnnnnnnnnnnnnnnnnnnnnnnnnnnnnnnnnnnnnnnnnnnnnnnnnnnnnnnnnnnnnnnnnnnnnnnnnnnnnnnnnnnnnnnnnnnnnnnnnnnnnnnnnnnnnnnnnnnnnnnnnnnnnnnnnnnnnnnnnnnnnnnnnnnnnnnnnnnnnnnnnnnnnnnnnnnnnnnnnnnnnnnnnnnnnnnnnnnnnnnnnnnnnnnnnnnnnnnnnnnnnnnnnnnnnnnnnnnnnnnnnnnnnnnnnnnnnnnnnnnnnnnnnnnnnnnnnnnnnnnnnnnnnnnnnnnnnnnnnnnnnnnnnnnnnnnnnnnnnnnnnnnnnnnnnncaggctggggcgactcctcctccgcgtggccccggatcagcataccaggctgctgccnnnnnnnnnnnnnagtcttctctcctgcttccacgacgacgcggccatcagggaagaggccttcctgcatgttgccgttgacatgtacctgaggctggtccagctcttcgtggctggggacacaagcacagtttcacctccagccggcaggagcctggagctccagggtcaggcaggnaaccctgtggaattgataacaaaagctcgtctttttctgctgcagttaatacctcggtgcccgaaaaagagcttctcacacatagcagag

SEQ ID NO: 40734 - DNA, 652 bp, Macaca Mulatta
  misc_feature (1)...(652): n = A,T,C or G
cctcacagcggaaacacagcttgtgagtgcatgtcagctgttaacaagtggtttntagtacattctgggctntgctgtatctatctagtgcctgtttgtgcgtttttttctttcttccgctgcttccccattttccttctgtccttttcctcctgctccttgttttcccagcagcacatggggttccttggaggagcggaggtggccgccgtcagcggggggcgtttgggctgcggtgctgcgtcatttttctcctttgctttctcattttactttagacagtggcccaactccaggcgtttcctttcatttcctcagtgcttctcttctcacctgcatgttgagttctgtattgctggggcttccaacaaaaaccagagtcactgacagggaacggcagggaccttgttggtatctggctgtgatggataaagagaatcggaggcaccttgttttcacaactaggataaaagtatctgcaaggtcctttccattcctatttggagggagtcctggctccatggccccctccccagtgaactgtccaagcagataggctcacacgagaaacagactgaaagtgggggccatagaagagcggtatggagtccacggagaagatacagtgaatgcttgcatgcattcacacgtg

SEQ ID NO: 40735 - DNA, 198 bp, Macaca Mulatta
tgttttgacaatgattcattaaccaataataaggccccaattggaaccattaggcatcagtgcctctgctaggcttaccttttattttgttcctcaacattgtctcttcttgacttggtttctggataactcccaagagactccttactatacaaaacaatatcaggaagacagctgtcattaaattcagctacttgt

SEQ ID NO: 40736 - DNA, 647 bp, Macaca Mulatta
  misc_feature (1)...(647): n = A,T,C or G
ctgctgcagggnccctggccaccctgtggcccgcccgcacctgcactccctggcaagcagctctggctattcacgagatcattgctgtggttgacctggggctcagagaggcactggaaaggccagggaaatcacctgttaaaatagccacaacagaaggaagaatgcacaagtactggattcatttacaacaaaaagttagaatatacgcagtgatgtgtcgacgccccatcccaaacctcacatttcctctgcgttcctcttcggtttctccccttcctgtcagacgttctcatttactttactttttagtcgagtttaatcactctacggtgtgtgatttctacttgaaaacttttgtgattggatgaaccaatgaagcataagtcagaaagaaaagggaaaccaagttgccaaggctggagaagttaggatggagtggtgacggcagcggtcagtgtcccttgacatgtgacgagtaggaggctgggcatggcagacagcaggttgtgtttagagaagggactcagagcaggctgcccgtgtctgattcccctgagtgccggcatgtgaccctggctgaaacgtgtgaaaactcttctccatgtgtacctttgagcaggtgtggtctaaacagaaggtcttcc

SEQ ID NO: 40737 - DNA, 640 bp, Macaca Mulatta
agtgtccagctactacttagctgttattaaacatttttggaaactgcctaaaattcttggggtcccagatgactttataaatgtatcaaaacgagttcttattttaaaatgcactttattaactaataaaatatgagcgagctttaattttgaaaagcttggggctcagaaatccaaatatataaaacatataaaataagaggtggtaataaggattactaaagaatatttttgttcttatgaaataattgatcagtattccctttaaaaacattaattccctttactgtaattattattttttattcaaagatatttacaagctacaaaatttgcagatgaaatttaaaaattaattttgggaacaatcctccttggagatcaatccaaaatgacagctaagcatctctgaaattgaaatttagtccagtgggaaacagaatgttatttagagatgtttagttgtttgactcagattttagggaaagtcagttacgtaaaattctcctagaatcatttatgttatggaaaacaatagcttattaccagagtaatagccctaaatactgaattcattaaaagtgccttctgtaatcttaaaattaaaccccattacttatttgaagtaaaaagaaaatta

SEQ ID NO: 40738 - DNA, 865 bp, Macaca Mulatta
acgagtatcagatattaccaagaatctccaaaaagaggcccaagctcaacacaataattctgaattcacagaagaacaaaagaaaaccataggcaaaattgcaacatgcttggaattgcgaagtgcagctttacagtccacacagtctcaagaagaattaaactggaggacctgaagaagctagaaccaatcctaaagaatattcttacatataataaagaattcccatttgatgttcagcctgtcccattaagaagaattttggcacctggtgaagaagagaatttggaatttgaagaagatgaagaagagggtggtgctggagcagggtctcctgattcttttcctgctagagttcccggtactttattaccaaggttgccatcagaaccaggaatgacgttactcactatcagaattgagaaaattggtttgaaagatgctgggcagtgcattgatccctatattacagttagtgtaaaaggatctgaatggcatagacttaactcctgtgcaagatacccctgtggcttcaagaaaagaagatacatatgttcattttaatgtggacattgagctccagaagcatgttgaaaaattaaccaaaggtgcagctatcttctttgaattcaaacactacaagcctaaaaaaaggtttaccagcaccaagtgttttgctttcatggagatggatgaaattaaacctgggccaattgtaatagaactatacaagaaacccactgactttaaaagaaagaaattacaattattgaccaagaaaccactttatcttcatctacatcaaactttgcacaaggaatgatcctgacatcatgaacctggaacttctgtgaattttaccact

SEQ ID NO: 40739 - DNA, 551 bp, Macaca Mulatta
tcacctcccccaaccccacccagatcatccgctcccggtgggcaaaggtgcagcagctggtgccaaagcaggattatgtccttctggaggagcagagcaagcagcagtccaacgagcacctctaccaccagttctccagccaggccaatgtcatgggaacctggatccaaaccaagatggaggaaattgggtacatctccatcaggatgaaggagacgccagaggacaagctaaacctgaagcaatatgagcaaagcatcgtgggccacaagctgaacctggacctgctgaagcagagcaccagctcctccaggaggtcttcatcttcaacaacaagcatatcagctgcatcgtggaacacatctgcatggctgggagcagctgctcaccaccattggctgcatcatcagggaggtcaagaaccagatcctcacctgcaacaccaagggcactggccaagagcagatgcaagagtttcaggtgtccttcagccacactgacaagagccgtgccagagggctggggccgaaggaggtcaaggcctgcttcat

SEQ ID NO: 40740 - DNA, 1544 bp, Macaca Mulatta
  misc_feature (1)...(1544): n = A,T,C or G
gatgagaaagcggaggcacagcggtgccctgacacggccaagagaaggactgtgggtaagcagcagagctaggaacagaccccagctgcccccgctggcaaatgcacagaaccattacatcatcccactccgagacccaaccaagaggtacccacaccctgtggcagcaggggctgaaggcctggaaataggagaggaggcccccacatactccagcacccaannnnnnnnnnnnnnnnnnnnnnnnnnnnnnnnnnnnnnnnnnnnnnnnnnnnnnnnnnngggctgggtggtgagcttcttcagagctgaggttcttctctgccaccctctcctgtcttgcaggactcccttaagacaattgttattctccaccctgcccctcctccacccggggtcaggcctgccttcggacaaagtagacacccgcctacaccatgcgattcttaaaaatggatttacattatgaattgcctgggaccagccacagaaccagcttctctataagcctccacgtagccatggatctttcctccatatcccacgtgctacataactgaccatcatctaagttctcaccaccatccattgagctacacattgtccccgtcctggtcagcaagggcaggaggtaggagggaagactcgcactttgtccctaacactccaactccactgaattataatcaattaagattatagattattcattttctggggtagccttgaaggggaataaggtggaatggagcctcctgttaaccnnnnnnnnnnnnnnnnnnnnnnnnnnnnnnnnnnnnnnnnnnnnnnnnnnnnnnnnnnnnnnnnnnnnnnnnnnnnnnnnnnnnnnnnnnnnnnnnnnnnnnnnnnnnnnnnnnnnnnnnnnnnnnnnnnnnnnnnnnnnnnnnnnnnnnnnnnnnnnnnnnnnnnnnnnnnnnnnnnnnnnnnnnnnnnnnnnnnnnnnnnnnnnnnnnnnnnnnnnngctggggcaggaaggtggctaggctgtgaaaggggcccaggggacttgcacaccaggacctagggagcccatcaacggagatgagtccccatctgtgcccctggcttccctaccgagccacaatgagtgaggggctgagatttcagccctggcccagaagacatggctgtcccctgtggccagctccacttggtccccaacgcctgccctctgtcctcagaggcctcatctataaaggatgctcagtgtccctgcctcacaatggaggtaaagtgccaggtcagtgatgagtaaatggtgccctctccagttccaatcagctcccagcacccatcactgggccttgagtgggagcagggccaggaggaggtgggagacagaaggcagcactggggagagggatgctgggacctgagggttaatgggtaatgggtgtagaggccagcccaggagaaggtagagccctgtcctccccaccccgagactctcctgctctcccatggacccacacagcactggcatcaggccatttcacagaggaagaggagggctgaaagtggg

SEQ ID NO: 40741 - DNA, 106 bp, Macaca Mulatta
tgtgcgagagatcgctccctgggcggtgtactagtactacttgctatgcttggggatgatgcttttgatttctggggccaagggctcagggtcaccgtctcttcag

SEQ ID NO: 40742 - DNA, 790 bp, Macaca Mulatta
ggggcgtctggtcgtggtgtggcggagctgcggttaccttgtggggtctccgccgctgccgccctcccttcctcttccccatcttcttctctcggtcccgggagcccccgcgcggagagagttgcgggtgctgatcgtggtgcttgagcagagccgtggttggtgacagcatgacgagcgaggtgatagaagacgagaagcaattctattccaaggccaagacctactggaaacaaatcccacccacggtggacggcatgcttggggggtatggccacatctccagcatcgacatcaacagctcccggaagtttctgcagaggtttttgagggaaggcccgaacaagacaggaacgtcctgtgccctggactgtggagctggcattgggaggatcaccaagcggctgctcctgccgctgttcagagaggtggatatggtcgacataacggaggacttcctggttctagcccagacctacctggggggagggaggggcaagagggtgaggaactacctttctgttgtgggctccaggaatttacccccgaacccgactctttcgacgttcttctgggatcccgtgggtggaaggccaccttcaccgatttgccacctggcccaaattcttgcggggcgctgcaaggggcaaccccccgcccccaagggtttcctttgtcatcaaaaaataacttggtcccaggtagggcgttgaatttggggttaaactttgaaaccaaaccttgtgtccgggaacctttgatgttggttcccccaaggaataattcttga

SEQ ID NO: 40743 - DNA, 815 bp, Macaca Mulatta
ggggttagaaatgttatcagagtacctaggattaagtaggaaaaggcaagttagcggatgtaaacagaaagttgtctcttatacggaggttaaggtgagcagaacacacctaagtaagagaaatcaacccaattactgtgagacacaaaaattattgtttctctagaatagtgggtcaagattgcagatatggaaggaaatggggacacagttgagcttatgggggcctgggtctgtcctgaatgtctaaatcacctaagttctgtataattttgtggtttgggcaagtaatgtactatatttgctgttggttatggtcactacctggagctgctgagaatggtttgggtgctagaaatgaacagaagcacaagtcaccatatcccagtgacataactcaaggaagatttgtgtaaagggaaaattcatacttccttggtctccagggacagacaggccatagtctttgaggatgatttgttcgttttttcatatatgttttacctagatcatttccttgtgttggttttgggaactcccctgttaagtaatttccagatagttatttaatggcatttcttaaacaatgaaaaagaattgggcaagcatggcattttgcagtccgaaccttggtttccagcccttgtccctgtgaatgtaaaaaccttttagaaccttgggagaggtcacgtaaccttccccggaatccggttttccttaaaggaaccattattttactttggtaaaagctctgggaaaccaaaggaggtcctgccctaaaaaatttcctccaccccttttccaaattacccaag

SEQ ID NO: 40744 - DNA, 2243 bp, Macaca Mulatta
  misc_feature (1)...(2243): n = A,T,C or G
gagttgcttggaggagcttggagaaaccagaagtgagatctaggagaagcaaggccctggagtgccaggaacccttctcctaaagatggagaagtaaatgaagaaatacagnnnnnnnnnnnnnnnnnnnnnnnnnnnnnnnnnnnnnnnnnnnnnnnnnnnnnnnnnnnnnnnnnnnnnnnnnnnnnnnnnnnnnnnnnnnnnnnnnnnnnnnnnnnnnnnnnnnnnnnnnnnnnnnnnnnnnnnnnnnnnnnnnnnnnnnnnnnnnnnnnnnnnnnnnnnnnnnnnnnnnnnnnnnnnnnnnnnnnnnnnnnnnnnnnnnnnnnnnnnnnnnnnnnnnnnnnnnnnnnnnnnnnnnnnnnnnnnnnnnnnnnnnnnnnnnnnnnnnnnnnnnnnnnnnnnnnnnnnnnnnnnnnnnnnnnnnnnnnnnnnnnnnnnnnnnnnnnnnnnnnnnnnnnnnnnnnnnnnnnnnnnnnnnnnnnnnnnnnnnnnnnnnnnnnnnnnnnnnnnnnnnnnnnnnnnnnnnnnnnnnnnnnnnnnnnnnnnnnnnnnnnnnnnnnnnnnnnnnnnnnnnnnnnnnnnnnnnnnnnnnnnnnnnnnnnnnnnnnnnnnnnnnnnnnncactattgaagtctatcaagagagaattcagtggctaacagaaaacagcaagaaggnaggcatttggcctcatcaaaggggccagagtcagcatcctcatagatgtgtcagccgtcagcagtggccctcagaaagaggagttccaaaaggacctcatgnnnnnnnnnnnnnnnnnnnnnnnnnnnnnnnnnnnnnnnnnnnnnnnnnnnnnnnnnnnnnnnnnnnnnnnnnnnnnnnnnnnnnnnnnnnnnnnnnnnnnnnnnnnnnnnnnnnnnnnnnnnnnnnnnnnnnnnnnnnnnnnnnnnnnnnnnnnnnnnnnnnnnnnnnnnnnnnnnnnnnnnnnnnnnnnnnnnnnnnnnnnnnnnnnnnnnnnnnnnnnnnnnnnnnnnnncccagatcagccttctgaaatcctgtccgactacatccagcagtccaccatgggaagagacctcatcatccacttcatcacctacagctgcgatgatcagatgcccnnnnnnnnnnnnnnnnnnnnnnnnnnnnnnnnnnnnnnnnnnnnnnnnnnnnnnnnnnnnnnnnnnnnnnnctacaccagccgggatatggatgagctcctggcagaaattcagaaggcccagagcctcctcagccacatgcaagccctgaggcacagcagcccctgtgaggcgctcacctgcaccatggaggannnnnnnnnnnnnnnnnnnnnnnnnnnnnnnnnnnnnnnnnnnnnnnnnnnnnnnnnnnnnnnnnnnnnnnnnnnnnnnnnnnnnnnnnnnnnnnnnnnnnnnnnnnnnnnnnnnnnnnnnnnnnnnnnnnnnnnnnnnnnnnnnnnnnnnnnnnnnnnnnnnnnnnnnnnnnnnnnnnnnnnnnnnnnnnnnnnnnnnnnnnnnnnnnnnnnnnnnnnnnnnnnnnnnnnnnnnnnnnnnnnnnnnnnnnnnnnnnnnnnnnnnnnnnnnnnnnnnnnnnnggttgtactgctcgatatctctgcgaccaattccatgtacattattcatatccagcactccctgcggctgctgctggaggagcagttatccaacaaggactacttcaacctcatcgcgtnnnnnnnnnnnnnnnnnnnnnnnnnnnnnnnnnnnnnnnnnnnnnnnnnnnnnnnnnnnnnnnnnnnnnnnnnnnnnnnnnnnnnnnnnnnnnnnnnnnnnnnnnnnnnnnnnnnnnnnnnnnnnnnnnnnnnnnnnnnnnnnnnnnnnnnnnnnnnnnnnnnnnnnnnnnnnnnnnnnnnnnnnnnnnnnnnnnnnnnnnnnnnnnnnnnnnnnnnnnnnnnnnnnnnnnnnnnnnnnnnnntggagaaacatggccaggctgggctgcccggaccctcacagcttcaaggccctcagctgcaggcccctcttaccttctcttccccaccagcctacaatcagcgcctacatggccgaggcctgtagtggctgcgacctccagctgaacgtgtgtctcttctacgtgggcgagccaaagatggacaccacaccccctgcctgctatgccagtcgcactgacacggccgctgcctacaaggaagtcacccgggctgcaggtggccgcttccactggtttggagacacagg

SEQ ID NO: 40745 - DNA, 587 bp, Macaca Mulatta
  misc_feature (1)...(587): n = A,T,C or G
ggggagttatgatgatggttatgctttgaaatatgctgtgcttcaaattatttttcactcagctttaattatttttattccctttgcagcaagatgagataatcaatatctaaaaataaactgtcaccaatggcttttttcccctttctaacacaaagtggtggtactatgaagtaaaaagaaagtgctgcttgatattagccacttatatttaaaataatactaaaattggagaaagttatgtcagtttcttttgaaaacctccatttgcaggaatttgttaacctacaaaatttatttaacctattccccatttggatgggtttcgatcattgtatttaaacccctttaaaaaattttctccccccccttaaaccctccaaacccctctacaaattttgaaaattgataactagattaaaaaaaatcatttattattagagggggaaaaagaaatatnnnnnnnnnnnnnnnnttnnnnnnnnnnnnnnnnnnnnnnnnnnnnnnnnnnnnnggcccgggcccccaagaaaaaaaaaggttaaacnnnnnnnnnnnnnnnnnntaaacatgtttttttcccaaaa

SEQ ID NO: 40746 - DNA, 774 bp, Macaca Mulatta
  misc_feature (1)...(774): n = A,T,C or G
ggggccgccatgttctctgtgtgtctttgtcttttgtgtgttctttcattctccaccacccccggcacggaccccaacaagtggcgcagcgagcagggtcagcacggatgaagaaactaagtcacagaggatgaactcacttgccctcagtcattggtgccgttggtgacaattaggtctggaattcagttttcccatctcactgtcttgaggagaaggaaaaggcccagtgttctatgtcatttggatgttggtgtctccctttctgctggtacagggagttggcacatttgtgggaattacaatcccagagaaggggcagagcaagacagtggaagagaagtctccaccaatcatgccccctacaaagacaccagtttaacaactatctacatgctatacacaaaagaagcacctctataagaaccaaaaatcagggggcatgcacccnnnnnnnnnnnnnnnnnnnnnnnnnnnnnnnncaaccttcctgctgactgttcttcaatcacattgtattgactttcttctgtttaggtggagaagggaggggacatgagaaaagggcaaagtagcaaaaagccccaaatgtacctaggtgggaaataattgatttttttgttaaaatccccaagtgcttgacatggttcaagaagttcattaggactttcccttttttttgggcaaggccccacaacttggcctccagaaccccccaattgaaaaaaactttttcctctggggaaatatttttcctaaaaaggggagttttta

SEQ ID NO: 40747 - DNA, 253 bp, Macaca Mulatta
caaccttccaaaccgggggaaggggcgggcagggccagcgggtgccacagacgccagccgagacctccgctccagaacgcaggggctgctttatccgggggaaggacattgcttcgccagcaaccaggaaaacagtccctgtgcacccggattcccattgccaccaacttcgtgtaaactccagtcccgaggacacgccagagacccaggcctcgggccccgtgggcacgcccggtgccacggctcccgccaa

SEQ ID NO: 40748 - DNA, 863 bp, Macaca Mulatta
  misc_feature (1)...(863): n = A,T,C or G
ggtgaacaccccctacctggcagctcagattatgttgttcatgagtatgcctcagctgagtgaacagtggaggcagcagctgcccacattcctgcagcagacacagatttctgatctgcttattgctttagccaaccctaaagcattcctagcaatattgcagattgagcagggcctccggctgctggccacagcggctccggttcttctgccttgggttgcaccttacctatggggcttgggttggctttctgcccccagctgcagctatcctgacacagtgctctattcctggaatgtttcggatatacccgagcctaagggacctgagtgctgccacaaacctggaagagtcctgtagaggctacaatccccagatggggacccttcccaccctctgcaagctcatgagatttgttttagcaaacagatggaatctctccaggccctagaagctgggaaccaccatgccaatctacaggcactcattgctactgaaggggacgccaatgctgctaccccaagctcaagggatccagagattctacactgctactctgtgcctgctgtacactgcatccatgctccccagtccaaacgaaattacagcannnnnnnnnnnnnnnnnnnnnnnnnnnnnnnnnnnnnnnnnnnnnnnnnnnnnnnnnnnnnnnnnnnnnnnnnnnnnnnnnnnnnnnnnnnnnnnnnnnnnnnnnnnnnnnnnnnnnnnnnnnnnnnnnnnnnnnnnnnnnnnnnnnnnnnnnnnnnnnnnnnnnnnnnnnnnnnnnnnnnnnnnnnnnnnnnnnnnnnnnnnnnnnnnnnnnnnnnnnnnnnnnnnnnnnnnnnnnnnnnnnnnnnnnnnn

SEQ ID NO: 40749 - DNA, 961 bp, Macaca Mulatta
  misc_feature (1)...(961): n = A,T,C or G
aagcacgtcagctaactgttcagatgatgcaaaatcctcagattcttgcagcccttcaagaaagacttgatggtctggtagaaacaccaacaggatacattgaaagnnnnnnnnnnnnnnnnnnnnnnnnnnnnnnnnnnnnnnnnnnnnnnnnnnnnnnnnnnnnnnnnnnnnnnnnnnnnnnnnnnnnnnnnnnnnnnnnnnnnnnnnnnnnnnnnnnnnnnnnnnnnnnnnnnnnnnnnnnnnnnnnnnnnnnnnnnnnnnnnnnnnnnnnnnnnnnnnnnnnnnnnnnnnnnnnnnnnnnnnnnnnnnnnnnnnnnnnnnnnnnnnnnnnnnnnnnnnnnnnnnnnnnnnnnnnnnnnnnnnnnnnnnnnnnnnnnnnnnnnnnaccccaaaggaattcctgaattttggttaactgtttttaagaatgttgacttgctcagtgatatggttcagnggaacatgatgaacctattctgaaacacttgaaagatattaaagtgaagttctcagatgctggccagcctatgnnnnnnnnnnnnnnnnnnnnnnnnnnnnnnnnnnnnnnnnnnnnnnnnnnnnnnnnnnnnnnnnnnnnnnnnnnnnnnnnnnnnnnnnnnnnnnnnnnnnnnnnnnnnnnnnnnnnnnnnnnnnnnnnnnnnnnnnnnnnnnnnnnnnnnnnnnnnnnnnnnnnnnnnnnnnnnnnnnnnnnnnnnnnnnnnnnnnnnnnnnnnnnnnnnnnnnnnnnnnnnnnnnnnnnnnnnnnnnnnnnnnnnnnnnnnnnnnnnnnnnnnnnnnnnnnnnnnnnnnnnnnnnnnnnnnnnnnnnnnnnnnnggatgatgatgctgaagctatccttgctgcagacttcgaaattggtcactttttacgtgagcgtataatcccgagatcagtgttatattttactggagaagctattgaagatgatgatgatga

SEQ ID NO: 40750 - DNA, 768 bp, Macaca Mulatta
gggggcactcgtacgcgtgtgccgcgctcgttagtattccaggccgccgtacacggcgagtacgggcggggccggccttggctgcgtccgggcgttccagtgcgtagttccgccatacccatctccacgacctcggtcgagcatgttcaccagggcccagaattcaaattaaattatggacacattctctattgcaagatcatttaagccaggataattatgcaggttatatttctgccagctactagactataaactttttgctagggtggtggaaattcctgattgactacgcatttctcaatgaacagaaatacgcgcctccctcgcttggctccactaaattgcgaggactggaccttcatgaggactctgggcaacaggttttatgctactctatgatgaagatgctgctcttccattcagctgctagaaacagttgctccttccatgagaaagtgaacctacacagcataaggcaatcccagacttgagctaaatcagaggctcagtctgttgagtgatttggcaatttgacccagtgtaactttggatcagcctggtagaaaaagcagacacctttccatgcttgcgtaaccacatctaacatcatttcaagcaagaaaatatctacatactaaagactaagtttcagaatagtttctaactattgcacgagaataaagctgatgccttaacgccacaagggtatcaagtttaatgattctctgcccataaacataatctccctaattttttttcttagaa

SEQ ID NO: 40751 - DNA, 694 bp, Macaca Mulatta
ggagggtggcaggattgaaggcccatgaccttcaccaggcaacactgacagcaccaaaagctggggcaattaggggtcctggaaactgtcatccttgtctgctcggaacatgacatggcacagccactttggcagccagttgggcagtgactcacaaagctcaatggacttgaaccacgtgtccccaaagtatcacaaatattgaacccactgatttgaaaactgatgtccacatgaaacctgcatgccacgtccactgcttgattcctcgtcactcacacaaggagccttcagggacagtcttcaacatgggaatggggagagcaaggctggttctctctccaaacggaagacccagtgagaaaagagaacgagccagtgatgcccgcacgaacgtgggtggatcctagatgcattttgctgagggaaagaagccagacccaataagctaccacgtaggattcccattcctgggccattctggaaaaggccaaaccataaggactgacaagcagtctgggtggccgggggctgagggatcagggagaggccgggtgcataggggccaccctggagacttggaagatgaaggagtcgcttcaggaggggctggagcagtagccaggatactgcccattggtttagaaccacggaggaactgtacatccaaagactgagctggcgtgtgtgcaaa

SEQ ID NO: 40752 - DNA, 875 bp, Macaca Mulatta
  misc_feature (1)...(875): n = A,T,C or G
tcttctattttctttcccgcggttcgtttgggtgccccgtcttgtattttcctcgtctctctcgggagggccctttccctcggtccattttgttctgattcctgntgttggccctctcggtcnttcaggcgagtgttcacgcttctgcattcttctggtccctttttgccctggtggccgcccaggtagnnnnnnnnnnnnnnnnnnnnatctatatacaatntcgcgtggtctcttgttgcgtcacttcggtaataattttgttcgctcttcgtctagggccggcgtgaagcgcccccctcangtttctcgctccatcgggaaatcttcggcttcccctttagccttcgtgtaacctctcgtcgttcanggatttcaacctccccccgtccgttcctctcttttctctccttgcgttactcaaccggaaccccaatttttttcggcgggagcgaatgcaccgcgggaaatcatctaccccaacaactgtattcccagggtttttcggaactaagtgtggactaggctccgggaaacaaacaagcacaggagtgggccttttggagaccgcaagggacaattccttttaccttcccttacttttcccgtgccgactggcatcatggacaatgaggtcactttgaaacgaaagccagccaggcacagtggctcatgtcggtaatcccagcactntcggaggcggaggtaggcaaatcacctaaggtcaggagatcaagaccatcttggtcacnnnnnnnnnnnnnnnnnnnnnataaaattacaacaattaggctnnnnnnnnnnnnnnnnnnnnnnnnnnnnnnncnnnnnnnnnnnnnnnacnnnnnnnnnnnnnnnnngggagatcgagaccc

SEQ ID NO: 40753 - DNA, 158 bp, Macaca Mulatta
ccatggctcctttcttaacatgtggctttgtagattctggcttcccagtttaatgatttaagtggatcttttggggaaactgatttttgactaggtgacacacctggtacagaatttaaaaggtacaaaagggaatagagtacaaaggtcttcttccc

SEQ ID NO: 40754 - DNA, 832 bp, Macaca Mulatta
  misc_feature (1)...(832): n = A,T,C or G
ggcaatttataagctaatttagggaggcagttataggaagacaagcatggaatgagacaggagtgaggacagagccttaaagttctctaatatttagagaagggaaatctagaatgggaaatggaaaaggagtggttgatgagagttttaaggaggaggagatggttttaaggagtgtagatgtgctgaatactgatgagaagtgtcttcaggtaatgtattgtttaatacatgaatgacagacactgttcttaggcccttttggggatccacatgatcatatatacattgaataaggtgtaatgtatatattttattcattgatgcattgaataaggtataatgtattgttgaatacatgaatgagggacactgttcttaggtgctttgggggatataagtgattatataaacattgaataagacccaaaccctattcttaagatattattgtctaaaaaggaacatgagatatgctaactcaactttttaaactttatgaggagaggtactaagtttgcagtattcatcactgcatcgttagcattgagtctagtgtatatagttgatttttaatatgtatttgttgactagtaaatggtcaaaatgctctttcacaggtctctaattattgcacacttaaagatatataccaaaaatgaacagttcattcgcctagctttttttacattgtaaaatataaacctatgatttnaatatgatctccgtaatcagtggagtatctgacagacacggtgctacgcacgtnnnnnnnnnnnnnnnnnnnnnnnnnnnnnnnnnnnnnnnnnnnnnnnnnnnnnnnnnnnnnnnn

SEQ ID NO: 40755 - DNA, 1656 bp, Macaca Mulatta
  misc_feature (1)...(1656): n = A,T,C or G
ggtgctcaactgggtcacagcaatatgcagaaactgagtttggaagaacatattaagaccaggngaagacattctgttggtnttagtagttcacgaaataagaagataacaagatctttgacagaggactttgaaagggaaaaagagcactcaactaacaagaatgtctttataaattgtctaagttccggcaaaagtgaaggggatgattctggtttcacagaagaccaaactcgccgttctgttaagcagtcaacaaggaagctactccctaaatctttttcatctcactataaattttctaagccagttctacagagccaatctatttcactggtacagcagtctgaattctcattggaagttacacagtaccaagagagagaacctgtgttagtaagagcttcgccatcctgctctgtggatgtaacggaacgggcaggaagctctttacaatctcctttgctttctgctgatcttaccacagctcagacaccttcagaatttttagccttgactgaagattctgtgtctgaaacggatgcattttctaaaagtggaagcatggcatcccactgtgacaactttggccacaatgattctacctctcagatgtctctcaatcctgctgctgttacaaagacaacaatagaacttatgggaactgtcccctgtgcaattatgtctcccgggaaatataggttagagggtcaatgtagcactgaatctaattccttaacagaaacctctgctgctaatcagaaggaagtgttattacaaattgctgaactacctgctacaagtgtgagaagtcagagaataacctaccagcacatactgaaagagaagaaaatatagggttacaaaatggtgaaacaatnnnnnnnnnnnnnnnnnnnnnnnnnnnnnnnnnnnnnnnnnnnnnnnnnnnnnnnnnnnnnnnnnnnnnnnnnnnnnnnnnnnnnnnnnnnnnnnnnnnnnnnnnnnnnnnnnnnnnnnnnnnnnnnnnnnnnnnnnnnnnnnnnnnnnnnnnnnnnnnnnnnnnnnnnnnnnnnnnnnnnnnnnnnnnnnnnnnnnnnnnnnnnnnnnnnnnnnnnnnnnnnnnnnnnnnnnnnnnnnnnnnnnnnnnnnnnnnnnnnnnnnnnnnnnnnnnnnnnnnnnnnnnnnnnnnnnnnnnnnnnnnnnnnnnnnnnnnnnnnnnnnnnnnnnnnnnnnnnnnnnnnnnnnnnnnnnnnnnnnnnnnnnnnnnnnnnnnnnnnnnnnnnnnnnnnnnnnnnnnnnnnnnnnnnnnnnnnnnnnnnnnnnnnnnnnnnnnnnnnnnnnnnnnnnnngccgggaggactcgtatcactctgtcgtctcatgtgctgcagtagttcttannnnnnnnnnnnnnnnnnnnnnnnnnnnnnnnnnnnnnnnnnnnnnnnnnnnnnnnnnnnnnnnnngaatctttccctgaaattaacaaaggacgttgatcaagaagccaggtgttcccacgtcagccgaatgcccaacagtccatctgcggattggcccctacaaggtgtggaagaaaacggaggcatagattctttgccattcagactgatgttacaggactgcacagcagtcaagacgttattattaaagatgaagagagttcttcaagag

SEQ ID NO: 40756 - DNA, 932 bp, Macaca Mulatta
gggatgaaaattggatatgctttacttttacaaagcacatcttatcttttagttgaagaaatggtggcactatttctttttttgtattaagcaactgcacatttcaaaaggattattgagatgttatgaaaatctctaccttgcacaaaaatctccagcagcttttaaaattcatcatttccacaactgaattgatttccatttctacagacctggctcaagcacaaaccggtttctttgtgttgttctgattcaacagttggtttctgggtggccaattcagaagaatggactttctcaacaaatcctaggccgtagcattcctcgtcatcctcttccaggggaaaaaacaccatcatcctgtcaattgcaaacagtctcctggaacctgtcggcatattggcattttcaatgcaactcctaaatatttttccaacgaaattccaataaaataaatttcacctttatgtacttccacaatcttcttactatggaatttcccgtccatacctgtgcacgctatatgcctccttttactatatagaggggcctatgatggttgatttggagcacttgtaagccattgtctaaaggggaactaacaatatttttttccgcaaattttttaatacaattcttcgtgaaaggggactcttataacttctctgcctagttgctttgctcacctacctcgctgttagagatgtcctgatatcaatctttcctcgcacgtttttttcctagccaatattcaaggtgatgttcaacatcggatagcgtatggagatcatcccctgtaaagtaaaagcccccttctccgtgaggcgtacatcaaatgagcatggtacgatattgtgctacatagtggatactattatgttgggaagcggagatatacgagtagatacaggatcagaagtatatagcattag

SEQ ID NO: 40757 - DNA, 671 bp, Macaca Mulatta
  misc_feature (1)...(671): n = A,T,C or G
gtgaacaaatcaatgccagattcctgttatgcgctttgtcatgggattcttaagtgaacattgctaaatgtggtcttgttcacatgctccatgtagctgtaacttcacgtcatcagcttgcagtttgtaattgactaaagcattccagtgtcctctttctagattgccagctcatgacatggtgcttataaagatttaattaaagtaagaatgaaataaagtttttataannnnnnnnnnnnnnnnnnnnnnnnnnnnnnnnnnnnnnnnnnnnnnnnnnnnnnnnnnnnnnnnnnnnnnnnnnnnnnnnnnnnnnnnnnnnnnnnnnnnnnnnnnnnnnnnnnnnnnnnnnnnnnnnnnnnnnnnnnnnnnnnnnnnnnnnnnnnnnnnnnnnnnnnnnnnnnnnnnnnnnnnnnnnnnnnnnnnnnnnnnnnnnnnnnnnnnnnnnnnnnnnnnnnnnnnnnnnnnnnnnnnnnnnnnnnnnnnnnnnnnnnnnnnnnnnnnnnnnnnnnnnnnnnnnnnnnnnnnnnnnnnnnnnnnnnnnnnnnnnnnnnnnnnnnnnnnnnnnnnnnnnnnnnnnnnnnnnnnnnnnnnnnnnnnnnnnnnnnnnnnnnnnnnnnnnnnnnnnnnnnnnnnnnnnnnnnnnnnnnnnnnnnnnnnnnnnnnnnnnn

SEQ ID NO: 40758 - DNA, 803 bp, Macaca Mulatta
  misc_feature (1)...(803): n = A,T,C or G
gggaggtgcgggactggagttagtggggcgcggacttggatatggaatgacctggtactgtgtccgaacttggtgggttcttggtctcaccgacttcaagaatgaagctgcagaccctcacgcatcaaggtcctcagaatcaactggaagcttgctggaaatgcctattgtcagcctctgtcccagatctactggattagacttttctctttggagtgtcactgtgtcatccaggctggactgtgatcactgctcactgtagccttgacctccaaggctcaagcgatcttgccnnnnnnnnnnnnnnnnnnnnnnnnnnnnnnnnatgtgccactaggcctgtctaatttttgtatattttgtagagatggggtttcatcgtgttgtccaggttggtctcaagttcttgagctcangtgatctgctggtnnnnnnnnnnnnnnnnnnnnnnnnnnngggtgtgaaccactgcacttggccaaacattcttaaaagaaattaagcaagagataaataattaagaaagacttcctgtaaaagtgacatacagatttcaatgcaatcccctatcaaaatttccaatgactttttttaataaattaaaattataaaaaaatatcccccacctaacttttccttatggaaattttccagaatttcttccaaaatttgtccaaaaataattcctcccaaaanggaaaggaaagaaaaaggtctcaagagaggccttcccaaggtttttccctgaaagtttctccggaaaaaacccttttactctnnnnnnnnnnnnnnnnnnnntgtgt

SEQ ID NO: 40759 - DNA, 813 bp, Macaca Mulatta
atctggcaccacaccttctgcagtgagctgcatatggcctcacttggtgagcacccagtgctactgaccaaggcccccctgaaccctcaggccaacagagagaagatgactcagatcatgtttgagacctttaacacccgggccatgtatgtggccatccaggccatgctgtccctctgcacctctgggcataccactgacgtcctggactctggagatggggtcacccacatggtgcccatctacaagggctatgccctcccccatggcatcctgtgtctggacctggctggccaggacctgactacctcacgaagatcctcaccgagctcggctacagcttcatcaccacgggtgagcaagagatcgtgcgtgacaaggagaagctgtgttgccctttgagcaggagatggccaccaccacatcctcctcctccctggagaagagctgtgaggtgccctatggccaggtcatcgccattggcaacgagcagttccagtgtctggaggcactgttccagccttccttcctgggcatggaatcttgcagcatccacaagaccaccttgaactcatcatgaaatgtgacgtggacatctgcaaagaccagtatgccaacacgtgctgtctggcagcaccaccatataccagggcatcccaacaggatgcagaagatcactgccctggcacccagcaccatgaagatcaagatcattgtgccccgccccaagcgcaagtactcggtaagatcggcagttccatcctggcctcactgtctaccttcttagcggatgtggatcagcaagcaggagta

SEQ ID NO: 40760 - DNA, 1253 bp, Macaca Mulatta
  misc_feature (1)...(1253): n = A,T,C or G
tcactggatcggtacatcgtaccacacagtaatgttatataatctgtgtattcttcacgcatccctcctagaccgacacaactcttattcgcctcttcggcgatatacttttagagtgtaaagtttcgtatcttttacataatatgtccctgtgtctaacatacaacttctatctacttacccacgtggacgtatttcgtgaccgtactctctcggctttacttataattgatgaccatcttagtgttgatcgacgaatttccacagaantgaggatttaattcgctctttcacaaattctgtcataattattcttgatacgtggtctaacatgattgtagtcgtagggattgggacgacgttattggtattttgaaattcctttaacggcgttgaatattaatttaacgtatcttgtttcacgcgtttatgttcccaaagtctatgagataagtttgtaatattaaatggtgatnatgttatatgtatgtctggactctgttagtatttgagacctgtacgaatatacncttgtaatataacctttttcaattcagaaaaaaagagacatatattaacttctctgtgattgttttcttgttgtgttcgcaaccgtgctcagctctatcagatcttgatctggtactactacagctatatgtgtcttaaatatcaatcgtacgagattcgagctacaagacgcgcattaccttttttttagattatccatgaattcaaaagattactagtgctttcatttcatcatacaatttgatatccaatgttatttaataccaccccggctatgtttcttcccaaagtgacatggggggttgctaaatacgcatccccaggatgtgcagattggaggtgaactgagttggtgacactgcattccagcctgggtgcccctgtctcaaaaaaactggttcatatttattgtccaaccagttcatacaaagattcttaattctttctagactgttccctagtctttgggactaggaaatagtctgtgttctttttgtcagatgtgctattcctggctaatttcatatctccctctgtgataaaagcgtaacgatgctgttaggatttacaatgtcatgacttcagaaactgttttgtgttgagctgtatagatcttgcctcagcagctccctaatgtcatttgtttaatgatacttcctcttttatgatgcagcattcgttgtgctactgtgaatactggtttccaatgatctctcaaagcc

SEQ ID NO: 40761 - DNA, 613 bp, Macaca Mulatta
gggggtactcatttggactcactgggagaagggattaactagaattctcattggaagaattgacaggaaagctccctccaatttctcaatttccaccctgcctggtacctggttttatgattccacaccctcctgatccatcctgccctcctaatacatcccactctcttaagccatcctactcttgtgctcacaaatccctcccccttcttcaatctgccaagccccttcctcctctccagaagcatgtggatttttcagttttctgccctaactgttatcccactgtggcttatacctgccctccccactaccctaccctaatactctacctgccctgctcttctgctattcgttacaaaccatccatttgtcattgctctggtcccagatctctttctggaaactcccctatccatcaccctagccctcctcctagccctactggtcaactttggggtcccagaactcttccttgtgattccccagtctgttcccctattcctcctcctagccctccttgccaacactctggtcccagaactcttttctgtgactcccctatctgtccccctactcctcctcctagccctgcttgcaaacactgtcgtcc

SEQ ID NO: 40762 - DNA, 572 bp, Macaca Mulatta
  misc_feature (1)...(572): n = A,T,C or G
taagcttggaagggtgagataagcttgcagctgcaccttagaaatgctgggcggggctgcttaaatttcttagcctatgnnnnnnnnnnnnnnnnnnnnnnnnnnnnnnnnnnnnnnnnnnnnnnnnnnnnnnnnnnnnnnnnnnnnnnnnnnnnnnnnnnnnnnnnnnttccttccacattacctctgctgttagcagctttgagaaatgctgctataagatgtgggacgtcattaaaggatttaagcagagagaggcaagatcagattaatgtttcagaaaaatatttactgttttccagctgaaactagtacagtgtaatttactttctggtcacagcacacagcagtcacatcctggaggaactgtactgctctaaggtctagtctgacctgtggtttaaatgacctttagcaaattgtctttattacatttgtacactgcattcaccagtctgctcttccatggcgaagggggcagaactgttattgagggttttctgcatccagtatgttcataagatttctaccctgtgtgaacttccagatgtcaaataaaggctggatgctga

SEQ ID NO: 40763 - DNA, 440 bp, Macaca Mulatta
  misc_feature (1)...(440): n = A,T,C or G
gttggccatggctctgcagagcagctctggggacagtgtggctgggacttctcctcaactctctctggaatgttgcagaaagcaaggaccaagtgtttcagccttccacagtggcatcttcggagggagccatggtggaaatcttctgtaatcactctgtgtccaatgcttacaacttcttctggtaccttcacttcccgggatgtgcaccaagactccttgttaagggctcaaagccttctcagcagggacgatacaacatgacctatgaacgattctcttcatcgctgctcatcctccaggtgcgggaggcagatgctgctgtttactactgtgctgtggttggtggcggtaaacgtaagctgttctttgggattggaacaagactcacagttattccatnnnnnnnnnnnnnnnnnnnnnnnnnnnnccagtctaga

SEQ ID NO: 40764 - DNA, 643 bp, Macaca Mulatta
  misc_feature (1)...(643): n = A,T,C or G
cagtgaaagaggtgattcagcaagccactcttcttcttttttctttaacctccccttcactttttatttttatgggggtgggtggtgcctgctatatgcttaccnnnnnnnnnnnnnnnnnnatttttacaaatttccttttttgtcctcacccctcaattcctaggggcttgagtgagtttaagattgggttttcttggaaatcacctgtccgtcgttaattttaaacaatctccctatctccaaagaatctcttccatattacagtctggaatgtggttaatgaaaaacaagtagggaggatttctggggcaaacactgccggatcaggatcgtagttctcaggcacggaatggctagtgtgagaaacaccaacggcaggcccatctcagatcttcactatggcaactcatacaagaagctgttgaattagacccgtttcctatagatgagaacccatacaagctgtggtatttatgagcctccatttcttatactactgcagtgaaccaacattggatgtgaaaattgccttttgtcaggtgtgtgttccttacaggtaaaacaagggattcgataaacaagtggatgtgtcatatattgccaaacattacaacatgagcaaaagcaaagttgacaacca

SEQ ID NO: 40765 - DNA, 2003 bp, Macaca Mulatta
  misc_feature (1)...(2003): n = A,T,C or G
atcatgaccgtcgggtccgagaagccacacaacaagcttttgaaaaacttatccttaaagtaaagaaacagttggctccctacttaaaaagtttaatgggatattggctaatggctcaatgtgatacttatacaccggctgcgtttgcagcaaaagatgcatttgaagcggcttttcctccaagcaagcaacctgaagccatagcattttgtaaggatgtttttacaagtgtngtgctgcaggatcatcttataaaagaaacacctgatacactcagtgacccgcnnnnnnnnnnnnnnnnnnnnnnnnnnnnnnnnnnnnnnnnnnnnnnnnnnnnnnnnnnnnnnnnnnnnnnnnnnnnnnnnnnnnnnnnnnnnnnnnnnnnnnnnnnnnnnnnnnnnnnnnnnnnnnnnntcttttatcacagaataagttttggaagtatggaaaacacagcgtacctcannnnnnnnnnnnnnnnnnnnnnnnnnnnnnnnnnnnnnnnnnnnnnnnnnnnnnnnnnnnnnnnnnnnnnnnnnnnnnnnnnnnnnnnnnnnnnnnnnnnnnnnnnnnnnnnnnnnnnnnnnnnnnnnnnnnnnnnnnnnnnnnnnnnnnnnnnnnnnnnnnnnnnnnnnnnnnnnnnnnnnnnnnnnnnnnnnnnnnnnnnnnnnnnnnnnnnnnnnnnnnnnnnnnnnnnnnnnnnnnnnnnnnnnnnnnnnnnnnnnnnnnnnnnnnnnnnnnnnnnnnnnnnnnnnnnnnnnnnnnnnnnnnnnnnnnnnnnnnnnnnnnnnnnnnnnnnnnnnnnnnnnnnnnnnnnnnnnnnnnnnnnnnnnnnnnnnnnnnnnnnnnnnnnnnnnnnnnnnnnnnnnnnnnnnnnnnnnnnnnnnnnnnnnnnnnnnnnnnnnnnnnnnnnnnnnnnnnnnnnnnnnnnnnnnnnnnnnnnnnnnnnnnnnnnnnnnnnnnnnnnnnnnnnnnnnnnnnnnnnnnnnnnnnnnnnnnnnnnnnnnnnnnnnnnnnnnnnnnnnnnnnnnnnnnnnnnnnnnnnnnnnnnnnnnnnnnnnnnnnnnnnnnnnnnnnnnnnnnnnnnnnnnnnnnnnnnnnnnnnnnnnnnnnnnnnnnnnnnnnnnnnnnnnnnnnnnnnnnnnnnnnnnnnnnnnnnnnnnnnnnnnnnnnnnnnnnnnnnnnnnnnnnnnnnnnnnnnnnnnnnnnnnnnnnnnnnnnnnnnnnnnnnnnnnnnnnnnnnnnnnnnnnnnnnnnnnnnnnnnnnnnnnnnnnnnnnnnnnnnnnnnnnnnnnnnnnnnnnnnnnnnnnnnnnnnnnnnnnnnnnnnnnnnnnnnnnnnnnnnnnnnnnnnnnnnnnnnnnnnnnnnnnnnnnnnnnnnnnnnnnnnnnnnnnnnnnnnnnnnnnnnnnnnnnnnnnnnnnnnnnnnnnnnnnnnnnnnnnnnnnnnnnnnnnnnnnnnnnnnnnnnnnnnnnnnnnnnnnnnnnnnnnnnnnnnnnnnnnnnnnnnnnnnnnnnnnnnnnnnnnnnnnnnnnnnnnnnnnnnnnnnnnnnnnnnnnnnnnnnnnnnnnnnnnnnnnnnnnnnnnnnnnnnnnnnnnnnnnnnnnnnnnnnnnnnnnnnnnnnnnnnnnnnnnnnnnnnnnnnnnnnnnnnnnnnnnnnnnnnnnnnnnnnnnnnnnnnnnnnnnnnnnnnnnnnnnnnnnnnnnnnnnnnnnnnnnnnnnnnnnnnnnnnnnnnnnnnnnnnnnnnnnnnnnnnnnnnnnnnnnnnnnnnnaggtggacctgaaatggaattctcttcttaagattattgaaaagnnnnnnnnnnnnngaagtacaaatactcacttccgtgtggaagatatcctcttcctgagcagtgattggaagttcctagccagtgtttgctgcctgcgcttccatgactcactagcctcctcatctccttacagctaggcagctttcattagatatgttcatactggcatatctcagagacatcg

SEQ ID NO: 40766 - DNA, 565 bp, Macaca Mulatta
  misc_feature (1)...(565): n = A,T,C or G
ggatatattgaaaattagagtctttaaaagtcttagtgtttagaaattaacattaggtttaatatgactaataatgaagaatataaagttccctgtgtgctggtgagtgagaggactttttatttttactcctggaaatacatgatgtgtaccagtcacttgtgtgaccataatatttttgccctaaatattaggtcatcatttcctctttattgttaagtaacccggaatgctgggtattctctaacagnnnnnnnnnnnnnnnnnnnnncagtttgcagtcctggtaaattgttggagattttaataatcccaataaaatatttccatttttcaaatatgtttagatgtccttggcagatttagattagttacatgaaatggatagaaaacgggctcaggacttagggtttattttgattatttttaaaatttgttgaaataagaattgttttatttaaggaataatatttctggattaagtatttcaaatccattatttttggagagatgctatagagcttatgannnnnnnnnnnnnnnnnnnnnnnnnnnnnnnnttgtc

SEQ ID NO: 40767 - DNA, 786 bp, Macaca Mulatta
  misc_feature (1)...(786): n = A,T,C or G
gggtgaaacagcacaatgtcccattccaaatttatttttgaaacagatgtaaataattggcattttaaagaaagagaaagcaaaaacatttaatgtattaacaggcttattgctatgcaggaaatagaaggggcattacaaaaactgaagcttgtgacatatttattgcttctgttttccaactacatcacttcaattagaagtaaagctatgattttcctgacttcacataggaggcaaatttagagaaagttgtaaagatttctatgnnnnnnnnnnnnnnnnnnnnnnnnnnnnnnnnnnnngtataaggtttacacaatcattctcataatgtgacgcaagccagcaaggccaaaaatgctagagaaaataatgggatctcttccttgtaaacttgtacagtatgtggtgactttttcaaaatacagctttttgtacatgatttagagacaaattttgtacatgaaaccccagatagactataaataattctaaacaaacaagtaggtagatatgtatgtaattgctttttaatcatttaaatgcctttgtttttggactgtgcaaaggttggaagtgggtttgcatttctaaaatggggacttttattctgcaagagttcttagtaacttcttggaggggtagactttggaaacatgtaatttttttgccttgaatgttaacccgtgggtagggtttttggccaggaacatacactgcccctattttaattttgagtcttaatttaaaggttttcctgaaaagagaaaccttgcccctgaa

SEQ ID NO: 40768 - DNA, 770 bp, Macaca Mulatta
  misc_feature (1)...(770): n = A,T,C or G
ggnnnnnnnnnnnnnnnnnnnnnnnnnnnnnnnnnnnnnnnnnnnnnnnnnnnnnnnnnnnnnnnnnnnnnnnnnnnnnnnnnnnnnnnnnnnnnnnnnnnnnnnnnnnnnnnnnnnnnnnnnnnnnnnnnnnnnnnnnnnnnnnnnnnnnnnnnnnnnnnnnnnnnnnnnnnnnnnnnnnnnnnnnnnnnnnnnnnnnnnnnnnnnnnnnnnnnnnnnnnnnnnnnnnnnnnnnnnnnnnnnnnnnnnnnnnnnnnnnnnnnnnnnnnnnnnnnnnnnnnnnnnnnnnnnnnnnnnnnnnnnnnnnnnnnnnnnnnnnnnnnnnnnnnnnnnnnnnnnnnnnnnnnnnnnnnnnnnnnnnnnnnnnnnnnnnnnnnnnnnnnnnnnnnnnnnnnnnnnnnnnnnnnnnnnnnnnnnnnnnnnnnnnnnnnnnnnnnnnnnnnnnnnnnnnnnnnnnnnnnnnnnnnnnnnnnnnnnnnnnnnnnnnnnnnnnnnnnnnnnnnnnnnnnnnnnnnnnnnnnnnnnnnnnnnnnnnnnnnnnnnnnnnnnnnnnnnnnnnnnnnnnnnnnnnnnnnnnnctcttcacaataattctcctacaaatcacccctaattctgaccttcatggcccacagagctaaattatattctacattcccattttgaaaacacccctaaattcccaccccctaattatccatttactaaaatggggggccaaccaagccaaaacgccctccaacgcaaggtaacctaacttttccaattcc

SEQ ID NO: 40769 - DNA, 163 bp, Macaca Mulatta
tgttctcactttcaatagtgttaggataagtgttagtttgatctgttctttacctccccttatttggttcagagaaattagggcctactagattttcattaaaagggacctgaaaataaaagccagtcccttctttaactctgcaagttattttaaagctaat

SEQ ID NO: 40770 - DNA, 945 bp, Macaca Mulatta
  misc_feature (1)...(945): n = A,T,C or G
gccggcagccgggtctgtgctgcactgtccagatgcacaggggtgggaggtcagattttacgccgagacagcagcctatgaaagagcagattctaactgccaatgctgtgtggcaggggcctgaaaactacagccggggccaaacccaggtgccacctcttcctgcaagtacagctcactacacacagccatgtccaccaggcaacacacagcgggacacacgcctgcggctgcagcaccattcagccagcaccgcccagactcctcaggctgccgtttacggaaaacactggcccagcctgctctgagggccaggtgactcnnnnnccgcaggagggtcgctctgccgcctcccgaggcagcagagcctcggcagagggacccatccgctctgcagagtgcacccctcccagcacctggnnnnnnnnnnnnnnnnnnnnnnnnnnnnnnnnnnnnnnnnnnnnnnnnnnnnnnnnnnnnnnnnnnnnnnnnnnnnnnnnnnnnnnnnnnnnnnnnnnnnnnnnnnnnnnnnnnnnnnnnnnnccccgcccctccctggcccctgcacgactatcggacaaggctgccgtttttgtaccctcccaagaggcagttctgctcctccatcagactgttgcctggaaagactccaacttctatttaaaactcacaacttaacagcaagtttttaatgaaagaaaacagcagttccacaggagcttcaattctggcagcggtgtcggaatagtaattcggctcagacgtggacccagggctgggctggttttagaggctccagggcatgctcacacccgcatcaagagagccacaggcaaaaccagctcacaacagggtcagtcaggctggacgggcagcacctcaccaggccccaaccccactcatctcgtgggcaccacgaccatctggcacagtgaatgggaatgc

SEQ ID NO: 40771 - DNA, 714 bp, Macaca Mulatta
ggtaattatattacattgctatgtaacttgtttatcctgcttaatattatattttccatatcataaaatacactataatgtaggtaatggctgtaaaatatagtcatgtaccacataataacatttcagttaacagtggacatgtataatagtaatcctgtaagattaaaataccatatttttactatacctttgtgtgtttagatatgcaaatgccgctgtattacagttgcctacagtcttcagtacagtaacatgctctagaggtttgcagcctagaaacattaggctataccatatagcctaggtgtgtagtaggctataccatctaggtttctgtaagtatactctgtgatgtttgcacaacaatgaaatagcctaaggatgcatttctcaaaatatatccccatcactaagggatacatgactctatttccttttacagatataccatcatttatttaatgaaatccaaagtatttgatattgcagttacttataggatttatatttgtatttattgctgtagtaaacatcttaaaaacaatatctttatgtgtatccattatagttttcttggtttgtgcttaaaaagtcaaagttgtctaagcataggatttggaagtacctaactgaaatgaaacttaagatataaattttttagcccagcacactggaaattacagtttcatgccttgtaaatctcagccactt

SEQ ID NO: 40772 - DNA, 740 bp, Macaca Mulatta
  misc_feature (1)...(740): n = A,T,C or G
gggagtgnnnnnnnnnnnnnnnnnnnnnnnnnnnnnnnngaggctcttgtgtgtacagaaggcaatttggtgctatttttatttcatgaccaattcattaagaatgtttcaaacagttagcatttttctaagtattaagtaattaacatttgcctaaagaattacacattagatggataatgtaaaaataaagtgtttaagaagttaaatgtctccaaacattaaacagtgcttgagattgggcatgatgggtcatggctgtaatcctnnnnnnnnnnnnnnnnnnnnngggttgattgcttgagtacaggagttcaagatcagcctgagaaacatggtgaaaccccgtttctacaaaaaaagtacataaaattagtcaggtgatatggtttgactgtgtccccacccaaatctcatcttgaattgtagctcccataattcccgcatgttgtgggagggacccggtgggaggtaattgagtcatggggggcagtttccccacactgttctcatggtagtgaataagtctcaagagactcggtggtttttataaggggttttcctctttttgtttgactctcattttgcctctttacctgcccacccccgtaaagaacatgggcttttcacccctccggcccataaatcccgtgaagggccctcccccagccccccatggggaaaactgttggaattccccatttaaaaacccccccctttggggccccttcccaatttat

SEQ ID NO: 40773 - DNA, 84 bp, Macaca Mulatta
atcttctgtgaccgtagtagcctggattcatgcgcattccctcttcataggaagagtatggacaacaaaaaggggcagatgagt

SEQ ID NO: 40774 - DNA, 870 bp, Macaca Mulatta
  misc_feature (1)...(870): n = A,T,C or G
gggtctgcactaagaccatctcctcagctttgcttttctattcatttcattgtcgaatgaaagcaaatatttccccttatttttatttatagttttgtgtctcattgttttcacctgttcatagtttctttaataagacttttatgatatttttatatcaaaattcaggaggctgcatgaacagtgaaaaaacgaatatgaagaaagtangtaggaaaatatgttacttttctttacatggaaacagattctcttgggaatatatttctaagagatttagggtgctgatataaaggaggtgaagtttggccttgtattgaaatataaccgaactttgacnnnnnnnnnnnnnnnnnnnnttacttttgggaaaataaaaatttctcagattttttggaaggaatggattttaaagggcaaaaaaaataataaaaannnnnnnnnnnnnnnnnnnggttgtttaaaaaaacttgcctttcccaaaaggggccgggaaaaccccnnnnnnnnnnnnnnnnnnnncttggaaagcccccttttgaaacagcccatatttaaaaataaaggttggggaaaatttaggggttctnnnnnnnnnnnnnngnnnnnnnnnnnnnnnnggggnnnnnnnnnnnnnnnnnnnnnnnnnnnnncccggaaaccgcggatttcccacaaaatttttccccccaaattttttctgttttggtggggcctcccctttttaattccccccccccctctcctcccgcgaaaaaatattacggggccgggcggagaatactacctcttatatacaccctccttcaaaccgcgcaaagaatatcttcttttataaacccccacaaattcaccaccaccccttgtttn

SEQ ID NO: 40775 - DNA, 532 bp, Macaca Mulatta
tttttcttcagtttttggccaatttgaccaagacacagataatgatgctttaacatagacaaccctgaaatactaaaagtatgatatgctttatgaatacagtatcttaataagtacaaaaatggctagattgtacaaagaatgcctggattgtgcccatattatataaattcagaagtcttttgtaaattttttctctggggaaaatttcacaaaagcaccctctttctactttggatcagcacttaacaattgtaaatgttgatctttcacttgtaaagagtgaaaaatcttccttccttttccatctctggaaacagaaaaatgtttttttaaaaatcagctgcagaatatattccaagctagttaaagatacaagattttatgaagagtaacttgcagccagggttatcattggttcgtagtttactcttagcataagctaatgaatttgaaataaacctggcccaaacatgttaggagacaaagctctattataacccagctctaagctatcatttattcactggga

SEQ ID NO: 40776 - DNA, 837 bp, Macaca Mulatta
  misc_feature (1)...(837): n = A,T,C or G
gggctctcggccttagcgccatttttctggaaacctctgcgccatgagagccaagtggaggaagaagcgaatgcgcaggctgaagcgcaaaagaagaaagatgaggcagaggtccaagtaaaccgctagcttgttgcatcgtggaggccacaggagcagaaacatggaatgccaggcgctggggatgctggtacaagttgtgggactgcatgctactgtctagagcttgtctcaatggatctagaacttcatcgccctctgatcgccgatcacttctgagacccaccttgctcataaacaaaactgcccatgttggtcctctgccctggacttgtgacattctggactatttctgtgtttatttgtggccgagtgtaacaaccctaaaataaatcacctcttccgctcttttagctgaagannannnnnnnnnnnnnnnnnnnnnnnnnnttggcnnnnnnnnnnnnnnnnnnnnnnnnnnnnnnnnnnntcggccggcctgtcgggccccccttcgccataaagaatttttataaaccattctttttggccgcgcggggcccacttagggtaaagtggaacatggggccaaagcgtggtttccctaggaagaatcccggggtccaagaacaaaggggcctgggaatttccccccnnnnnnnnnnnnggggggcaacccgaagctggtttctgaaaacaaatttcccaaaaggagagtttcgtgaaggggcctttaacgggggattcttttccaaacgggggatttccaaaggggaggcgttcgaattattaaatatttacgccccccccctggccaacattaatggcacatataat

SEQ ID NO: 40777 - DNA, 204 bp, Macaca Mulatta
  misc_feature (1)...(204): n = A,T,C or G
cgcaccttttgacaagacagccaacatcaccttctccatcaacgccgacgatgnnnncccaacgccaacctgcttgagatatgctacaaggaccgcatccagcagtttgatgatgatgaggaagaggaggacgaggaagaggcccagggctcaggggagtctgatggagaagatggcgcctggcagggcagccagttggccagg

SEQ ID NO: 40778 - DNA, 656 bp, Macaca Mulatta
gattgaaatgggatcccaagaaacatcagtagggggctggagaatgagagaggcaagaaaaagaagctaaaggggaatgtcattgtaggaaacaaggtctcagtctccaggagatggagcagaacagcctcagagatgactcacctgagcagtaagacatctgaaatatttaatttaacaattcccattagctattagttgacagctgtcctgagggtattaatttcctgcatttcagcccacctgacatcaggtcaagcatattatcatggcagagggcgcccttaggtagaaagtcatgggttcttgtagcacaaagaacacaaactctattacatttcagttgaatctaagctgttgtatatgtaataagctgtctcagctgataggcaggcaaaaaataattatgaatttatttagtttcattaagtttctgcaatacaccatccaataactggatttccaaactcattctcagactttcattcactccttttctacctaaatgagaacagttacctcaagcaaattaaatgtgctgattctgtcctttaaacttttgctcaatccaaatccaatgcatgtttcttgtaggtccagaagcagatcctgatgcaggaatcccagtataaatgatgtattacggatgttctctt

SEQ ID NO: 40779 - DNA, 807 bp, Macaca Mulatta
  misc_feature (1)...(807): n = A,T,C or G
cacctcatccctctcaacatctcttccgtagatgaaagaaaaaaaagcaaagtttttttttcttctcctgagttcttcatgtgagagtggagcttgnnnnnnnnnnnnnnnnnnaaatgtatagacttgcagcgtgccgagtccatcgggttttttttagcattgttatgctaaaattagagaaaaaaaaatcctcatgaaccttccacaatcaagcctgcatcaaccttctgggtgtgacttgtgagttttggccttgtgatgccaaatctgagagtttagtctgccattaaaaaaactcattctcatctcatgcattattatgcttgctactttgtcttagcaacaatgaactataactgtttcaaagactttatggaaaagagacattatattaataaaaaaaaaagcctgcatgctggacatgtatggtataattannnnnnnnnnnnnnnnnnnnnggccttaaaaatggacgttccaaaaacttatagcatggcattcatactttttgtttattgcctcatgaccttttttgaattcaaacaaaaaaatgcaaccctaaagcccttctccccagaaattttgcttctgccccaaaatggctttgaattccccaaaatttaaccccccaatgcctgaagggtttctttgtaaaaaacccaaaagggttcaaaatttaccgcggcaaacttgaaaaaccctaaannnnnnnnnnnnnnnnnnnnnnnnnnnnnnnnnnnnnnnnnnngggttttccaaaaaccccnnnnnnnnnnnnnnnnnnnnnnnnnnnnnnnnnnnngg

SEQ ID NO: 40780 - DNA, 577 bp, Macaca Mulatta
gcctggccgggaacatattttcttaaagtttcttccaagaggaaatctgtgttagctgttagggtgacacaatagagaatcttctttcctcttacagtggtggcccagcttgccgatctcaagcttaatactgagtcctgcttcctgaaaaagtgtcagaaaccttaaacattcttatacatgtaatttgtccaaatcataaactctagatgtctttggctaatatattgtccttgtgtacagaatatataccgcttttaaagaagcatgccgcttacatataggtcataaacccacttagcacaaaagagtcacctcattccatcttgttattttatatttcacttacgctaaaataattttagcttttgatattcaggtatttttgttaccatgaatttgtgtgtttcttttctgagtttcagattgtatgcaaatataatgtgtaatttttaagacctaaaataaatgcagaagtgcgtttttcaggaagtaaacctttaatacttccattgatcagtctacccataagtgactgactctttggttactcttagctaaaaagaaagatcacagt

SEQ ID NO: 40781 - DNA, 804 bp, Macaca Mulatta
gggttttatttcattctatatgtgatcttgatatagctcattcctctctgcaactgatttaatctcatcttgacaaaatataacctagaagtgttttgagtaatattaaatcttaaacacatacatactatcattaatgaactatccgtgatttataagaggaaaacatgacaatcattaaaatgtttaccaaagaaaatatagctgaagtgctaggtcaaaataagcagtgctgtaatatatagtatggtttggtcttcaaatattgaggttaaaaaaagaaactattttgtgtgattatcttacaatctatatgagcgaatgtgttctaatgtattacataaaagtatatgcgaaaataatacaagaaactaaaattaatttgtaccattatataacatttaaggttaaaacattcagtgttaagaaattctgtagtgccacatttattgaatcacatttgtgctatataataatctcaaacagtccctttaagaacttattagagagctatgtctgaagtctgttctgcaatatctgttgcttaataactctttcaaagcattaatactgagtttatatagttcaaaaattctaatattcagtttttaataccctaaatacttatatttttactaggtgatggcatttctaaatatattgaagtccctcattttaaatactttaatgcttttgtttaactgtgggcattaataatttctgaaatttttaaaacccttttaatatttggtggactgtttgcataattccttttaaataaaacatggcaggccttatttttat

SEQ ID NO: 40782 - DNA, 707 bp, Macaca Mulatta
  misc_feature (1)...(707): n = A,T,C or G
gggaagatcctttgacatttgtagctgtgaaggcaaggggtgttatcatgtctaagttgagggtaaacatagaaggttatcaagaacttttagttaagagatagtacacttggaatatgtgcttaccttgcatccctcgtgagatattttaaatggataaatctttaacagaggagagaaattctgggctgatagtcagcaaggtccatagaggtttgagtaagaaatgtggatgtaaacagggattaattgagagtacctctactcctctgcccaatttctgttcccagaataatctgacagatgcctaggaaaacaacaacaaataacaacaacaaacacaacaacaaaatggctcttccatacaaaaacaggatggatccacttggaaaaactaaggcttttagtgtggatattgatattccagagaaaagggagtagagctcttcttactctgccaattgagggagtttctcgctctctcatcttaacttgcaaagtttcgtccttcacctttgattccctccaccatgctttagtatcccacataaatatcccagtcgaaattcccactcaaggaaaagacttggtgaggaataagtccttcttacccagcagcagaggaagcccacaacagcaaccctacccctcctttttgtaactatngaatgggacaaccaggtgaattgcccaaggttctattggga

SEQ ID NO: 40783 - DNA, 858 bp, Macaca Mulatta
tttggctctctgaccagcaccatggcagttggcaaaaacaagcaccttacgaaagggggcaaaaaggcagccaagaagaaagtggttgatccattttctaagaaatattggtatgatgtgaaagcacctgctatgttcagtataagaaatattgaaaagacactcatcaccaggacccaaggaaccaaaattgcatctgatggtctcaagggtcatgtgtttgaagtgagtcttgctgatgtgcagaatgattaagttgcatttagaaaatttaagctgattactgaagatgttcagggtaaaaactgcctgactaacttccgtgccatggatcttacctgtaacaagatgtgttccgtggtcaaaaaatggcagacaatgattgaagctcatgttgatgtcaagactaccgatggttacttgcttcatctgttctgtgttggttttactaaaaaacgcaacaatcagatacataagacctcttatgctcagcaccagtgggtccgccaaatccggaagatgatgatgaaagtcatgacccgagaggagcagacaaatgacttgaaagaagtggtcaataaattgattccagatagcattgggaaagacacagaaaaggcttgccaatctgtttatcctctccatgaagtcttcgttaggaaagtaaaaatgctgaagaagcccaggtttgaattgggaaagctcatggagcttcatggtgaaggcagtagttctggaaaagccactggggatgagataggtgctaaagttgaacgagctgatagatatgaaccaccagtccaagaatctgtttaaagttcagacttcaattagtgtcaaataaaaagtgctaattgt

SEQ ID NO: 40784 - DNA, 279 bp, Macaca Mulatta
ctcagagataatttggagttggatgagaacagaaaggtgagaaacactaaacaaataagcgttaaaaaccatttgcatcagtggcagccagaaagaataaacttctgcagattgcaaagataacaaagccaatgatggcaacactagaccattcaacaattagttcaggaaggaagtttctggaggtcggagtccgctcaatttggccttgcatcataaaggtacttaaaccatactatctaaaatagcatggtcaaagcaaaataattctttcagtag

SEQ ID NO: 40785 - DNA, 862 bp, Macaca Mulatta
gcttgatgacagagacaaagagacagtgaatatgtcttttaggttcatctaagtaaaactatgtagcctggtttcatttgctcttaggtctctctgtttttaatttattacctatatttttccaattctgcagttgaagcctgatgaaagaatcatcaaaacggaatatgggctactgattcgaagtttgcagaagaaggattctgggatatattactgcaaagcacaggagcacactttcatccacaccatagtgaagctgactttgaatgtcattgagaatgaacagatggaaaatacccagagggcagagcatgaggaggggcaggtcaaggatctattggctgagtcacggttgagatacaaagactacatccaaatccttagcagcccaaacttcagccttgaccagtactgcgaacagatgtggcacagggagaagcggagacagcgaaacaaggggggcccaaagtggaagcacatgcaggaaatgaagaagaaaagaaatagaagacatcacagagacctggatgagctccctagagctgtggccacgtagttttctacttaatttaaagaaaagaattatttacctacaaaaacactgtcttctgttttgtatatcccttataataattcataaatgcttcccatggagttttgctaaggcacaagacaataatctgattaagacaatatgtggtgaatataagaaagggcaaaaaaatcatttgaaccagttttccaagaacaaatcttgtaccagcaaagtataagaattatcctaaaaataggggctatacatttgtaaatgttccatgttttgagttttgaaatttaagtgcatgtaaataattgagct

SEQ ID NO: 40786 - DNA, 858 bp, Macaca Mulatta
  misc_feature (1)...(858): n = A,T,C or G
ggtatcactgttgctaacatgtttatagtgggagtcttggggatgatagctggttcaagagtattttgctgctaatactttatgttccttcttggtcaaacttttcccattcaaaggaagaaggtggtgctactatagacagtttttcccctagcaaatgtattgtaccataatatctatcatccaagtttcagggttttttgaaagttgataattaggaaagcgacattttactttttttagtgccctttgcctgtttgatttccattgagaatgagcagtcagttaccaaagttcctcaagtgtgggaagactgcctccatcagaatcagtgctcgttgaaaaaataaaaatccctaggttccagacctactgaattggactctttggacacgagattcagcaatctgcatcttttaaaagacattcccggtgattttgtgcatactgtttgaaaaaccctaagttatacttacgctacccttctttaatgttagagagggcgccccccaccccaaagagggannnnnnnnnnnnnnnnnnnnagattaaaaaccaccccctcaaccccccccccaaattgaaaaatgaagagatttaacggaaacaaaaacgcgtagaaatatttatctttataaaacacttcttccaatataacaacaataaagaaaaacaataagtaaaacgcgtcttttcttctcatttcgctatatataaagatctcttataatatacatgcaagtctctcttttcaccctccacctcatatttccatgcccagttattcactcatcagattcgcaattcgtcggctagtacatcactccaccattgacgtatatgtatgacagtagaccn

SEQ ID NO: 40787 - DNA, 799 bp, Macaca Mulatta
gggttttccaggtttctttgaaatccctttggctgagaggagacaccattcagttggttgtaggggtggtggcactaagaattttgtttttggtttacacttagaaacccccaacccccactccccaccctccagtcttcttcaaggactgtaaaggtagctagcttcccatgacatccaggagaagcaagaggtgcctcgcctttttgaaaatacaaaacaaaacaacaagtaagtcagagaaaatggtggaataaggaattccaaaagttcacccttctataaaagctagagaaagaaagtggtaataactctcagaatctgctttttcagaactctagaatgtaaccaaatgcttgaagtactctggggaagcatttatttgaaaacgaaaccaaaaagccttagtcagttcttagtgaaaagagcaaaactgtggggtcttgacttaccttaatgccatactccactccccggctcggcagcagccttgaaataacgacccacgttcccagtgcaggcatgtggaggctgcgaaatggagccttatttacaggggcgtgtctaatttggatcctgtgctggtgggctggccttgagagaactgtgctaagtaaagacgagtggttggggggcggcgccccggagtggggaaaattgccctgttgtgccgaagccgtggggccccaaaggggaaagattgggcgcgagagcgcgtacctcgctcggacgggggcgcaggggcgcaaaggggagaaaacaggttgtgggagaacaagggcaatggggaacacgccct

SEQ ID NO: 40788 - DNA, 635 bp, Macaca Mulatta
gggattatgggaactgattaatatttacaattttttttgtttatgagttattttgatactaatactaggaaaagagagaatctagaacatcttgaagttggaatacaaattttattcttttggtcttgggagaatttaagcagtctatgcaactcatcaaatgatgagaaatagccctccgaggttccagtaagctttcagtgactttgatacctccccaagtttcttgagttgctgcttgttaacacccagcttttaactgagtgtttgctcctgatggtttaggagattttcatattgtatcacactgtcaggttttattttgtctttttatccctccgtggatgtgagtttcaaacaagcatagtacagtaatcctgcctgatcaagagtagtctggaatgagacttattttttgagtgggagagttctccattttaatgtttctaaagtttttcatatgaacttggcattggaaaagggaggtaaagaaaaaggacgtttactaaaagcagtgtctactcttcccctttatgagtgtgtattcatggctaataaaagaggaagactctcgggttttgtgttgcatgttagcatggagaggatgctgacagctgctattgaagcagagcagt

SEQ ID NO: 40789 - DNA, 791 bp, Macaca Mulatta
ggagcgtgcttctctcagtagcctcagcatgaccctcactgtgtctccttggctctggtcgggtcatttacttctctctgagcaaatcctgcctccagggaaatgatgtcctttggctggccaggcctcagccacacgccccaacaaagcacaaggcaggaggaggcacggtgaattcccctggagcaaagtcagtggctgccaggaagagagcagtggccattggaggtatgcacggtgacctgcttcccagtcctccctggttgtcctaaactgcgctttcctccattccagaagccaaagctagaggcaaagtagggttctgtgtcccccttccccgagccacaggctcctgctcctccggtcctcagttgcagctcctgtaggacactgtcctgtttctaactggaactcacttctctaaggggctctgccgtgcatgatgggtagttttttattatacatgggaatgtatctctctgcctggccctgtctctgtgctctcaggctgtgttctggaaagtactgagtttggccacaactgcacaggcagcttgggtccctcaatcatcgtgagctctgggaggactctggccttcagctgacaggactgcacagaccagctctgtcttctctacctctgggactcatcattgaaagctctcagctaccgtttttctccttgacaaaatgggggttaataatggctcccttcaaagctacatggaaataatggtgacagttaacaagaatttcccaagggtttaaaccacaactttctcaaaactgtt

SEQ ID NO: 40790 - DNA, 1690 bp, Macaca Mulatta
  misc_feature (1)...(1690): n = A,T,C or G
cacttgtggctgcaggaagacgctcccggcaggcaaggttccgctgggagacggagatcctggtggaagcgggattcaggggacacacggacatttttcaggatgagtcgtccagagnnnnnnnnnnnnnnnnnnnnnnnnnnnnnnnnnnnnnnnnnnnnnnnnnnnnnnnnnnnnnnnnnnnnnnnnnnnnnnnnnnnnnnnnnnnnnnnnnnnnnnnnnnnnnnnnnnnnnnnnnnnnnnnnnnnnnnnnnnnnnnnnnnnnnnnnnnnnnnnnnnnnnnnnnnnnnnnnnnnnnnnnnnnnnnnnnnnnnnnnnnnnnnnnnnnnnnnnnnnnnnnnnnnnnnnnnnnnnnnnnnnnnnnnnnnnnnnnnnnnnnnnnnnnnnnnnnnnnnnnnnnnnnnnnnnnnnnnnnnnnnnnnnnnnnnnnnnnnnnnnnnnnnnnnnnnnnnnnnnnnnnnnnnnnnnnnnnnnnnnnnnnnnnnnnnnnnnnnnnnnnnnnnnnnnnnnnnnnnnnnnnnnnnnnnnnnnnnnnnnnnnnnnnnnnnnnnnnnnnnnnnnnnnnnnnnnnnnnnnnnnnnnnnnnnnnnnnnnnnnnnnnnnnnnnnnnnnnnnnnnnnnnnnnnnnnnnnnnnnnnnnnnnnnnnnnnnnnnnnnnnnnnnnnnnnnnnnnnnnnnnnnnnnnnnnnnnnnnnnnnnnnnnnnnnnnnnnnnnnnnnnnnnnnnnnnnnnnnnnnnnnnnnnnnnnnnnnnnnnnnnnnnnnnnnnnnnnnnnnnnnnnnnnnnnnnnnnnnnnnnnnnnnnnnnnnnnnnnnnnnnnnnnnnnnnnnnnnnnnnnnnnnnnnnnnnnnnnnnnnnnnnnnnnnnnnnnnnnnnnnnnnnnnnnnnnnnnnnnnnnnnnnnnnnnnnnnnnnnnnnnnnnnnnnnnnnnnnnnnnnnnnnnnnnnnnnnnnnnnnnnnnnnnnnnnnnnnnnnnnnnnnnnttgcccacagagctgggtgaccctagagcttgtgagggaacccctgaggaagggggactcagggcagccaggttccacagaaagaccctggaggggcaggcacaggagacagcagtggcccaggggaagcccagggcccagccaactcctggaatgagctgggagggtgaaggtgagggactgcagagcctggaaattgggatcgccagactgtccttgagagacacaaccgaaggaggcacacagatcggcccacccaaaattagggtgcgagtacacgatttaaagacaccaaaattcgcattttctaccgaaaaagagccagaaagagaaaggcgcattagtgaaacacagcgagggaagagacaggacctgtcctcaaaagtggataaaggcctgaatgttgaggaggtggaaggagcagggtgggaaccaggcagggaaccagccacacacgcagaagcacaagagggtgaaggagatggagaaggactacagaggacaaggatcacccaggaacaggacaaggtcggggaagacagagaaggacagatgagaatgcccaagttcaagataccatccttaggatgataaaccaagcaagcaggcaaagacagggagagaaaaagccacacaagacacagagcaggaaagggcaggagaggccatagcaacagccgacagaagagaacagggaggcacggagg

SEQ ID NO: 40791 - DNA, 857 bp, Macaca Mulatta
ggggggaaggagcagcaccaaatccaagatggcggccagcaggaggctgatgaaggagcttgaagaaatccgcaaatgtgggatgaaaaacttccgtaacatccaggttgatgaagctaatttattgacttggcaagggcttattgttcctgacaaccctccatatgataagggggccttcagaatcgaaatcaactttccagcagagtacccattcaaaccaccgaagatcacatttaaaacaaagatctatcacccgaacattgacgaaaaggggcaggtctgtctgccagtaattagcgctgaaaactggaagccagcaaccaaaaccgaccaagtaatccagtccctcatagcactggtgaatgacccccagcccgagcacccgcttcgggctgacctagctgaagaatactctaaggaccgtaaaaaattctgtaagaatgctggaagagtttacaaagaaatatggggaaaagcgcacctgtggactaaaaatctgccacgaattggttccagcaaagtgtgagccagaggccccgctgcattgcaattcagtacacccccgccaaagaaggactcctgtgggaaatttgacacgtttgccaccgcctgggaagtttgccttgttggcaattaactaaaatattccaaacgatttttcttaaaatcaaagaatggggcctaagctaaccctggtaaaacaaaaagggttaaaaaaatttaaaaaatgtttcttataaataattaaactcttcctgaattaccttcatatcaacattattgcacatacagtagaatcgtcttccacgtaacacaatactattataacctcatccttctccctctgtctatct

SEQ ID NO: 40792 - DNA, 809 bp, Macaca Mulatta
  misc_feature (1)...(809): n = A,T,C or G
attatgacgatgccctcccggcgtatatcttatcatgcagctaaagctactaaacacaaatcaccaccaaccaccccttacaaaaacccccacccttcagtctcacaatgtccgnnnnnnnnnnnnnnnnnnnnnnnnnnnnnnnnnnnnnnnnnnnnnnnnnnnnnnnnnnnnnnnnnnnnnnnnnnnnnnnnnnnnnnnnnnnnnnnnnnnnnnnnnnnnnnnnnnnnnnnnnnnnnnnnnnnnnnnnnnnnnnnnnnnnnnnnnnnnnnnnnnnnnnnnnnnnnnnnnnnnnnnnnnnnnnnnnnnnnnnnnnnnnnnnnnnnnnnnnnnnnnnnnnnnnnnnnnnnnnnnnnnnnnnnnnnnnnnnnnnnnnnnnnnnnnnnnnnnnnnnnnnnnnnnnnnnnnnnnnnnnnnnnnnnnnnnnnnnnnnnnnnnnnnnnnnnnnnnnnnnnnnnnnnnnnnnnnnnnnnnnnnnnnnnnnnnnnnnnnnnnnnnnnnnnnnnnnnnnnnnnnnnnnnnnnnnnnnnnnnnnnnnnnnnnnnnnnnnnnnnnnnnnnnnnnnnnnnnnnnnnnnnnnnnnnnnnnnnnnnnnnnnnnnnnnnnnnnnnnnnnnnnnnnnnnnnnnnnnnnnnnnnnnnnnnnnnnnnnnnnnnnnnnnnnnnnnnnnnnnnnnnnnnnnnctccatagctctaatagcctctacacttctggtattactaactattctagaaattgcagagccctaattcaagctatgtctcacactcttaattaccttatctacggaaacactaatgaccacaga

SEQ ID NO: 40793 - DNA, 789 bp, Macaca Mulatta
  misc_feature (1)...(789): n = A,T,C or G
ggcactctacttttgaatatgtttgaaattttccatcataaaaagctcaaaaataatataatggtcacccttagagtcagtcagttctctgaacattattactttcctgaaaggcaaattactcacaactacgtggcaactgtacattatactcactactcacttctggtcccctagctcttcatttaacaagcagtgtgggcaaaaaattttaactttccaagtaaaagcttcagggaattcagtttgacaggatgagtgtagaagaatttataccaaacttgtatatgtttctgcagaagcccttcctgctgaatcaagggacctatatattcatatggcagaaacaaggtggggctctaaaaagagcggagagattatggacagaacttggttttattagtctctatgagccctggagtcaaaatatatgtcaaaagatgtttataagatttactcaattagaattctcttgaaaattctattaagtacattttcagtactctctttttttgcaaaataccagagtttctgagttcaagtacaatttcactcagaaaaacaatagtactcccaaatgtactgattgatttacagttggtcttttgatcatcactgttcacagaaatgttatgccaaanttttcaaccagctcagcagctactagattaaattagtaaggttgaagaccattatgggtaccttttaggtataaatttttagttaattgatgggaggagaaagcatacccgctccaaaaaattggttcaacttaatttttggggaatt

SEQ ID NO: 40794 - DNA, 2202 bp, Macaca Mulatta
  misc_feature (1)...(2202): n = A,T,C or G
taaaatatggtgtctggcaggattaatgcagagaggtaccatcttgattttccccagttacattcaccgggtctggtctctgtacgcttagaagagtagaatcactttcttgtttaaacatttacggccgggcgcggtggttcacgcctgtaatgccagcactttgggaggccaaggcgagtggatcacctaaggtcaggagttcaagaccagcctgtccaacatggcaaaaccccgtctctacnnnnnnnnnnatacagaaatattagctgggtgtggtggtgtgtgcctgtaatcccagctactcaggaggctgaagcaggagaatcctttaacccgagaggcagaggttgcagtgagccgagatcgcaccactgcactccagcctgggcgacagaatgggactctgtnnnnnnnnnnnnnnnnnnnnnnnnnnnnnnnnnnnnnnnnnnnnnnnnnnnnnnnnnnnnnnnnnnnnnnnnnnnnnnnnnnnnnnnnnnnnnnnnnnnnnnnnnnnnnnnnnnnnnnnnnnnnnnnnnnnnnnnnnnnnnnnnnnnnnnnnnnnnnnnnnnnnnnnnnnnnnnnnnnnnnnnnnnnnnnnnnnnnnnnnnnnnnnnnnnnnnnnnnnnnnnnnnnnnnnnnnnnnnnnnnnnnnnnnnnnnnnnnnnnnnnnnnnnnnnnnnnnnnnnnnnnnnnnnnnnnnnnnnnnnnnnnnnnnnnnnnnnnnnnnnnnnnnnnnnnnnnnnnnnnnnnnnnnnnnnnnnnnnnnnnnnnnnnnnnnnnnnnnnnnnnnnnnnnnnnnnnnnnnnnnnnnnnnnnnnnnnnnnnnnnnnnnnnnnnnnnnnnnnnnnnnnnnnnnnnnnnnnnnnnnnnnnnnnnnnnnnnnnnnnnnnnnnnnnnnnnnnnnnnnnnnnnnnnnnnnnnnnnnnnnnnnnnnnnnnnnnnnnnnnnnnnnnnnnnnnnnnnnnnnnnnnnnnnnnnnnnnnnnnnnnnnnnnnnnnnnnnnnnnnnnnnnnnnnnnnnnnnnnnnnnnnnnnnnnnnnnnnnnnnnnnnnnnnnnnnnnnnnnnnnnnnnnnnnnnnnnnnnnnnnnnnnnnnnnnnnnnnnnnnnnnnnnnnnnnnnnnnnnnnnnnnnnnnnnnnnnnnnnnnnnnnnnnnnnnnnnnnnnnnnnnnnnnnnnnnnnnnnnnnnnnnnnnnnnnnnnnnnnnnnnnnnnnnnnnnnnnnnnnnnnnnnnnnnnnnnnnnnnnnnnnnnnnnnnnnnnnnnnnnnnnnnnnnnnnnnnnnnnnnnnnnnnnnnnnnnnnnnnnnnnnnnnnnnnnnnnnnnnnnnnnnnnnnnnnnnnnnnnnnnnnnnnnnnnnnnnnnnnnnnnnnnnnnnnnnnnnnnnnnnnnnnnnnnnnnnnnnnnnnnnnnnnnnnnnnnnnnnnnnnnnnnnnnnnnnnnnnnnnnnnnnnnnnnnnnnnnnnnnnnnnnnnnnnnnnnnnnnnnnnnnnnnnnnnnnnnnnnnnnnnnnnnnnnnnnnnnnnnnnnnnnnnnnnnnnnnnnnnnnnnnnnnnnnnnnnnnnnnnnnnnnnnnnnnnnnnnnnnnnnnnnnnnnnnnnnnnnnnnnnnnnnnnnnnnnnnnnnnnnnnnnnnnnnnnnnnnnnnnnnnnnnnnnnnnnnnnnnnnnnnnnnnnnnnnnnnnnnnnnnnnnnnnnnnnnnnnnnnnnnnnnnnnnnnnnnnnnnnnnnnnnnnnnnnnnnnnnnnnnaaaaggtgggaagcagaaacagccaggcttgtcaaaagctctctccggcctaactctgcagcttccagcctctgcacagctcccttccctgcagcaagatgagtgctttggacaagaacgttagccccttccccaacgccgagaaaactttgtaggtccagcagcgccgccagcaagcagcaaagggagagtacctgtcgcggcctccctcccaaagaggaggtggccactcagggcacggtcacgggagcagcttaggcaggactggagactgcagggacagcacaggtgtcaggctgcgccccttctcagagaagccagcagactccctccgagagtccctttttctggggcttggggcagggccgttgcagccttcgaggtcctctggggaggaggaatgctgctcccaagtgggtgagcttgtgcttggccggccacggtggcttcct

SEQ ID NO: 40795 - DNA, 664 bp, Macaca Mulatta
gccctgaggacgtgcgggccaggggcggcccggaaagtaggaagcggagggggagcaggtctgcgaggctaagtgtcgcggcggcgcacctcgcgtcgagaatcgggaggaggaggagactgcaaggataggcccaggagtaatggagtccaaagaggaactagcggcaaacaatctcaacgggaaaaatgcccaacaagaaaacgatggaggggagcaggcccccatgccgaatgaagaagaatcccgccatttgggagggggtgaaggccagaagcctggaggaaatatcaggcgggggcgagttaggcgacttgtccctaattttcgatgggccatacctaataggcatattgagcacaatgaagcgagagatgatgtagaaaggtttgtagggcagatgatggaaatcaagagaaagactagggaacagcagatgaggcactatatgcgcttccaaactcctgaacctgacaaccattatgacttttgcctcataccttgaatcctaaaagtttttgctgaggttaatgtgaacactgctttacaagcttgtaatctggtgatttactttttctgtaagccttttggtgtttccacttaaccaggttctaatggaaattagaatgctaattgtatattatcttgtctcagccaaaaagta

SEQ ID NO: 40796 - DNA, 673 bp, Macaca Mulatta
  misc_feature (1)...(673): n = A,T,C or G
attctgggaactttagtggcttaggtcattctgtacattaggaaagattttttagcaccagagtggcatgatctgatttgttttaggacaataattggtataggaaaagagtggaaatagggcaacctacgtattcacacttcagataagttgttctttaggattccttcacaaccactttcttgttctcatgttcaggtttaatgcctcttgtgagtttttgttttgttagtccttgagacagagtctccgttgcctcggctggagtgcagtggcaccatctctgctcactacagcnnnnnnnnnnnnnnnnnnnnnnnnnnnnnnnnnnnnnnnnnnnnnnnnnnnnnnnnnnnnnnnnnnnnctaatttttgtatttttagtagagacggggtttcaccacgttggccgggcttgtctcgaactcctgacctcaagtgatcnnnnnnnnnnnnnnnnnnnnnnnnnnnnnnnnnnnnnnnnnnnnnnnnnnnnnnnnnnnnnnnnnnnnnnnnnnnnnnnnnngttcaagctattttcctgcctctgcctcccaagtagctgggattacagatgggcaccaccatgcccagctaatttttgtatttttagtagagacggggtttcaccacgttggccgggcttgtctcgaactcctgacctcaagtgatc

SEQ ID NO: 40797 - DNA, 869 bp, Macaca Mulatta
  misc_feature (1)...(869): n = A,T,C or G
ggggaaacataaggtacattttttttttcatattcctgagttaatctgaaacgccttagcgccaggacgttggaaagctaaagctggcccgttttgctggcttttgtagtttaagagttaccaaccaactgaattagctgataagatctcagaacagtgggataagtacacagctcggagttttatannnnnnnnnnnnnnnnnngcagactatcaagaaatccaaagtggtaatgggcaaagtctgttcagcattcggcaatggatttatcttaattggggaaacggtgttccaaataatgttctggaagttatcaggatacctattttgaatataggactgaattttttaaagtaatatttaaggtggtccttgataattaaataaaatgcttaattcatgtggctnnnnnnnnnnnnnnnnnnnnnnnnnnnnnnnnnnnnnnnnnnnnnnnnnnnnnnnnnnnnnnnnnnnnnannnnnnnnnnnnnnataataatttttttatttcatgtggggcccccccgaggnnnnnnnnnnnnnnnnnnnacctattttgtttggggcccgggggcccccaatagggaagttaaacaatggttcctaaagggtttttcttgaagaattcccggggcctaagaaataggcctctgggatttccctcnnnnnnnnnnnnnnnnnnnnngggggtcaaccaagagggatttctagaaaataatccccaaggggggtattttaagggcgtcctttaggggggttcttctacaaggggagcttcccaagttggtgccctattatatcaaattattgccccccctcccttgtctattgttatgagagagtgggccggtgggaatttctcaaacaaa

SEQ ID NO: 40798 - DNA, 137 bp, Macaca Mulatta
aggccagtggacctgctctggagacccaggctcttctcccaaggagcaccccaagtctgtccttatgggaagaagcaggagccccgtctggctgtaccccaagctgcattctaaggaccaatgctgtcagcaataga

SEQ ID NO: 40799 - DNA, 315 bp, Macaca Mulatta
ttcacatcagcactactttaagtaggctactgtgtagatcccattgctgcttcaagcttctcaaatgttcatcactgtcccatctttctgtaggtcaactttccttttttacatcgtggaaattgtcaagagttttaatctccaaagcctcccattaaggggtgccataaaaagatgaatgatgtaaacttcccaaagccgtaattagctgacagttaaatgattgattcaatcgaagctagaaaagttagggtgtacaagtaaccaaaaggcttcctgtccttgattccaggaactagaattactgaacctggc

SEQ ID NO: 40800 - DNA, 768 bp, Macaca Mulatta
  misc_feature (1)...(768): n = A,T,C or G
ggagcagggcacgatttcctcctattgtgactcctgatgacctccaagaaataattcctgaatgtcacgcttataagacattttgctgattatgggcttgtaataattagaggtttgtccctagaaaatattgccaacaaaaatttattaatagtgcaaaggaagtgcttctgcatcttattatgtagattgttattttatattcaacatcattacaaacgtgttctgagagggctattgagataaatctccaagacatctaccataaaccagtacttggacttacagccagtgctctccacatctccatggtaaagaacattcaggtcaagaggtagaaatggaaaaccaggaaggtgtttggtgattactttgtgaggttagttgtgtcaagagcaaattaatttttttaatacagtaagtcttagcaattttaaaaccattcatacaaaagaatcagagttaaaatgaaattcacagtagtttccatggggattaccggcaggtgtaatgcatcttccagggaaagaaaatggtggagggaagtagaataggatgggggaatggtagagagtcncagttgacttcagttgccactcgggggcattactggtccttggttactttccgagcatttagatctagagctagaagggaatcccagaagaccgaccccacgaaaatcccccaggaagtttccttgggggggtgggactttttaaatggggcatgccctcccttgaaaaggccatgttgggaaggcctcca

SEQ ID NO: 40801 - DNA, 652 bp, Macaca Mulatta
ggggagatcacatcaacatctcggcgttgggctgggtctgcgtggagcctcagaaatgttccccagcccattcttcccaagaaccaatgagtaaaatcaggggcctcccacctgaggtcagggaaccaggccctggagtggaacttggggtggaaaatggccttctttgtcaactgattcattctccagaattcaacttgttctccaactcggtggtgtttgaaagcaactttatccaggtcactaagcccgggaactggagagatgtctgtgaagggtctgccaccgtgatccttggggtgacctcctcggtgccctccctgccgctccccaatgtcctcctgatggccaatgttacctggccccggggtccgttttccacctggagcacacctggtgatgccccagtcatcaccctcagcaggcttctccccctgaagtacgtggagctgcgaatctacgaccggctccagcgcatcctgagggttaggaacgtgaccgaaagatctctatctgaagctcacgaaaaaacccaaaatgtgtttcattcgggggccctgtggaaatccgcaaaagcctgtcctcccccaaaacccaaatcaatccctctgctgggccaaagcccccatcccaaaaaacccaaaaccccctt

SEQ ID NO: 40802 - DNA, 836 bp, Macaca Mulatta
tgagattcggcacgaggtctgtatattatgctgcactctgcacttggttcagttacatctgtcattaaatgcagtgactttccacgggagaggatgggagaagcagtaactcccaggggaagacatcgcggaatttctgtgattggatggagagcttgcattttcatgcccttcccacttgaggttctgatgcttttctcaaaagacataagtcttccagctgtctgttgagaattagtgttccatagtaagttagttgtgggaaagaaaattggtgccaatagcttttaagggttggactattactgataattggtgaggtccatacatagttaaacagcacctatatataacagtaaatgctgctgttcaatttcaactccagagtgtttagtaacattaattacagcaagtgctgacaattacattgaagctttgtaaaatgacagaaaattagaatattggaaatgcgttctgtattgtgtacaaaacaggatgtatttatgccactttttatggttaggaaatacataatctagagggattcacaagaaacagaatactttgctctgggaacagaaacagtacaagaagaacactggtgaaagagattgactttttcaccgtatacgtgttcatatacttcatatactttgtaaatatatgcttgttttattagtagaacaaatcaaatactgaaggaaaagataaacacattcttaaaatgtgcagaatgcagaataggtcattatgaagccagggtctctatgacaaacaaattgcccttgagtgaagctaaggctgctctgtggcaaacgtaaactcaaaggacccgg

SEQ ID NO: 40803 - DNA, 642 bp, Macaca Mulatta
cgattttgtacgacagatcataggacttggcagcaaatacttggatctgaaactttagccttgcccattaaccagctgtgatgttgagtaagtcatctagtctttggctcacttgtaaaatggtataatattgatactatagttgtattgctattacctgggaatgacaccccccactcttatgattcacaacatggactttttatgacccaggtctgttttgcttttaaaatcttaaatgtacagcatcccagtcttagaccacagcctttgatgcttccagcctgtactccctcacaccctacacacctgttctttgatgttgactaagccctcgggtcttttgtcagtctctcagtccctatgaaactttaataacttgtctctccagccttgggcctcatgattccttaatttaatcatttttagccaacacgtactatctcccttatcctttgttcctccataatatccaccttgcagaccccttcccttaggtcagtctagctgttcatttttctgcatttgggctgcacagctcaactcagcactgcttaataatcagctgtatgtacctgctcagttccttctcctgttccctgggatagttgctcccaattctccactctctcctctcctccc

SEQ ID NO: 40804 - DNA, 238 bp, Macaca Mulatta
aaaaagagtaagatatctaggtttcctagtagcccaagggcagtgcgaactcggcagtgggcagaaggttgccatacgtgcactccccactcctgtcacccggcgacaagtgagggagtttttaggggcagcaggcttttgatgtacttggatgccgaacttttcactcatggccaagccattgtatgaagccacaaagtgggggagaaacagagtccctcctatggggtgatgagca

SEQ ID NO: 40805 - DNA, 801 bp, Macaca Mulatta
  misc_feature (1)...(801): n = A,T,C or G
gggcacgtcttgtgtacggaccaccatcttttcccttttcttaatgttctctctgctgcccttagttgacttgttctatcaagctcatttttagggctcaattgccagtcatttacggccagctaagtcaatcctatttagaagtgatggtatataaatgtgtactttcaggttttcaccagacaagcagttttcccttcattgggggtgaggggagcaagaggacacattgtataagcaagtgtcagtcctactcaagtgccatgggactcggtctccccagagggacatttcctttgtttttgtttttggtggttgctgnnnnnnnnnnnnnnnnnnnnnnngatggagtctcgctctgtcggnnnnnnnnnnnnnnnnnnacgtgatctccgcccactccacctcccgggttcaagggattctgccgcctcagcctctcgattagctgggattatatgggcccgccaccatggccgggctaatttttggaatttttagtgacgaggggcgctgtcgcccgtggtgagcgaaactggtccgtgaaacttctggggctcgaagtgatccgccctggccttggtgcttcccgggccggctgggaatggcgagggggggaagtcacccgccgcgtgggcccagaaaggggaagtttgcggaaaaaagctggggaggagaggccccttggaaaaagggagggcccgaccgctccgctgtggcgggaaggggagagggagggcccgcacgagacaggtagccgtgatgttgccgagtgagaagaaggaagacagggacaaagcg

SEQ ID NO: 40806 - DNA, 778 bp, Macaca Mulatta
  misc_feature (1)...(778): n = A,T,C or G
aatccagaaggccttaaaattttttgtcctggtcccccagagtccataaaattttggatatatttgattaaaaattatattcttcaaaatgtcctctaatcttctaataaagattctattccacacgagagagggaaggcggggttcctgtagttgattggcatgttctacctgatcaaacactgtgtcttgctccttcagacacggagtcattccagccagactctcttcttttatctttacctttctcacctcttctttcttcacccttataaaccttccttaccctaccaaggtgtaacaagagggaaagatagacgggagaaataagaaaatttgaaatgtaggccctattttgttaaggagttttgtgcatttttaagaaccaagaagttaaagcttattttgagttgtgtttattccctgtgaccatcttggctgctgagagaccgcagtgagaactggcaaattaggagaagcaagatgaaatgcaaaagcaaacagactctgaggagggacaggatgctcgaacctaagtagtattcagaatttggtgctggagtttttgggagtaggggtagggtaggaatctgggggaaagaaagagtatataagcannnnnnnnnnnnnnnnnnnnnnngcnnnnnnnnnnnnnnnnnnnnnnnannnnnnnnnnnnnnnannnnnnnnnnnnnnnnnnnnnnnnnnnnnnnnnnnnnnnnnnnnnnnnnngnnnnnnnnnnnnntaactgggactataggcatgcgccaccatgcc

SEQ ID NO: 40807 - DNA, 1546 bp, Macaca Mulatta
ctcctttctccctctcagaaccttcctgccgccgcgttcgcacctcgctgctccagcgtctggggcgcgttccaaccttccagcctgcgacctgcagagaaaaaaaattacttattttcttgccccatacataccttgaggcgagcaaaaaaaattaattttaaccatgagggaaatcgtgcacatccaggccggtcagtgtggcaaccagatcggtgccaagttctgggaggtgatcagtgatgaacatggcatcgaccccaccggcacctaccacggggacagcgacctgcagctggaccgcatctccgtgtactacaatgaagccacaggtggcaaatatgttcctcgtgccatcctggtggatctagaacctgggaccatggactctgttcgctcaggtccttttggccagatctttagaccagacaactttgtatttggtcagtctggggcaggtaacaactgggccaaaggccactacacagagggggccgagctggttgattctgtcctggatgtggtacggaaggaggcagagagctgtgactgcctgcagggcttccagctgacccactcactgggtggaggcacaggctctggaatgggcactctccttatcagcaagatccgagaagagtaccctgatcgcatcatgaacaccttcagtgtggttccttcacccaaagtatctgacaccgtggtcgagccctacaatgccaccctctccgtccatcagttggtagagaacactgatgagacctattgcattgacaacgaggccctctatgatatctgcttccgtactctgaagctgaccacaccaacctacggggatctgaaccacctcgtctcagccaccatgagcggtgtcaccacctgcctccgcttccctggccagctcaatgctgacctccgcaaattggcagtcaacatggtccccttcccacgcctccatttctttatgcctggctttgcccctctcaccagccgtggaagccagcaatatcgagctcttacagtgccagaactcacccagcaggtcttcgatgccaagaacatgatggctgcctgtgacccccgccacggccgatacctcaccgtggctgctgtcttccgtgggtcggatgtccatgaaggaggtcgatgagcagatgcttaacgtgcagaacaaaaacagcagctactttgtggaatggatccccaacaacgtcaagacagctgtctgtgacatcccacctcgtggcctcaagatggcagtcaccttcatcggcaacagcacggccatccaggagctcttcaagcgcatctcggagcagttcactgccatgttccgccggaaggccttcctccactggtacacaggcgagggcatggacgagatggagttcactgaggctgagagcaacatgaacgacctcgtctctgagtatcagcagtaccaggatgccaccgcagaagaggaggaggatttcggtgaggaggccgaagaggaggcctaaggcagagcccccatcacctcaggcttctcagttcccttagccgt

SEQ ID NO: 40808 - DNA, 902 bp, Macaca Mulatta
  misc_feature (1)...(902): n = A,T,C or G
gcacgaggctaatacattactaacacgcactnnnnnnnnnnnnnnnnnnnnnnnnnnnnnnnnnnnnnnnnnnnnnnnnnnnnnnnnnnnnnnnnnnnnnnnnnnnnnnnnnnnnnnnnnnnnnnnnnnnnnnnnnnnnnnnnnnnnnnnnnnnnnnnnnnnnnnnnnnnnnnnnnnnnnnnnnnnnnnnnnnnnnnnnnnnnnnnnnnnnnnnnnnnnnnnnnnnnnnnnnnnnnnnnnnnnnnnnnnnnnnnnnnnnnnnnnnnnnnnnnnnnnnnnnnnnnnnnnnnnnnnnnnnnnnnnnnnnnnnnnnnnnnnnnnnnnnnnnnnnnnnnnnnnnnnnnnnnnnnnnnnnnnnnnnnnnnnnnnnnnnnnnnnnnnnnnnnnnnnnnnnnnnnnnnnnnnnnnnnnnnnnnnnnnnnnnnnnnnnnnnnnnnnnnnnnnnnnnnnnnnnnnnnnnnnnnnnnnnnnnnnnnnnnnnnnnnnnnnnnnnnnnnnnnnnnnnnnnnnnnnnnnnnnnnnnnnnnnnnnnnnnnnnnnnnnnnnnnnnnnnnnnnnnnnnnnnnnnnnnnnnnnnnnnnnnnnnnnnnnnnnnnnnnnnnnnnnnnnnnnnnnnnnnnnnnnnnnnnnnnnnnnnnnnnnnnnnnaaatcggatcgaagacttagcgataactaaaggcaggcatagcaagccaaaaaagccctgctaccttactggtacccaagacagggtgctccaggaaagttgcacagttaagagtcggaaactaaaccgggtgtttcaagagtcccctgagtacgatatagcagcttccgtgaccccttatgcgcggaccaccggaagagcaacctgttttacggacgctagggcaggttttttgttacagaaatcgcggagtca

SEQ ID NO: 40809 - DNA, 635 bp, Macaca Mulatta
gctcagacatcaaaactccctttggatgacatagattattacttagtagtatatcatgcattggcggtcccacattttgaaatttaacggaatcgtggtgatcagaataaaagaagccttcaatgtgaggcccaggcattgggtaccatgtgtgcgattcatgagccttggcatctgaacacttttctggaaggatccatcaagacaacacatcagggatgcactagtgaagtgatgttcaaaatgtgctactcagacctatagcatcaacatcacctgagaatttgttagaaattctaactgttaggctctactttagaccaactgaatctgaaacttggggagttcatggggtccagcaatttgtgtttttacaagacttactagatgattctgagaaccactgtgctagtgaattgttactgtctgtggctacgtagaatatgaaaagtaaagggttggaaaatggggaaattgatgagtgttcacttatgaggaaatgaagaatagatagaaaagaatgagttaaattttggaattcaaaaaagaagcaatttgtaaaagcgaggaatttgatttgtaggacaattgcttgcggaatatttgctttctcagagaagggcaatctagatcac

SEQ ID NO: 40810 - DNA, 397 bp, Macaca Mulatta
  misc_feature (1)...(397): n = A,T,C or G
gaactccagatgtgaaggcgtttctggaaagtccttggtcccgggatccggcatcggccggcccagagcccctgccccacgtccttgagtcctccaggcattgggaccctccgagctgcacgtccctgggcacagacaagtgtgaggtgctgtcggggctgtgtcaggtgcggggtgggccgccccctttctcagncagaaccttccagcctggtgccgtggcccccaggcccgagtcttcctaaggctgtgaggccacccctgtcctggcctccgttctcgcagcagcagactttgcctatgatgagtggggaggcccctggctggctgggccaggctgggcccctggccatgggggctgtacctctgggggagccagctgaggaggcccccatgc

SEQ ID NO: 40811 - DNA, 357 bp, Macaca Mulatta
ttctacctctataatctctttacttcagtatttccaaagtgtctttatcttagttggtaagtacataaagcataaaatctttcatcactgttaagtagtccttgacaccgtcagtctctttgattaccaaaccagcttcctctcctaggcctttccccaaccctttgactaatctttagccttccttttcagtcttctcctcctctgtcaatcccttaaatatggtatcctgctcttttctcaatatccaagctcctctggccagtgcatctattaagttggcacctaactgatccctcacaatattacactttagcccaggtctctctcataccctagcagataaatatctagagt

SEQ ID NO: 40812 - DNA, 802 bp, Macaca Mulatta
  misc_feature (1)...(802): n = A,T,C or G
gnnnnnnnnnnnnnnnnnnnnnnnnnnnnnnnnnnnnnnnnnnnnnnnnnnnnnnnnnnnnnnnnnnnnnnnagtactaatgctggctttttgtgcctcttttactgtcataatgcagtgttcctcacagtatgttcacaaacaattatttacttgggaaattactagtggctaaaataaaaaaaattgtactatatagttttttgggaaaacattgggttaaataaattttatttgttgctttttttgttattgcagctaaacatccaaaagaacctctgatagtgctcatgtacattgtaaatctctaagaaatctgcattaaatatactgtctcacagacttgtttaaacatttaacattcatgccccccaccctcaagtactttagtaaactgtccttagagagataaaagttatttcactgtaatgatttttgacagacacctaattatcctgaaatgatttcatataaagagatactctttgaaagatgtctcacttttcaggtagggctctgtttcctttctcaaatattcttttcccacttaatcatttcattaaaaaaaaaatctagagtcattaaaacttcttaagatttggaaaaaaagtaaggtgtggatattttcttgaaaattctgtatcaggcagaaattttaaaacttaaaacagttaaagaaaatcaccacgttgcgaaaacctacaaacaatttctgaacggtccaaaaaatataaaaaccctctaaacccttcaaaaaaaagcctaagtaaaaatagggtaaagtccaagaaaaaaagtccat

SEQ ID NO: 40813 - DNA, 982 bp, Macaca Mulatta
  misc_feature (1)...(982): n = A,T,C or G
ggattctagaggccgaaggcggccgacnnnnnnnnnnnnnnnnnnnnnnnnnnnnnnnnnnnnnnnnnnnnnnnnnnnnnnnnnnnnnnnnnnnnnnnnnnnnnnnnnnnnnnnnnnnnnnnnnnnnnnnnnnnnnnnnnnnnnnnnnnnnnnnnnnnnnnnnnnnnnnnnnnnnnnnncccttctccttacttctctttattccttcnnnnnnnnnnnnnnnnnnnnnttctttcttctgttttttttcttttattgtctttnnnnnnnnnnnnnnnnnnnnnnnnnnnnncctattatcnnnnnnnnnnnnnnnnnnnngttttattttttctttatagtatttcttgtttattttttttcttttttatgattttttactttttttattttattattgcgtctattttattctttctatactnnnnnnnnnnnnnnnnnnnnnnnnctttctttttgttttcttttgttttgtatttttcttttttattctttcttctatattnnnnnnnnnnnnnatnnnnnnnnnnnnnncttcttgnnnnnnnnnnnnnnnnnnnnnnnnnnnnnnnnnnnnnnnnnnnnnattcttcctttattcctctctcattttcaatttttttcttcttctttgcttttctttttctcttcttatcttttttatttatttttacttcttacaagcgacatgtctattctattccttccttgatgttttcctacattcttaatttatcttatttttcttttcatcaattaccgtacttttattcgtttcattctctctttttcctctcttttcttgttcatcttcttcttatctttttatttctctttctatttcttttttcattatttatgcattttatccttctcttttcctctttaactgtttctctgcactgactatccattatatatatttatatatttcctatatgtgacgctatactttaatacagatnctttcatttatcagtct

SEQ ID NO: 40814 - DNA, 799 bp, Macaca Mulatta
  misc_feature (1)...(799): n = A,T,C or G
gggttgataagctttttcctaaaaatagttatcctcttttgtagttttttttccctcctttaaatctggctagcttttcctacttcagtttttgtagaacaccaactaaatttgaaagtatgaagtctctagccctcataacactgtttctggctgtttaatcattgctgcctttgcaagtcctggtgaaagcaatgggaagctttgcttgctggttttgtagtctcaacaattccatgtctatgtttagctgagtaactgctatcatttagaacagtacaatttttatagatttcaaatttgaaaatttaaatagactcagttatctaataaggggccactgagcctgtttttaaaaaaaactattttgaagttataaaaagggagaacatctgactgatgatgttcacataaagagacagacagaaaatctccttgccgacatgaaaaccggcaggttaagtttttccatttccttccaatgcccaggggctacccaatctccnnnnnnnnnnnnnnnnnnntggttgaggaagggaaacccctgggctgaaatccttgcaaaaatttggccaaatcaaaagaaaatatggtgggtccccatacacttctatttttccctttaaaacaaaatacccttttcaggttttttcttgggcggacaatggctcaaaaaaagaaatacctctaaaagagggaaataaaaatctcttcccgaaaaaaagaggttgtaattacatcccccctttacaacaagaaaatgaagagcacctattattttttcacacaacaaaattta

SEQ ID NO: 40815 - DNA, 692 bp, Macaca Mulatta
  misc_feature (1)...(692): n = A,T,C or G
gggcttttcgatccgccatctgcggtggagccgccacaaaaatgcagattttcgtgaaaacccttacggggnnnnnnnnnnnnnnnnnnnnnnnnnnnnnnnnnnnnnnnnnnnnnnnnnnnnnnnnnnnnnnnnnnnnnnnnnnnnnnnnnnnnnnnnnnnnnnnnnnnnnnnnnnnnnnncaagcaactgggaagatggacgtacttttgtctgacttccaatattcaaaaaagagtccaactccttcctccttgggggtggaaaacttccctgggggggnnnnnnnnnnnnnnnnnnnnnnnnnnnnnnnnnaaaaccccaannnnnnnnnnnnnnnnnnnnnnnnnnnnnnnnnnnnnnnnnnnnnnnnnnnnnnttaaaacccgggggcgggttcccctgnnnnnnnnnnnnnnnnnncaccccgggggtttttgtgcacctttttttcnnnnnnnnnnnnnnnnnnnnnnnnnnnngcaaaaatttttatttgcccccccctcttnnnnnnnnnnnnngtnnnnnnnnnnnnnnnnnnnnnnnnnnnnnnnngccaccccgggggggtgttttttttttggaggaannnnnnnnnnnnnnngnnnnnnnnnnnnnnnnnttttgtnnnnnnnnnnnnnnnnnnnnttnnnnnnnnnnnnntaggggttttaacataaaaaaaaaat

SEQ ID NO: 40816 - DNA, 1195 bp, Macaca Mulatta
  misc_feature (1)...(1195): n = A,T,C or G
ggtacaggtgccttggattaaaacaaagttgattttaaaatttttatgtaagtcattgtgtttatgatgccacttttaaaaggaaaatgcaattgcttaatggctaatacccttatttcatgtacctatttgtgttccaataactgtttgaatgttttattcagcttaagactttaccacgaagtcataaacagtaaacgatgttttgttatgtattaacggaatagcagtgtttctcaaagtataatcacataggaccctcctgggtcatggtgcctggtttcacaccaccctgaatcaaatctttaggggtgcgtggcttatcggatgccctatgcttccatatagcaggcacccgagcgcagactcctgaagcagcacccaatggtctggacgaacccacctacaaactgtaggagctgcgcaaaaaaaaaatatcacagattctttgctctagatttacacaagcactgaactcctcgcagcagcggaataaatcacatatttttccttatgcgggtctcgaagtggaaacgattctcgacagccgctaatcggttgggccaaccgtgggaacgtcatccatgcgttataggagacgcctgttaaccactaagactcgatcaagccggcgcgtttcgcccccttgaattggtttcaatacttacacggatacgacctgtctcccgtgggaggcggcgtaacattcaaaaataggagagaaacgatgcaagaaacgtgttgtccacacagtcggaaaagcttagggacaacgattcgcgttaaagatgaagtctttttaactctttcaacgccccgttggtctataacaccactttcttgcttataatgggtaaaaatctcgctctccacaggaaggaacatgcgggccccctgcttctctccacaccccactattttagtgcgcaacataacctcgcagttcacttttaagcgacactaactccatatctttcgctgtgggggtcgccaagaaagcaccggtataggtaaaacaaaacatatacccaccgattatcaagacatagaaaagtcaccatgaaaacccacgtgttcctcgaanaaatacagacgtctgaacttggccacggttacccagctatatgatggagacgaaaataattgagagtagaattatacttactgttctccgctactcacaaaaacatgatta

SEQ ID NO: 40817 - DNA, 591 bp, Macaca Mulatta
  misc_feature (1)...(591): n = A,T,C or G
gaagggaaaacagaccctggggtctacttgagggtggaaggtgggaggagggagaggagcagaaaaagtaactgttgggtctaggctgaagactggctcatgaaataatctgtacaacaaacccctgtgacacaagtttacttatatagcatgtgcccctaaagctaaaataagttttaaagaaaaataaggatttgcttcgtagtcatattagaaattttcaacgtgaaaaaggggcctatattgtcaatcactatttttgctctgcttatataatcaggaaaagtatgataagagtaaatttatttttgtaaacaaattagtcttactttgattaacttaggtagaaattggggcgactgtagagataaaaattatgtttcagaaaaacactacagtatacttgttattggattatagctctattcattgtttgtgtgttagtcagtatgatcgtaagttttgagaaggagtctcannnnnnnnnnnnnnnnnnnnnagagtggtgccatctcagctcactgcaanctccagctcctgaattcgagctatttgcttacttcagctcnnnnnnnnnnnnnnnnnnnnnnn

SEQ ID NO: 40818 - DNA, 849 bp, Macaca Mulatta
  misc_feature (1)...(849): n = A,T,C or G
ggcatcccttccaccacaaataacccgccttggaaatttcagggcaggaccccaggtcctcctatttaaagacgaagaggcagatgaagccaagagagtgagtgtctcccgctgggcgccgtggcccgcagatgacggaggggcctggaaccttgactccggggacagcccacgcttcccgccccccagccttgntgcacgtgcagggctctgaccagccggctccncactgaggccataaccccaccccccaacgggggccgttcagtctttttcaggaagctgacctacggcgtgcaccccgtggaggtggcagaggaggtgatgcgcaccgtgcggaggaagaagcaagaggtgttcatggccaaccccattcccaaggctgccgtgtacgtccgcaccttcttcccggagttctttttcgccgtggtggcctgtggggtgaaggagaagctcaatgtcccggaggaggggtaactgcagcaggccaaatgggccaccccttggaaataaaggtttttctggaaggtgctggtgcttctgtcctgtgctctgcactgggggcccttgcagccccacccctcatctgtgtggggtctctccttgacagtgaggatggcctggagccagcccagaagctacgtagcctggggttctccacgttcccaggtcagacttccagaagcttccctgctctgtagggtgacgactcagcaggaaacaggagctgcaatgcctctaacccccacatacacacactcacattgtatgcctatgtgctcaggaactcagtctgaaaaccacctccattgtatacaagggtaacctggccacttcacctccacccac

SEQ ID NO: 40819 - DNA, 87 bp, Macaca Mulatta
  misc_feature (1)...(87): n = A,T,C or G
tgtgcaagaggctattgtactactactacttgctatgctgaatacttcgagttgtggggccagggcgcctggtcaccgtctncctcc

SEQ ID NO: 40820 - DNA, 439 bp, Macaca Mulatta
aatatcaaaatgtgagggggcgccccatattctggatggaaaaagacatctgaggccatccagggcaaggaactgtctttctgggtcaatagactgccctggacagtctacaagcctcagcccactgaccatacctcagccccctagtccctggggggcagctttagtctgggcatgtttcctgggtaccagtggggccaggaggtggctctggttcagagccgtcagtgtggctgaataaagcctctgttgggtgtggctgtgacagagtttatttgttgacccccctaccctcacctctcccctcttctgcaggtcccttatccctgcagaagtccccagatccaccttggtcctaaggccattgatgggaggatgcctgtcctttgcctttaccccccaccaggctcaggagacagggtggctgttctcttcccca

SEQ ID NO: 40821 - DNA, 765 bp, Macaca Mulatta
  misc_feature (1)...(765): n = A,T,C or G
ggtcttatctgagtgggaatttcagagaaattggagaaagaagaataaatggcgatttttcagctaatgatgtcccagatcaagagttgtccactctgcctcctggactgtcctgcgtttagtacttgcaagcctttacttctctacttgtatttttcctccctaatgagtttaactacttttaaaaatttttatgatagtcaggggtctctgaaaaatatttccttcctacgtaccagatctttctgtacattctctacatcatagctttttatatgccatgcagagttctcaccaagattataaattaatctgcaatattaaaaatgttcccttgtggctgtgaaacatgaggtgtggatactcaaggtttcaattggggaaaggtgggttcctcagtagagatggagaacatgtaatgttgagggtctatctgtgttctccattggctttacgcagaacaggattttaaaaatgcttatttaaacaggatggcatttattacccagaaaattccaaatatatatagacatatatatatattaggaggtacttgttctctagagtgctaaaaaaaagacaactttaaatcactattaaaaattacagaacacttggccnnnnnnnnnnnnnnnnnnnnnnggtcttaannnnnnnnnnnnnnnnnntggttggataacttgtgatcaggagttcgaaccagtctgannnnnnnnnnnnnnnnnnnnnnnnnnnnnnnnnnnnnnnnnnnnccagcgtggtggc

SEQ ID NO: 40822 - DNA, 804 bp, Macaca Mulatta
  misc_feature (1)...(804): n = A,T,C or G
gggagaccaaaccaagcctggacaatccctgtaaagtgaccctgaggaggatgacaagccccgctccagtcatacccggaagctgactggtctacccatggcggaagcatgaggaaaatcatggtgggacttattttccgtatgacatggacttgtgtggtaaaagcttccactgcctcttttcatatggaggactgctttccatgtatacatcaggtcactgaggtaggacaacaagttaaaacaatccttttgttctatagttattacaagtgcctaggaactccaaaaggaacatgtttatataataacactcagtacaaagtatgtaatccagggagtgatcagcctggtgtgtgttatgacccctctgaaactcccatgatcacggttttttgaataagactaaggactggtccttttctaggtgacacaagtaaagtaatagctaggaacacagaaagaaggggtcccaaacatgtaactctaaaatttaatgcttgtgccactattaaatttaatcagcaaggactaggaatgttgttctccagattggggaaaaaaccaacctggccagaaattaagtttatccggctatgaaaccataatttttggttccgatgtggggttaaaaaccggggcccttggggccacccggggcttccnnnnnnnnnnnnnnnnnnnnnnnttnnnnnnnccaatttttgggccgccttcgggccctccaaaaaaacttttctagacccctttccttttggggccccgggggccccctttaggggaaatgggaaacaggggcccttt

SEQ ID NO: 40823 - DNA, 770 bp, Macaca Mulatta
ggaacaatgaaatagggggagaatgtgtgcagaatgtttcttctggtaagtaggggaactgttttaaaagttacttgtgtatttttatttgttttataattttaaaaaagtctcaatgtagaaatgctaagcaaccagatgattttataaaatgtgtgggaaggaccaaatattctatatctgtcctgaaggacggcatcataggagttaatcccatcagattccaaagaaggctgttcatcctttgcttctcgttttgcaaatgaaaatcctttccctgggaatatagtttgacagcacacaatagccttaacataaagctgctgtgttaggcagattcagcttcaatgatagacaagagtgctcttaaatatttgatctaagaaaaacaaaagattaattagttgttggtgtgttaataattttaaactctgtgcaggtttagataagatttccatgtctcccgttctctctcacaaggttttcctcagttctctaagaaccaggatagttccatctttttcattgtctatctgtacacctttcatttatgctgtgattccgtctgatctttcaattagtgttcttaagtgaagccagcttgtcttagaatctagttttcagaagtctgtaactgagaattgtaatattagattctgtctctgttgatagacacattcgtttactggggagtataagtgtgttaaatataacaactattatttagcatttcactaaacgaaatgtggggtgagtttaggaactcattt

SEQ ID NO: 40824 - DNA, 493 bp, Macaca Mulatta
tgtttgttgccatcatggactacaatggccacgttggtctgggtgttaagtgctccaaggaggtggcccaggtcatccgcggggccatcatcctggccaagctctccattgtccctgtgcgcagaggctactgggggaacaagatcagcaagccccacatcgtcccttgcaaggtgacaggacactgcggctctgtgctggtgcgcctcatccctacgcccagggcactggcatcgtctcagtgcctgtacccaagaagctgctcacgatggctggtattgatgacaactacacctcggccaggggctgcactgccaccctgggtaactacaccaaggacaccttagatgccatctctaagacctacagctatgtgactcccgacctctggaaggagaatacattcatcaagtcttcctgtcagggattcactaaccacctcgtcaagacccacaccagagtctccatgcagaggacacaggctccagttgtg

SEQ ID NO: 40825 - DNA, 742 bp, Macaca Mulatta
  misc_feature (1)...(742): n = A,T,C or G
gggctccgcgtcccgctcgctgggagagaggtacctctccttttccctctccctttccctaagagttgtctgctggttctcagcttgaagaagattctgcagtccttattgatcctttttcttggcgttaccattttttgaagcaaagttaacctagctttctagtttgagctttctttttggccgnnnnnnnnnnnnnnnnnnnnnnnnnnnntataaaatagacaagagctagttctacaatgtccaagtcattccagcagtcatctctcagtagggactcacagggtcatgggcgtgacctgtctgcggcaggaataggccttcttgctgctgctacccagtctttaagtatgccagcatctcttggaaggatgaaccagggtactgcacgccttgctagtttaatgaatcttggaatgagttcttcattgaatcaacaaggagctcatagtgcactgtcttctgctagtacttcttcccataatttgcagtctatatttaacattggaagtaggggtccactccctttatcttctcaacaccgtggagatgcagaccaggccagtaacattttggccagctttggtctgtctgctagagacttagatgaactgagtcgttatccagaggacaagattactcctgagaatttgccccaaatccttctacagcttaaaaggaggagaactgaagaaagccctacccttgagtatgggtagagatgggcagaatctgctac

SEQ ID NO: 40826 - DNA, 785 bp, Macaca Mulatta
  misc_feature (1)...(785): n = A,T,C or G
gggaacgaaaacttgtttacccctttctcagccccaacaattctaaaccaacccgctacaatccccattnnnnnnnnnnnnnnnnnnnnnnnnnnnnnnnnnnnnnnnnnnnnnnnnnnnnnnnnnnnnnnnnnnnnnnnnnnnnnnnnnnnnnnnnnnnnnnnnnnnnnnnnnnnnnnnnnnnnnnnnnnnnnnnnnnnnnnnnnnnnnnnnnnnnnnnnnnnnnnnnnnnnnnnnnnnnnnnnnnnnnnnnnnnnnnnnnnnnnnnnnnnnnnnnnnnnnnnnnnnnnnnnnnnnnnnnnnnnnnnnnnnnnnnnnnnnnnnnnnnnnnnnnnnnnnnnnnnnnnnnnnnnnnnnnnnnnnnnnnnnnnnnnnnnnnnnnnnnnnnnnnnnnnnnnnnnnnnnnnnnnnnnnnnnnnnnnnnnnnnnnnnnnnnnnnnnnnnnnnnnnnnnnnnnnnnnnnnnnnnnnnnnnnnnnnnnnnnnnnnnnnnnnnnnnnnnnnnnnnnnnnnnnnnnnnnnnnnnnnnnnnnnnnnnnnactatcaaaccaccaactctccatagctctaataagcctctacactttctgggtattaccaaacccattctagaaaattggcagtaaacccctaaatttcaagaccctatggtccttcaccaacctcctaaaattaagaccctttttatctaaccggaaacaaacaccccttaaatggacaccccccccaaaaatccccacgcccttaaacaacaaataaggtttgggagacccacagatttccac

SEQ ID NO: 40827 - DNA, 470 bp, Macaca Mulatta
  misc_feature (1)...(470): n = A,T,C or G
gaatttttgttattgtttctacaaaggcagatacatttaaatatattcctagtcctggggctgtaaaactgttcagtggctttttgtccccatgcttagataagctgggataggcaccctgctattcagttactgtaataatatgtgataggcattcctcatcttcacaataataggatatctgttgaatagcattcctcgaaaatgaccctaaaaacgccatactttaaattgtccggttcttgtaatactgggtttcctgccaagagtttgaccattctgcttgagaagtgtagagctcactcttggagtaccaaactgtgcaatatttttacatcataagatgtattagtttacaggctgtgctttgaaattatagtagtattttgctgtggctccattaattaaattgagatatatatttnagtgcagaaaaaagacatttaaaacagctattagttcacctgtga

SEQ ID NO: 40828 - DNA, 260 bp, Macaca Mulatta
gtcgtggcgttagccatagccagcttcatggctgcggtgaaatttcatgacctgacagaacgaatcgccaactttcaggagaagctcttccagtttgtggtgctggaagaacagtatgaagagtcgttttggatctgcgtggccagcgcgttggcccacgccacaaacttggtcgtggtggcgatcagtcatattcccctccctgagattaagaccaagatcgaagaggccactgtcacggctgaggatatcttgtatta

SEQ ID NO: 40829 - DNA, 1725 bp, Macaca Mulatta
  misc_feature (1)...(1725): n = A,T,C or G
atggtgagtggactgcgcctggcttcccgaagtggggaagaggggctggttaaaacttgctnnnnnnnnnnnnnnnnnnnnnngccatcggctgcggaacctgcggaccgagtcgccgcggcgcagccgggcctcagtccccttctgtgcagggccgggcggggcgggcagcgggacccctgcgtcctgtctgtacctgcgggcgccacttccgccggccggagccctctcgggaaccccgcgcctccccnnnnnaggactccatggcttttgaggatgtggctctgaactttacccaggaggaatggattttgatagattcttctcaaagaacctctacagagaagtgatgcaggaagcctgcaggaatctggcttctgtaggntaggaaacaaatggaaagaccagaatattgaagatcacttcgaaaaacctgggaaagatataagangaaatcatatggtacagagactgtgtgaaagcaaagaaggtagtcagtatgatggacaagttgtcagccaaattccaaatcttgatctgaatgagaacatttctactggattaaaacaatgtgaatgcagtatttgtggaaaagtctttgtatgtcattccctccttaataggcacatcctagctcactcaggatacaaaccatatggagagaagcaatataaatgtgaacagtgtgggaaattcttcgtttctgttccaggtgttagaagacacatgataatgcacagtggaaatccagcttataaatgtacgatatgtgggaaagcttttcattttctcaattcagttgaaagacatcagagaactctacacaggagaaaaaccctataaatgtaaacagtgtggtaaagcgttcactgtttccggttgttgtgtaatacatgaacgaactgacactggagagaaaccctaggaatgtaaggaatgtgggaaagcattcagattttcttgttattttaagatgcgtgaaaggactcacgctggagaaagaccctatacatctaccaaatgtgataaagccttcagctgttccacttcctttcgttaccatggaagcattcatactggagagagaccctttgaaggtaaacaatgtggcaaagcctttagtcatttgagttccctttgtaaccatagaagtactcatactggagagaaagcctatgaatgtaaacaatgtgaccaagccttcagtcgtctcagttcccttcacctccacgaaagaattcatactggagaaaaaccctatgaatgtaagagatgcggtaaagcctacattcgttccagccatcttactcgctatgaaagaagtcatgatatagaggctgggtgtagtgactcagcctataatcccagcactttgggaggccaaggtgtgtgtattgcttgagcccaggagttcataaccagcccggattaaaacaatgtgaaacaacctgggcaacatggtgaaaccctgtctctagaaaaaataaaataatgccaggcgtggtggcttnnnnnnnctcccaaagtgctgggattacaggcatgagccaccgcgcccggccaggtaagtttcatttgtatgtattgtcctgtgattaatggaccagtgaataatgattgtgaattgttgggattgtcttacgagcgtacatttggcaaattttgattatcccttgtccattatacacattccacctttccttgttaaaggaaaaactactcttg

SEQ ID NO: 40830 - DNA, 766 bp, Macaca Mulatta
  misc_feature (1)...(766): n = A,T,C or G
gggtgtaaaagatggggtatagaacagcaaattgggccctgagttaatttaatagatcatggagtagcaggagacacttagaatgcacaggaaaataaaaagctaaactctttatgagggcagtttgacaatatctaccaagtcctaagatgtttaaagtatttcaaactgccaattccacctctaggtattgatccaacaagtatattcacatgtatgcacaaatatttttttcaatatccctgtcatgacatgaacaaaaattatacaaacacatgttcatagtgatattgtatataatagtaaagactggaaacaacttaaatgcccataagtaaaagactgttttaatagattatatatgattgtacaataaaatgccttatattcatttgaaagaatgaaggagatttacaataacatggaaaaaatgtctaaggtatagtgataagtaggggggaatgcaagcagagtaatacgtataattcnnnnnnnnnnnnnnnnnnnncgcgcgcgcgtgtgtgcttcttaaagagcagctacaatctattgctgcttgcgtatacaagcaaaatttctggaaatattaataacaatcatctctgggagtaagatgatgagaatgagaatagtgacttttatttttacctttctgaaattctaaaaagtgatttaaacattccgcatnggttaatattatttttaaaacaactannnnnnnnnnnnnnnnnnnnncttcctcggagaaggtccaaaaaaaaaaaaa

SEQ ID NO: 40831 - DNA, 797 bp, Macaca Mulatta
gggatgccccagttagacacatcgacatgattcaccactattatggcgatgcttcctacactatatcttatcatacagctaaagctactaaacacgaaccactaccaaccaccccttacaaaaaaccccacccttcaattccacaacatccgctgacaaccaaaatggacgaaaacttgtttacccctttctcagccccaacaattttaaatcaacccgctacaatccccattatcctattccctaccctactaatcttaacccccaagcaccccattaataatcgactagctaccattcaacaagacctgactcgattcactctaaaacaaataataataactcacaacgctaagggacaaacctgatccttaatactaacatccctaatcacctttattgctataaaaaaactcctaggacttatgcctttactcgttcacgccaaatagccaaattttcccataaacctagctattagcaatccctcttatgagcgggcacagtaatagtgggggcttccgcttttaaacaaaaaattcccctacccaacctccctgccacaaggcacaacccacacctcttcattcccatgtttattagcaaatcgaaacctattaggcctacttttattcaacccagttagcttctatagcccggtacagaattaaaccccgcaaaacatctcaaagaccgggccccaacctatccaatataaacccctaaaaatcaggaaaatatttttgtttctattgcaaccgatatttaaaacttatgtgcgaaacattcttcacaat

SEQ ID NO: 40832 - DNA, 1033 bp, Macaca Mulatta
  misc_feature (1)...(1033): n = A,T,C or G
ggaagatcagtcccaaggaggatggacccgttttgccttcctgtctttaagtgcaccagtgctacttttcacctggctgaatttcctcttaagctttcgagttgtaaacacatattggatttgaatgtatgtctgcttgcattgcgcagaggtggattgctagggtgtggtgtagcaataaacatgcagtgaacactgactttgtttttacattgagactagaagggtgcatgggagctgcactggtcatgtcttacacctctaagtattgaacacatacagtggtagaaacttgtttctcagtttcatgaagataacatgttaaaacttgtcatctcagtagctgtgtggttttaaggcccacaactgtttttaagagtactgaggtggttggaggcataaactgactaaggccatgaaagaaaaccacaactggttttgagagtgccgaggtggttggatccataaactaaggccatgagagtggaggctatagggtagcagtgtttacgagagacggttcaatgctcccagtgaatgtggagggtacacgacatcgganggatcaaccagaaanngtaannnnnnnnnnnnnnnnnnnnnnnnnnnnnnnnnnnnnnnnnnnnnnnnnnnnnnnnnnnnnnnnnnnnnnnnnnnnnnnnnnnnnnnnnnnnnnnnnnnnnnnnnnnnnnnnnnnnnnnnnnnnnnnnnnnnnnnnnnnnnnnnnnnnnnnnnnnnnnnnnnnnnnnnnnnnnnnnnnnnnnnnnnnnnnnnnnnnnnnnnnnnnnnnnnnnnnnnnnnnnnnnnnnnnnnnnnnnnnnnnnnnnnnnnnnnnnnnnnnnnnnnnnnnnnnnnnnnnnnnnnnnnnnnnnnnnnnnnnnnnnnnnnnnnnnnnnnnnnnnnnnnnnnnnnnnnnnnnnnnnnnnnnnnnnnnnnnnnnnnnnnnnnnnnnnnnnnnnnnnnnnnnnnnnnnnnnnnnnnnnnnnnnnnnnnnnnnnnnnnnnnnnnnnnnnnnnnnnnnnnnnnnnnnnnn

SEQ ID NO: 40833 - DNA, 677 bp, Macaca Mulatta
atctgaattcagtgtctgcttcttccatattctcgtctccctcccctcttccatatgacattattcatatgacattattttacttcaaatgacattatcaatcttaaaaagacatacattaaaactaagttttttaaagaaagcctaaattcctttccctggtaactttgaaaagcagtcagagttgctagatagatgtatgtggctcctttaaaatgctttgtgtatttgtggtgtttaaaaaaaaagtcttaccagttaactttgcagtatctaggtttgagtgtcataaatccatgtgttcctgttgcaacaaataccccaaaattgtgtgtgcacttcataataccagtcttcacccgtggaggaacagtgctttttagagatgctttctagtttcagtgttggcatactacctgagggttttgcagttgtgggtgcattccctaatttgtatcatcaagatgaactggcccttttctacttccaagctttcaacagataccaccatatttgatggaattcccatagtgaattgcttatgttgttagtagattcagtgcacccagctgggataggcaagccgtattatgacagcttccctgtttcacctacagaagtcgtcttgtctgagggctttattcacagtaagcaccaaggtctcccatgtcttgagg

SEQ ID NO: 40834 - DNA, 965 bp, Macaca Mulatta
  misc_feature (1)...(965): n = A,T,C or G
ggatgccccagttagacacatcgacatgattcaccactattatggcgatgcttcctacactatatcttatcatacagctaaagctactaaacacgaaccactaccaaccaccccttacaaaaaaactccacccttcaactccacaacatccgnnnnnnnnnnnnnnnnnnnnnnnnnnnnnnnnnnnnnnnnnnnnnnnnnnnnntttaaaatcaacccgctacgatccccattatcctattccctaccctactaatcttaacccccaagcaccccattaataatcgactagctaccattcaacaagacctgactcgattcaccctaaaacaaataataacaactctacaacgcttaaggacaaacctgaattcttaatactaacatccctaaatcacctttattaccaccaacaaaccttcctagggacttaacgcccttacttcggttcccacccaacctaccccaacttttccaataaaaccttagtctaattagcagaattcccctccaatatgagccatcctaccgagaaattaaatgggggaacttccgccttttaaaaaaccaaaaaaactttccctaaaccccaacctttcctacgcacaaagggtaaaaagacccacaaagcttcttatattccccattggtttaataacccaattcctgaaaacctatattagacccaagatcctaattaaaccactagttaactccctaggctctgcgtaacttttattaaccctgcacaaaaatttcttaaggcccaggcgcacacctttgcgataataagatccccttatattcgaacaaacacccttgtgaccttttccagcttattttgatcacccataacatttgagagataataacgtctgtgaaaaaaagcccctccaacaagttttgtgagggggattttatagagacgacacattcttcaatagaaacctatgtcatcaaatttc

SEQ ID NO: 40835 - DNA, 824 bp, Macaca Mulatta
  misc_feature (1)...(824): n = A,T,C or G
gggattgcttgaatgttttctgattttattgggtaaaagtttgcctagtaatgatctttcagcaattagttgaaataattatttgaagtaatcttgcttcagatttattttgtgatgtacaacaagccgttttagtacaggtgtctcatttatgtagttgaaagttgactgtggaatttcnnnnnnnnnnnnnnnnnnccattcagtctctttacatagtcacatgtttcacaggggaacttgtccactggaacctaacgtagtacaaccttttaacatgcgtgtgttaaaggaaaatattataaaacaagatattaatactaaaatgttaacattaatatgttgtactcatggaagaaaagtagaaaatacgataggctcagaaactattttttatctgcattaaatgcttcaatttctccccataaaaattctaaggaaatttcagttcctcatattatagttttccccataatttaatattactaactatttctctgcctagtaatgttgatgcagtttgcatgaataaccttggaagtaaggaggcaggacagaaagccaaatatcaaaatctttggccttcatttagtgacagtttattctaatggggaccataggtgttattagtaaaaagaggatgtacaaggcctgaattcagtgtacattgttctttgaaattagtccatttattgtgttgaataatttagtctaagtaggagatgctgtatttaacataatcatgctttctacataatcatatatggatttgttgggatactggtagaaataaccttcccctttctccactgtggaagtggaaa

SEQ ID NO: 40836 - DNA, 806 bp, Macaca Mulatta
ggggcatttgaacttgcaggcgagctgccccgagcctttctggggaagaactccaggcgtgcggacgcaacaaccgagaacattaggtgttgtggacaggagctgggaccaagatcttcggccagccccgcatcctcccgcatcttccagcaccgtcccgcaccctccgcacccttccctgggccaccacgcttcctatgtgacccgcctgggcaacgccgaacccagtcgcgcagcgctgcagtgaattttccccccaaactgcaataagccgccttcgaaggccaagatgttgataaatataaacagcatcttatggatgtgttcaaccttaatagcaacccatgcgctacataaagtcaaagtgggaaaaagcccacctctgaggggctccctctctggaaaaagtcagcctaccttgtcatttttcaaccatgcctactttgccacccaagttacaacacccgtgaatttctccgcatcaaaatggtctaagattgaagtggaccaaaataatagaacccaaaacaaaaataacctgttggccgccttcggccctcagagaagctttttagaacattcggttttggcgcgcggggcccaattaagtaagtgaaacccggaccatagctggtttcccaaagaaaatccgggcaatgaacaagggcctggaattcccaccccataaaaaaacccccggggggaaaccggagctgtttcgaaaaaaatcccgaaggggatttttaagggtctttactgggattttattcaacgggagatccaaaagcggacctcgaataacacat

SEQ ID NO: 40837 - DNA, 1581 bp, Macaca Mulatta
  misc_feature (1)...(1581): n = A,T,C or G
acttgctgaagcatactcctgccagccaccccgaccaccccttgctgcaggatgccctccgcatctcacagaacttcctgtccagcatcaacgaggagatcacaccccgacggcagtccatgacggtgaagaagggagagnnnnnnnnnnnnnnnnnnnnnnnnnnnnnnnnnnnnnnnnnnnnnnnnnnnnnnnnnnnnnnnnnnnnnnnnnnnnnnnnnnnnnnnnnnnnnnnnnnnnnnnnnnnnnnnnnnnnnnnnnnnnnnnnnnnnnnnnnnnnnnnnnnnnnnnnnnnnnnnnnnnnnnnnnnnnnnnnnnnnnnnnnnnnnnnnnnnnnnnnnnnnnnnnnnnnnnnnnnnnnnnnnnnnnnnnnnnnnnnnnnnnnnnnnnnnnnnnnnnnnnnnnnnnnnnnnnnnnnnnnnnnnnnnnnnnnnnnnnnnnnnnnnnnnnnnnnnnnnnnnnnnnnnnnnnnnnnnnnnnnnnnnnnnnnnnnnnnnnnnnnnnnnnnnnnnnnnnnnnnnnnnnnnnnnnnnnnnnnnnnnnnnnnnnnnnnnnnnnnnnnnnnnnnnnnnnnnnnnnnnnnnnnnnnnnnnnnnnnnnnnnnnnnnnnnnnnnnnnnnnnnnnnnnnnnnnnnnnnnnnnnnnnnnnnnnnnnnnnnnnnnnnnnnnnnnnnnnnnnnnnnnnnnnnnnnnnnnnnnnnnnnnnnnnnnnnnnnnnnnnnnnnnnnnnnnnnnnnnnnnnnnnnnnnnnnnnnnnnnnnnnnnnnnnnnnnnnnnnnnnnnnnnnnnnnnnnnnnnnnnnnnnnnnnnnnnnnnnnnnnnnnnnnnnnnnnnnnnnnnnnnnnnnnnnnnnnnnnnnnnnnnnnnnnnnnnnnnnnnnnnnnnnnnnnnnnnnnnnnnnnnnnnnnnnnnnnnnnnnnnnnnnnnnnnnnnnnnnnnnnnnnnnnnnnnnnnnnnnnnnnnnnnnnnnnnnnnnnnnnnnnnnnnnnnnnnnnnnnnnnnnnnnnnnnnnnnnnnnnnnnnnnnnnnnnnnnnnnnnnnnnnnnnnnnnnnnnnnnnnnnnnnnnnnnnnnnnnnnnnnnnnnnnnnnnnnnnnnnnngaagtaaagttctcagtcaagttcaccagcagggagttcagcttgaagaagatgctgtccccaaaacagacgggtcttcggagtcaagattgctgtggtcaccaannnnnnnnnnnnnnnnnnnnnnnnnnnnnnnnnnnnnnnnnnnnnnnnnnnnnnnnnnnnnnnnnnnnnnnnnnnnnnnnnnnnnnnnnnnnnnnnnnnnnnnnnnnnnnnnnnnnnnnnnnnnnnnnnnnnnnnnnnnnnnnnnnnnnnnnnnnnnnnnnnnnnnnnnnnnnnnnnnnnnnnnnnnnnnnnnnnnnnnnnnnnnnnnnnnnnnnnnnnnnnnnnnnnnnnnnnnnnnnnnnnnnnnnnnnnnnnnnnnnnnnnnnnnnnnnngctctttcagaccccattgcaaaggagagctgcctgctcaacctgctgctgtccctgccggaggacggcctgctcaccttccttttccttctggaccacctga

SEQ ID NO: 40838 - DNA, 877 bp, Macaca Mulatta
  misc_feature (1)...(877): n = A,T,C or G
gggggcggaggaggaaaactccaggcattctcaaaaaaggtattggcaccaaaaggtaagttcctcggataacgtttttctaaattcaaatctatatatggcttgttcagtctcgtagactggccttaactgatagagatcactgtgtaagaagttaatgtacttaggcaattttgccacccgtatgatgcccttaattcattccttttgaaagatacttgttgagtgctttcaggttgccatgcactgtgcttaattgttcacatctgttactcctttaatcttcagaatctgtgaggtaggtgatagtatcttctattttgcattggaggaaacaggtgcagagaggtcacttgatggaggtccccccctaattaagtgtcaaaatagtagttctaatgcttgtatctcattcttctaattggccctggttatttgccgaaccagaaatctatgactgttatgttcttccccatgaaggtgctttttttttgctttcttccactctaatgtttccccttcctccttaccactctttcctcatctggcttttaacacccaaagcacaccttccttacatatgggtaattcccttaagtcaattttaaacaagcccaagcttgttttgggattccctttttgttnnnnnnnnnnnnnnnnnnnnnnnnncccaacctattaaaccaaaccccaatggggtgaaaacccttatttgtgaatcccttccataaatttaaacaacctttaaatattttataaggaaattaatattttttaagtttataaaaccccctaaaaatattggtggcccacccctggacccaaaaaattataaaaggccctatttccactaggcgaaaaactaacaaaataaaat

SEQ ID NO: 40839 - DNA, 721 bp, Macaca Mulatta
  misc_feature (1)...(721): n = A,T,C or G
catgctgttatanggagactctntgtggataaatctctttaatgaagcttgagacacatggcattgccatgcaatgatttttttccccctcttcacggaatcagagggaataacagaatgtgacaatgattctttagcatggactgctgaggcttctggttcctttttaagatctgtggtgaaagaagatgagaaacataggtatgcccttcttttcgtccccctcttcctttatttgaatctttacttccttctataaatatattagggctacattgtccccttgtatttcaaacaaggcaaaaagaggttgtaattagactttactgcaatcctcagtttctccacggaacaggaatgcaaaggttttgaaggcctctctatttgctgacatggtcagctgggtgccgtgggccaagtccttctgttgccctcctctgtcgccaagtaagctaggtccattctgaggctcaggtttgctgtgatgatgaccacttttaggcagaaagttagaggtctcacgagtgctatatagactttatcaggctttagatttgatggggaataaggaatgtgacttgtcttttgggaactgatttttgattcatcattgtctcttggtgtcctggaatttccatgttattacagtctactgaacgaaagagtaacctgtgccagaggagaagcgaagtgaagactccacagcatgctcattctcagt

SEQ ID NO: 40840 - DNA, 789 bp, Macaca Mulatta
ggacaccaatgagcaacagttataaggaaggaagttaagttataatttactaatgataaagatcatgatactactactaaagaggtagagataaagctgtttcgacagtgaatcaggtcttggagggtagtaaatttcttaattgggaataattgaatctgagaggtttgccagggatgttgtaaaaagtatcctgcattgattagacgatgaaactagatagccctaaaagtgccttgcagcctaagtgtcagtaggagctctccagcactcctggaggaggacttcggcttctgggtaagaaagacctgggtgaacggtccagttaacatagctccatgaacttggtcgcattacttaatatctctgagtcggtttcctaatctgtaaggtaattatagtacctactccgtgaggtagttttggagcttaaatgaaagtacttagcattactctggacgtacattaaatatttctgtatgttacttcttgttgttttgtaggtaagcattttttgaagcataatgtgcataaagataaagtggacatctccatgaattttttacaatgtaaacactttatggtaactactaccctagatccgcaaataagaccattgtccagcacccagggaagcctcccctcatgccccccctttccatgggttaactattgggtgcgcattttaacaagaaaaaaaaggcctgggctccggcgggcctccaagcccttggtattccgccgccaccttttggggaaggcgccaaaaacgggcgcaaaaccccgccc

SEQ ID NO: 40841 - DNA, 505 bp, Macaca Mulatta
tctcatggagaagggagacatgtacgctccccgcagggatctatcaccgcttcaccgtggacgaaaagaactacgcgaaggccatgcggctgtttgtgggagaaccggtgtggacagcgtacaaccggcccgctgaccatttcgaagcccgcgggcagtacatgaaatttctggcacagacagcctagcagtgctgcctgggaactaacacgtgcctcgtgaaggtccccagtatgatgactgagcagaaaatccaccattttctctttgcttttagaggatagacttgaggctaggttatctctcctttgtaagattatttgaccagaatcttttgtaatgaaaggatctagaaagcaacttggaagtgtaaagagtcaccttcattttctgtaactcagtcaagactagtgggtccgtggccctgtgtgtgttcatgcattcagttcagacctaaatgaaagtttcatctcacgaaatgcaggtccacagatgctcgtctgga

SEQ ID NO: 40842 - DNA, 1775 bp, Macaca Mulatta
  misc_feature (1)...(1775): n = A,T,C or G
caatttgccaacagtgtcacctgcttgccttaggaatggtgatcctttacctgtgtgccagatttcgactcaccttcaggcaagacctacagcgcacccccctcaccccagatctacagaatcggagtcttcaagggatggagctggggaatctgcatttctaacacgctccctgggcaacgcttcagatgcattggagttggggaccatagtccctgggccgggtgagcagaactgcctcaaaaatgctaggatgtcatcatgtggagatggggaggtgaatgtaacccccacagcaggccaaaaccttggcctccattgccacagctgtctacatctagggcccccaaaccccattcctgggccatgtgaactcatagacaccttcagggagtggggtgcagcctccttcctatcctatcccagaaggcctctcccttcttgtccagccctttatgctatacctggctggcctctcacccctatttctagagcctcagaggacccacccannnnnnnnnnnnnnnnnnnnnnnnnnnnnnnnnnnnnnnnnnnnnacataaatcatgacttgcatgcgtgtgccaggcacaggggataccctctcaaaacaatgtcctcttagggctcatggcctagtggagaagatagattaaaacttaattagaaaaannnnnnnnnnnnnnnnnnnnnnnnnnnnnnnnnnnnnnnnnnntctataattttctggtagtcacaatggaaacaaacaaaacaccttaaaaccttatatcagcccccaagcaatacatgaattcccttcacaaaaaatgtcagggctgcatgagtatctgtgttgaatgcagtctgagatgaccctgtggattttcctggctggttgccactactgtacaacattcagtgcccacatccaccggtgccagtaaggttttatgagacatgagaaatgcctcttccctgctatgtgacttgcatttgggaagttggaaagaaataatgacatcagggagaaaacatttcaaccttcttacctgtaggtagaatcagccttcacttggtgcttattaccagttattcaannnnnnnnnnnnnnnnnnnnnnnnnnnnnnnnnnnnnnnnnnnnnnnnnnnccaaagatagcatcaactgtatttgaaggaaccgtagtttgcgcattttatgacatttttataaagtactgtaattctttcattgaggggcgatgtgatggagactaactcattttgttatttgcattaaaattattttgggtctctgttcaaatgagtttggagaatgcttgacttgttggtctgtgtgaatgtgtatacatatacctgaatacaggaacatcagacctcctcactcccacacactctgctatagtttgcgtgcttttgtgcacacccgtcatgaacaggctggtgctctaggatgatctgtgttcactgatgatgaagaaaccgagaactccaagcctgtttgtaaacacactaaacacagtggcctagatagaagctgtatcatagtttaaaatctgccttacgggatattactaaactcgctaatagttaaaaggttacttacaatagagcaagttggccaattttgtggtgttggggaaatgttagggcaaggcctagaggttcatttggaatcttggtttgtgattttagggtagttaggaacttcctacttaatgtacctttaaaatagtatattttctatgttttgtataatctgaaactgtacatggaaaataaagtttaaagcca

SEQ ID NO: 40843 - DNA, 855 bp, Macaca Mulatta
  misc_feature (1)...(855): n = A,T,C or G
ggggctgtatttcagtcatttttctgccaaaagtaaaaagtaagagagtccaaaaaaatagaaaagaatctcaagtttaaaattttcttttgcatttattatacccgagaatatggcaagcagcttaatttaatcaagcagcaagagtgccagacagtttttctgcatgtgatagctaaataaatagtggacctccgtatggcagtgataatcgcaacttagagggttttgtccgttgtgaagtgtttgtgttaaggatgacttttttgttgtttttgttacagtctgacagctgaagatgcttttaaaaccttctagtcacttagagcagagctatacggcacaggcttggtggttctaaaaggcaggtcctatccatcacagaaacagctagtctctgggttatgggggaagattgaggggtgggggagtgnnnnnncnnnnnnnnnnnnnnnnnnnnnncccgggttcctttggtgcggcgtgcgttgccttttgccctcggttcccgcttggccctgctggtccggtcccgatcccccttcccggcgtccctggcccccgcgcggggctgccggcgccctcgggctggttcccggtctccgttccgggccttttctcgccccccccggcccgcgcgctgtgccttttccgtccgcccgccgtggcgttttgcggcgccccgccgcggttcccctgttgtcttccccctcttgctaccccgtgtcaaccccttgacataccatgcggggggcgccctaatctttacaaaatggtggcccactcggcccgcggggtaagccgggtgcccgcgcaaatgcgcctgcgttcctcccgaacgactcgggcagccat

SEQ ID NO: 40844 - DNA, 481 bp, Macaca Mulatta
taatggctcagctcaccgactgtggcgagtgaaattccagaacccttcatgccaaagaaagcacctagcgcagggttgacacccagtgggttttcatcagcgattatttagtctgctttccttaaataaatcggccatcacgtctcccgttagtgtcttagtgagaccccaagaggtgtcatgtgtataaaaagaaactctgtatatgcaatagagttgagaagacatatagaaaggagactggaaaagtgtgctcaaaacgttggtaatggttaccttcagaggggagaacgatgggcacgatggtcaaagcagactttacttcgagtttcttatttatctttttatttttaaacaaacattactggccgggcgcggtggctcataactgtaatcccagcactttagaaggccgaggtgggagaatcgcttgaggcaaggagttcgagaccagactgggaaatatatcaagaatccatct

SEQ ID NO: 40845 - DNA, 986 bp, Macaca Mulatta
tgctcagtttaagcgctctatcggcaaacttatgggaaactttattcgtttcaggatcttgctttaatgcgagcgatcgagactatatagagttgatatcttctgcgtaatttagaagttttgcgaacacaatttacacttctgctgtgccactatttgtgttgtctacaggtatgttcatcatagagtttgtgttttatacaataatagtaccaaaagtcctctatgatatctttgttacccatctattatttgcgtcatattatgactgggcgactcttgagtgaggctgtacctacgataaagatcagtgtaagcgggatgttcctcatttgtgccactctgtctttattattaatccacacgttcttgatagttgacagtggtgcagtattcgttactagacaaagggtcctattgtgggaatcgttcacgagtgctacggcaaattattggtgatatctcgtgagtgtaattatatattatcttctaatatactctgtaaataaggtgttggtctgttgcatatttttttgtctgtttttgaatgtacctatgttaattcttcagctaaaagagcggaagaggtgatttattttagggttgttacactcggccacaaataaacacagaaatagtccagaatgtcacaagtccagggcagaggaccaacatgggcagttttgtttatgagcaaggtgggtctcagaagtgatcggcgatcagagggcgatgaagttctagatccattgagacaagctctagacagtagcatgcagtcccacaacttgtaccagcatccccagcgcctggcattccatgtttctgctcctgtggcctccacgatgcaacaagctagcggtttacttggacctctgcctcatctttcttcttttgcgcttcagcctgcgcattcgcttcttcctccacttggctctcatggcgcagaggtttccagaaaaatggcgctaaggccgagagccccc

SEQ ID NO: 40846 - DNA, 2950 bp, Macaca Mulatta
  misc_feature (1)...(2950): n = A,T,C or G
aatacaaaatacaagcaaaggatacacatacttaaaacagagctcaggagcagacacgcagtcctggaaacccttcaataaaagcaaagcaggagtttgttttttctttgtctatgcagatacatacagagactgggatatgtaaaaattaaggatcacaaaagaccatcacacgattctaccaatgcatgttgcatctataattcacgaacatggtcaacaaaatcatgttcacttcaacctcatttcatttaaattaaagaaaaaaaccctttaaataaagtggttacattcaaactttaacttccttagtaccatgctgcagatttcagcactgttaaggtattgcaagaacgcccaaccctctggtgtctgatcatgtatccagcaacattgcagtatgaagaaaagagatgccccggtctcagcccatggactagttaatacagtaaagcaggttcctgtcttttacccttcctgctcagaacataaaagattaaggactaaaatcaagcaactgggagttttagagctggcaaaatgaagtctaaaagataaatcaannnnnnnnnnnnnnnnnnnnnnnnnnnnnnnnnnnnnnnnnnnnnnnnnnnnnnnnnnnnnnnnnnnnnnnnnnnnnnnnnnnnnnnnnnnnnnnnnnnnnnnnnnnnnnnnnnnnnnnnnnnnnnnnnnnnnnnnnnnnnnnnnnnnnnnnnnnnnnnnnnnnnnnnnnnnnnnnnnnnnnnnnnnnnnnnnnnnnnnnnnnnnnnnnnnnnnnnnnnnnnnnnnnnnnnnnnnnnnnnnnnnnnnnnnnnnnnnnnnnnnnnnnnnnnnnnnnnnnnnnnnnnnnnnnnnnnnnnnnnnnnnnnnnnnnnnnnnnnnnnnnnnnnnnnnnnnnnnnnnnnnnnnnnnnnnnnnnnnnnnnnnnnnnnnnnnnnnnnnnnnnnnnnnnnnnnnnnnnnnnnnnnnnnnnnnnnnnnnnnnnnnnnnnnnnnnnnnnnnnnnnnnnnnnnnnnnnnnnnnnnnnnnnnnnnnnnnnnnnnnnnnnnnnnnnnnnnnnnnnnnnnnnnnnnnnnnnnnnnnnnnnnnnnnnnnnnnnnnnnnnnnnnnnnnnnnnnnnnnnnnnnnnnnnnnnnnnnnnnnnnnnnnnnnnnnnnnnnnnnnnnnnnnnnnnnnnnnnnnnnnnnnnnnnnnnnnnnnnnnnnnnnnnnnnnnnnnnnnnnnnnnnnnnnnnnnnnnnnnnnnnnnnnnnnnnnnnnnnnnnnnnnnnnnnnnnnnnnnnnnnnnnnnnnnnnnnnnnnnnnnnnnnnnnnnnnnnnnnnnnnnnnnnnnnnnnnnnnnnnnnnnnnnnnnnnnnnnnnnnnnnnnnnnnnnnnnnnnnnnnnnnnnnnnnnnnnnnnnnnnnnnnnnnnnnnnnnnnnnnnnnnnnnnnnnnnnnnnnnnnnnnnnnnnnnnnnnnnnnnnnnnnnnnnnnnnnnnnnnnnnnnnnnnnnnnnnnnnnnnnnnnnnnnnnnnnnnnnnnnnnnnnnnnnnnnnnnnnnnnnnnnnnnnnnnnnnnnnnnnnnnnnnnnnnnnnnnnnnnnnnnnnnnnnnnnnnnnnnnnnnnnnnnnnnnnnnnnnnnnnnnnnnnnnnnnnnnnnnnnnnnnnnnnnnnnnnnnnnnnnnnnnnnnnnnnnnnnnnnnnnnnnnnnnnnnnnnnnnnnnnnnnnnnnnnnnnnnnnnnnnnnnnnnnnnnnnnnnnnnnnnnnnnnnnnnnnnnnnnnnnnnnnnnnnnnnnnnnnnnnnnnnnnnnnnnnnnnnnnnnnnnnnnnnnnnnnnnnnnnnnnnnnnnnnnnnnnnnnnnnnnnnnnnnnnnnnnnnnnnnnnnnnnnnnnnnnnnnnnnnnnnnnnnnnnnnnnnnnnnnnnnnnnnnnnnnnnnnnnnnnnnnnnnnnnnnnnnnnnnnnnnnnnnnnnnnnnnnnnnnnnnnnnnnnnnnnnnnnnnnnnnnnnnnnnnnnnnnnnnnnnnnnnnnnnnnnnnnnnnnnnnnnnnnnnnnnnnnnnnnnnnnnnnnnnnnnnnnnnnnnnnnnnnnnnnnnnnnnnnnnnnnnnnnnnnnnnnnnnnnnnnnnnnnnnnnnnnnnnnnnnnnnnnnnnnnnnnnnnnnnnnnnnnnnnnnnnnnnnnnnnnnnnnnnnnnnnnnnnnnnnnnnnnnnnnnnnnnnnnnnnnnnnnnnnnnnnnnnnnnnnnnnnnnnnnnnnnnnnnnnnnnnnnnnnnnnnnnnnnnnnnnnnnnnnnnnnnnnnnnnnnnnnnnnnnnnnnnnnnnnnnnnnnnnnnnnnnnnnnnnnnnnnnnnnnnnnnnnnnnnnnnnnnnnnnnnnnnnnnnnnnnnnnnnnnnnnnnnnnnnnnnnnnnnnnnnnnnnnnnnnnnnnnnnnnnnnnnnnnnnnnnnnnnnnnnnnnnnnnnnnnnnnnnnnnnnnnnnnnnnnnnnnnnnnnnnnnnnnnnnnnnnnnnnnnnnnnnnnnnnnnnnnnnnnnnnnnnnnnnnnnnnnnnnnnnnnnnnnnnnnnnnnnnnnnnnnnnnnnnnnnnnnnnnnnnnnnnnnnnnnnnnnnnnnnnnnnnnnnnnnnnnnnnnnnnnnnnnnnnnnnnnnnnnnnnnnnnnnnnnnnnnnnnnnnnnnnnnnnnnnnnnnnnnnnnnnnnnnnnnnnnnnnnnnnnnnnnnnnnnnnnnnnnnnnnnnnnnnnnnnnnnnnnnnnnnnnnnnaaatgcacacaagtaacctagaagacatgattacctctaaaatatgtgcgtatatcacagagatgttagtgcagattaatatattaaacagactgttacacaaacaattgaggctgaagttttaaaagcgccctcccccccgaatcttcacgaaacataacctaagaaaagcccacatgttactaggaatgtaagacttaaaattata

SEQ ID NO: 40847 - DNA, 682 bp, Macaca Mulatta
cgaaaacgcccgcgcagctgagcggctgcgaccactgcctggcaccccgacgggaggggctccgggtcgttcggagccggctgaaccccttcggccccgagcggccgcatgagtcgggggactatgcctcaacccggagcgtggccaggcgcgagctgcgccgagacggcggcgcgggaggctggggccgcggcgcaggagggcgggaaggcggcggccagcgggcagccgctgccggagatgcagtgcccggccgagcaaaccgagattaagcgtagctcctgaaatggatatcatggactactgcaaaaaagaatggaggggaaatacacagaaagcaacatgtatgaaaaagggctatgaggaggtttcacagaagttcacctccatacggcgagtccgtggtgataattactgtgcactgagggccacgctgttccaggccatgagccaggctgcggggctgccgctctggctgcaggatccagagctcatgctgttaccagaaaaactcataagcaaatacaactggatcaagcaatggaaacttggactgaaatttgatgggaagaacgaggacctggttgatcaaattaaagagtcccttactctgctgaggaagaagtgggcaggcttggctgaaatgagaactgctgaagccagaccgatagcttgtgatgaa

SEQ ID NO: 40848 - DNA, 212 bp, Macaca Mulatta
caaatgccaccacagcaggtggagaggcaaagctgcctggaatggatttgtgtgttgatttttaagaattattagagataattaaacagtatggtcaggcttctgtggtctcaacccgagggtatttttctgttctccctccccacctaccaccccaggcttgggcccagcgggctcttccacaatgtcacgtttgccctccaaggcagtct

SEQ ID NO: 40849 - DNA, 779 bp, Macaca Mulatta
  misc_feature (1)...(779): n = A,T,C or G
ggggggttcacaacaagagatgtcattgttcagtagcaggcaaagaggaagcacacagcattattctgatggaaaaagattatccagggaatggtacaatgaccagcccaatgcaggaaaacactacttccaaaacattaaattctctatccaaaacgttgaattctctagaccagaggtgctctgaggatccagggccttgtgttcttatgtatcttctgcttcctgacagtttctttttcaaaataacatgcaaaaaaagctgaatgcactaactcacaaacacttgcactgaactcccaatgaagtgaagatgttggaaagacagaggccagctatttaggaccacacacacctgtgacaagggctgtgttgaccacagtcacactgtggcatgactggatacccaaactacacttctacacatgaaaagtaagaactgtctttagattttctttactttgataacttgtgtttgtttagcttaagacccaagaaatgctgtttgctcatggtaaacagaaacagcatctttgctacagccactgacaccagctggcgtcataggtagctagatcattgcatttgttttgaaatgttaatatgttaaatactaaactaatatttcaaaaatgtgtatatatgatttctatatccttgcttttcagatagcctgcttataatttaatataaattaactgatgcattcataagatttcaataatgaaaatgnnnnnnnnnnnnnnnnnnnnaaatacctttgtcttttgtagattaaa

SEQ ID NO: 40850 - DNA, 751 bp, Macaca Mulatta
  misc_feature (1)...(751): n = A,T,C or G
gggaattaattttatacaccagtctcactgtttcatctttaccttcatccctttctattcctgatatactcagaatattaaaataaatcttttattcatatttttgcacaataccttaaatgtacgttagaacaaaatagggtttacgttgattcagatttgaaatttgagatgtaaattagatttaaattatacttaattgaagtcactttattcattgaatattgatgaattttcatcatgtgccagttcatgatcagatactgagtttctgttaatataatagagacttaagatgtgaaaaaaagtgtaaaagactaggacttggatgggcctggtggttcatgnnnnnnnnnnnnnnnnnnnnnnnnnngtcatgcctccatgatggagctttcataaaaatcccaaaggtggcnnnnnnnnnnnnnnnnnnnnnnnnnnntcagtnnnnnnnnnnnnnnnnnnaggtggatgacnnnnnnnnnnnnnnnnnnnnnnnnnnnnnnntnnnnnnnnnnnnnnnnnnnnnnnnnnnnnnnnnnnnnnnnnnnncgtggtggtannnnnnnnnnnnnnnnnnnnttctggaggctaaggcaggaagaattgcnttgaacccaggaggcgggaggttgcacgtgagccgaatattacgcccactgttactcccagccctggggcaacaagaagcgataactcctgtnnnnnnnnnnnnnnnnnnnnnnnnttagggaactccccttcaacc

SEQ ID NO: 40851 - DNA, 636 bp, Macaca Mulatta
  misc_feature (1)...(636): n = A,T,C or G
cttccgagtcaggaagggtctgcgcgctccggctctctgggcccggccctcggcctgggccgggtctctcgatggggctcgggaccccggctggtgccagggcgacccccacagccccgcgactctctttcccggccgcctcccaccgtcattcccctacttcctgctcgcctttgcctcgctctgagtcctgctttggccttcctctctccccactctctcccgcgctccagggaagaggtggccgccgcgggaacctgggcacctgcatgcctgccccgcccggtacctgggagagggcccccacctcctgnnnnnnnnnnnnnnnnnnnnnnnnnnnntgctgcttcgactattcctcctttgtagatgcttcacgaccgccttgattgagggcaaggcttccggcagatgactcagaaccgttcgattgcgctggcctgtgcaatccctgattctttgggcctgtgtggatgtctgcgggcaccggagagaaggccagtgactggtccttggagggtggttgtggaaggctttgctcaacaggagattggtttgtttttctggattagtatgttcagtatccgtgtttcgggtgtgtgtatgcaagagcactctcaaagtgaggactttgaa

SEQ ID NO: 40852 - DNA, 477 bp, Macaca Mulatta
gtcaaccccactgtgttcttcgacattgctgtcaatagcgagcccttgggctgcatctcctttgcagacaagcttccaaagacagcagaaaactttcatactctgagcactggagagaaaggatttggttatgatggttcctgctttcacagaatgattactaggtttgtatgtcagggtggtgacttcacatgccatatggcactggtggcaagtccatctacagggagaaatttgatgaggagaacttcatcctgaagcatacaggtcctggcatcttgcccatggcaaatgctggacccaacacaaatggttcccagtttttcatatgccctgccaagaccgagtggttggatggcaagcaagtggtctttggcgtgctgaaggcatgaatattgtggaggccatggagcgctttaggttcaggaatggcaaaaccagcaagaagatcaccattgctgactgtggacagctcta

SEQ ID NO: 40853 - DNA, 781 bp, Macaca Mulatta
  misc_feature (1)...(781): n = A,T,C or G
nattnnttttggtgggnnnnntnnnnnngtntnnntnnnnnnnnnnnnnnntnnnnnnnnnnnnnnnnnnnnnnnnnnnnnnnnnnnnnnnnnnnnnnnntnnttntntnnntttttgggtatttatacattttatttaaagacttcaannnnnnnnnnnnnnnnnnnnnnnnnnnnacagaaatacagattacattatgatgaccacagtagtattctacatgacaaaaataaaaacagatttaagtaaatgtaccggcactgaacaagcatttacttaacatccaatccaggctgcatatgcacaaaatgatctgaccaaatgcttatgcaaaataaagtttttcttagaacgccaaaattccaaccattctgactgtccgctgcctattcccctgttgagtattttcagcgaacttttatagaatataaaaacaattggcatggcacttaaaagactgcaaaaaacaacacaattaaaaacattacaatgcatttctgtataaaatatacaccgtaaatattattagttaaaaaaagatttaaaaacaaaagaccaccctgaataatcgttaaaacctcatcatagaaaaatgctcatcattttgtacattattgatagaaactactgagaggtttctttagggggttggggggaaggtagatacctaacttaaagattcattcaaaatttgctttcaattgtggataataactcacggcttaccccttctgaaaatgttttatcatgaatactcatatttaaccacaggacaaaccc

SEQ ID NO: 40854 - DNA, 799 bp, Macaca Mulatta
gggagtcacaaaagttaagagctagaaggcttgaaataaggttgcaaaactcttaaggtttgctaattttcctgaattccagagaaaaattatttcttctcccttgaaacattccttagcttgtctattctttgctagggatgactgttgtaagtttaagaaaacatctagcatgatgtctctgcaataacagctttttgtactcatgtttcagttggaaattttgattaataaggtgctggagtctttttctagattgaaacagtaaaacaagcatatgtggaaaaagaactaacagtaccaatgtgcgctcagtgaaaagtaaattttccaccataccagacccctgctccacctcccgatggctatcaatgtcaccagtttcttaatcagctttctaaaaatagtgtgcttatacacaaaccacttatccatttatttgacacatatttttacaatgaacagtattctgcatcttgcttttctcatttaacaatgcatttcagagataatttgatatcagtacttacaggttttacttcacacttatcaataaagggaagttgttccatttaattgatatatcataatctatgtaactagccttctattgataggcatttatattatttccaaggttttaccatcacaaaaaaactccatagggaatgtacttgagcatacgtttctgtactcatataagtatgtctgtggggataccttcttagaagtagactatcttgactaaaagcaaaagggggtttagcccttctaacagggattttctaattggtcctcc

SEQ ID NO: 40855 - DNA, 794 bp, Macaca Mulatta
  misc_feature (1)...(794): n = A,T,C or G
gggtgcatcagatcccttcttatggcctattgagtgttgtttcagcagttctccctcttcaatgttttttccctcctgactgcattaattcccattaatgtttaaacatcctccnnnnnnnnnnnnnnnnnnnnnntcaaatcctatatttctttctacctatacccccatatctctttttctctttaaggcaaaactcttgagttttctaccttcatatctccaattcctcctttttcattctctcttaaatccacgcctgtgaggctcccacacctccatactgatacatctaattcccatctttcttgaatcagcaggagcatttgacagatgatcattcccactgtcttgaaatattttcatttgactctgaggacacatgcattcatagttttctaattccccatctgcattctacacatccacagcaggtggcaccaaaccacacccaggactaaaatagactgggatggcagagcaggaccccataggccaaccacagaggctcacagtgtcatatttcattgattaaattttttagatttcactcatcaggctaaggtggagttttacagcaggtccacagatagtgctgttttgttcaatgttattttgttataacgttgatnnnnnnnnnnnnnnnnnnntcccaagccaggactactgatctgtgttggagttggcacgttcaccccccccatttgtgtggggttttctccaaactatttccggttttcttccccaacatcccaaaaaattgtgcttgtttagggtgaaacttggtgtgttct

SEQ ID NO: 40856 - DNA, 1047 bp, Macaca Mulatta
  misc_feature (1)...(1047): n = A,T,C or G
ggatctttgggaagaggatctttccgaatggaaggtaaagactgacttttcagaattttctttgctgtctttggcagtaaagtattggctaagtattagtccataaaatcttcttgtgaccttgtgcaaaaagcagaagctttctacaaagatcatttttagcttaaacttggatttttttccagatgtgtaataattggcaccacagtttttgccttgaaatagtgcataggaaatctgaatagcaagagttctggtctagaaaagttgtttattgtaatttagaaccagccttcaatggtagaaagaatgtgaaactgtaatttatacaggtccaaatgtaaactttattcccaaacttggtggggatgtaattttaagaatggctgttttttcggtaataaatcaaggaaaacaattttagattaaccccccaaaagagaaatttttaagaaacttcgaacccactccttttacaaaaaaaatgagcnnnnnnnnnnnnnnnnnnngggaaatgctctcatttccttaccaggccctagtacccccactttcacatacaaatttccctagtgggctatgtttaccccaatccccccaacaacaacgataaattatatatgtccgaaaactaccccgaagaaatctacataaacccactccnnnnnnnnnnnnnnnnnnnnnaattggganagaatactttcccctcattttttttcgggaaaaacccctcagagagaaagcgttagtgaatacaaaattatctttgtataaccccaaacacgtgtggctttctaagggcagtagggttagtgtgtntagtgggatcttttgcgcaacgtcctattctatacaagcggccagtcaagtttgtccgaattatggcccctggattagaataaaaagagggtttacctgtactcttagaccaaaaaagactcaaagaaataattttctctaaacgggtaggtggatgaaacacaaatgcgtgtcgcgagatatcgtaggtgcaccagagaaatacaaacatttattacgcctcgcccc

SEQ ID NO: 40857 - DNA, 354 bp, Macaca Mulatta
atgatggtaatcatcagaccctgaattcatttcctgagcttgaaagttctgcagaagtgtttagggccagttgtgtggcagccctcatggaaacaaagagaagtataagggctggtaacctacatcacaaccagcccatcacccaagaacacagccagctccttttgcaacgttgtacctattagtcaatcaaatctaaatctgagagttgtgactggcttagacctattcatcttccaaagcagaaacctcaagaatttgtttccaccagtacattaaatatatgccatctaacagaccaaaaagcttgaagcttaactaaattttaaataaagctcatgtgtatcatttgtt

SEQ ID NO: 40858 - DNA, 408 bp, Macaca Mulatta
cctttacaggactttctcagaaatacacatttcaaagggcagagcaaggggctccacagcaagtctggcatgggtaaatttctgttttaactccgttctttgctccacttccccaaagagatgaagccacggccattgttaacaccccaacttcagaattcctcgctggtgcttgaattctcagtccaaacgctgcatccccctcccttgagttgcacaatcaggagtatttttatcacccatccttgatcctcggtgtcacccaacacttcagcagtgagtcacttctccagggaggggaaaaggaaggctcaaaggtaagagctagagaaaggaaatgactcagtgtctcagaaaaaggaaagctggggttctgggtagagcaagctcattcaggagagtaggggt

SEQ ID NO: 40859 - DNA, 2119 bp, Macaca Mulatta
gaaaaaggaaatttaaaaagttcttgatataaagcctggaggaaacaatacgaaaatccagcctctatttcagcaatatctgccggactattatggatctctggcagctgctgttgaccttggcactggcaggatcaagtgatgctttttctggaagtgagcccacagcagctatccttagcagagcatcctggagtctgcaaagtgttaatccaggcctaaagacaaactcttctaaggagcctaaattcaccaagtgtcgttcacctgagcgagagactttttcatgccactggacagatgcggttcatcatggttcaaagagcctaggacccatacagctgttctataccagaaggaatattcaaggacagactcaagaatggaaagaatgccctgattatgtttctgctggggaaaacagctgttactttaattcatcatttacctccgtctggataccttattgtatcaagctaactagcaatggtgatacagtggatggaaagtgtttctctgttgacgaaatagtgcaaccagatccacccattgccctcaactggactttactgaacgtcagtttaactgggattcatgcagatattcttgtgagatgggaagcaccacccaatgcagatattcagaaaggatggatggttctggagtatgaacttcaatacaaagaagtaaatgaaactaaatggaaaatgatggatcctatattgtcaacatcagttccagtgtactcattgaaagtggataaggaatatgaagtgctggtgagatccaaacgacgaaactctagaaattatggcgagttcagtgaggtgctctatgtaacacttcctcagatgaaccaatttacatgtgaagaagatttctactttccatggctcttaattattatctttggaatatttgggctaactgtgatgctatttgtattcttattttctaaacagcaaaggattaaaatgctgattctgcccccagttccagttccaaagattaaaggaatcaatccagatctcctcaaggaaggaaaattagaggaggtgaacgcaatcttagccattcatgatagctataaacccgaattccacagtgatgactcttgggttgaatttattgagctagatattgatgagccagatgaaaagaatgagggatcagacacagacagacttctaagcagtgaccatcagaaatcacatagtaacctaggggtgaaggatggcgactctggacgtaccagctgttatgaacctgacattctggagactgatttcaatgccaataacatacatgagggcacctcagaggttgctcagccacagaggttaaaaggggaagcagatctcttatgccttgaccagaagaatcaaaataagtcaccttatcatgatgcttgccctgctactcagcagcccagtgttatccaagcagagaaaaacaaaccacaaccacttcctactgatggagctgagtcaactcatcaagctgcccatattcagctaagtaatccaagttcactggcaaacatcgacttttatgcccaggtgagcgacattacaccagcaggtagtgtggtcctttccccaggccaaaagaataaggcagggatgtcccagtgtgacatgcacctggaaatggtctcactctgccaagaagacttcattatggacaatgcctacttctgtgaggcagatgccaaaaagtgcatccctgtggctcctcacatcaaggttgaatcacacatagagccaagctttaaccaagaggacatttacatcaccaccgaaagccttaccactactgctgggaggcctgggacaacagaacatattccaggttctgagatgcctgtcccagactatacctccattcatatagtacagtccccacagggcctcatactcaatgcaactgccttgcccttgcctggcaaagagtttctctcgtcgtgtggctatgtgagcactgaccaactgaacaaaatcatgccttagcctttctttgatttcccaagagctacgtatttaatggcaaagaattggctggggcaataatgtttaaaccaaaacaatgtttaaaccttttttgcaggggtgacaggatg

SEQ ID NO: 40860 - DNA, 1296 bp, Macaca Mulatta
  misc_feature (1)...(1296): n = A,T,C or G
cgatatcagttcactgcagtagttcatcatgaaacacgtcctggtgtgttttaggacagcaagaaagccacgcacggcttagaagactggtagtggatgagcccagagtgttaagcagtagtatgatcacacagggccttgtggcaacaaaaagaactttgaatttcatgtaaaatattatgggtaatattacaatgttttaatataaatagatgtgaacattttaatttgttaataagggaaccaatagggaagaaagaagagtgagttccaagagtatttgacaagcaaggatttatatagtcaggcaaaaaaaaaacaaaaaaaaaccaagcctatgtaagacttctaagttagatatatggttatgtgtttttctacaggaaaagaaaaccatagcagtttggatgttaacttttccaccagactacataattctaacaccttatcaattctttggttcacctctaacctcacagggttctaaactgacttcactgttaatagctgtggatgattattagctaaataaattgtgacaaagctgcaatcggatgagaatgtgcatcagaagaatgtcagaggagaatcagtcaggcttcttaggacatattataacacgatattgacatatcaggtaattaatgttttgtgattttttccaagttttggataaagctttctttcacaaagctattggacggagtatgaattagtttggaatgtctgtcccctccaaatttcatattgatatgtgatccccagtgttggagatgaagcctggntagaggtgttgcgtctaaagagtggatccctcatgatgggcttggtaccctacccatggttctcattctatcagttcaggtgacagctagctgcttaaaaaagcccagaacttctcctctgaaactctctgctccctcttcacacatggcagcctatttcacctcacttcgggcatgataaaaagttctgatgcgcaccaaacctagnngctgatgtgagcttgtcacctgcaaatgggagcaacaaactttatttacattaccagtccaaattgcttattgacccaacacttaccgaacgagggggaccaaggactcctttaaaaattctttttctgttttgggaaaattccaagcccacagggaaccccctgggttcttaaattttagaaagggactgaataactccggggtgaaatggagatccaaattttttgtttcgaaataaaagctttaaacccctgggaaaataggttaggcttagaaagggcaaaccccttttttttttttt

SEQ ID NO: 40861 - DNA, 726 bp, Macaca Mulatta
  misc_feature (1)...(726): n = A,T,C or G
gggtctctttctctctcttgcctgctgtgatgtaagacatgtctttcgccttctgccatgattgtgaggcttcctcagccatatggaactatttgctgnnnnnnnnnnnnnnnnnnnnnnnnnnnnnnnnnnnnnnnnnnnnnnnnnnnnnnnnntggannnnnnnnnnnnnnnnnnnnnnnnnnnnnnnnnnnnnnnnnnnnnnnattttgcaagacctggatacattcataggcacgggaagaaggatcctaaggagagggagagagatggattttgcaaggaagaaaaactgtaacataaatttgtcatagcttaaaggatattgtgtacagatgaaaggactggccatgaaaaaagnnnnnnnnnnnnnnnnnnnnnnnnnnnggtcagggtaaaaagaaagagtgagagaaagtcacgtgaagaagnnnnnnnnnnnnnnnnnnnnctgtataattagaatgattggtaaggtttatcatttaaaccagatcactttgaaggtgaaagggacgttggggggatgtagaagagcagacataagccaaggctaacagtgatgtatggtcaccctccgatgacttcaaccttcttattaaaattaagttaaggctgtctcccctactctttgttttccaaacatctctcactctatgaggtatacctcatgccctatgtagaaaattttttccttccattttaattggctttaaaaaatacttg

SEQ ID NO: 40862 - DNA, 748 bp, Macaca Mulatta
  misc_feature (1)...(748): n = A,T,C or G
ggatcatcactctcttctctacctaaccacttaagaagtaaatggaggaattgagataatgcagtgtgaaggatgataaaaataggttaagagtgggtccggtcaggcattaaaaaaatatggttttgaaaggtaaattgagatctatcaattgcaagagtttggggacctaaaacaagcaaaaaatagttgatttattaaaatatccactgtttgctgttagcatctnnnnnnnnnnnnnnnnnntaataatgtatagtcagtcatctgccttcaaatccccagtgctaatacatcagactgggttcaaatccctctaccttggaaacagctcctttggagtaatgtgtgnnnnnnnnnnnnnnnnnnnngaaacatatgtctgtgagtgctacattaaaaaaattctcataatcattgaaaaactaaatcatgtaaattaattcccatgaacattctattgacatgacaatgtgaaaccattgtgtaacacatcaagaactatttgtaattcagttattagggaggtacaaagattttagtttccaattacaaatatacagatctaatttactgtgttttctttatattctttaagaatcgaggtctctacatttaaataagaaaaatggtatactttactttcttatgcagctgctgtaaataaaattgtaattacagtaattcagggaacgaattgacagtagttaaggtagatgggaattggtcctccaaaagaaaagcattc

SEQ ID NO: 40863 - DNA, 186 bp, Macaca Mulatta
ggaaatcctcctccagagcctggagcctgggtgcccgggtccccacactgctggctgctgatagcgctgggtgagtgtggggactccttccccagtctggagtccaccttcctcctctggccagcagagctcaggctggacaccaacgaatcctccagcaatgacattccaggaaaacggaaagcc

SEQ ID NO: 40864 - DNA, 666 bp, Macaca Mulatta
gccaatgctgggcttagactctactcccctccctgtagggtggggcaagtggctcagctgttggaaaatcattttgccagtaagattgcctgtgaatcccttttaagaagttgtcctgatctgagcctgtcttcctgagcactttggtgctaaattgaaaatggtaagctaaagcagtgacagatccacatagcctctttaacctctttattgtcttgccaaaaaaaaaagtttctcaggttaaaccttggtctttaacctccctttgttgtggagaaaatgtgtcactaatcagtggtccaaaggatatctagctttggttgctcagttcctgcagcataacagatacgacttatgccagggaaggtagaggctgattatggagacacccaggagcaggaataagaagggataggtctgttctacatagaacctccccagatctgaagttaagtcttggagagtttccaaagtgctgaagtaaaaaggagacttggagggcctttgcttaatgaacaagaggcttgtgtcctcccaagaacatggagttcagaagggagtaacaggtacctaagctatatagctcacagactgaaaactgcccgctcaccccgtccctggtgactgagagcattttgctgagaatttctaagaggactctccctt

SEQ ID NO: 40865 - DNA, 1473 bp, Macaca Mulatta
ctcctcctgctgctctcgggggctctggccctgacagagacctgggcgggctcccactccatgaggtacttcagcgctgccgtgtcccggcccggccgcggggagccccgcttcatccccgtgggctacgtggacaacacgcagttcgtgcggctcgatagcgacgctgcaagtccgaggatggagccgcgggcgccgtgggtggagcaggaggggccggagtattgggaagaggagacgcggaacatcaaggcccacgcacacactgacagagtgaacctgcggaccctgcgcagctgctacaaccagagccaggccggtgtgaacagttcgcctaagatggcaaggattacctcgccctgaacgaggacctgtgctcctgaaccgcagcggacactgtggctcagatctccaagcacaagtgtgaggcggccaaagccactgaacgaaggagagcctacctggagggcacaccaccccaattcacatgtgacccaccatcctgtctttgactatgaggccaccctgaggtgctgagccctgggcttctaccctgcggagatcagactgacctggcagcgggagagtgaggaccagacccacgacgtggagctcgtgggaaccaggcctgcaggggatggaaccttccagaagtgggcagctgtggtggtgccttctggagaggagcagagattcacgtgctatgtgcagcaccaggggctgcctgagcccctcatgctcagatggagtaaggagggagatggagctgttgtcactgaagctgtggttacttttgtgctgtggaggaagaagagctcagatagaaaaggagggagctactctcaggctggaagcagtgacagtgtccagggctctgatgtctctcacggcttgtaaatgtgagaccctgggggcctgatgtgtgtgggttgttggggggaacagtggacacagctgtgccatgaggtttctttgacttggatgtattgagcatgtgctgggctgtttcaagtgtcacccctcactgtgacagatatgaatttgttcatgaatgtttttctgcagtctggacagctgccctgtgtgggactgagtggcaagatttgttaactctttccctttgtgacttcaagaaccctgacttctgtttctgcaaaggcatctgaatgtgtctgtgttcctgtaggcataatgtgaggaggtggggagaccagcccaaccccatgtccaccatgaccctcttccccacgctgacctgcattccttcccccatcacctttcctgttccagaaatggggctgggatgtctccatctctgtctcaactttatggtgcactgagctgtaacttcttacttccctattaaaattagaacctgagtataaatttactttttcaattctgccatagaggttgatgagtttataaaggagaagattcctgaaatttgagagagaaaataaatggaagaca

SEQ ID NO: 40866 - DNA, 745 bp, Macaca Mulatta
  misc_feature (1)...(745): n = A,T,C or G
gggtacatatcacttttcagtgatttaaaaaaatgtgatgtgtttaaagtcttaagagtttcccaggtgacagccagcccaaaacaatgttacagtgtatctttgnnnnnnnnnnnnnnnnnnnnnnnnnnnnnnnnnnnnnnttgagacaggatctcttcagcctccttatgttgttnnnnnnnnnnnnnnnnnnntattaacaggcacaatcacagcacactacaacctagaactcccgggctcaattgttcctctcactnnnnnnnnnnnnnnnnnnnnnnnntgcagtgtatcttgaatgtgaaatatcttcccattgtccaggcataatttcccacttttattcacgtgattacacatctatgtctgtaaatctggaactaatctgggcaatcttggtgaaaaaaagtcagtgatttccaagagttggtttttatgtgtccaatctactatccaaatcccttggttagtttaggtatgcatcccatttagaacttgatatgatttggtattacatgtgattggcatgtgtatattttcctttctgcttaatatttttaattgtatgagcaaggtacttcatacgtgtgttgattactcctggggcccagggccgagtgagactgtgactctacttttaccctgaatcctgctgtgttaggattctctcctctgggagctgtggtgctgagccctagtggtttcatgcagtcccctcccctttcccttccccctgtggcag

SEQ ID NO: 40867 - DNA, 638 bp, Macaca Mulatta
  misc_feature (1)...(638): n = A,T,C or G
ttgagtgataaagaagtagagactcccgagaaaaagcagaatgaccagcgaaatcggaaaagaaaagctgaaccatatgaaactagccaagggaaaggcactcctaggggacataaaattagtgattactttgggtttgctgggggaagcgggccaggaaccagccctggcagaagtgttccaccagttgcacgatcctcaccgcaacattccttatccaatcccttaccgcgacgagtagaacagcccctctatggtttagatggcagtgctgcaaaggaggcaacggaggagcagtctgctctgccaaccctcatgtcagtgatgctagcaaaacctcggcttgacacagagcagctggcacaaaggggagctggcctctgcttcactttttgtttcagctcagcaaaacagtccctcatctacaggatctgggcacacagagcattcctgcagctcccaaaacagatctccatccagcacagacagacccagtccgaacctcacatagaaaaatatctgcactagaaaccgtaagattctgacttaaagagagggagggagatagatgattattagagccactgggatggacacgccatgttgaacccnaaatgctggaaattcggcacgtaata

SEQ ID NO: 40868 - DNA, 625 bp, Macaca Mulatta
  misc_feature (1)...(625): n = A,T,C or G
tcacatggnctaattcagaggactggccagagcagtggttctcggggttgggctcctcttcaaagttcatccattgttagaaaaatccagtccttgtggctgcaggactgaggttcccacttccttgctggctgtcagctgagaactgctcctgcattccttctcatgtgatcccttccatcttcaacccagtaacagtttgtcaagtcttctcaaacccaaatctgactccctctcctgtatctggttttaaggagtcattttattacactggacttactcaaataatccaagataacctattttaagataaatcgattaataaccttaaatttctgtgctccttttctcattgaagataaccacaatcaggaaagactgtgggctcccataaatagtacacacagaaaaatacacataattttaaaaattaatgttttccaaatttcttagaaacacgtttgacttttaaagtgggaactaactgagtggtgttttaaagagattactgtggctgcagtgtggaggatgaattggagaaagaaagatggaggcagggagtcaattaggtcttgatatagtgaagaaagagatactaagtgatccagggatgtatagaagagta

SEQ ID NO: 40869 - DNA, 821 bp, Macaca Mulatta
  misc_feature (1)...(821): n = A,T,C or G
gggagctgctttttatatatagataagatacggtttgaggttgtgtttgggattttttttcttcctgcatatgaatgttcagttgttccagcaccgtttgttgaaaaaacactatcctttctctattaatttaccgttttacttttgtcagttgattgtatttgtcggtctatttttaaactccattctatgtctacatcatgaactatatagtgagtcttgaaattaggtagtgtgggtcttctctcttgttcttttcaaaattgttttggctcttctaattccttttcccacacaaattttagaaacagcttatttatttctgccactttcccccaaaaagcctcttgggaatttgactaagtttacatctaatctaataaatgattttggagagaagtgatatcttagcaatacagtcttttctgataacactttctgttttagttctttttctcatttaataattttccaacattaaaatcttggaccaatttagatttatatctgaataattccagttttgttgccatttcaaatggtacataatccctattttatagatgagaaaatttaagtaactttccccaagtcacacaggttattaaatgaccaaagcccgatttaaattctatggaacttataaacctaatgtccttggttttgaaactacagtactagtttttcctaaattggttgtaaactgggggtagaaaaagaaacccctctacgnnnnnnnnnnnnnnnnnnncggcctacgggaaattcccaaaagaaattggtcctttcccccattttgggtattttcccagggttttaac

SEQ ID NO: 40870 - DNA, 828 bp, Macaca Mulatta
  misc_feature (1)...(828): n = A,T,C or G
ggcgtggtgacaggcgcctnnnnnnnnnnnnnnnnnnnnnnannnnnnnnnnnnnngtnnnnnnnnnnnnnncnnnnnnnnnnnnnnnnnnnnnnaaagccattgcactcaaacctgggagacaagagcaagacttcnnnnnnnnnnnnnnnnnnnnnnnnnnncagacaccaagcctggcacagtgccgtgcacctgcagtcccagctactaagttgggatggatggcttgagcccagttctgggctgtagtgcactatgtcgatcggctaagtttggcattgatatggtgacctcctgagagtcagggaccatcaggtcgcctaaggaggggtgaactagccaaggcaggaaacaaagcaagtcaaaaattctcatgctgatcagaagagggatcactgcctgtgaaaatgcggcaagaccctgtctcannnnnnnnnnnnnnnnnnnnnnngaaggaataccgaccgaagttattgaaaacccgatttatgcaaccctcctctctaatgggtccaaaagaaaacaccatttgaatcctaaacaacaatgggttttaaagctggggcagggtccccttaattgggcaatgttttttccattcaataaaaattaccggaatattatttttttgggaaaactcccctaattttttgtaaaaaaacttctcctaaattcctctgtgacatataaaattccctgcaatacaaagaagtctccacgggtataatttttgccctatttctccgtaattgctcttaaaaacacggtgtacgccatccatcgggtcctcgacacattgtgagggtttaagagctcctgttaaat

SEQ ID NO: 40871 - DNA, 87 bp, Macaca Mulatta
cagaaatggtcttctcacagaacataacatctgtgaaatcaatggacagaatgtcattggattgaaggtaaggaacagactttgtgc

SEQ ID NO: 40872 - DNA, 747 bp, Macaca Mulatta
  misc_feature (1)...(747): n = A,T,C or G
gggtgccaccacgcccagctaatttttgtgttttttttaagtagagacagggtttcatgnnnnnnnnnnnnnnnnnnnnnnnnnnnnnnnnnnnnnnnnnnnacccgcctgtgttcttctgaggaggatgcatttcctcatttatcctaggtaatgttattagtgtttatcaggttctgtaaaggagatctccccccaaaaaagtccaaaagcactactataggataggataccatagccttaaatatataattggttatttaagaagaaagctaacgaatatcaaatgtttatggatataaaagataagcttcttagacagaatcttcaaatcaatgaaggtcgtttgtctttgaatacctgccttggggaaagtaacccaaatttcattcccatcctctctccctgccaaggttcaaagagcagcactttagaaattgcagttaccatagcaacacactctgtggcatgaaaaactaagctgcaaaaataagttaaagctctggaaatgtattggttggaaggggttgtattaaccacatttctgtctctcctccctgtggcaatgggctccattttaaggatattttgtttaatttggatgaccggcagaagtcccccccaccccccatttttaatagaaatttaaaaaatttttccatggggggttaatttggcgacagtaattatttaaaaaacacccggcccttcaatggggccctcttttcaccccttaatttcttccaa

SEQ ID NO: 40873 - DNA, 624 bp, Macaca Mulatta
  misc_feature (1)...(624): n = A,T,C or G
gctcactagagtttatgtcttatattaaattgtatacagtttttattctaaccactaactagggagtatatgccccttcagaacatgcagagtgtatcttttttaaaatttctccttccgtttcttaagtattgctcagatttgttcaactttgtaaatatggacatcnnnnnnnnnnnnnnnnnnnngaaaacacttgtatcagctttgtggtggtttcagggagacagctgtctgcactccctgtagaaacccagcaatgattgtgcacgttgagacatgtgctttttatttcttagcaggatattttatctctgtacataaagtagaaaccaaaagctagggaaacagatactctttacaccatcatgccacacattgtttttaaagcattgnnnnnnnnnnnnnnnnnnaaaccaagacgctnnnnnnnnnnnnnnnnnnntgcaatatgtttttggtttttttcattttttaatcattgcagttaagagaaatggaaattagttgtgttaatcttgcagaatgtttgcaggactgactatcaaactggatgatttccgtttataccctactgtgtcagttcaagcatcaaaataccttgcatctgaggcagacttccta

SEQ ID NO: 40874 - DNA, 773 bp, Macaca Mulatta
  misc_feature (1)...(773): n = A,T,C or G
ggnnnnnnnnnnnnnnnnnnnnnnnnnnnnnnnnnnnnnnnnnnnnnnnnnnnnnnnnnnnnnnnnnnnnnnnnnnnnnnnnnnnnnnnnnnnnnnnnnnnnnnnnnnnnnnnnnnnnnnnnnnnnnnnnnnnnnnnnnnnnnnnnnnnnnnnnnnnnnnnnnnnnnnnnnnnnnnnnnnnnnnnnnnnnnnnnnnnnnnnnnnnnnnnnnnnnnnnnnnnnnnnnnnnnnnnnnnnnnnnnnnnnnnnnnnnnnnnnnnnnnnnnnnnnnnnnnnnnnnnnnnnnnnnnnnnnnnnnnnnnnnnnnnnnnnnnnnnnnnnnnnnnnnnnnnnnnnnnnnnnnnnnnnnnnnnnnnnnnnnnnnnnnnnnnnnnnnnnnnnnnnnnnnnnnnnnnnnnnnnnnnnnnnnnnnnnnnnnnnnnnnnnnnnnnnnnnnnnnnnnnnnnnnnnnnnnnnnnnnnnnnnnnnnnnnnnnnnnnnnnnnnnnnnnnnnnnnnnnnnnnnnnnnnnnnnnnnnnnnnnnnnnnnnnnnnnnnnnnnnnnnnnnnnnnnnnnnnnnnnnnnnnnnnnnnnnnnnnnnnnnnnnnnnnnnnnnnnnnnnnnnnnnnnnnnnnnnnnnnnnnnnnnnnnnnnnnnnnnnnnnnnnnccctggttctgccttaggtcgggcactattccgccaaatttactacaaaccatttttccattcgaaaacaaacaacctggtggactgttcaaaacnccccccgcttttgaaatattgacggaccgt

SEQ ID NO: 40875 - DNA, 359 bp, Macaca Mulatta
aaagaagaccaagggcaagacggtggccgcagtccctgctgtcttgaagcaacaggccaagaaagtgatgaatcccctgtttgagaaaaggcctaagaattctaacactggacaggacatccagccccacagggacctcacccattttgtgaaatggccccactatgtcaggctgcagcagcaaagagctaccctctgcaggagcctagaagtgcctcctgtgatgaaccagttcacccaggccctgggaccaccaaacagctgcttaacgacataagctggcccgcaatacagaccagagactaagcaagagaagaagcagagactcggctcaggctgagaagaaagctgctggcaaa

SEQ ID NO: 40876 - DNA, 757 bp, Macaca Mulatta
  misc_feature (1)...(757): n = A,T,C or G
gggtggagctaaaagagtatgttgggaatgaccattttgtgtagtaagggtcaaggaaagtctctttgtagaggtgatatttgagctgagacttgaaacatgaacttgtgctagccatgtgaaaagctggggagacattccagacatgggaacaagttcaaagaactggaaggctgggtgttagaatggagagaagggtcctctgagcaaggggagaaattaagaatagggtaggcatgagatggagatggagaaatcctataggtcttcttgtgttacatcatagggggatttttggattttattctaatggcaatgaggggttttaatttgggcagtgatnnnnnnnnnnnnnnnnnnctatttagaggaagagaggaaacagggaagttaggagggtattgtagtagcccaagatcaatagtatttcgggcaagtaaagtggcaatgagatacagcagagtagacagcagctttcacatatattatttaagatagattatcagaaagacagtttgttaaagagtacgggcacttgatacacaatgccaaattattcttcataagagctgttgccaaatcagtgataatgttcatttaattgtattcttgccaccatgtttactggggtggtagttgtttattggggttggttattggttcttttagggggtggggttcccccataatgtgggtccttttaaaataaatttattcctaaataaattggggtaggnnnnnnnnnnnnnnnnnnnnn

SEQ ID NO: 40877 - DNA, 830 bp, Macaca Mulatta
gcacgaggctttggttacttctgaacttagaatctccataacacatgtactgtagaatgtgatggagaagcattgatgagaatttatgggcagttcagactgtgttttcccaacttaggctctttataaattggttaaggttttctccttttaaagggcatttcaacaatgggaattatttaatgtaacagtgggcacagattacttatcttccttctctgctttgtgactcaccagcagtaacacacactctccacatcttgtgcacctcaaatgaacagacttggtttccttgctttcttgacatttccatgactgtttcacatacaaactattgagtgaggtttttcagctgttaccgacccacgtcctactgtctctgtgtggtcctgcaaaaactgtccattcccacccctttgctttgccatttgcaagtgtctggaattgtcaagtctgagctttgaaaagtcctggttccactgacaggacacattcgttagttggaattaagacctacaaagtctagtttgtatgtaggtatgaagggaattttttaaataaattgaaaagctgtgaacagcagtagaactttgtctatttcttaattttaaaatatgctgatatgccttaaactgtagttgtagatccttgtcattttgctgtttgaaaataccaatgtgtttctaaactgtgtgtatctacttcaggttaagcgaatgtcaattgtagcgctgttgacttgcttttaaactagtatgatcgttgaacttctttcacataattcttccagcgaatgccgagaaaagccggatatttcgccaagcggattc

SEQ ID NO: 40878 - DNA, 603 bp, Macaca Mulatta
attagagttcctataaagccttcatgttttatatttcattatgtgtaacccttccagttacaaaactgtgtgatgtcccctaaagatcatttgactttgtgttgatgtcagtttttaatgtgtagttttaggagtgtatatttttagggatggctctagaataagatttatgggcaaactaataaggtttaaaagaaagcataagatattacctagtaaatcagaacttatattcttcacttgatagctactgtgtggttttgtaaagttggagagaatagtaagaccataaaattgaccaatttatatttatcgtaagctctgttatgtcctacgctcttaacctaaatccttctgatcctacttgtccatacatttgcagctgatattcacctgaaggccatgcagtactctaatacctaaaagtatctgttaaataatagaggattcaattatttaatgtttgtaaagcacttagaacagtgccttcctatgataactactattatcatagaataatttgtccaatttagttttgttgtgaaactttattgaattttgttcttcacaagttgatatctttctaatgaatttccactaaaa

SEQ ID NO: 40879 - DNA, 744 bp, Macaca Mulatta
gggatccactgctctcttcaaagctgtcagacagggacatttacctctgccgaggtttctgctgctttttgtttagctatgccctgtccccagaggtggagtctacataggcaggcaggcctccttgagctgtgctgggctccacctaattcgagcttcctggtgtctttgtttacctacttaagcgtcagcaatggtgggtgcccctcccccagcctcgctgctgccttgcagttagatctcagactgctgtgctagcaatgagggaggctccgtgggcatgggacctccgggccaggtgtgggatataatctcctggtgtgccgtttgctaagacccttggtttagtgcagtattagggtgggagttacccaattttccaggtgttgtgtgtctcaatttcctttggctagggaaaggaattcccttcccccttgtgcttcccaggtgagggcgatgcctcgccctgctttagctctcgctggttgagctgcacccatggaacccagcgtcaactgtccgaaatgccccagtgagatgaacccggtaccctcatttgaaaatgcagaaatcccccctgcttctgtggctctcatgctgggaacctggaggctggacctccttcctatttggtcaatcttgggtggtgcccccgatggtatctcaaatggttttccttggagtatccccctaaattgccctgttcaattttttccaagccaacaggcgaaaacaagcttggtg

SEQ ID NO: 40880 - DNA, 631 bp, Macaca Mulatta
  misc_feature (1)...(631): n = A,T,C or G
ggggagaaccaagtttgctctcagcggatcctgtgattactctgaaaggtattttcatccaacctgtctactgagaagttatccatctttagtggcatcttgatatcatagatctttaaatggatgagatggctaccactcagatttccaaagatgaacttgatgaactcaaagaggcctttgcaaaagttgatctcaacagcaatggattcatttgtgactatgaacttcatgagctcttcaaggaagctaatatgccattaccaggatataaagtgagagaaattattcagaaactcatgctggatggtgacaggaataaagatgggaaaataagttttgacgaatttgtttacatttttcaagaggtaaaaagtagtgatattgccaagaccttccgcaaagcaatcaacaggaaagaaggtatttgtgctctgggcggaacttcagagttgtccagcgaaggaacacagcattcttactcagaggaagaaaaatatgcttttgttaactggataaacaaagctttggaaaatgatcctgattgtagacatgttataccaatgaaccctaacaccgatgacctgttcnaagctgttggtgatggaatttgtgcttgtaaatgattacc

SEQ ID NO: 40881 - DNA, 642 bp, Macaca Mulatta
gatgaattgaaaaattgaactgcgttttgtttaacacagtgttctctataacaagcctgtgactaattttcacttaagtgattgagccgaaatttatctaataacatttcaggtgaaatttacattgcaccaaaactttgacacaatatgcaaaattaatatgaaactaccctttgttaatttactcttaaatcaaaatactaacttttaaaaaccatgagaatcatcagcattgtgcatcagtagtaaaatgaacttccaagtcaaggccatgccaagtgagtgaaaagtgtgactgcaaaaaggaacaaaaaaagtgaaagcagaaagtagaagtgggtgatttagcaagtaaagccgattgccagttgcttgatgatgaaatcaacatagtgaatactgtgtctgctccctctgccaaagcttctaggtcaaacggaccccgttccacacctggaaccgctgtacaaaaagaagaatgagactctttaaaaattatgcatttaaaaatatatgtgtgtgtgtgtagttcatcagccagctacacatgaggaccaaaatgcttcagtctaaaatggaagatatacatttttttccttcaaaatgcaagtgagaactgaagtagcttttttatggagttaa

SEQ ID NO: 40882 - DNA, 230 bp, Macaca Mulatta
ttccctttcacccacgctgccatcctgtggctgtcgtgtggtttcttcatacgtgctctgttctcgcggttgctccattcatgtcttcttggagggtgagggtggcttgggaactgacccagtgatcacacctactttctgcatctttctatctccctccttcccagcccacccgggctgcagactctgatggaaggaaggtgccgcaggtgggcttttagaaactaacg

SEQ ID NO: 40883 - DNA, 138 bp, Macaca Mulatta
actgatagtgcatcagccgacccagataatttaaaatattcttcatccagagatagaggtagttcttcctcttatggactgcaacctaaaaattcagctgttgtgtctcggcaaaggcacgatgataccagaatccac

SEQ ID NO: 40884 - DNA, 278 bp, Macaca Mulatta
ccctcttccaaaagacggtactgattggctgtttttcatctttgatgttgcaggctagcctctgccgaggagggtacagccgcttcaccccctactagcaagagacccagcccctaacagcattcacactgactgtctattacacaccaaacccaacagcccaaaaccaggcacagccaccagaagacagtgcacccctcccggtcagcgccacgcacggctggccctctgcgacgctaaaatccatagatttttctctccagccagttggtctcccc

SEQ ID NO: 40885 - DNA, 768 bp, Macaca Mulatta
ggaaatgtcaatatacatgcaaaaatcagagcatactgactagaatataaaaggcacccactggagatgaattactttgccaccatctgaccctctattctcttaggtttttataaacctacaaaatctaaggcaagaggcatttgatgctttggctgtttttgtctttcagaattgatatgtatacggaaggtatggcagatttgaatgaaatgatccttcttctgcccttatgtcgacctgaggaaaaagatgccaagattgccttgatcaaagagaaaacaaaaaatcgctacttccctgccttcgaaaaagtgttacagagccatggacaagattaccttgttggcaacaagctgagccgggctgacattagcctggtggaacttctctactatgtggaagagcttgactccagccttatctccagcttcccactgctgaaggccctgaaaaccagaatcagcaacatgcccacggtgaagaagtttctacagcctggcagcccaaggaaacctcccccagatgcaaaagctttagaagaagccagaaagattttcagattttaataaagcagccatgggagccaagaacatgcaagaccagtattctaaagtttgcaacaatgaagtgctttacttaagtgttgactgtgcctcttgtaaagctaatgaaaccttttcccattacatgcttattaaataaataaaaactccctattttgcccaactttagtttaaaaatttaaaccttttttcatttagggat

SEQ ID NO: 40886 - DNA, 470 bp, Macaca Mulatta
  misc_feature (1)...(470): n = A,T,C or G
tctcaggacagcatggccgatgtgttcatctatctcaggacaacatggccgatgtgttcatccatctcaagacagcatggccaacgtgttcattcatctcaggatggcatggcccaggtgttcattcatctcaggacagcatggctgatctgttcattcatctcaggatggcatgaccaatgtgttcattcatctcaggatggcatggcccaggtgttcattcatctcaggacagcatgncaggacaacatggccgatgtgttcatccatctcaagacagcatggccaacgtgttcattcatctcaggatggcatggcccaggtgnnnnnnnnnnnnnnnnnnnnnnnnnnnnnnnnnncccagcaagcctgctgcatgtgaaccctgcactaccggcactcacaactccaactgcacctgttctacacgctgcaccgaataacacagctcagaaagagaaagtccccag

SEQ ID NO: 40887 - DNA, 1161 bp, Macaca Mulatta
  misc_feature (1)...(1161): n = A,T,C or G
ctggtgcaaactgcccagggcctccagctgatccctagcagcgtgcaaccccctacacctccgccccctcctgcacctcccaagctcatcctgctgccctcctccagtgctggggctgggagcggccgtgcaaggcagggcccgcgggcagtggggaaagccagccagggggcgggagtggtctggctgccaggccctgggggtctaggggtgcagggagcggcnnnnnnnnnnnnnnnnnnnnnnnnnnnnnnnnnnnnnnnnnnnnnnnnnnnnnnnnnnnnnnnnnnnnnnnnnnnnnnnnnnnnnnnnnnnnnnnnnnnnnnnnnnnnnnnnnnnnnnnnnnnnnnnnnnnnnnnnnnnnnnnnnnnnnnnnnnnnnnnnnnnnnnnnnnnnnnnnnnnnnnnnnnnnnnnnnnnnnnnnnnnnnnnnnnnnnnnnnnnnnnnnnnnnnnnnnnnnnnnnnnnnnnnnnnnnnnnnnnnnnnnnnnnnnnnnnnnnnnnnnnnnnnnnnnnnnnnnnnnnnnnnnnnnnnnnnnnnnnnnnnnnnnnnnnnnnnnnnnnnnnnnnnnnnnnnnnnnnnnnnnnnnnnnnnnnnnnnnnnnnnnnnnnnnnnnnnnnnnnnnnnnnnnnnnnnnnnnnnnnnnnnnnnnnnnnnnnnnnnnnnnnnnnnnnnnnnnnnnnnnnnnnnnnnnnnnnnnnnnnnnnnnnnnnnnnnnnnnnnnnnnnnnnnnnnnnnnnnnnnnnnnnnnnnnnnnnnnnnnnnnnnnnnnnnnnnnnnnnnnnnnnnnnnnnnnnnnnnnnnnnnnnnnnnnnnnnnnacagcagcaccactggaggaggcgccgccacgctgcagctcctggccccaccgccctcagccccagcctcgggccccgcggggctccccgcggctccagcctcccagatggtacaagtggtccccgcaggagctgggcctggtgttatgaccccgcagggcctgccctccatccagattgtccagactctacccgcagtccagctggtgcacacgttttgaggagagccagtgattcccctcccgacccacacagagaccccgactcactgccagccggggcggggcggggcggggtgctgcaggctggccttgcctaataaagacccgagtctccccgcc

SEQ ID NO: 40888 - DNA, 106 bp, Macaca Mulatta
  misc_feature (1)...(106): n = A,T,C or G
nagaataaagatcctaaaatgtctcgagttgcactggaatctttgtatagattattgtgggtttatgtaattagaataaaatgtgaaagcaacactgtaactcaaa

SEQ ID NO: 40889 - DNA, 765 bp, Macaca Mulatta
  misc_feature (1)...(765): n = A,T,C or G
gggtaacaaaatgttacagatactgaccagggtccccatgttaccaccccgtcttaatccctgttcaccatacactttccccagaggtaactagtatggtgaagttgatgtttattatttctcttgcatgtttctactcttattacagataccagagagaaagtacagagagatatttctgcgaacaatatcttgttcccaaaaacatgtagcattttttaatcttgagatgagatatgctggaggtttatctgttgataaatgtagttctagcagattcatagttaatattaattacagaaggattccagtttactgacccgttttcctgctgatgggcatttagaatttttcaacattggctgttacaaatagtgctacaattacnnnnnnnnnnnnnnnnnnnnnnacagggtctcactctannnnnnnnnnnnnnnnnnnnnnnnncaatcaccacacacttaggtgatcctcctacctcagcctctggaatagctgagactacatgcatgtgccaccgcannnnnnnnnnnnnnnnngnnnnnnnnnnnnnncaggcttcactatgttgcctgggctgatcttgaactcctggcctaagcaatttgcctgcctggggctctcagnnnnnnnnnnnnnnnnnnnnnnnnnnntctgcccggcccaattaacattctttacctatctctttatgcatatacatngtgtgatttttctctaggggtagtgatctttcagtctttttgaaacaccctcgaaaaa

SEQ ID NO: 40890 - DNA, 244 bp, Macaca Mulatta
acttgccttcaggcaatttttcttgaggtggagtagatgtatgtgtgaaatcagtagtaatggcgtatgacgtcctaagtagtgctaataataatgaagctctgaatggcattttttgagtgtatgctatgtgccaggaaccgttctaggtgctttacttgtgttagtcatatttaatcctgacaatagctctgtgaggtaggtgtcttcgtaactttacatgtgaggaaactgaggcatagaa

SEQ ID NO: 40891 - DNA, 946 bp, Macaca Mulatta
  misc_feature (1)...(946): n = A,T,C or G
ggnnnnnnnnnnnnnnnnnnnnnnnnnnnnnnnnnnnnnnnnnnnnnnnnnnnnnnnnnnnnnnnnnnnnnnnnnnnnnnnnnnnnnnnnnnnnnnnnnnnnnnnnnnnnnnnnnnnnnnnnnnnnnnnnnnnnnnnnnnnnnnnnnnnnnnnnnnnnnnnnnnnnnnnnnnnnnnnnnnnnnnnnnnnnnnnnnnnnnnnnnnnnnnnnnnnnnnnnnnnnnnnnnnnnnnnnnnnnnnnnnnnnnnnnnnnnnnnnnnnnnnnnnnnnnnnnnnnnnnnnnnnnnnnnnnnnnnnnnnnnnnnnnnnnnnnnnnnnnnnnnnnnnnnnnnnnnnnnnnnnnnnnnnnnnnnnnnnnnnnnnnnnnnnnnnnnnnnnnnnnnnnnnnnnnnnnnnnnnnnnnnnnnnnnnnnnnnnnnnnnnnnnnnnnnnnnnnnaagtttctgtcaaataagaacctgtattccgcccttaaaaagggggcttttataccactgaatttccttttattcctcaaggctaacacactcggaaccanaaactgtttgcctaaaagcttcacctttcattcttttttatttccgtgggggcgttaaaaattataaccctttcctttcaccccgaatcaacttccctattgggccctggtccccggaaatagccccagtaattccttctctattgatttaaccccgcaaaggcccctacccccccttatggaaaattaccccagatacaacctgtagaagacctcctttccagtcccccagatatatataatcacacaagttttttataataaatcatcacctggaatacgtgaaaaacgccgcttttgggcttttacaataacggataaatattctcttactcgtttgtgtgtaaatacgcccgcctgttgcctaaccacataagaaaaggtctataaaataatggcccggtgccn

SEQ ID NO: 40892 - DNA, 830 bp, Macaca Mulatta
  misc_feature (1)...(830): n = A,T,C or G
ggatcatacccccaagtcaccttcgcatggctactgtccccatcgctcttcttaaatcgcgctaatgcagcccttatgtcatcattaccccttatgtctttgtccctcccttggcatcactgttcctctgacagtcaccatccattcctcatgtttccagctttccccataaggagccacccagccttacagttatttgtcttccctccgtgtcttcgtcatttccctgtatcacagctcacataacatacagggtactgcagcccattacctggggagtgtcagaatcccagccccaccactacacctctggataccttgactaccttatggcacctttccaatcccagcttcatctgcaaaatgcacgtggggacatccacatcagggctgagtgtgacaattctgcgagtttattcttgtggcaggctgagcttgacatggtgtttttagctaatattgttattaaccatgtcaccctctgcccggtnnnnnnnnnnnnnnnnnnnnnnnnnnnnnnnnnnnnnnnnnnnntgggcggatcacctgatgtcgggagttccagaccagcctgatcaaaatggannnnnnnnnnnnnnnnnnnnnnnnngaaattggccgggcgtggtggtgcatgnnnnnnnnnnnnnnnnnnncanaagctgaagcggggagaatggcttgaacctggggagggtggaagttgcggttgaaccaagatcgtgccatttgcactccatctggggcgaacaagagtgagaactcagtctcaataaaaaataattaaccctgttcacccctcaaccctcatccaagtcaccttcatcata

SEQ ID NO: 40893 - DNA, 791 bp, Macaca Mulatta
  misc_feature (1)...(791): n = A,T,C or G
gggttttgagcttcctggacctgtatgtccatcttgctgccaatacttgggaagttttcagctatttttaatatgttatttatacattttctgttctcttttcttctggaatgcccagaatgtgaatatttgttcacttgattttgaacaaatggtgtccccagaatcctgtaggctttcttcatttttattcttttttctctttttgtctgttgatgttatttcaagtatctagtcctctagtgtagaaattatttctactctgttgttaaagctcacagttnnnnnnnnnnnnnnnnnnttcattgaattcttcaactctagaatttttgtttggcacacaccttcgtggccagcctgggagtgttcctgccaggggtagcccataaggctgtttctcaggtgtgatttttttaaatgagcaaaggacctaaatagacatttctcaaaggaagtatacaagtggaagacatacaaatggccaacaggtatatttcttaaaaagttcaacatcactaattcttagggaaatgcaaattaaaactacaatgagaaaaacaccatgggataccgcctcatgcctgtatatggtacatcgagagcaataagtgtgagaagtaaaggaactgcctgccgtggaagataacctggacgtagtcaaataataccttagcctcttgttcacagactgtagtagnnnnnnnnnnaaattaaaaacagccaattgttggaaaaatgtggtaaaaaaggttnnnnnnnnnnnnnnnnnnnnnnnnnnnncttaccgttag

SEQ ID NO: 40894 - DNA, 780 bp, Macaca Mulatta
  misc_feature (1)...(780): n = A,T,C or G
gggacattacaacaaagagctggcagctcctgaaggaaaagggcttgtgccgctgccgttcaaacttgtcagtcaactcatgccagcagcctcagcgtctgcctccccagcacaccctcattacatgtgtctgtctggcctgatctgtgcatctgctcggagacgctcctgacaagtcgggaatttctccatttctccactggtgcaaagagcggatttctccctgcttctcttctgtcacccccgctcctctcccccaggaggctccttgatttatggtagctttggacttacttccccgtctgactgtccttgacttctagaatggaagaagctgagctggtgaagggaagactccaggccatcacagataaaagaaaaatacaggaagaaatctcacagaagcggctgaaaatagaggaagacaaactaaagcaccagcatttgaagaaaaaggccttgagggagaaatggcttctagatggaatcagcagcgggaaaagaacaggaagagatgaagaagcaagatcaacaagaccagcaccagaatccggggtctagaacaaagtatcctccaggcttgggaaaagagatcccaagatctttgaaagagctggaactgccagagtctcaaccaaagggaaagaggcccatttttaaaagaaaactaaaaggtccagtttggagcggggccaacccggaaagaacctttattaaagaatanctggtggaagaagacggggaaagagagggggaaaaaaaacagaaagccaccgaaac

SEQ ID NO: 40895 - DNA, 553 bp, Macaca Mulatta
gtccgcagcagagacccgcactccacaaggaccggctgagcgtcacggcgctcagcgccggcgtcctgacgtcaacaccccgcgccggcgcctagtgtgacgcgcgccgcgccgaacgccaagacgtcacaaggtgtcgccgctgcctttgggaatgatgcgaaggtccgcgcttacccgggagagcattgaggacagttccccggcccggcgtcttgtgtcctgagacgattttttgctttccctcggtccccgtggggcccatagttctcacttctgccaccccagagtcgtcgcgcttcactagatctactccctccgctgtcccgaagagccacagacattcccagttctgaggctcgctcccgtcccgtgtcgctgttaccgtcctccggccccggctcatacaagcaggagcacatcgctcttttatgaaagcccttcaacatttaacgtttaaatgcgagggccgacctgtggagacctggctgggagtgcacgtcgactaaggtcttcctcgcctcgggcttccttggagaggccgccggctggt

SEQ ID NO: 40896 - DNA, 140 bp, Macaca Mulatta
ctccctgctgtggcctttaatgtgaacaacctgcccttcacagagcccatgctgtctgtctgggctcagttggtgaacctcgctggaagcaagttagaaaagcacaaaataaagaaatctactaaacaggcctttacagg

SEQ ID NO: 40897 - DNA, 609 bp, Macaca Mulatta
  misc_feature (1)...(609): n = A,T,C or G
gggggggagttggagactggagctgctcctattcggccatcttgctccgcccccccccatcctgcttcttaattacatgctgaccaaagcaatgaaacataccacagcataaaatatgtgttagattgacatcactacggtatttgattctggtgtcaagaaacactatcctgttacacatgttagttttaaaacccaggtttaacagcaaaagtgcatggattgagggaattataatgcacacattaacaacagtaatggtgggacagacaattattatatggcacattactgttcaccaagtattgcatatacatggttttaattgttttcattataaataaatacaaattttggcacgcaaaggggattctattatagtcctgttttcagaggagacagatcttccctgtttttctaggctcaggccaaagactgtcttcgatatgaagtttgtgcttctgttaccaggccaggggacaaactttatctgaactctcataacctcctggttaactagactatcctctcatctttagtagcggaggctggggtatgtttgtgtgtatgtgtatgggggtgtgtgtgcccncacgtgcccntgtgctn

SEQ ID NO: 40898 - DNA, 534 bp, Macaca Mulatta
  misc_feature (1)...(534): n = A,T,C or G
gtatttgttagggcactgatgtcacagaggactgacttgaaagcttgaaacgactcttttggtcataattatgtataaggaagatcagattagtacatcacctttactccccccagttgtctttgacttttctgcattgtaaattcatatggcctttccccagtgttgcttatggtgaccaagcatttttaaatggttccctagcaaagcaaaagtcgtcaatattcagcaataccacttttatttgatagcttcccctctttgttttctatatcctggtcctttgttcgnnnnnnnnnnnnnnnnnnnnnnnnnnnnnnnnnnnnnnnnnnnnnnnnnnnnnnnnnnnnnnnnnnntttctttccttctttctgtctttcttataacttacttaagcttctacttccttctcactcttatttctgatgtcgggaacatgcccatttgccctttctcctgctcatctgctcagcttattgtaagccctgccctggttcttcatatttctgtgttttcttggaaacactttattc

SEQ ID NO: 40899 - DNA, 595 bp, Macaca Mulatta
  misc_feature (1)...(595): n = A,T,C or G
aattgcactattgttgaagcagaggcaatgaattacaaaggcagtccaattaaagtaacactggcaactttgcaaatgtctgtacagccaaccatttcccttgggggctttgaaataacaccaccagtggtcttaaggttgaagtgtggttcaggtccactgcacattagtggacagtactgagtaactgtggaggaagatgcagagtcagaagatgaagagggggaggatgtgaaactcttaagtatatctggaaagcagtctgcccctggaggtagtagcaaggttccacagaaaaaagtaaaacttgctgcngccaaaaatgcacaaaacttaaatcagaatggaaaagactcaaaaccatcatcaacaccaagatcaaaaggacaagaacccttcaaaaaaacagaaaaactcctaaaacaccaaaaggacctagttctgtaaaagacattacagcaaaaatgcaagcaagtatagaaaaacgtgattctcttcccaaagtggaagccaagttcatcaattatgtgaagaattgcttccagatgactgaccaggaggctattcaagatctctggcaatggaggaagtctct

SEQ ID NO: 40900 - DNA, 399 bp, Macaca Mulatta
ccagcccacccccagtaaccctaccctgtccccagatgcactaacagatggggcccagcccccttcctccctggatcccacgggcccctgtcccaggaaccccgccctctgacttcctgccctttggaaatggtgccgcactctgacgtttatcagactccacctgggtcccctgcaacctcccatcaaaggatgacccctaaacacagaggagcggggcaggcagggaggcaaggactggagctaccttgctcggggggagactgggtgcagttggccagctgtgttcccgtcagctacctgtcctccttccttccctcgttattgatctgtagatattaggaagggagtaacacggctcctccaccgtcctcagccagtacagcccattccctctgc

SEQ ID NO: 40901 - DNA, 307 bp, Macaca Mulatta
gcgggcgggaggttgcctctccttctgcgcctatttggtgctgggaggcgggccgcagggttgctgttggcgccgccgcctctctgggtctggccgactcacgtgaccgacgcgggctctgaagcggtgggccgcaccgaggcggcggtggctactgcagcccgggaggtagcggcctggcgagggacgggccggctgccttctcggacggccgcggcggaggacaaaaatggcggaggcttcggcggccggggcggactcgggcgccgctgtagccgcccaccggtttttctgccacttttgcaag

SEQ ID NO: 40902 - DNA, 421 bp, Macaca Mulatta
atcatatatatcctgtgttagaaattttaagttgctgttgtgatgaatccaaatctttgtcttgctaccaagctatgcactgcagtgcattataccaaagagcaaagtgtgtgccattgaaaatacagaacccaattaaatattcgtgaactatattgattgcatttatattccaagggtgaacctttatttatactaaaaaatttgggggaatatgttttgggatgtattactagagctgaaactctaacctcttaatagttttatagaatttaaaaattttgatacagaccaaggatacgatcttaactatgtcaattatttaatatgacttcgcttattatcttattatggtatgttactgggtggaacaaaatatctttaaagttaaaacatcaatttaaactcttttcctaatgat

SEQ ID NO: 40903 - DNA, 691 bp, Macaca Mulatta
gggatctgtataggtttagtgaaatcacaatgaaaaatcccagcagtttttttttcaataaaatcaacgagctgattttaaaacttatatgaaagttgaaaaaggcaagaatagccaagacaggaagaagaagaacgaaattatggaatatacatccatagatatcaaacttattataaacagtaataatcaagtcaaggggatattaattcaaggactgacaaatagaataaaggcatactatagaatctagaaataacctacacatatatggatatttgatttgtgacaagtgtggtagtgcattaggtagaagataaataatgcagtgggtagaaatagcgatttcactaaatcaagtggatacccatatagggaaaaaaaaatgaatcttggaccctgttcacaccatgcattaaaaaaatcaaattttgattgattaactttgccagattaggctgataattcaggtaaggtgaggaatgctaaatcaataacattgatttagcaatgtggacatgttggtaggggaagcctgaagttaaagtgaatttaagagagaacagaaagatgggaattagatatagcaagtacaaacaactcttttaaaaagttttgcttgcaaagaaaaacggaaaaggctggggcatggttgggctcaccgccctgtaaatccaaaccccctttgaaa

SEQ ID NO: 40904 - DNA, 626 bp, Macaca Mulatta
aactccacctgtctatacagctgtgagatgtctctaggtaagcacaaagcatagctttttttctcatttgaataactgtgggtttgttttaggtaagcccctctgtttgcagtgcaatctcctatggagtcccccttgttcatgtctgagaggggaggaaacattttcctggaagcctgctaatcacacaaagaacaaaaggctcctatgctggaccttgcctgcttatctgtgcagatgcagtctgagttttccccaggctgctctatttttgcctgtagctgtgatttttcaggcaggctgcttctctgaagactagccttagctgtctacacaactgatttttcatgttctcctctctcattatgattgattcagcatccagattatagaattactaattatttctctgctctgaaaacgttccaataattcaacacttattatatagtaggcatgtccaaggggtaggaagataaaacaagattcttgagcttgtagtctattgacaaataaaagacttcgcatttggataaagcactaacaaaaaattagtttctcttccgttaaacaaaaaaagaacccttaaactgatctctaatatgttcccatttatcttttatgga

SEQ ID NO: 40905 - DNA, 372 bp, Macaca Mulatta
  misc_feature (1)...(372): n = A,T,C or G
agaaatgctcactaaccaagaccaacaaatttgtgcgtatttggaggagaagctgcatatctatgctgaacttggagaactgagtggattcgaggacgtccatctagagccccacctccttattaaacctgacccaggcgagcctccccaggcagcctcattactggcagcagcactgaaagaannnnnnnnnnnnnnnnnnnnnnnnnnnnnnnnnnnnnnnnnnnnnnnnnnnnnnnnnnnnnnnnnnnnnnnnnnnnnnnnnnnnnnnnnnnnnnnnnnnnnnnnnnnnnnnnnnnnnnnnnnnnnnnnnnnnnnnnnngattatacaagccatacagaatttaacccgtctcttatatagccttcagg

SEQ ID NO: 40906 - DNA, 659 bp, Macaca Mulatta
ttgaaaagaatctggactggactgttttgtatctgtaaagcaacactgcaaggcccccgtttctcccactcggaggtaagacttggtctcccctgatgtccctgtattttaaaagagccaccagggacaaactgcctcatttcatagtgaaggaatttatttgctttttttttttaaagcactagtccctggaagggattagttgctttttggtaagcaactgtacagaggctctctgaagccaaccttccaggagaatttgcaaggtgaccccatgaaatgaggaaataacaggtgggaaatgtgagactgtggaaagagatgactttattaggagatgtagactctttctgggtaagtgacatactatcttttagttaatggccatctctgggcacccatgtttgtgttaaccactgtattatcacttgtactcagcttaagaagaaaggagaagtcacccttaggtaaggcagtgaagggacaggaagactctgggggagccggaagtgcaggtgctctaggttggaggtgttagccctgcttgagaatggggccacagcagggccatggaggttgtctgtacctcagtacttccgggttcgctatgtcaggcagtgaagggatggcccaacagaagggcaggttgtctccttcag

SEQ ID NO: 40907 - DNA, 1084 bp, Macaca Mulatta
  misc_feature (1)...(1084): n = A,T,C or G
actgccaatggcgtggcctctcgtgaggaggaagaaataagtgaacttcaagaggatgatcgagaccagttttctgatcagctggccagtgtaggaatgctaggaagaattgctgcagagcactgtatacctcttctgacaagnnnnnnnnnnnnnnnnnnnnnnnnnnnnnnnnnnnnnnnnnnnnnnnnnnnnnnnnnnnnnnnnnnnnnnnnnnnnnnnnnnnnnnnnnnnnnnnnnnnnnnnnnnnnnnnnnnnnnnnnnnnnnnnnnnnnnnnnnnnnnnnnnnnnnnnnnnnnnnnnnnnnnnnnnnnnnnnnnnnnnnnnnnnnnnnnnnnnnnnnnnnnnnnnnnnnnnnnnnnnnnnnnnnnnnnnnnnnnnnnnnnnnnnnnnnnnnnnnnnnnnnnnnnnnnnnnnnnnnnnnnnnnnnnnnnnnnnnnnnnnnnnnnnnnnnnnnnnnnnnnnnnnnnnnnnnnnnnnnnnnnnnnnnnnnnnnnnnnnnnnnnnnnnnnnnnnnnnnnnnnnnnnnnnnnnnnnnnnnnnnnnnnnnnnnnnnnnnnnnnnnnnnnnnnnnnnnnnnnnnnnnnnnnnnnnnnnnnnnnnnnnnnnnnnnnnnnnnnnnnnnnnnnnnnnnnnnnnnnnnnnnnnnnnnnnnnnnnnnnnnnnnnnnnnnnnnnnnnnnnnnnnnnnnnnnnnnnnnnnnnnnnnnnnnnnnnnnnnnnnnnnnnnnnnnnnnnnnnnnnnnnnnnnnnnnnnnnnnnnnnnnnnnnnnnnnnnnnnnnnnnnnnnnnnnnnnnnnnnnnnnnnnnnnnnnnnnnnnnnnnnnnnnnnnnnnnnnnnnnnnnnnnnnnnnnnnnnnnnnnnnnnnnnnnnnnnnnnnnnnnnnnnnnnnnnnnnnnnnnnnnnnnnnnnnnnnnnnnnnnnnnnnnnnnnnnnnnnnnnnnnnnnnnnnnnnnnnnnnnnnnnnnnnaggttcttcagccacttcagcagcgattcttaagagtaataaaccaagaaaacttccagcagatgtgtcagcaagaggaagtcaagcaggaaatcactgccacactggaggccc

SEQ ID NO: 40908 - DNA, 798 bp, Macaca Mulatta
  misc_feature (1)...(798): n = A,T,C or G
gggctttttcgcaacgggtttgccgccagaacacaggtgtcgtgaaaactacccctaaaagccaaaatgggaaaggaaaagactcatatcaacattgtcgtcattggacacgtagattcgggcaagtccaccactactggccatctgatctacaaatgcggtggcatcgacaaaagaaccattgaaaaatttgagaaggaggctgctgagatgggaaagggctccttcaagtatgcctgggtcttggataaactgaaagctgagcgggaacgtggtatcaccattgatatctccttgtggaaatttgagaccagcaggtattgtgtgatgtatcattgatgccccaggacacagagacttcatcaaaaacatgattacagggacatctcaggctgactgtgctgtcctgattgttgctggtggtgttggtgggtttgaagctggtatctaaaagaatgggcagacccaagaagcagggctcttttggctttaacaactgggtgtgaaacaactaattgttggtgttaaaaaaagtggtttcccttgggccaccctccagcccaaaaaaatacgaagaaaattggttaaggaaagtcagctacttttcttttcnnnnnnnnnnnnnctaacaaaccaccaaaaaccaattgccgattttggtgccccatatatttccaggattgggaaaatagggggaacaaaaaactgggcgtgtgaaaatccaaaaagttgggtttaaaaccacgagccgcctttgaggttttataataaaagggagaaaattgggaaaacgaagag

SEQ ID NO: 40909 - DNA, 112 bp, Macaca Mulatta
cggctgaccgctgattgttattcgcagcatcttcgtaaccgctaacaggtcaaaatgcagatcttcgtgaagaccctgaccggcaagagcatcaccttgaggtggagcccag

SEQ ID NO: 40910 - DNA, 778 bp, Macaca Mulatta
  misc_feature (1)...(778): n = A,T,C or G
ggagagacacgatctatattttttaaaaagtgcctggctttttagtcatagctgtatatggtgtagggcaggcagtggttgtgtacatttttaggtgagtttgtcttgggttctatggtggttataagggcctaaaaaaattacttaattattgactaacttccctcactagaatttaaactccttgagggccaggactttgtcttactattttatccttaagtggctgaaatggtttctaggcacatagttgaccctgatatacttaatgggtttgctgaatgaatgagtggcacatgttagaaatagtttggcttagttggagaaaaaaagtgttattaagccctgtgaactttctgggtcagcagaccaagatcctctataatagaaaccaactattgctcagagaaatttgtgattttagtaaagtacttgttaaaaactcagagttctatcaagccaatcaagccattaaactttctagcaggaatgagagtccatggccagttgtttttaaggtctaccattttacctccagtacaattcattaagtggtttgaaaattgttgaatttctaaaaccaccttgtcaatcagagtacatttttccccatttatacagagatcagatatgactgagttgtacctcccaccattattaagttatggaaaaagtggccnnnnnnnnnnnnnnnnnnnnnnnnnnnnnntactttgggaagctgaatcccggtggatcacctgaaggtcccaatttcagaaccagcccggaccaaact

SEQ ID NO: 40911 - DNA, 205 bp, Macaca Mulatta
gccagaggttcaacaaggtgatgcctttcgatctgctcttgggctacaagaggtccaagctggagtctgtaccatccctttgcatccccagcctttggcagatctgaccaacagcagcacactttcccatgccacaaggtacagcgcagggtctctgccagctccaagcttgagtctcagggagactaccactcccacctttaac

SEQ ID NO: 40912 - DNA, 775 bp, Macaca Mulatta
ggaagacgatgtctttttcttctttgtttccccagcaccagtatagtgcctgactcttagtgggagggcaataaatatttattttaactgtagttgaactgataatttattagtgttatcggttgatttaacttaattggcttttttatttatgcactgggatctgaggatagtgctgtctttgggccctgtgctatacaaaaatttgttgcttcatttgtgtaatagatttagaaagaagaaattttgacacttctaatacgtctttaaagggtttcaaaatattcttaacctgaactctccaatataactattaatgatttataacataacttgagaataacaacatattattataatacaacattttagaagcaaattacctttttgaagaaaacaatttatttttcatattactttatggtttttagaaatagaaaattgttttatgatgatatcgtaagcaaaatgaatattggtggtttattattttactgttgaaggttctatattgaagatttttttctatgaaaacttttaaagcttatctttggtatgtgtttgaaaatctcattagtattgggagtttaggatttggctttaggtgttattatatggccatatttttgagaaagtggcggggttagtcctggtaattttggggaaaaagtggtagcattttgtggggtgagcctggccagttgccctaagcagaaggggaagggagaaaatttttggcggaaagcgggtggggttacaggcgagtgttagagag

SEQ ID NO: 40913 - DNA, 515 bp, Macaca Mulatta
tgggaaagttgcatgctttcttgtatttcttagatagtagggttctgtacagtgtgagttctttcatgtgttctaataaactagagcacatggtgattttaccacatttcttaacatgaaataatgtttttgaattaacattgtcctgagttggttttgttgtgtttctccttccccaggaatgagttggaaaggcaattcttgaagctaattaattataatatcagcattactggcagtcttatagcagattctacttcaatattcgcaccttggcacacgacaacagcctgtattctccagtttatcttcttgacagagaaagagcatgaaagctggaggtaaggctacgaagttactaagtgggttttcagtcaaacaccaatgccaacatctgtgactaggtcatattaagtagtgattagaaaaatggaaagcttcaaaattaactaacatattgaagagcttattaactttttggcattatatttcctgtatcttttatggtttttaca

SEQ ID NO: 40914 - DNA, 219 bp, Macaca Mulatta
ggtacagattggctgccacaccgacgacctaaccaaggccaagaagctatctcgagcccccgtggtgactcatcaatgctgtatggacaggactgaacggtcagtctcctgcctctggggcggcctcctctacgtcatcgtgcccaagggcagccaactaggccctgtgtctgtcactatcaggggggctgtgcctgccccatactacaagttgggtaa

SEQ ID NO: 40915 - DNA, 109 bp, Macaca Mulatta
caggtacagagattacagatatcctcctgatcatgagaataaatattttcataatatgcaattctggcacgtccttgctgccaagatgaccttcatcattgttatggaa

SEQ ID NO: 40916 - DNA, 2157 bp, Macaca Mulatta
  misc_feature (1)...(2157): n = A,T,C or G
tctgaggaagaagaggtcattggtccctggttttggtctggagaacaagttgatatagaggctgggattggagaagaggccaggccaggagctgaagaagagacaatattcgggtcctggttttgggctgaaaaccacacctatatggattgtagggctgaagctagctgtggcaccatgcaaggggctgaggaggaggggcccattattgggtcctggttttggaccagagtagaagcttgtgtggagggtgatgtcaacagcaagtctagcctggaagacaaggaagaggccatgataccatgttttggggccaaagaaaaggtcagtatgaagcatgggactgatgtcagatgcagatttatggcaggggctgaggagaccaataataggtcttgcttctgggcagaaaaagaaccctgtatgtatcctacctgtggaggaatttggaagactaggccagaggaggaagaggacattgtcaattcatggttctggtccagaaaatacacaaagccagaggccattatagggtcctggttatgggctacagaagagagtaatatagatggaactggagaagaggccaagttattgactgaagaggagaccatgatcaattcctggttctggaaagatgaagccatttcagaggctactgacagagaagagtccaggccagaagctgaggagggggacattattggttcttggttctgggctggagaagaggacagactagagccagctgctgaggttagagaagaggacaggctagtagctgagaaagaaggtattgttggttcctggtttggggccagagaagagaccattagaagagaggctgggtcttgcagcaaatccagtcctaaagctgaagaggaagaagtcattattgggtcctggttctgggaagaagaggccagtctggaggcagtggcaggagtcggctttgagtcaaagccagggactgagaaggaagaaatcactgttgggtcctggttctggcctgaagaagaaaccagtatagaggctggatctcaggcagtagaggagatggagtcagagactgaagaggaaaccatttttgggtcctggttctgggctggaaaagaagtcagtgaannnnnnnnnnnnnnnnnnnnnnnnnnnnnnnnnnnnnnnnnnnnnnnnnnnnnnnnnnnnnnnnnnnnnnnnnnnnnnnnnnnnnnnnnnnnnnnnnnnnnnnnnnnnnnnnnnnnnnnnnnnnnnnnnnnnnnnnnnnnnnnnnnnnnnnnnnnnnnnnnnnnnnnnnnnnnnnnnnnnnnnnnnnnnnnnnnnnnnnnnnnnnnnnnnngtccaggacattagctgatgaagatgaggccatagtggggtcctggttctgggcaggagatgaggcccattttggatcaaatcctagccccgtgttcagggccatttgcaggtctacgtgttcggttgaacaggagcctgatccttcacgcaggcctcagagttgggaggaggttactgttcagttcaagcctggtccatggggtagggtcggcttcccatctataagcccctttagatttccaaaagaggcagcatctttattctgtgaaatgtttgggggcaaacccaggaacgtggtacttagcccagaaggggaagatcaggaatctttgcttcagcctgatcagcctgatcctgagttcccatttcagtatgatccttcctaccggtcagtccaggaaattcgagagcatcttagggccaaagagagtgcagagcctgagagttggtcctgtagctgcatacaatgtgagctgaaaattggttctgaagagtttgaagaacttcttttattaatggaaaaaattcgggatccttttattcatgaaatatctaaaattgcaatgggtataagaagtgcttctcaatttacccgagatttcattcgagattcaggtgttgtctcacttattgaaaccttgcttaattatccatcctcccgagttagaacaaggtttttggaaaatatgattcgcatggccccaccttatccgaatctaaacatgattcagacatacatatgtaaagtgtgtgaggaaacccttgcttatagcttggattccccagaacagctgtctggaataaggatgattagacatc

SEQ ID NO: 40917 - DNA, 478 bp, Macaca Mulatta
tgccacggcctgctcttaacacctgtgtttccctttcagatcttacaggtgaacaaggtgatgtccatcttgttttatgtgatatttctcgcttatctccgtggcatccaaggtaacaacatggatcaaaggagtttgccagaagactcgctcaattccctgattattaagctgatccaggcagatattttgaaaaacaagctctccaagcagatggtggacgttaaggaaaattaccagagcaccctgccgaaagcagaggccccccgagagccggagcggggacagcccgccaagtcagaattccagccagtgattgcaatggataccgaactgctgcggcaacagagacgctacaactcaccgcgggtcctgctgagcgacagcacccccttggagcccccacccttgtacctcatggaagattacgtgggcaaccccgtggtggcgaacagaacatcacggcggaaacggtacg

SEQ ID NO: 40918 - DNA, 192 bp, Macaca Mulatta
cttagggtgattagcacatgcaaaatcaaactgtaagttcatcttttctgtatggttgtaataattttggggggcatttaaataattttccctaattagattttcaactcaccggtggggaaaaagaaacacacaagctgcaaagtgaaactttctcgatacaggcataaaacaaaaatgaaactaaatagc

SEQ ID NO: 40919 - DNA, 601 bp, Macaca Mulatta
  misc_feature (1)...(601): n = A,T,C or G
gcagtctgcccaccatgngcctcccaagtgctggcattataggcatgagccaccactcccggccaagaatacttggctttatatataaaaaatataaatatgtaagtgcgtgtgtgtcnnnnnnnnnnnnnnnnnnnnnnnnnnnnngaaggatttcacatgggtatatctccagctatatgctaagcattttatatgtagctcatttgatgtttatgcctccatgtaagataggtgttaccccaatgtgattgaagaaataggcttaagaaggttaaataatttgctcaacgtcacacagcaactattaaatcgtcattaactagtattgcttacaaagagagtttgtaaattcaaaaatgtaaatgtctttatcactaaaaaatttttttcacgatccaaaaattattcaagatatatgctgtgtcattagatgtattaattaacatttttggagaatcctaaaagatcttaaaccttaaagcatttacttcattgctaaatttgtagttctgttacatgagtttggcttctcagccttagggtattagttttggcttcctaaaagtaggtaagagttagtcacttgatgtaagtgtta

SEQ ID NO: 40920 - DNA, 387 bp, Macaca Mulatta
gaatcggaaacaacaaataaatatatttaccctcttgtaaaagctgtacaggaaggacctggaggtggccgtggaccagtgcttgtggatagaggtggattaagacccagctatcaggcaaatgatattactggagtccagctccctttttataactctcagggaccaaaatataattttcagaagtcaaagagaaggttaggttttacatggtagaaaaaaatttttaacattgagaagactaagttgtagcatatatgagcttcaaatgtaaatggatttctgttaataaagctgttcttcatctaagtacaattatgtctgatttaattgatcgttctcagtatttcttttgggtatatataaaaccccaattttgagattcct

SEQ ID NO: 40921 - DNA, 789 bp, Macaca Mulatta
gaggcttcatatagctcccaggccccaccagcagcgtgtgggcagaggcccaggccccttcccgtcgctcagagaagctgctgcccccagaacacggggtgccagcctcccatcaacactgggtcccgacctcggtccgctcaggattcctgtgtggaaatgtcacttctgccccagccctctggggtgtacctggcatccagctctgccccccttctgcttaagcaggtgctgggagaccctgagccgggcaggctgaggttctgagctcgtgaggggtgcagcagtttcccgcacagcatggggagcacatttgctcatgtctcccaagctggctgtacactctgaggacagccctgggctctgacaccctccaactttcactgggccttctaagccctcctctcctgtccactgctagcccatggcctgggcctggccttgaagctgtaaagacctctcaccccatccaaacgagactggtcagatatctcccgcatgtcagccaccactggattgggaaggaggggtggtaggtgcaaggctggccctttttatgagagtaatttaaaaaacaaaaacaggtcaggcacaggggctcacacctgtaatcgcagcacattgggagactgaggcaggagggtcacttgaacccaggagtttgagaccagtctgggcaacatagtgagatcctgtctcaaaaaatgttaaatgataaaattagccagctgtagtggcacatgcctgtagtcccaggaacggggagactgagatgggaggatcgcgtga

SEQ ID NO: 40922 - DNA, 790 bp, Macaca Mulatta
  misc_feature (1)...(790): n = A,T,C or G
gggtgtggctcaatatgagtgctaaagttacattagaaggtaatgaaaactgattttgccgttttatttgctatagtattttaatcctggtatgtaaaattgttattcatttgtgcctaatgctgataatgggaagcagctcactgtggtaagagtaggggcattaagcacaggtgcaactgtaaacatatgtatccacatacacacgtgtgtacacaaactcatgaatgccagcaatgacctttggacactacattgtatatatatctaggaataaaactgatggaagtccagtattatctgtaaattgtacacatgcagtgactgtctttgcataatgttcccccagcttatgcttggtggcttatctgcattgttattcatctcatctcaaagtaacctagctcagcttgtcttcagttcattcacagcttccacatccacagctcagttcatcttcagctaatccacatcgtttaaaattggatgaaaggaagagaattaatacttgagggcagagattgngccttaattacttaaacctagttcagtatttgacatatggttctactctgttggatgaattaatgagtgaacattttgtgactgtggatgggttttgtgtactttgtggntataccccacaagaacaccactactgggagtccccacacgaactttggtttgaaaaaatactcctacaaacaaaaaccatttgtggtgggtatttaagccaaattaattgtcctcctgaaattcccaggtttttccttatttttggtaaaaatag

SEQ ID NO: 40923 - DNA, 363 bp, Macaca Mulatta
  misc_feature (1)...(363): n = A,T,C or G
gcctcccagatcacgccatctcctgctccaatagctgggactacaggcacccaccaccacannnnnnnnnnnnnnnnngnnnnnnnnnnnnnnaggctttcactgtgttagnnnnnnnnnnnnnnnnnnnnnnnnnnnnnnnnnnacctnnnnnnnnnnnnnnnnnnnnnnnnnnnnnnnnnnnnnnnnnnactgcgcctggccaacatccagtgtttatcttgactgtcctaaccttaccttagatgctaatagaagggtcctgctgaaataacactgggcactatatttgtgggtaaatgtgtacatcatattcctttctctttatctcacaatttttgtctccactaagcaagaagtaaa

SEQ ID NO: 40924 - DNA, 789 bp, Macaca Mulatta
ggtgtcccaactactcccaactactcaattctgctgttgtacacaaaagcagccatagacagtatgtaaatgaatgagtgttggttgtgttccaataaaacttgatttacaaaaacaggtagaaatggtagccttgaaaaccaacagcctacaatcatggtgaaaaccagcagcctggcagccaccagagggaacagaacatggagtagaatgttggagctccttccaagcctcatttctgaagaattaatatttggcctgtctagcggttccttggaagaccccactcgcaaggctttttttattaggcatgattcaagagtgtgctcagtgtgtaaaactttttccttggggtatttgtcaaaaataattagagacaaatgattaactttacagctgcctatggtaatagacaacagttgtggtgaacattaagctaaccaaaaagcttaaaagtaactgctggggaatgaggtgtccatatggggcttagaaaagctccaacaaattcctgggaatctaaaaggctgtgcatatgcacaggatgatatgcattcccaaggctgtgcacatgctcaaaaaacaccttgaaaaaggcaaagttctcacctatggctgaacttccagctctgtacaaatgaaatggctaagcaaaattgtttaactgaacaaaatgtttaaagggcatccccccaaaacacaccccgaaccacctttggtaaagaactgggaaaaattaatgggctcccataaattttaaacccaaacccctggtaaaacaccttagcc

SEQ ID NO: 40925 - DNA, 115 bp, Macaca Mulatta
atgatgtaggaggacaacgcagcctgataaacaagtggacgacttttcttaaggccagattgatttgctcaattcctggaagtgatggggcagatacttactttgatgagcttcg

SEQ ID NO: 40926 - DNA, 870 bp, Macaca Mulatta
  misc_feature (1)...(870): n = A,T,C or G
gtaatgttcttcgtgntattgtatactgttgactgtaacgactgggttctcagacccctagcctaagatctggatttctgtgtagtctgcatgaaaaaaaagacaaggaatggaataaaccattgtaagtaaaaaggaaatgtaaaaagagcactgagaaccttagttttaatacaattttatgtctactttttctactcagccactagtcagttcttgctgacagttatttcaaaggctgaagaaataaatttgtcttgctcacaattactatgattctttgtataagctttttaaatagaatccacactttcctctttaattgtaatggatttcttggttatctatggcacacagcaccctctccccaatcatgttgcctcaagcacgcaaatagagcaatatgttgaaaatcaaagcacttacatttggagttgaaggaaaagaagggaactgcaaaagcatctctccttattctgcaatggaagagtgcaaataaccacatttttcctggccttctctaagatgcccctggcccacacaatacgcttgagactaaatcagtaattctctatcatcagcactgcatttattcagtctctaggtatggaaccccaacaacaagcaaagtctgagctttctctcagacaacattgaatttcatacacttttgtctctcaaattccttctgaatattattccttctattcacaacctgatggttaatattgattccgtctgaagtactgtggtccgagtccatcttttactaaaatgtcttcaattctgaaaccagaaaacggtccgttaggttgccataaacatcgacgaggtctgttcagacggacaccagaagagaaaagtaacgag

SEQ ID NO: 40927 - DNA, 652 bp, Macaca Mulatta
  misc_feature (1)...(652): n = A,T,C or G
ggggacactgcgcacgcgacccgctctgctctcggtgcgtaaattcacagagaaacatgaatggataacaacagaaaatggtattggaacagtgggaatcagcaattttgcacaggaagcattgggagatgtcgtttactgtagtctacctgaagttgggacaaaattgaacaaacaagatgagtttggtgctttggaaagtgtgaaagctgctagtgaactctattctcctttatcaggagaagtaactgaaattaatgaagctcttgcagaaaatccaggacttgtaaacaaatcttgttatgaagatgggttcttgatatcagttgtagattctttggtttggtgtaaacacctgcaaagtacttttcagacataaagcagccactcatattgtgtgacacggacatgggagataaacaataataatatattctaccttaatttttggtttctcccatttcatccttacaatctaatgaagttggctgatcaaaagaacctgataacccttcaaactaaataacttttgatgaaaacctttgaaaaatctcaaaccttttggatgaaatggaccccttataactttttgaaaacccccccccaatttttaatnnnnnnnnnnnnnnnnnnnncccttttgttcccatgg

SEQ ID NO: 40928 - DNA, 1210 bp, Macaca Mulatta
  misc_feature (1)...(1210): n = A,T,C or G
gggttatggaagagcttttagctgttttcatggtttttgtaacagttccccagttgggattagagcctttctttgaatttcagcctactagaataaactgcttatcttttgctagtccttttctgggagtaggaccctccctacctttccaaaaacttggttctggatccaaacaatacttataacatagtacttagttataagtatatattaatatgcatgacttaactgcatattaccactccctctgatcttattccaccctgtagaataacatcattagagaccatcttggggcagaagaggataccttttcagtatgagaactagactccttttcttactctgatgagtcctggtctccccactgctgaggtctcagcatgccatgtagctgagtttatcagagttatgagggtttaatcagaatcccaaatcaagtacagtccagtccaacctatttgagaactttatcttttcttgttacttcatttattatagttctcttcaaacgagcaatggaaaaggcacttcagaatatgcaaaagatctgtcatttgaaggggataatttacaaatgtgcatcacttcactgagaatcaggaaattgtttttgtccttacctgctgtagtgggatataactggtttacaaaaatggtgtacattttaaaagtatgccaatttgatgagttttttttcttaggaatacactcattgaaacctttaacaaggattatggccgtttatccatcacttccaaaaatgttctcttgttagcttgattttgaacatgttaagtttaagatagcacatgatattcaaattgggatttttgagtagttatagaggtccacagttcagaggagagatctgactaaaataaaattgggagtcatcgacatatggaaggcatatttaaagccataagattagatgagatcaccaatagagaaaaaaaggtgtccaagagttgaaccctgtggcctttcaagattaggacattccaggtttattcaaatcctagaaaataatttgtgccaaaggacaaaaatcaggacacagggaatctgctgccaagttcaagtgccatattttgttaaggaacagaaaacttaagttagaaaacccagggatgccctgggaattgtaaatggagcccacagaaaaaagaaagggatgganaaaccccagcccaaaaagttggctggt

SEQ ID NO: 40929 - DNA, 782 bp, Macaca Mulatta
  misc_feature (1)...(782): n = A,T,C or G
ggcgtggtggtgggcactttnnnnnnnnnnnnncnnnnnnnnnnnnnnnnnnnnnnngcttgtacctgggaggtggaggttacagtgaacagagatcacaccactgcactccaggctagggtggcaaagcaagactccttctcaaaacaaaacatacagatacgcaaagatttgtatgttagtgtttatagcatcatcattcctaagagtcagaaaagggaaacaatccaaattgtccagtaaatgcataagcaaaatgtggtaaatacacacaaccgaatagcatttagcaatataaagtactgacacacactacaacatggataaactttcaaagctttatgttacataaaagaagccagacacaaaagaccacataatatattagtctgtttatatgaattgtccagtaaaggcaatagtatagaggccgaaagtagattagtgggtgcctggggctggaggtgagaatggaaatgactacaaaatgtacatggggatctctttggagtgatggaaatgtttcaaaactgcattgtggtgatggctgagccattccgtaaatacgcccaaaaatcattgaaatgcaccgtttaaacgggggatattttatggtatgttaagcatacctcaataagaccggtttaaaaaaacccacctgaaaaggaggtgaaaaatcattcggatgtggatattttttaatttatggatccttaatatcccgaaaaggcccaggaattccccagcagcttaataaaaatatgtgttaaacctcgataaag

SEQ ID NO: 40930 - DNA, 112 bp, Macaca Mulatta
gatattttagtacaacatcttttcatcacagaaatgatatcttcagggaaaagactttgagaaagtgcctgaagtgacagaacacatattttcttctggtatctggctaaag

SEQ ID NO: 40931 - DNA, 632 bp, Macaca Mulatta
  misc_feature (1)...(632): n = A,T,C or G
ttggaagacccaantcaatacaaaggaaagggtcactagctaaacgatgtgtgaaattttcaaaggtgaaaaatagcaagtctgcagctctcctgacatccttgcctcaggctgctgtcccacgtggagagcagatgcctgcaaagctcttggtcactgatggagtcactcagggttctgggctttgggatgtaacttaaatgacagtgtcagggcatgtcaggggaatatgaaggctgcagcaatgcctgcaagtcagcttttgctgcactgggactgagatgttctaagtctggaaagacgcaaagctgtcctcaccccatcctgctgtgcccctccttgagagttagtgtaaggctctgaaggactgtgtgaattatggcggtagtggaaacaagctcatctttggaactggcactctgcttgctggccagccaagtaagtagtggcgtgtgtcaggtggattctgtgtccactgcaagtgggaagcgacagacaccctttggtggaaagaaggtctgaaggttgactttgttcactgctgtcatctcttatctgctgtgatatagcaggctgtcaaaatttcccctttctcctgaatggcacacccacagtcagggaaggggaaacat

SEQ ID NO: 40932 - DNA, 373 bp, Macaca Mulatta
  misc_feature (1)...(373): n = A,T,C or G
gtgctaaaagtggatgtgcaagaccagccactgcaggtagctctctggaaccaaagagagccctgcttttctaccagacatgggagcagcatgtgggaaacaagggcctacccagagagcagagagagtccgcctagtccgtgcagcctcaggaagtcctgggcccacatgagtcctggtccaaggatccccctggagagctgcagttcagtgggctccactgcagcccctggccacagcctatgcccaccctgggcccctgtggggctgggaattgtgtccgacctgtgcatctcccatgggagggctgggcacaggcagtgccatgtnnnnnnnnnnnnnnnnnnnnnaataaaagaacttgcccagcaaa

SEQ ID NO: 40933 - DNA, 722 bp, Macaca Mulatta
  misc_feature (1)...(722): n = A,T,C or G
ggcgcggtggctcacgcttgtaattgcagcactttgggagcccaaggcgggtggatcgnnnnnnnnnnnnnncnnnnnnnnnnnnnnnntaacatgatgaaaccccgtttctactaaaaacaaaaaaattagcctggcgtggtggggggcannnnnnnnnnnnnnnnnnnnnnnnnnnnnnnnnnntctggctaacatagtgaaacnnnnnnnnnnnnnnnnnncacagaaattagccagacatgggggcaggcgcctgtaatcccaactaannnnnnnnnnnnnnnnnnnnnnnnnnnnnnnaccgggaggcggagtttgtagtgaaacgatactgtgcccactgcaactccaaccctggggcgaaacgaattgaaaaaccctggtctccccnnancctaaacgcatacccaaactccccacaatattcccctttgtttgggcccgccctttcgggcnnnnnnnnnnnnnnnnnnnnnnnnnnnnnnnnnnnnaannnnnnnnnnnnnnnnnnnnnnnnnnnnnnnnnnnnnnnnnnnnnnnaggggcgnnnnnnnnnnnnnnnnnnnnnnnggtgggggnnnnnnnnnnnnnnnnnnnnggtttttccccctcccctgagagggcagaaaaaaacatccccccccggcggggggcattnnnnnnnnnnnnnnnnnnntaaaaatccgtcccccctgtcccgccaaaaacaaatcactccc

SEQ ID NO: 40934 - DNA, 436 bp, Macaca Mulatta
  misc_feature (1)...(436): n = A,T,C or G
gggtgtggcctggtgggtcagggggagtctttgcaccaaagatgtcccgactttgcccccttgcccatcagccatttgccatcaccccaaacaactcagcttcggggccggtgaagggaggggcctcccccagcacagttgaggagcagctggggtaggctctctgtgccatggccccccactcccccttcccttggagggagaggtggcaggaatacttcacctttcctctccctcaggggcaggtggtggaggggcacccagggttgtctttgtgcaccggggaaggtgctgggtgcctgcagcgcctcccttgtctcagacggtgtgtccagcactcgattgttgtaaactgttgttttgtatgagcgaaattgtctttactaaacagatttaatagcnnnnnnnnnnnnnnnnnnnnnnnnnnnnnnnnnnc

SEQ ID NO: 40935 - DNA, 788 bp, Macaca Mulatta
  misc_feature (1)...(788): n = A,T,C or G
gggtgcctaaatttctccttcttaggaggataccagtcatactggattaggacccacactgaggaccacatttttccttaattatctctttaaaaacctatctccaaatacagtcacattctgaagtgctgggattaggatttcttcatgtgaattttggggggactacaactcagcccataacaccccctaagtatttcccagctattaaggttgaaataaacttgtagtatcaatttaaccttgcatgatttgtagatgtaaatttgactttattatcattaattgttgaattatcaagtgcatgatgcagtgcaatcaagtttaacatagcgtggtgggtaaaagcatctacattagaatctttgcaatccaaccagatgcttaagtgacacttggcaaattatttatccttccttaggtcttttgcctcatcttcataatgggaataataataatggctagcttattgggctattacaacgattaaatgagatagatatataaactanactaagtgcttaatgtcagctgatcgtattaatactattttcagttcaaaggtgggaatggattgatttgtgactaaagattctgtataaccaaaagtagatgtgatattttaaaaaatgtaaaacaatgcccattatttttcactaaattattttttattttaggaaaatatagttttcccataaaaaatgtttaacataaataaatttaatcccttttcctaattggagcgaaaacgaanagacgcgggagnagcaggaagcagggaggcaagg

SEQ ID NO: 40936 - DNA, 204 bp, Macaca Mulatta
  misc_feature (1)...(204): n = A,T,C or G
agaagaccatcgaccgcctgggagttggcagatgctgctccctatgtggtgctggacttgccgcagagaccctggaggaggagacccctggtgccaacctgtggcccaccaccatcacacttccctccctnttctgctgagctgtcgtatagcacagcactaacaaaaccagnntcgggatcatttngcaaaanggagggnaca

SEQ ID NO: 40937 - DNA, 717 bp, Macaca Mulatta
gtggtcgcgcgcccgacctctgcagtaccagctcagccgcgacccttccggccgcctccaccccacctcgccgccatgcgccttcgccgccttgcgctattcccgggcgtggcgctgcttctcgccgcggcccgcctcgccgctgcctccgatgtgttagaactcacggacgacaacttcgagagtcgcgtctccgacacgggctctgcgggcctcatgctcgtggagttcttcgccccctggtgtggacactgcaagagacttgctcctgaatatgaagctgcagctaccagattaaaaggaatagtcccattagcaaaggttgattgcactgccaacactaacacctgtaataaatacggcgtcagtggatatccaaccctgaagatatttagagatggtgaagaagcaggtgcttatgatggacctaggactgctgatggaattgtcagccacctgaagaagcaggcaggaccagcttcagtgcctctcaggactgaggaagaatttaagaaattcattagtgataaagatgcgtctgtagtaaggttttttcgatgatttattcagtgaagctcactctgagttcctaaaagcagccagcaacttgagggataactaccgatttgcacatacgaatgttaagtctctggtgaacgagtatgatgataatggagagggtatcatcttatatcgtccttcacatctgactaacaa

SEQ ID NO: 40938 - DNA, 171 bp, Macaca Mulatta
aggtggatatgagcccccacttacaaatgtcttcacgatgcagtggtttctgactctctttgccacgtgcctccctaatcagaccgttttaaagatctgggattcagtcttctttgaaggttcagaaatcatcctaagggtgtcgctggccatctgggcaaaattaggaga

SEQ ID NO: 40939 - DNA, 606 bp, Macaca Mulatta
  misc_feature (1)...(606): n = A,T,C or G
tgatcctatagaggcagtggaaattgcatcttcagaagatcgacatgtggatggagagattgaagttcttcaacaggcattatatatgaaaatgatgcaaaataaatgtgaaacactacagatggatcaggagaggttggaagaagaactagtgaacctcaaaagtcacatggaaatgaatatgttagaacgtggtctcttggaacaccataaacaggaggttgaagaagagcaaggcaggagataatagaacaattagaaannnnnnnnnnnnnnnnnnnnnnnnnnnnnnnnnnnnnnnnnngttaacagaagaaaacattgcttccatgcaaagtcagatggaactaataattgaaaatctggaattccaactctgcaaagcaaacacttcacaagcagactatactacagcagaattggaaccatataagaaactgcatctagaagaattaaaagctagaggatctctgtcagannnnnnnnnnnnnnnnnnnnnnnnnnnnnnnnnnnnnnnnnnnnnnnnnnnnnnnnnnnnnnnnnnnnnnnnnnnnnnnnnnnnnnnnnnnnnnnnnnnnntagagtcaccatgcaatggaaatctta

SEQ ID NO: 40940 - DNA, 788 bp, Macaca Mulatta
  misc_feature (1)...(788): n = A,T,C or G
gggaagcacnnnnnnnnnnnnnnnngnnnnnnnnnnnnnnnntatgcaatttctaaacatacacatagaagctgagtctctgatccaatatgtttttatttgttccatttaatttatcacatagattgagaaggcaagctaaaagctttaaaaatgccctttatattttgagtgatttcagagttgaacactagtatgctatctaaatttgctgctcatttctttaaactgtggcaattaaaggcatccttatacatgacttaatcgtgaaatgtttgtcacttttactgcacagacttatctgcaatcataactggttagttcnnnnnnnnnnnnnnnnnnnaatgaaactggtaccatctgtgctttcacaaaaaacttccaatgccgtttttgagaactaacctaactagtcatgctaaccagaaaatccactggggaggaggttccttttgaaacaaaatgctgttcagttagtaaccaagttactttgatttcaaaagcagctgtgtttctgatgagtactgaacaaatgtgtgtaattttctgtgccagacttacactttgttttcaagcactgcaatgtgggatggatggttagaaacataatatagtagggtttctgtttaactctttcaggactgaactgtatctccttttgttaattccccgtgtcgtgataaatgttttgccagcatttcagtactgtgtttggtcccgaatggtaggttttattatgctcattttttagcctaatttcttggtacccttgccagccatggctcctc

SEQ ID NO: 40941 - DNA, 351 bp, Macaca Mulatta
atacataacagtggaaaaatggcatcttagcacactcagaatttattgtgcagcagttgtgtattttagggaatctgtagttaaaaggaagagatccaaaggtcctgataacatttcttgatgtttcagaagagttgtcaatgagtagtgtctggatttcctctctgtacccctcaccctgccattttctcctttattcttctaagattgttagcgttgttactcaaaacatacacatacaatataccggatggtgctattctaatggtatttgttcacataatctaacattcttactgcttatactatatacatatttaattttgttgggagcaagaaggttttcaagaa

SEQ ID NO: 40942 - DNA, 191 bp, Macaca Mulatta
atggagaatgggagcatcttgtcagacaaggacctccgtgctgaagtggatacattcatgttcgagggccacgacaccacagccagtgggatctcctggattctgtatgctctggccacacaccccaagcatcaggagaggtgccgggaagagatccatggcctcctgggtgatggagcctccatcacctg

SEQ ID NO: 40943 - DNA, 585 bp, Macaca Mulatta
gcagttacaaactaattcttgtacattttccctctcactaaaaaaaataactaattgatagttgccactcacatgaacaaggtatgatcaggtttgggatcgtacacccaaaacctatgtttctttaccttatattcttaaaacttgagacatgatttttctagaataaattaagatttcatgtacaatagagtccttttcctaatactgttatggagaaaccaagttgactaccttatgagagatcagatatttcccttatctcattatattcacagcatatgtttggacatgcatttcaccaagaaccatgtagtaataagataaatggtaactgaggcactgtgaaatttttagaacttgattccccaggacatggtatagcaaactaaactatttattcgaaagtaacccaactaattgaagtgaaaaaaattattgaatcacaatgaacaaacgtaaaacaacacttaaatgagaattctgtgtcttttttggttttatctgtgatttattttgtcctgtattaaggaaaggttatctttatcattcttctaatatgttttggtttctctaatagttcat

SEQ ID NO: 40944 - DNA, 650 bp, Macaca Mulatta
  misc_feature (1)...(650): n = A,T,C or G
tatccacacacacatatgcatatgcnaggcatatatatatatatatctccacacacacatatatataattgttttatatgtgaaaatgagcctgcagctgaaacggaaatgttgctgctttcaatctgtctagtgtatctcattgttcatcttatcaccagatagtagctatgtgatttttggaaaattatttaatggctttaagatttagttttcccgtaagtgatacgaaaataataaaagtatctcataagatttttgctagaattaaatgagacaaatatgcaaagtgtttagaacagtgctggacacattatattatctcttgttatgagtactatgagatcaggctacaacaagtaataatacactaatttttgtgatatctacttattttataagataataaaaacaaaatgcataaannnnnnnnnnnnnnnnnnnnnnnnnnnnnnnnnnnnnnnnnnnnnnnnnnnnnnnnnnnnnnnnnnnnnnnnnnnnnnnnnnnnnnnnnnnnnnnnnnnnnnnnnnnnnnnnnnnnnnnnnnnnnnnnnnnnnnnnnnnnnnnnnnnnnnnnnnnnnnnnnnnnnnnnnnnnnnnnnnnnnnnnnnnnnnnnnnnnnnnnnnnnnnnnnnnnnnnnnnnnnnnnn

SEQ ID NO: 40945 - DNA, 645 bp, Macaca Mulatta
  misc_feature (1)...(645): n = A,T,C or G
tgggtccgcctggaggagagtgacgtggtaccgcaactccaggtccgtgtcctggacaggcacatctccactgagctgcagttccctcgccatgggcattcccaccacagccagatggtggccagcagtgcctgcctgtctctctggactcctgtgttctgggtgctggtgctggctttccaaacagagacacctctcctgtaacgaccagaagtaccaggctaataccctgaccccttggacttgaaggatggccattcctgtactccacattctggtctagccttgttgggcccaatccaacactgaaaaagaagcccagtgttgattcttctctttccaaggaatgagactttgggttatccaactttggggggaggtgtacagttttgtaacataatgagttgtgtgaaaataaattataaatgagttgtatnnnnnnnnnnnnnnnnnnnnnnnnnnnnnnnnnnnnnnnnnnnnnnnnnnnnnnnnnnnnnnnnnnnnnnnnnnnnnnnnnnnnnnnnnnnnnnnnnnnnnnnnnnnnnnnnnnnnnnngannnnnnnnnnnnnnnnnnnnnnnnnnnnnnnnnnnnnnnnnnnnnnnnnnnnnnnnnnnnnnnnnnnnnnnnnnnnnnnnnnnnnntc

SEQ ID NO: 40946 - DNA, 638 bp, Macaca Mulatta
ctagcattagtgcacatggtagtttttctaattaaattgtattcaaggtagaaatgatcatgtgagaaagttatatgattgagctactactgtcacctcttacaatgactagtgttatctaatagaaactttcatacatacacaatagaaaacaattattacactttacattgaaaaacgtaatatgtggctcatgtagtgtttagaaaaatctgtagttgattggttcatcaactatgtattgtgtacctacctataggtgtcaggtacaatgttaggaactgtagaatcaaatgtaaatagaagacagtcccagccctcatggagccaagaatctaatagtgaatctgtttgtacagacatcatcatgtttcagaacttttaaaacaaaacaatgcaatctgtctttagcttgaaagaatgtaattgatttcttatctctgttttgaaatttttatttccttgctcttctgcagagtcaggtaatggttccttgtataaatgctacttttcttccatgtctcaaagtgggttttgttcctctccttgcttccctattttccaataattctctgtctccccttctcttggaaaaggcattaatatggtgagtctcatatgggaaccattccatggga

SEQ ID NO: 40947 - DNA, 614 bp, Macaca Mulatta
  misc_feature (1)...(614): n = A,T,C or G
ggggagaagactgtgtatgctctgaatcagcttccaatatatgctactgtttctccaatagccaggattcatgggtccaggaatcaaagggtggaagtggaagtggcaccactcaccatcacccctagtgatccactagtaacatttttgcttcctgttctctagacatttttgcttcctgtcctctaagccagcagaactggcttagaggtcttagttccagagggaggaacaccaccaccaggagacacacaacgattccattaaactggaagttaagatccccgcctgggcactttgggctcctcctacctttacgtncacaggctaagaatggagttacactgttgaatgggggtgattgacctgaactaccaagatgaaattagtctaaccctctcacccaagcaaggaaactgatgcctgggctaggccacccctggatttaacgcccaactgaaaaatttttccaaacttgggtttcccgaacccttcccaaattgttttccccctttaaaacctttggccattttcaggggtttagggggcgaaaaacattttaaacctcccccctcccgggcccctttgaacccaaaagtttttggcacactccc

SEQ ID NO: 40948 - DNA, 668 bp, Macaca Mulatta
  misc_feature (1)...(668): n = A,T,C or G
ggggacccactagcagcannnnnnnnnnnnnnnnnnnnnnnnnnnnnnnnnnnnnnnnnnnnnnnnnnnnnnnnnnnnnnnnnnnnnnnnnnnnnctnnnnnnnnnnnnnnnnnnntcttcacaannnnnnnnnnnnnnnnnnnnnnnnnnnnnnnnnnnnnnnnnnnnnnnnnnnnnnnnnnnnnnnnnnnnnnnnnnnnnnnnnnnnnnnnnnnnnnnnnnnnnnnnnnnnnnnnnnnnnnnnnnnnnnnnnnnnnnnnnnnnnnnnnnnnnnnnnnnnnnnnnnnnnnnnnnnnnnnnnnnnnnnnnnnnnnnnnnnnnnnnnnnnnnnnnnnnnnnnnnnnnnnnnnnnnnnnaactttactaacactcccagaaccaaaaactaaccaccccctgatcctcccacttttacctgaataagccaggctnnnnnnnnnnnnnnnnnnnnnnncacccccattttgccctaacccctgtgtaacttcccaaaaccccttggtcaaaacccccttttgggaggatcaaaattctcttgccccaaatcccccaaaaataggggggtccggnnnnnnnnnnnnnnnnnnnnctcccttaaccccttaaaaagaaaaagaagtttcccccctccccaaatttcccttgggggggaaataaaaagggccaa

SEQ ID NO: 40949 - DNA, 784 bp, Macaca Mulatta
cctggtgtgcaggaaccgggctcacggcctcgtgtcattctccggcctctggtgcggcgacccgaagacccccgatgtgtacacgcgggtgtcctcctttgtggcctggatctgggacgtggttcggcggagcagcccccagcccagacccctgcgtgggaccaccaggcccccaggaggagtcgcctgagccacagccttgcagcatgcaaatgaggttgctgctccaggcctggaatgttccatggctgcggcagggggtccctgatgttcagggttggggtgggacggccagcggcgggggacacccgttccatatgcaaagggcagaatctaacccagtaaaatgttaactgacttccagcctcacccgcgggcggtcagcggcagggtccacccgtgtttgtgtcacggctccttgtccgcagcccctttccaccttcccatgccccccaccgtgaacccctctgggtccacctccgcaggcctgcaacccacactcatgcagcctcccacctggaacgctgtgcctccacctccctccagccggctaaccacagcacagatgagtaggctgggaaacggaggctaggaagccctgagctccctctgcagggcgtgggggccgctggacaccagtgcgggcttgcgccggccacaccatagaatcccaagagggtctggcctcccatccagcctggcgttcatcctctgaaaaccacggagaatagcgccaggtgcacggcaagtcccagctgatgttactgtcacagcttgttattgt

SEQ ID NO: 40950 - DNA, 749 bp, Macaca Mulatta
gaacttctagacgtgcctcccttgtaattaaatgttttaaatgggataaagtactgtgattttggatctgtggaaaccaatccttatagtaatatcaaaagctacttctgactacctataataagaccgtctaaaatgcggtatttgtttcttaaaatatatgcaatttgcattgcaagttgtagaataactaacactaaatatagcaacaaactccaataacttagggcatcatacagtatgtaatatatattacatgttcaacagaggttggcaggttgtgaggagacgtgtcttcccaacaaaataactcagaaacttggactagtaggtgctcccatcttgcagcagcattacctggaaacatgttatctgaagttgcaatggcaggggagtagagagacagaggttgagagagacatgggcttttaactgcctctgccccaaagcaactaacatcactttcacaaatcactggcctaaaccagccacatggtcccggcttagctacaaggaatgagaaatgtagtggagtataaggaatatttgatgagaactatctctgccacatacaatttgaacatcagctttgggcactgacatgataaatcaaacttcacagttgacatgaaaagcacattttgaatgtgtccagatattctgaaggcataagcaaaggaaatcaatacatcagtaagaaattatttcaattatctactaaattttgaaacgaattctctgacaagttg

SEQ ID NO: 40951 - DNA, 824 bp, Macaca Mulatta
  misc_feature (1)...(824): n = A,T,C or G
ggtgcgnnnnnnnnnnnnnnnnnnnnnnnnnnnnnnnnnnnnnnnnntgggcggatcatttgaggcnnnnnnnnnnnnnnnnnnnnnnnnnnnnnnncnnnnnnnnnnnnnnnnnnnnnnnnnnnnnnnnnnnnnnntgtggtgggannnnnnnnnnnnnnnngnnnnnnnnnnnnnnnnnnnnnnnnnnnnnnnnnnnnnnnntggaggctgcaataagccgaaatagcaccactgcactgcactctagcctgggcaacaaagcannnnnnnnnnnnnnnnnnnnnnnnnnnnnnnnnnncatttagaaatccaagagtttaaaagaacaacaaacagactgggcatggtggctcacgtnnnnnnnnnnnnnnnnnnnnngagctactgcaggcaagtcactaatgaaacaaattaccaagcaaacaacacaatcaacctctagtggaaggagaaaccagtatagcaggtgtctccaacccctggatcatggactggtactggtccgtagcctgttaagaaccccgctggccagcaggaggtgaaccatgggtggggtaaagctgaactccacctccccgtcaactcaacagtggcattagggtttcccacaggagtggtgaacccctatgtgaaactgcacatgggcagggatctagggttccatgtttccttgtggaaactctaataaaatgccaaagcaacttttaatcattactgaaaaccatccccctcgtccccccaccccccagtgtgaaaaaattattcttttcattgaaaccctgtcccttggtggccacaaaaaaggttgtggggaatcacta

SEQ ID NO: 40952 - DNA, 778 bp, Macaca Mulatta
ggagcaggtatccgttttaacaagttttctagatgattcatatttagataaaatgtttgggaggtactgccctatcagcgtatcacagagacttctacaaatgtatcaaactttaatggagagttacagaaatgaaagggaatttgagtttaggagatgatccttataggatgctccttgttcctagctttgcctaggtgctctgcagtgtgctttctctccaagagttacatagtaggcagctccacccagaagaacattttcctcaagtttgagcctttttggctaaaatcaatggcaagggggttggatttgcaaagtttcactaaagtgtgtaattatcaatggggcgatggttggaatatacacatgtacgcacacacatccctagacaaatgcttccccaagataccacagcctacattcacaaagattttgcaagagagcccaaccaatctgcccagataggttttcttcagttcagtaaagctttctaatttatatgtacttttcaaacaatttttattacatatataatgcactgtatatttgttgtaaaaaatccaaaatatccaggcaagggaaattgaccaaacatatcacatattcaatcacacggccaagagattacacctgtttaacatataagtgtggtcctcccggggatgaggatgaaattggtttgaagatgcataacatataattgataatttataattgtaaaaattaaaacacccctttttgtattaaaaatggcttgggcagtaaccaaaaaaaa

SEQ ID NO: 40953 - DNA, 380 bp, Macaca Mulatta
taggggagggcaaaggtgagagggaggtattacactaaacttctccttgcccatacagctctcaatgccatagatggattctggtcattcattttgcaggattctgggtgtttgctggagacatgaggagttactataaaagttaactgaggtttatggcacagcacacaaatgggaaatcaatgacagattttcctagtacatacttgccttttgtataaagctagttgcccaggaactccactttctcactctatagtattttttcctcccttccttccttctctttcaacttcaccctgtagtctgttacctcctgagagttttaattgatagttttacgtggggaaggtgtttttttggccagttgactgagtatt

SEQ ID NO: 40954 - DNA, 897 bp, Macaca Mulatta
  misc_feature (1)...(897): n = A,T,C or G
gggcaaaatggaaaaccaatatccattgtaatatgggatgaaagtttgagaatcacaaattcaaatgcttataaggtccagacaaaagtgaaaaaatggtgctgatttgagggaagggtagtagggagtgttgaggcctgtggtgaattggtgactctatgctactgggataaacaagtacgaagtgaaaccctagtgagggttaggtttgggggttgggaaaaagccagacaatgaaaattttctatttttcccaggctgtatcatagccctgaagagttgtctaaaattagacaacaggtgtggactacagaaagacaatggttgtgtgtcatctcttccctgttgtacccccactgggcctaaaacataacaagtagcatagacacttctcttgttccctgataccgtatgactggcgttatttactataggcaattcccttaataaaagattggagttaccttcacacaaggatactacttggtcatcatacatactagggagtccggaagccacaggagggagaggggtaggttttttgactgagacgcaacaaacgcaatagatttatttttgtccctaatatccccgcccccaccggaatattaaattctgctttttttatttcctgacgaatatatgacccgtcatcaccctctctcataatatattaacctcctgaagaataacgcgcggaagtatattgctgggaagcagcggtaggttatagtatcacccaccaaatttctggactaaattccactactaagatgtttaaccgccgtatttgttaacgcgaattcgcaacgcaatcatctgaataatatttgtcatccaggcattatcgcaccactttctctgataccggataatttttaaccgtcaacttataan

SEQ ID NO: 40955 - DNA, 202 bp, Macaca Mulatta
gctgttccccttgaagttcgtccagctctttgtccacgatgaaagccggtgtcagctcgaggtcaagttgaacaccagccgaaccttctacttgcgactgcgcgccccactcgagacccgagaccgggagttcggccagtgggtgcggctgctctaccgcctgcgcttcctctccgcctctgccgtgcccttcacgcaggag

SEQ ID NO: 40956 - DNA, 355 bp, Macaca Mulatta
ctccgagcatcgctctccggcaaccgaagccacggaaggaggagggggatccagctaaggcagcgactaagggaacccgaggagaacgagagggcgacgtccggagcggcggcagagccacgggacgctgtgtgaggctggcaaggcggtgtcacctagttctttcgggctccgccgccgccggtggagaacacgaggccagcattgcgacccccaaatctcctcctcaggatctgacctcagtctcctaaccccgcaacttccatcccggccttggaaaatcccgcgagaacgggctgccgaattgtcactgggatctcgcgagaacgaaatcttcctttccgtgggcggagcc

SEQ ID NO: 40957 - DNA, 139 bp, Macaca Mulatta
gttctggtgatagagccaaccaaagtgtaccagccttcttacgtttccataaacaatgaagccgaggagagaatggtttctttatggcatgtctcacccacagaaatggtaaggaggaaaactcacaagcaattgaatc

SEQ ID NO: 40958 - DNA, 796 bp, Macaca Mulatta
  misc_feature (1)...(796): n = A,T,C or G
tatcccgggttaatttggggaagtttggaggccaaagaaagattggtttgggggccccagggagttttgagggaaaggccttgggcaaacctaaccaaggactgtacctggaacttaaaaattttaattccttggaaatggtggaaaatttaaatttttggctttcaaaatttgttccgcaaagggatttttttgggtgtgttttgtaaagttgtccatgaagagtttccatgaaacatttcatctattgttgcaaataaacagttctcgaagcagagactctttaataccaatatggtaatacttcactgtcataattttgtcattgtagtttatctaaactattgacttggccgggccccgtagctcaagcctataatcccagcgccgtgggaggcagaggtgggggatgaccnnnnnnnnnnnnnnnnnnntcagcctggccagcatggtgaaaccttgcctctaaaagaagaaaagacacaaaaattagccgggcaggctggtgcatgcttgtattcccagctgctcaggaggccgaggcgggaggatcgcttcaactagggacgcagaagctgcagtgagccaagatcacactgttgcactccagccagggtgacagagcaagactacatcttaaaacataaaatgaccactcaaagtccatctatcacattctgcaattttgggttttggaagtttttaggtttccttgtttaaaaaatcattgaaagcgcctgcataccatgggccactggaggtcagcaaacatatttgtgtgtatcctggagtaccc

SEQ ID NO: 40959 - DNA, 1043 bp, Macaca Mulatta
  misc_feature (1)...(1043): n = A,T,C or G
gggcaggtttctttccgtattttatatgccactatttgtattaacatttttgtaaaggcaaaatcaaaggtgatatatgacttgccctcatagattaaaaaatggagattctggagattcgtccatctcaaattttccaagctagatcatttgttaaatagctggtcaattgtacaaatgactgatttcatgtctattaattttttgaatatctgaggtagtttttacagattcggcgtgtgattaatgcagagttactctgttaatnnnnnnnnnnnnnnnnnnctctcctttttctttataataccaaatagtgtctaaagagaagaattggctgtaatctaagttatcccgcccaagaaggggtcacattaacctacgttcgaacccctttaatgtaaaattagcaattaaaagacccatgcaccaccggtatttggtgcccatgcaatttccattttaataaaacaggcccccccatattttattggaaaattctttaaatatttgaaaagcactatcagccaaactctaaaatccccctattatattcagtggggttgtcattcactgagtgggtgcaaatgaatcaagattacaccacaatacggcaaatttggagagaataattttcatcgaagaatttttttaacacaggggagaaacataaaatataaataaccaccatggngtgtggggaatttcgggcacaagaaacatacggcgacaaagataatagggggggtccgctacttgaccctgagagcnataacaggtggatagggcaggctcttaatcaacacggggaaaaagaggcatattttccctcactctagaatcttgcgagcgggattccgacactctaactcgacaaactcccgaggagacaatggctaaataaaccttttggattcctatttatagggcggaggatcgtactgtattatcctacagatcatgagagggggagaaaaatgatcaatctcgcgaggaagaaatgagaagaaaagagatcttgtcctgggagctgcgcggcgaaggaa

SEQ ID NO: 40960 - DNA, 1794 bp, Macaca Mulatta
  misc_feature (1)...(1794): n = A,T,C or G
ctcctcctggtgctctcaggggccctgacccagacctgggccggctctcactccatgaggtatttctacacctccatgtcccggcccggccgcggggagccccgcttcatctccgtgggctacgtggacgacacgcagttcgtgcggttcgacagcgacgccgagagtccgaggatggagccgcgggcgccgtggatggagcaggaggggccggagtattgggaaggggagacacggagagccaaggcccacgcacagactgaccgagtggacctggggaccctgcgcggctactacaaccagagcgagggggtgagtgaccccggcccggggcgcaggtcacgacccctccccatccccccacggacggcccgggtcgccccgagtctccgggtccgagatccgccccgaggccgcgggacccgcccagaccctcgaccggggagagccccaggcgcctttacccggtttcattttcagttgaggccaaaatccccgcgggttggtcggggcggggcggggctcggggggctgggctgaccgcgggggcggggccaggggtctcacaccttccagtggatgtctggctgcgacctgggacccgacgggcgcctcctccgcgggtatcaacagttcgcctacgacggcaaggattacatcgccctgaacgaggacctgcgctcctggaccgccgcggacatggcggctcagaacacccagcgcaagtgggaggcggcccgtgtggcggagcagctgagagcctacctggaggggagtcccccaaagacacacgtgacccaccaccccgtctctgaccatgaggccaccctgaggtgctgggccctgggcttctaccctgcgtcgatcacactgacctggcagcgggatggggaggaccaaactcaggacaccgagcttgtggagaccaggccaggaggagatggaaccttccagaagtgggcagctgtggtggtgccttctggagaagagcagagatacacgtgccatgtgcagcacgagggattgccggagcccctcaccctgagatgggagccatcttcccagtccaccatccccatcgtgggcattgttgctggcctggctgtcctagcagttgtggtcaccggagctgtggtcgctgttgtgatgtggaggaggaagagctcaggtggaaaaggagggagctactttcaggctgcgtccaacgacagtgccccagggttctgatgagtctctcacggcttgaagagccttagaggagtgtcttgtgtggaactgagaagcaggatttcttcatgcctcccttttaaagagactctggcatttctttctgcaaaggcatctgaatgtgtctgcgtccctgtagcataatgtgaggaggtggagagacagcccatccctgtgtccagcgtgaccccttttcccacgctgaccagtgtttcctccccagtcatctttcctgttccagagaggtgggactggatgtctccatctcagtctcaactttatgtgcactaagctgcaacttcttacttccctactgaaaataagaatctgaatataaatttgttttctcaaatatttgctatgagaggttgatggattaactaaataagtaaaccctagaatttcagagagcaaataaagacctaagaaccttccnnnnnnnnnnnnnnnnnnnnnnnnnnnnnnnnnnnnnnnnnnnnnnnnnnnnnnnnnnnnnnnnnnnnnnnnnnnnnnnnnnnnnnnnnnnnnnnnnnnnnnnnnnnnnnnnngcctggtgtaacccaactt

SEQ ID NO: 40961 - DNA, 701 bp, Macaca Mulatta
  misc_feature (1)...(701): n = A,T,C or G
ggcaagatgttaaaaaagagaatcctttacagttcaagtttagagctaaattctttcctgaagatgtttctgaggaattaattcaagaaataacccagagactcttcttcttgcaagttaaagaagccatcttaaatgatgagatatattgcccaccagaaactgcagttcttttggcttcctatgctgtccaagccaagtatggagattataataaagagattcataagccaggctacctggctaatgatagactcctaccccagcgtgtattggaacaacacaaactaacaaaagaacagtgggaagaaagaatacagaactggcatgaagaacatagaggaatgttaagggaggattctatgatggaatacctgaagattgcacaagatctagaaatgtatggagtcaactattttnnnnnnnnnnnnnnnnnnnggaactgaattgtggctaggtgttgatgccttgggtctgaatatttatgagcatgatgacaagttaacacctaaaattggttttccctggagtgaaatcagaaatatttcatttaatgacaaaaaatttgttataaaaccaatcgacaaaaaggcacccgattttgttttttatgcacctcgtctgagaaatcaataagcgggattttgggcctttatgttatggggaaaaaccatggaaactataacatgccgaaaagaaaa

SEQ ID NO: 40962 - DNA, 445 bp, Macaca Mulatta
aaggagatcttatccctaagtgaaagggactttatattaattatcaattataacaatatataaaatacgtaaaagagatatagcgctgcaggtcatcaaggtcaaacatttaaaacaaaattaaactaaattataaggaggattaaatggcttttgtctttgtaaataaaagaatgtgtgtgcattgattgcctatgtagaaggatttataaatcttttggcatggtcgatttgtaataaattactgaaaatgtgggattacaatgaaactcttaaagtgtgccacagaagtcaaagaagccacctaagtcattggatgggcatgagtgacacactctggaatcatcttgatgctactttggggctgcccttgcagggtgggacatcagcttcactaaggggctcaccagagactccttcaagggagcattccttgctttccatg

SEQ ID NO: 40963 - DNA, 649 bp, Macaca Mulatta
  misc_feature (1)...(649): n = A,T,C or G
ggggtgcctgtggtcccagctgctcgggagcttgaggcagggggannnnnnnnnnnnnnnnnnnnnnnnnnnnnnnnnnnnnnnnnnnnnnnnnnnnnnnnnnnnnnnnnnnnnnnnnnnnnnnnnnnnnnnnnnnnnnnnnnnnnnnnngnnnnnnnnnnnnnnnnnnnnnntgtgttagccaggatggtctcaatctcctgaccttgtgatctgcctgcctcggcctctcagggtgctggggttgcaggtgtgagccaccacgcccagcaatgttttcttaataagtatagtttttctagggaaagttaattcatttttgtctagtacatacatgtaaatatattaatgtttttgtgcttgtgatgtagtaaggagatgtatatagaaattcattgagatatatagatactcacttgcctaggcagtttccgtctttctgaagaatgttttacagcaaaattttctattttattttattaaataatgacacgtcaaacaatgtcacatccaaaacactagttttatcaatttctagcagtaataatagacttgctgtaagttttgttttctgatgtcatacccttgtcatacacattattaaatgaccatacgatgtatgaagtagacaaaatttactcaactcatt

SEQ ID NO: 40964 - DNA, 630 bp, Macaca Mulatta
  misc_feature (1)...(630): n = A,T,C or G
cctgtnnnnnnnnnnnnnnnnnnnnnnnnnnnnnggccctgggaaaaagtttttcaaaggaaaaaggttttttcacccaaaaggattaaaaacccctttggggattttgaaaagcccagaattttaaaagcctttaaggcggttggggagagagattcttttgtagggtcctggaggaagaacctcctggaaaaacttgggaatctttttgaaagttaacccctgtgcaaaggcccaggaaggaaaccccattttttgccagtcaagcaataaaaaattcgggttgaaggagcaaccgttgccggtggcggcgttggcgcnnnnnnnnnnnnnnnnnnnnctagaggccaattcagatgagaaaggggattgtagtcaagaagcgttttagagttgtcagtagctgtctacgttcttccattcttctaacacatttcatgctgctgcttctaggtacatatgttgttctgtacaggcagaaggcatgtagccctataatcccagcgctttgggaagccgagtagggagaatcacttgaagccaggagttcaaggctagtctgggcatcatggtgagatgctgtctcttgtatcatacacagaaattcatttgaggttcggtgtggtcccc

SEQ ID NO: 40965 - DNA, 252 bp, Macaca Mulatta
agcaactatagctacacttcttattcattaaataaaggggttaaactagaaagacgatctctgatatcctttcaccttttcaccttaaagcaacaaatctctgtagagtatatgtgagttcagtcccttgtaaatgattgggacgtgtcgcctcttttcctttatatttctagcctctgctattcataagtaagaaaataagaaaaatactaacttcccttaacagtaactactcaatgtcccaaaacccct

SEQ ID NO: 40966 - DNA, 207 bp, Macaca Mulatta
  misc_feature (1)...(207): n = A,T,C or G
ctctggcttgtccccagcacccttgccccagaccattttaaaccttgccaccgcattccaggtccttgtgcccctgagtggttggtaaacgtgcactgtttgggggagaagatgagactgagggtttgccctcagcctgggaacctctcccctctgtctgcttagncccttggggccccagccctggctcccctatgcctgcttcag

SEQ ID NO: 40967 - DNA, 624 bp, Macaca Mulatta
  misc_feature (1)...(624): n = A,T,C or G
aatactctctggcttgcactatatataaccttaaaattcagcgaaatatgactgcccnccnactcagacgcacaagcactactgctccactacaactagggcaacgtatatttggtcatatgacacagagcattttaaatgagaagaatttcaagtccttttgtcttctatgtattttaactaagaaatacatacatcttaaatacatccatctttctggagagaaaaggtgttgagaaaattgtttatccagacctttgctcagcaataaatgtttatactcggtatgcttagcatcatccttggactgagagaatctcatacacatagataattaacctccaaatggcctgtgtgtttctgcaagaattagtgctgctccgtactgccagatcggtgctggcaggtttccaaaatacagaattcttcttcacagacactgtcagatggaatttgtgttcccatatatttgaaatgagtgataataggcgaccattcttaaagttactttactgctaattgtttaccaaaactttgtgctctgacttgctgatcaccaactttcataacgatataagtaacatggtaaacacaatatttatcatatgtcttacggggtatgag

SEQ ID NO: 40968 - DNA, 1065 bp, Macaca Mulatta
tgctaaaaaggcatgaatggtcagttaattgaaaattgccattaatacagtattttcaggttttaaatgttaactaatttaggaaatttttttgtctgaagactttgggtatgaaatcttgagtcacgtgtacattaacaatattggtttaaatactcattttgatctgtgttaaatgactgtaatggagttaagaattttgccatctagtttcagagtggttaggttcgtaggagtctctcagtaactcctcagtaggccaaaagcattttcttttatttaagagtcagtttcaaaatactcaatctgttgtgcatgccatctgaagatttctccctgtagctactgctcctacgtcctgtggaagtttatattttgcaagctccccatccttaaaatagatttatccaagctttccattttatgacttctccacaatgtctgtttaggctcagttttaatgttttctgccacaactaatcttgcaccttgtttgttctattagactaatcttgaattagcatttgttgtattagattatatactgctagatcgaaagtttgatgctaggtacttgaacatttattattctcttctactttggggcatttttggaaatttcaataatacaaagcttaaaaaaagtcattacatatatcaagagtacaattcataaacctctctcttttaggactacttatccataataatgatgaaaactattattggtagagccatatcaggcattgtgctagagatgcactttatacaaggtgtcacatttaatctatagaacaattctcaaaggtaaacagtatcatccccatttttcgcctgaaaactgaggttcagagaggccatccactttactccccttctgaaccgttttgtaatggccagaggattgtgtaatttaaagggggattttggggtcccaaaggcttttcccccggcttcttacgaagcccaagggaagaaaaaccttttcctctcacatttcttccttggtcctggaggaaaaggggcataccccccctaaatttcccccgggtttctctttaaaac

SEQ ID NO: 40969 - DNA, 845 bp, Macaca Mulatta
cggggtactggtgtgtgcggttcgtctaagggggtgttccactaagcggggcggaggaccagcgtcaacaaaagggtcccaaaacactacagatgtgaaacggagacgcggcgccgggaagccacgggatgcacgaagcaatgccgtggcactaaccaggcgccggaagggcaaataaaatgggcgcaaaggttacggactgggcccgggggggaggcccgcggcaaggccccctcaacaaggtccaacgggtctgggggattggtttgggtggaagaaaagataagagaagtggctaggcccctgggctagcgtaataaagcgggaagggagagaagatgcaaataggcccaataagaaataagggcgatattaccactgaccccccagaaatacaaaaaccatcagagaatattataaacacctctatgcacatcaactagaacatctagaagaaatggataaattcctggacacatacaccctcctaagactaaaccagaaagaaattgaattcctgaacagaccaataacgagttctgaaattaagacagtaataaatagtctactagccaagaaaagcccaggaccaaatggattcacagctgaattctagcaggtgtacaaagagctggtaatatttctactgaaactatttcaaaaattgaaaaggaaggagtccttcctaactcattttatgaggtcagcatcaccctgataccaaaacctggcagaaatgcaactaaaaatgaaaacttcaagacaatatccttgatgaacatcaatgcaaaaattcccgtgagatttcttactctcagtcaagtccacactcaacattcagcccc

SEQ ID NO: 40970 - DNA, 417 bp, Macaca Mulatta
  misc_feature (1)...(417): n = A,T,C or G
gggtttggagccaacagaaggaggtggagcagaatcctggatccctcagtgttccagagggagccactgcctctctcaactgcacttacagcaacagtgcttttcaatatttcatgtggtacagacagtattccagaaaaggccctcagttgctgatttacatatactccagtggtaacaaagaagatggaaggtttacagcactggtcgataaatccagcaagtatatttccttgttcatcagagactcacagcccagtgattcagccacctacttctgtgcaatgagctcagattaataatgcaggcaacgtgctcatcttttggagtgggaacaaggttaatggtctttccacnnnnnnnnnnnnnnnnnnnnnnnnnnnnccagctgagaggctctaaatccaatgacacgtc

SEQ ID NO: 40971 - DNA, 513 bp, Macaca Mulatta
  misc_feature (1)...(513): n = A,T,C or G
gaaatctcattggaattggaagcagcagtgcaagaaaaagaagaaatgaagagcagagttcataaatacataacagaggtgtcacgatgggagagcttaatggctgccaaggnaggaaaaagaaaatcaagatttgttagatagatttcagatgcttcataaccgtgctgaagactgggaggtcaaagcccatcaagcggagggagaaagcagctcagttcgactggaacttctttctattgacactgagaggagacatcttcgagaaagagtggagctattagaaaaagaaattcaagagnncataaatgcccatcatgcttatgaatctcagatctcatcaatggcaaaagccatgtctcgattagaagaagagctgagacatcaagaagatgagaaagcaacagtattaaatgacttatcatctcttagagaactttgcattaaacttgattcaggcaaagatattatgacgcagcaactgaattccaaaaaccttgagtttgagagggt

SEQ ID NO: 40972 - DNA, 188 bp, Macaca Mulatta
aggagagccggcagccatcaactcctgttcattgtcaatgaagaaggctgggaggcgctatttttccagtgccagaatcaggctgactagccgtaagtatgcaaaactatctttggtcattttgacctgtgtaaatcccactagcaagtatagagcttggatgcccccaaaatataaggcacttccac

SEQ ID NO: 40973 - DNA, 420 bp, Macaca Mulatta
atgaagaccattctcagcaatcagactgtcgacattccagaaaatgtcgacattaccctgaagggacgcacagttatcgtgaagggccccagaggaaccctgcggagggacttcaatcacatcaatgtagaactcagttttcttggaaagaaaaaaaagaggcttcgggttgacaaatggtggggtaacagaaaggaactggctaccgttcggactatttgtagtcatgtacagaacatgatcaagggtgttatactgggcttccgttacaagatgaggtctgtgtatgctcacttcctcatcaacgttgttatccaggagaatgggtctcttgttgaaatccgaaatttcttgagtgaaaaatacatccgcagggttcggatgagaccaggtgttgcttgttcagtatctcaagcccag

SEQ ID NO: 40974 - DNA, 861 bp, Macaca Mulatta
  misc_feature (1)...(861): n = A,T,C or G
ccgaggaagggagaggcggcgggacagttcgggaagctccccccggggctgggaagagctgcaggtcaggacaaggaccggaggaagggaaggagacgggggcggctgggcaaggcccaggccaggacgcgcaggagccacggggaggcagcccggccccacggagggcagtgtcgctcggctccaggacactgaaggcactgaaggcactttctcggagctgacctggggccagcggagggcgaggcggtgcccgcgggaactggccgtgaggtggggggccagaggcgccctcccagccgctgctctgccctggctgcaccctcagaccaggcagaagacgtggggaacgcnnnnnnnnnnnnnnnnnnnnnnnnnnnnnnnnnncagggctgggccgggcgattctggcccctctgccgggagagcgagtgcggggttcggcctggctcagggcggcaggacgtccctcctgtccccgggcgcccccactacagcacaccctccatgaagctggtgtccaggtgctggatgagcacgcgcaggaaggacatctccttgcgggtgttctcgaagataacgcgcgggtcgtcggactggcagcgcaggcagttgggcgccatcaccatggccaggttgcttacatccatcttggtgaccgcgacgttggccggctgcacgaagacctggnnggaagcggatgaggtagcagagcaccatgcggttgatgcggggcagcgcgtgcaccacggccaccgccgcctcggggctgtcgtagtgcgcgatgcactgctcgtagaactcgtgcgggatcaggggctcctccagctcccggtaccacagcttcagcagggatgctgg

SEQ ID NO: 40975 - DNA, 749 bp, Macaca Mulatta
ttagactccagttatgctcactggagactatcccatggtatttaatacgactctgtggcgctctgcagaatataaacctgtttaaatctcagaggtaaacttaaaaagcagaaccaaacaaattgctccttccccaagttgtttcccgttccgtgtgtttaactttgggcgcccaacaccacgcattatgctagccacgtcagtaacacgtttttcggagagtgtaaaaaactctgtttacatttgcctcctccgtgggttgattgaaaatgtataaaactgactgcttctcgccagcgtcagacaaaaagagtgagttgctggtactcactactcttttacttctttcatcaagtattgactcttggaaggccacagtctcaacatgttttttaaaagaagtaacgagcaagtggctgccctgctagaaatcacacaccgatttttgtagaatattttgtgccccaggcgttgatttcactggctccagaacctgcagttcagagaatgatttactgtgatcataaaaatcaaatgggatcagactatgtttgcatttttttagtacttgaataggacacctgaagtttgagagtttgttttcttttagaacacagtcacacgatcaatctggtgaatccttttgtcacagttctcgtgtgtgtgtgcgcgtctgtgtgtgcgtgtgcctgtgtgttaaactgaatggtaacgtcattgctttttggaccattgaatagttgggcagt

SEQ ID NO: 40976 - DNA, 654 bp, Macaca Mulatta
  misc_feature (1)...(654): n = A,T,C or G
tcggggaacagctctcacagtcctagctctcatcctgcctcgagtaccttggacgagtttctttgtttctttgctatacctttgtcatctgtgaatgggacctggactggccccactccgagggccggtctgttctgtcattttctgacttgtcagatttaggtcaggacaggcctgcgccggtggggccagcgctgtagcaggtgaacccangggtgtatcgtttccctttagggcactcttgtcaatgctccctcctccttcctccctgtgctgctctggggaggtctcttggctctgcccagaagtaggaatggtggagacaaagacagcttcacattctcttcaactgtcagcattgagagtggtggattcgggaggagaaaaatgagtcagtggcaactcgttgtgtgtgactctgcagtttatgagtccgcgggagccacagtcgtaggctgaaagtgacccttatttaagaggggctgagtgtgtggatggagctgccctggcactttgatggactaggcggcctggggacactaactgagaagtggatgggtacaggagccagcctgcaatcctcagtgtcttacagtttcctagagaagtgggtgtttcggcgggaaggtggtgggtaaacacctggaacgatcc

SEQ ID NO: 40977 - DNA, 820 bp, Macaca Mulatta
  misc_feature (1)...(820): n = A,T,C or G
gggggaaaataaagcattctgtttggcacgcaccccncanatttgaaaaaggctctatctcaaatgtagtaaattatttcctttcagtttgtgaaagcaggatttggctctgaaggaagctttgccaattttgcttattcatgatcaatcaaggaaaatctaataaattttacaccaaataagaatatagcatatttagtatggttatattcaacgtagagatcacaacttagaagaaatataaagaaatggccgctcccaatcccccacagtcctggagtagataaaaatcaatatctgattcttttaaacattaagtttgaaatagggatggttttctcaagaatagatttggtgataccttgtgtttgctcacactggctcgctatatatgcatatatatttatgtggatagagatacttccatgaaagggctaatatgatgcatatactaaagtgcaaagactttgaccatgtgaatttttcagctgagaatagtcagaaagatcagtacaaccccatggattaggctgaagcatatgaaaatttgctgcatttggtagttaaaaaactgtccccaagtttcataatgggttccacctaatattaactgaaagaaaattatttttcttacctatagggctaaaaaagtttttagttattttaaacattttggaaagtgtttttaaaaaaattgccctttatcctgaacaaaaaccancttttaaggaaccgggcttttccggttttttcagtaatcctaaantctggggggtatgttccgaaaaatataaatttagttaaaaatctaggtaaatgc

SEQ ID NO: 40978 - DNA, 886 bp, Macaca Mulatta
ggtttacccaataagaaattctgaaagtttatttgtaatgaaaaatagcatacagctattaaaactgtaccaaataatccactgaaaaaaatcaaacaatgaacccccccaatccacccaccaccaccaactctgtttcttgaatggtttaaggaaagtacattaaattagaagaaaatgaagtaataaatgaatattttctgaaaattccaaagaggagagctgggtaccatgaagaaattaaagacatagctccagttctgccaaacagataatacaccaaatttttaaatttaccacttacgaagcttatgagaattcttattaaaatggactgtttgggtttaagaggaccacatggaagaaatattccagactctcctgctacccaccactcccctctaatcatgtctccctctgtgggattggcggttcagtctatggtgtggctgcttcccctttttatcattccgtttagaaaacaccccaaactttcattttaaattgctattaatgaataaaaatttagaagggaaaaaattaaaaactttctcaaaaaatcttaaaaattcttgttaccaaaataatattcttttgaaaaagagaattgttttagttaaatccaaaatccagtttttccccttattcttccaccagcattacctttggttgggaacctccaaaatttaagaaagccctttaatcctttcattaaccaaacccctttattggaaaaattaaaggttaatttcttccagcccaccattcctttttcctggaaaaggggacaatttaaatatttttccgaacttggctttacacccccaaaacctaaaaacttgctctcaggaaaacccacaatcccttttaaacgttacaacaccgg

SEQ ID NO: 40979 - DNA, 642 bp, Macaca Mulatta
tacataattccagacacatatttatatgcaaagaaacctctcccttatctagagtcacatccctaatgcacgccacagagttagatgtgatagaatattaaagatcacaaaggtcaatctcttccctcttaggaaaaaggcacattttcccagaatggcagcaccaaaatcaagaaaatcgataattgaacatttctgactacagactaatagaaaatatggacttaactcttatattcaaataaacagtgaattcctaggggaagaaattcattttattctgaatctagtttttattaaaggcaatggtcagagcaaataaacgtatttgtacatatgtgcacctcttaatgctagtttatttatagacctgtaaaatctcaagtacaccagttatttttagctgaatttatatataattttgctaaaatacattttagcaaattcgttagctattaaaagtcactttagaatgcttaaagaattctagttgttggcagcttgtccgtaaaaggcacatatgtcacattctccaagaagtattgaaaatctcttcggtagagtcataatcaaattatgggcaataggtgttataagcaactgcatacatgttcctgtgcataggaataagtactatgaagt

SEQ ID NO: 40980 - DNA, 1263 bp, Macaca Mulatta
  misc_feature (1)...(1263): n = A,T,C or G
cttgtcctgcagacaggtctcctttccttcctcccccacctcctgtcacagattgctcccagggctctcctctgcctcactctcctgtgttcccccctccgccgccagaagctctcactcccttctgctccccacctgattggtgcctttctcccccgcccactgcactgagcccacttcttccagattcacctgtgtccttgccattgcccccacctctcttacctttctcggagcccccacccgccccacctcttgaccccaaattcatgaaagacaccaggccgcctttcacaaattctggccagccagaatcctcccggggatccttgagnnnnnnnnnnnnnnnnnnnnnnnnnnnnnnnnnnnnnnnnnnnnnnnnnnnnnnnnnnnnnnnnnnnnnnnnnnnnnnnnnnnnnnnnnnnnnnnnnnnnnnnnnnnnnnnnnnnnnnnnnnnnnnnnnnnnnnnnnnnnnnnnnnnnnnnnnnnnnnnnnnnnnnnnnnnnnnnnnnnnnnnnnnnnnnnnnnnnnnnnnnnnnnnnnnnnnnnnnnnnnnnnnnnnnnnnnnnnnnnnnnnnnnnnnnnnnnnnnnnnnnnnnnnnnnnnnnnnnnnnnnnnnnnnnnnnnnnnnnnnnnnnnnnnnnnnnnnnnnnnnnnnnnnnnnnnnnnnnnnnnnnnnnnnnnnnnnnnnnnnnnnnnnnnnnnnnnnnnnnnnnnnnnnnnnnnnnnnnnnnnnnnnnnnnnnnnnnnnnnnnnnnnnnnnnnnnnnnnnnnnnnnnnnnnnnnnnnnnnnnnnnnnnnnnnnnnnnnnnnnnnnnnnnnnnnnnnnnnnnnnnnnnnnnnnnnnnnnnnnnnnnnnnnnnnnnnnnnnnnnnnnnnnnnnnnnnnnnnnnnnnnnnnnnnnnnnnnnnnnnnnnnnnnnnnnnnnnnnnnnnnnnnnnnnnnnnnnnnnnnnnnnnnnnnnnnnnnnnnnnnnnnnnnnnnnnnnnnnnnnnnnnnnnnnnnnnnnnnnnnnnnnnnnnnnnnnnnnnnnnnnnnnnnnnnnnnnnnnnnnnnnnnnnnnnnnnnnnnnnnnnnnnnnnnnnnnnnnnnnnnnnnnnnnnnnnnnnnnnnnnnnnnnnnnnnnnnnagctggggtgccggagaccaccgcagccagttcatcctcagaggcctgtgacttcctcaaggaagacgggagtgatgaggtgatgacccctagtcgacccaggaccacagaagacctttttgcagctattcaca

SEQ ID NO: 40981 - DNA, 271 bp, Macaca Mulatta
tggcaacgtagtggtcacctgacagggcagctggtgctctacaacgcgcgactggaagacgccggcctgtacacctgcaccgcgcgcaatgcggctggcctgctgcgggctgacttcccactctctgtggtccagcgagagccggccagggacagagcccccagcatcccagcccccgccgagtgcctaccggatgtgcaggcctgcacgggccccacctccccacaccttgtcctctggcactttgacccacagcggggcagctgcatga

SEQ ID NO: 40982 - DNA, 1049 bp, Macaca Mulatta
atggaaaccaacttctccattcctctgaatgaaactgaggaggtgctccctgagcctgctggccacaccgttctgtggatcttctcattgctagtccatggagtcacctttatcttcggggtcctgggcaatgggcttgtgatctgggtggctggattccgtatgacacgcacagtgaacaccatctgttacctgaacctggccctagctgacttctctttcagtgccatcctaccattccacatggtctcagtcgccatgagagaaaaatggccttttggcacattcctatgtaagttagttcatgttatgatagacatcaacctgtttgtcagtgtctacctgatcaccatcattgctctggaccgctgtatttgtgtcctgcatccagcctgggcccagaaccatcgcaccatgagtctggccaagagggtgatgacgggactctggattctcaccatagtccttaccttaccaaatttcatcttctggactacaataagtactacgaatggggacacatactgtattttcaactatccattctggggtgacactgttgtagagaggatgaacgtgttcatcaccatggccaaggtctctctgatcctccacttcattattggcttcagcatacccatgtccatcatcacagtctgttatgggatcatcgttgccaaaattcacaaaaagcgcatgactaaatccagccgtcccttacacatcttcactgctgtggtggcttctttcttcatctgttggttcccttatgaactaactggcattctaatggcagtctggctcaaagagattttgttaaatggcaaatacaaaatcattcttgtcctgattaacccaacaagctccttggccttttttaacagctgcctcaacccaagtctctacgtcttcatgggtcataacttccaagaaagactgattcgctccttgcccactagtttggagagggccctgactgaggtccctgactcagcccagaccagcaacacacacaccacttctgcttcacctcctgaggagacggagtt

SEQ ID NO: 40983 - DNA, 730 bp, Macaca Mulatta
  misc_feature (1)...(730): n = A,T,C or G
ggacactcagtgtccttacaaccgcagctaaaatggttaatcattctgtcaagaaggtgacagtgtgtgtattggaaaagcagacaatcacattcgaaaatattttgtattattgttagctaaaatcaacctctccttgaatgtagatacagtatatggttttgcagtgaattctgaatggaaaaaaagaatcaagtctgaagtttatgtgaatgtggcttcagatcatttgaaccgatatgtagatatctaggtgaacgtaatcattagaggtgaaagcaaaatttgtttgaaagcctaatgagatgaagcaacattgtctctctctaatctgccaacagtattccatagattatgttgccactatattgattctgagtaatttggcttgtttatgcatggtttaaatgcgggtggctgaatgcagtactttttcaagttactgagtagtagaattcaccactattcactgtctcccagagatgaacannnnnnnnnnnnnnnnnnngacaaagataggctcttggaaggacagagcacacatggatcatgctgtatgagctcactttgtgtccctggaattagtgtttttttgtgtgtgatctggctggcaagtttaatgaatagcccaaatctgtgtttatttttgaggctcctaaaattgtgtgtgaacccccaagtttctgtctagtattatatcccctaaaatggcttttattttgaaagtaaa

SEQ ID NO: 40984 - DNA, 704 bp, Macaca Mulatta
acctctgtattcttcctcagggtcacgatggtgtgctccaagaccacatctcgaacctcacagatggcacaggaagcggtcagtaccccaactagcaagagtggcccgttcattggcagaggttcttgaggatagagtggaaggtgggggcttccctcgtgctgccttcatttttcctaccctcagctcatgggtctgtgctagaggaagacacacggaggctactgtgccccctctcccgcccaaaagagggaaacagggagacgcgtgggtctggagccaagcgtatctctctgtacccatcacacacgaatttgaatcatctgctctttggaatcgcccacaccctgctgcacccacgatgtggctgtaactccattaaagaattgaatatcatctccacggaatctctctctgcacaaaaggggcacatttaattttctgttttttaaacaaaggtttaaaaaatccttttgcaaagtgatgatagaggcacgtggttcgaaattgacaatgcacagaagggtagaccatgaaaagtctctctaccaccccttcctcccagccaaaaatttcctcccactccatgccaatgactgttaactgtttcctgtgtccccaaagagatgttcttctatgtgtgtcaaagcaaagtatatgttcactattcttcctccttggaatatgctgcactcatttttctg

SEQ ID NO: 40985 - DNA, 514 bp, Macaca Mulatta
gctttgttttttgttaacgtgttactcagagtcacccaggcccctcggctgagggtgaaggtggggcgggaggcaggagggggctggcagtgccgcttgtgtggtgtcaacgctgcagggagtcgcggcaccttggtgccctctgagcacctggccgcctgctgtccccagtgcctgtgaaattcgtcatgagatgacccacctgcattaaacctatttttttaatgtgttgatggagtgattgcttaaagctcagttgttttattcctttttgaaggacgtaataatcacccagagcaccatagaaaccatcttctcctgtaagatgggaaagtttccacaaacactcgttgtgatgctggggaagtagcccctgaagccagggttccccttgtgggaagctgccgtggggaggtggcctagctgacaagcaaggatttgtcagcagggcagtcaccaggacactgctatgcaggccggtggaggttgcattcagctgactggcccattcaga

SEQ ID NO: 40986 - DNA, 661 bp, Macaca Mulatta
tgctccacctcctccccgcggggcgtgcagctcagacgctctatggacctagcaggttcggtggtcggggtgaggattgcagtttgctaaagctgccatgacaaaatattatagagtggtggcttaaacaacagaaatttgtttctcactattttggaggctgtgaagtagaagatgaagattctggctgattcaggttctggtatgaagtgaagaagtgagttctcccagaatcagctcccaagacaaggatttgagtgccaatagttcattttgggagtgatcaggagtggccagaaacttattttgggagtgacccagagtcactaataagcaccgagtcaccactcacatcaaatgtagccattttagaggtgccaaaataaaatatatcagccatatttaataaattccagctctactcttctaccctatagcccaagaagcagcaacgatggggttaaaggatcatgaaggatttttcaggaaaatgacaaagttaattttgaatgaaatgccaaaagctgggtattccagcatattaactgatttcgtggaatctaattgttctgtgattgatggagattccttgcttgtcaccgtgcctgtgtgttagatccttccaagtgggtgccgaatctccaacttttctatctggtga

SEQ ID NO: 40987 - DNA, 443 bp, Macaca Mulatta
cttagtggctactgtctccttctcaccttctgccttcggtcaagataaatgaagttttccaccaagaaagccatatggccctttgaggttttgaactctaaccaatgctatcttgttcattgcctttgggtttcagggtcttattttacctcctcctcagcctctctcttctgcagttccatatccacatgagctgcaagagtcccaagaaggccccttcctctgctaatagctgccttattgcactgcttcagtattcacttcagagatagaggatcaaatggtagaaacttttggcaaacttttgaccaaacagagaatggcttacatgggaattaattatgcacttgttcattttactctatagaacaatcccatctgtcctggatctctatgtttcatctcccatgcaaaagaagcaccctacaaagataccttcagtc

SEQ ID NO: 40988 - DNA, 774 bp, Macaca Mulatta
  misc_feature (1)...(774): n = A,T,C or G
ggtgtacttatgtacttttaatgaccataagcaatgacttgttatttgggagctgaagttgatgaggcagatatttgctaagttcttactgactattaaaagcacattataacattaatgtaacttgtttatttcattacttcttggcatagatgtaaagttaattttgttaactatcttctaagagaaactatgctgatacatgtaaagttcctaatgattcatttactgtaattgtttcatataaatttattttgaaacacttgccatttttataggcaatagtaaacacatttctctcagccaggagaggtagcagtaatgatttcttgagaacaaaaatcagccttttgtgaaacacaacattttttcatgtaaggacttccctttcagtaaattgtattaggattgtcaagagcaaacgttactggaagtgcattaataaagcatgtcatttacaactccagttaaattttaattgagttctgcangattccagaagggaggtagttggtcaaaccattgccccttctcccctttattgtaccaatgacgctctcattcttcacaaataagcctttatctcacataatcattcaggacaatttttttgtacaattaccnccacccacttaattaacttctgcattgtaaagccaatttcttccaagtcatctttagaaactctttttagaggtctgtaattttggttttgtgaatatattaataaagtaatttttttcggcccaggcgccggtgcctcatagtctgtaa

SEQ ID NO: 40989 - DNA, 2003 bp, Macaca Mulatta
  misc_feature (1)...(2003): n = A,T,C or G
atgaccattgctacatgtgcaaagtgcaaaagtgttcacaagatctctcttcaagatttgcagaagggtacagggaaggacggtatatatgtctgcttccagtgcagcctcggtgcagctcctcccaattttcattttgtgagcaataatcgcagtgctactcatgttggaaataaaactgaaaacttctcaagtcctgtcagtaacaaatttaaggtaaggaactttaagccaggcaaatactattgtgataaatgtcgattttccacaaaggannnnnnnnnnnnnnnnnnnnnnnnnnnnnnnnnnnnnnnnnnnnnnnnnnnnnnnnnnnnnnnnnnnnnnnnnnnnnnnnnnnnnnnnnnnnnnnnnnnnnnnnnnnnnnnnnnnnnnnnnnnnnnnnnnnnnnnnnnnnnnnnnnnnnnnnnnnnnnnnnnnnnnnnnnnnnnnnnnnnnnnnnnnnnnnnnnnnnnnnnnnnnnnnnnnnnnnnnnnnnnnnnnnnnnnnnnnnnnnnnnnnnnnnnnnnnnnnnnnnnnnnnnnnnnnnnnnnnnnnnnnnnnnnnnnnnnnnnnnnnnnnnnnnnnnnnnnnnnnnnnnnnnnnnnnnnnnnnnnnnnnnnnnnnnnnnnnnnnnnnnnnnnnnnnnnnnnnnnnnnnnnnnnnnnnnnnnnnnnnnnnnnnnnnnnnnnnnnnnnnnnnnnnnnnnnnnnnnnnnnnnnnnnnnnnnnnnnnnnnnnnnnnnnnnnnnnnnnnnnnnnnnnnnnnnnnnnnnnnnnnnnnnnnnnnnnnnnnnnnnnnnnnnnnnnnnnnnnnnnnnnnnnnnnnnnnnnnnnnnnnnnnnnnnnnnnnnnnnnnnnnnnnnnnnnnnnnnnnnnnnnnnnnnnnnnnnnnnnnnnnnnnnnnnnnnnnnnnnnnnnnnnnnnnnnnnnnnnnnnnnnnnnnnnnnnnnnnnnnnnnnnnnnnnnnnnnnnnnnnnnnnnnnnnnnnnnnnnnnnnnnnnnnnnnnnnnnnnnnnnnnnnnnnnnnnnnnnnnnnnnnnnnnnnnnnnnnnnnnnnnnnnnnnnnnnnnnnnnnnnnnnnnnnnnnnnnnnnnnnnnnnnnnnnnnnnnnnnnnnnnnnnnnnnnnnnnnnnnnnnnnnnnnnnnnnnnnnnnnnnnnnnnnnnnnnnnnnnnnnnnnnnnnnnnnnnnnnnnnnnnnnnnnnnnnnnnnnnnnnnnnnnnnnnnnnnnnnnnnnnnnnnnnnnnnnnnnnnnnnnnnnnnnnnnnnnnnnnnnnnnnnnnnnnnnnnnnnnnnnnnnnnnnnnnnnnnnnnnnnnnnnnnnnnnnnnnnnnnnnnnnnnnnnnnnnnnnnnnnnnnnnnnnnnnnnnnnnnnnnnnnnnnnnnnnnnnnnnnnnnnnnnnnnnnnnnnnnnnnnnnnnnnnnnnnnnnnnnnnnnnnnnnnnnnnnnnnnnnnnnnnnnnnaaaagggcttattgcctataagtgaaaatgacttggaatctacaagtaaaatcagtattcctgtaaaaatggttctctctaatagaaagcaggaagataaccagacagaggaacacaaggcagtttcaactgtaggccagatttcctctcaacgtaagagtgagtatttacatataaacataactggagaagatagatctcaacagcctggggataagcctttggaattaaagaattctgaaaggactaacaacactaatgatggcccagtcatctcatcagtattttctctgagctctggatctgaaaatgtccccgagggcataaaaaaaaatagctcaacgtctaaaataaagtcaattgaactgttgcgcagaaaaatagctcagttaattgagtcctgtggcaagccttcatctttggcttcaaatagtgcacatcgtcgctctgtaggacaggcatcaaagggaacttcaaaagctacctctgaaggtattcaagaaatcaacgtgtcagtcactggccctggccatcccacagg

SEQ ID NO: 40990 - DNA, 648 bp, Macaca Mulatta
atccctccaagaattatctgaacttatcatgaactatagttgcacctaattgaagatgggagtgttattgtgtgtttattgtaggaccttcatcccagaataatcactgaaggatttgaagttgtgaaggaaaaggcccttcagtttttggaagaagtcaaagtaagcagagagatggacaaggaaacacttaaagatgtggccagagcatctctttgtaccaaagttcatgctgaatttgcagatgtcttaacagagatatatattaaattttgtgtgtgtctgttattgtacacctatatagaaaatctctgatagtagaaacatgaatataattaccaatttcaattacaaggtgctatgtaggttcatttttgtgacagtgatacctaatctgtgtctctaaaaagtaaaatgaggaaattcaagtaatagtatacctaaccaggttataaaattggagctttcattaaaaggattataaagtagagattttgttattagaaagcttccagttaccagtatttttaatgaaacaccaggaggaatgttaatgtctgtgaattacagattgagatttcagaaaggtaacagctgtttatatataatgtattctatctgcttatagaagaagacaaatcagtgtag

SEQ ID NO: 40991 - DNA, 682 bp, Macaca Mulatta
tggtgaagagtggtcgtcctgataattgagggcagaggtatggcagttactggcaggctgccatgacaaccaggcaatgctggatagataccgaattcttatcacaaaggactcagcccaggagagtgttattactcgagatattcatcgtacatttcccgcacatgattactttaaagatactggaggagatggtcaggaatcgctctataagatctgcaaggcctactctgtgtatgatgaagacattggatactgtcaagggcagtcttttcttgctgctgtattactgctgcatattccagaggaacaagcattctgtgttttggtgaaaatcatgtacgactatggtttgagagacctctacaaaaacaactttgaagatcttcactgcaaattctaccagttggagagactaatgcaggaacagctaccggacctgcatagccatttttgtgatctgaacctggaagctcatatgtatgcatcccagtggtttctcactctttttactgccaagttcccactctgcatggtgttccacatcattgacttactgctttgtgagggtttgaacataatctttcatgtagctttggctctcctaaagacttcaaaggaagaccttctgcaggctgattttgaaggtgctttaaagttctttaaagttcagcttccaaag

SEQ ID NO: 40992 - DNA, 805 bp, Macaca Mulatta
  misc_feature (1)...(805): n = A,T,C or G
gggtagaaaccagtgctagtggcttaactaggaaaagcaagtagactcatcaacagtcctttcaaaacaagacctaaacaattttttccagtttcaattttcatagnnnnnnnnnnnnnnnnnnncacaccttgtcacccagtgctagcaaaaattgtaaagagcaaaaccaaagtttttgatgttagtcttatttttgtaagcagggtatactatagtcatggcccatatggaacacacaggcagccggctttctgctacctgagccttggagaagatgaaaaggaagggctgtctgctgtgctgccctttgaaaaggtccaaagcagacatgagaacacacagcagaagtcaccttctccttctgatgatcgcctttcaaaaggcttaacagaatcaccaaatgtcacggtcagctattggccagtggaaaattgtctgggcctgtatatgttggaagaactccgatacaaaaagacttgtaaacagcatggaaacttcaacatctggctgtctcaagcaccttgaaatgaggcctacaatttcgggtggttactgggatgaaattaactggcccgggacaattttggggggccgaaccttgcgaaattatttcccaatttggtggggacttttggggaaaaaaaccacaaaggtggaatgggcttttttcaagactcgtggcgcaggagggggttttaaaattcccttacacgcgaattgtggggtaaataatattgcccaacccgtggagaaaatatgtgaaatcctctgctaccacgagagtgggtggccccactttcac

SEQ ID NO: 40993 - DNA, 835 bp, Macaca Mulatta
ccttttttttttaacccccggagcttgggggaaaagaccagttttctccaggggccaggaagggttttaaaaaccggcccggaattgtttccaaatgggattaaaatttccttataattccccggggagccttttttcctgttctggttaccaggaagccccccatattttagggggccagggcatggtggttcctcgcccggtaatccttggcattttgggcatggtggttgaaacccaggagtttcgagaccaggttggcgcaacatgatgaaatcccttcttttctgcacaaagggtgttgatgagctcaacagagacgtatgggtgttgaaaggcatcgtagcccttccccggagcaaaggcttgcttgcttatccctgcgtctgaggtcatgtaacccccgccagttcagccaggacttaaaaccatagctaatgctcctctctcctcctccccgcaagatcatcagccgtcgaagcaccgcctctcctgagttcactccatctggagtcctctgttttttcactttttaatacagctagtcaggaaacaataggtgctggagaggatgtcgagaaataggaacactttttcactgttggtgggactgtaaactcgttcaaccattgttcaagacagtgtggcgattcctcaaggatctcctgactggttcgccaaaatacgttatcagatagaaggtcctaatcgtgagttgtccagattcttggagtattggacaaggaattgaacaaaatgccacacgatgggcagatttactgaagacaattcacagagcgttaacaggccccagcaagcaactcaagtgcctccc

SEQ ID NO: 40994 - DNA, 222 bp, Macaca Mulatta
atgaactgagctctcagtctcctttgtgggctcctgtcctgggtataatcagataatggtgatgctgtgtgacactaagcaagttatttattttagcatccagaattaacagagaaaaaaaatctcccaacctcccgctcacagaactgtgatagggaccagattggttaatgagtaaggagtatttctatgcttggctgtagaaccgtgggcagatcccat

SEQ ID NO: 40995 - DNA, 556 bp, Macaca Mulatta
  misc_feature (1)...(556): n = A,T,C or G
tcggcacgagggannnnnnnnnnnnnnnnnnnnnnnnccaacatannnnnnnnnnnnnntnnnnnnnnnnnnnnnnnnnnnncatggtggtgnnnnnnnnnnnnnnnnnnnnnnnnnnnnnnnnnnnnggnnnnnnnnnnnnnnaccgnnnnnnnnnnnnnnnnnnnnnnnnnnnnnacgnnnnnnnnnnnnnnnnnnnnnnnnnnnnnnnnnnnncatnnnnnnnnnnnnnnnnnnnnnnnnncgggggggggcccggtcccaatgtgcgccctatagtgagttcgttttgaagagttcaggggccgacggtttacaatcggtcggagagctgggagaaaaccttggggttccccatactttagagcggccgagggaggggtgattcaaaagcaggaagctgctaccacctcataggatagagagagaccaagggagcaggtgggagtcccggagctggggccacctgcagaagctagaaccacaaaagagtccactgccactgccgctcatgccagaggaggtagggagagaaataacctgaattctctgccct

SEQ ID NO: 40996 - DNA, 135 bp, Macaca Mulatta
gcataaatgtgtattccttttatgatttcaaagataccagagattgaaattaacattatatcattataacattgatagaatccttttataatatagcttctgaatttgacagatcaggcacctcatcctgttctt

SEQ ID NO: 40997 - DNA, 750 bp, Macaca Mulatta
ggatccctccgaccttgacggccaagattcacttcagaccagagcttccagcagagagaaaccagctaattcagcgtcttccaatgggagctatcattaagtgcatgatgtattacaaggaggccttctggaagaagaaggattactgtggctgcatgatcattgaagatgaagatgctccaatttcaataaccttggatgacaccaagccggatggatcactgcctgccatcatgggcttcattcttgcccggaaagctgatcgacttgctaaactacataaggaaataaggaagaagaaaatctgtgagctctatgccaaagtgttgggatcccaagaagctttacatccagtacactatgaagagaagaactggtgtgaggagcagtactctgggggctgctacacggcgtacttccctcctgggatcatgactcaatatggaagggtgattcgtcaacccgtgggcaggattttcttcgcgggtacagagactgccacaaagtggagcggctacatggaaagggcaattgaggctggagaacgaacagcttagggaggtctttaaatggtcttggggaaggtggaacgagaaaagacattctggggtaacaagaaacctgaaattcaaagggacgtttcccacccgggtaataaaattcacttccacaacccttttcttgtggaagaaggggaaaccttggcactttccctggttttcctggggcccgcggccttgaaaagaaaat

SEQ ID NO: 40998 - DNA, 401 bp, Macaca Mulatta
caatttatgcctataaatctcagatgatttaacattttaaacctgttacattgaaaaacattgaagttcatcttgcagaaagcattaaggtatgcctggaggtgatttatttataaacataacacctaacctaacatggggaagagagtgtgtaactagatatgagctatgtaagaagcctaattgtgaacgagtcgattgattgccttctactttattttttacaagtaatgtattagtcttcttgatttcctcattatcagatgtcttttgatctttaaaagttcaatgttgttgtaattctcaaccagaaatttactcctttctaaaatatttattaaatttagcttgtgcctttgaatgaccggagaagggaatcataatttaataccaatgctcac

SEQ ID NO: 40999 - DNA, 462 bp, Macaca Mulatta
  misc_feature (1)...(462): n = A,T,C or G
ggcacctgtggtcccggctgnnnnnnnnnnnnnnnnnnaagaattgcttggacttgggaggtggaggttgccatgagctgggattgggccattgcactccagcctacacagtggagtgagacctgtttcacnnnnnnnnnnnnnnnnnnnnnnnnnnnnnnnnnnnnnnnnnnnnnnnnnngtttctgcaaatttgataggtatatgactcaaaccatggcagacctaagatattttagcaaactttatatctgacccagaattgtttaaagatctagaaaaatagccagctcccctgttcctgttcatcatacttagctcagcatacactaaggttattctgttgtagaacctgtagctttaaattgatcacccttcctttcttagaccttgcaaatttagtttctgttgttgtgttttcacnnnnnnnnnnnnnnnnnnnnnnnnnnnnnnnnnnttgtc

SEQ ID NO: 41000 - DNA, 803 bp, Macaca Mulatta
gggattgcctcctttcacctttcgaagaaggtgccttgcttccccttcagctttctgccatgcttgtgagtttcctgaggcctctccagctatggtgaacttttcctggtggtgtctcacaatggcagaaaacaaccagaatccagagggcaagatttcctggtgttgcaattcacagatgccaccatctcagagccttgagcagagtgaaggactgtggagtgaatgacgggtttgctggtgcgtgttatttctattagaagcacttcttacctggacacattgattccgacttctggtgattccctgggatccttttgttctcagctctgacttggaagcacagaagacttctgtttctgaatcatgtgatagtagctatttgcttttgtgaaaattaagcttctgaatgattagtaaattcaggccaggttacagctaatatgtggtagtagatctggagttaaaatcactgtctatttggctcccaagtatctgctttttcacttgtcttaaaagtcagtctttctactttatttacttagtattcacactcttcattttttttcctggagtcaatctcttaaaatttcttagtggtatgttcccctccacattctcttaacctttcttctccatccatttatgatactggaacccagtccttcttcccaattcttcagttcctttcaactacttggaccctgagcatgtggaaagatccccccagtttggggcccatcaagactgttcctttcttcctttgggaaaaaaagtccttaaaaatcccgaatttaaaatac

SEQ ID NO: 41001 - DNA, 347 bp, Macaca Mulatta
caccagctgcttctgagaactcgagactagcagttcccttgctggccaagggcaaagataatttagggacttttcaaaacaactgctgagctaataaatcctagcatttctcaggtcaaatcctgcagtagtgagtagctatgaatggatcctattaactgggtgggaggggggtgaaaacggagtgcatgactgctctgacaacctgaggatatcacaggtttagaactagccacgcttaaagggtgagctgtactctttggtgccattctctgactaagaatgggttaagcaggtttaacccttaaaagtgctgcagatgatttcagagtgctcatactattctg

SEQ ID NO: 41002 - DNA, 780 bp, Macaca Mulatta
  misc_feature (1)...(780): n = A,T,C or G
ggnnnnnnnnnnnnnnnnnnnnnnnnnnnnnnnnnnnnnnnnnnnnnnnnnnnnnnnnnnnnnnnnnnnnnnnnnnnnnnnnnnnnnnnnnnnnnnnnnnnnnnnnnnnnnnnnnnnnnnnnnnnnnnnnnnnnnnnnnnnnnnnnnnnnnnnnnnnnnnnnnnnnnnnnnnnnnnnnnnnnnnnnnnnnnnnnnnnnnnnnnnnnnnnnnnnnnnnnnnnnnnnnnnnnnnnnnnnnnnnnnnnnnnnnnnnnnnnnnnnnnnnnnnnnnnnnnnnnnnnnnnnnnnnnnnnnnnnnnnnnnnnnnnnnnnnnnnnnnnnnnnnnnnnnnnnnnnnnnnnnnnnnnnnnnnnnnnnnnnnnnnnnnnnnnnnnnnnnnnnnnnnnnnnnnnnnnnnnnnnnnnnnnnnnnnnnnnnnnnnnnnnnnnnnnnnnnnnnnnnnnnnnnnnnnnnnnnnnnnnnnnnnnnnnnnnnnnnnnnnnnnnnnnnnnnnnnnnnnnnnnnnnnnnnnnnnnnnnnnnnnnnnnnnnnnnnnnnnnnnnnnnnnnnnnnnnnnatttggcttgaacaatctttaaaaaacggcaaatcctttgctacccccctctccacctaacaagattcctaatcccgcgaggcaatttaccaatggcttacctaaaaagaaatgcccaaatcctcccatagaacaaccttttttcattttgaacccccggtctgtgggaacggaaaggaataaccccttatattcctttaatattttcaaaacccgccctattt

SEQ ID NO: 41003 - DNA, 764 bp, Macaca Mulatta
  misc_feature (1)...(764): n = A,T,C or G
ggggcgggggagagaaacagtcgtggggaaggtgagggtggttgtgcagggcctggtggactttggagaggactttggnnnnnnnnnnnnnnnnnnnnnnngagacagttttactcttgttgcctaggctggagtgcaatggtgtnnnnnnnnnnnnnnnnnnnnnnnannnnnnnnnnnnnnnnnnnnnnnnnnnnnnnnnnnnnntagtagctgggatagctgggattataggcatgcgccaccacgtccggctannnnnnnnnnnnnnnnnnnnnnnnnnnnnntccacgttggtnnnnnnnnnnnnnnnnnnnnngtgatccgcccgcctcgannnnnnnnnnnnnnnnnnnnnnnnnnnnnnnnngcgcacccggccggcaatttataatttttaaaaggtgattttgattaccagtcaggcttgaaaatcactggtttgtattgaaacaaaagatattttcttgtagcagggctaaaatgtgagatgaaacattaaatctactagcctgaaaaaaaatttcggcatttgtagtcaaagaagctaaaagttgcccttgtgtgttttcctctgggaaaatgcttggaaattttgtgaagggacaaatgttttcaaaatttcaaggtggccctatgcttttggaaccctttttaagaaaccccattaagtcttctggttgnnnnnnnnnnnnnnnnnnnnnnnnnnnnngaaacaggtcccccccccaaccctttattaaaatttcaggccttttttgcaa

SEQ ID NO: 41004 - DNA, 295 bp, Macaca Mulatta
aagacggattggcatcaaagttcacttctttaacaaaagtgttttatgactttaataaaatattagagaatggtagactccatggaagccctttacaaaaacttgtgataggaagttttgatgatgagcagactttgcaacaactggaattgcaaaatgacccaattttacaaagcttccaaaatgcagttagtgaaacaaagatgaggatataagtctcccagagagtgaagaacaggagtgtgaagaggatggttcagagacagaggctggtggccaggaggacctagaagat

SEQ ID NO: 41005 - DNA, 752 bp, Macaca Mulatta
  misc_feature (1)...(752): n = A,T,C or G
gggtccttatactacactttaacacatagactgcccactaaaaagtaaaattgaataccatccaaagtctcatgatatgatatgcaaattgtctagggtatgataataaaatcatttgtcatacccagaaccaagaaaatcacaacaatgaatgagtaaagatgatcaacagatgtcaacacaaaggtgattcagatattagaattatttaacaagaatgttaaataaatcatcataaaaatgctcaaccagcaatcacaaatacacttaaaacaaattaataaaatagaaaatctcagcaaagaaattgagattataaaaaagaaccaaatggatattaaagaactgaaaaatacattaacaaaaataaaataacccacaaatgggttaattagtagtgtaaagatgaaagaagatagagctaatgagcttgaggacacatcagtataattcacccaacctgaacaacaaagcgaaagtatctaaacaatnnnnnnnnnnnnnnnnnnnnnnnnnnnnnnnnnnnngggctcagggatctgtggggcaataacaaaagatccaaaacgtttctatcattggaaaaccccaattatgtatctgggcaaaaatttccttcaataacaaaagggggaaatccaaggttttttcagaatggaagaaaaaacttaaaaaatgttgggttgccnnnnnnnnnnnnnnnnnnnnnaaaagaaaaggccctaaaagggaaaaattcccccaaaaacaaa

SEQ ID NO: 41006 - DNA, 449 bp, Macaca Mulatta
agttgtcagtagtagtcacttaaaataaattttgttttattctattctttcttactacttagtgttaaaaactaaatttgtacctaatttctatcaaaaatcagtatattgtgaagagtacccaactagaaatgagtatatgtgaattgccgcttactggtgttataacttctctgggtatcaggtttctcatatgtaaaatcagaataattatctcttccccgcccacctcacaggcttgcttcaggaatctatagtgcaaaatatatatgaatgcactttatgtaatgtaaagtgctgaacatacgtaaggtggcattattattatttttgatttactaagccaatggactaagctaataagcaagattaatttatttctatgttagggctatttccctataatattgaaccatttcagttcctaataaaagatcaagtacctgcag

SEQ ID NO: 41007 - DNA, 765 bp, Macaca Mulatta
  misc_feature (1)...(765): n = A,T,C or G
gggtatgtattgtcttattttnnnnnnnnnnnnnnnnnnnnagagggggtttgtnnnnnnnnnnnnnnnnnnnnnnnnnnnnnnccatcatggttcactgcggcctccaactcctggattcaggtaatcctcctgcatcagcctcccgagtggctgggactgcaggtgctcgttaccacacccagggtctcactgtgttgctcgggcttgtcnnnnnnnnnnnnnnnnnnnnnnnnnnnnnnnnnnnnnnnnnnnnnnnnnnnnnnnnnnnnnnnnnnnnnnnnnnnnnnggccttatttcatttttctaacaaaccttggtgtctaaagtgtattagagagtttttctaattataaaattggagtaggcagatgaatgaggataggtgatgctagcataacacatggtgatctctgttttgggggaaaaaattctctaatccattcctgtaaggaagctcaatgaaggcaggtacttttcctagtactattatatcctcagtacctagcacagggcctggcacagagaagctacctaatgaatttgtaaatgagctgagctaggaaagctggacttcaggtctgctaagggtctgtgggaatggtgannnnnnnnnnnnnnnnnnngcttttacaggtttcatggctatgaacagctgtttaaaaggaagggtgataccccagttacagccccatttaaagttcctgggacaaacaggtcccattttatggggtagtttacccccaatgtggcctaaataacct

SEQ ID NO: 41008 - DNA, 420 bp, Macaca Mulatta
gtaagaattcgccatcaatagcagctatgtggttacttgtagtgttgtatggctgggctctgaaagaaaacgcactgaggaccgggtaaaccctctttagatgttcagctttcctgtgctccgttcctgacatcagaaactcgaagcaaatttgccagcttcacaccatttcattcacaatctccccttaaatttctaaaggacaacctatggacatggcattctatttttccaatccaaaaatgagaagaaaatgattaggaccagatgtaagaacatttgggcaagaggaatgcagttctgctttctgaatgacatcatctctattttaattagtggaagttggaacttccatttaatactttggtggatggagagaaaatgtgcttgtttcgcaacgtccaggaggaatttgagcct

SEQ ID NO: 41009 - DNA, 654 bp, Macaca Mulatta
acccccaggagcctcccggccggcgttcagatcgcgccggttccaggcagctgcaggcggcccatcttctgctaatgatcctagttcctccgccaagcctgtgaaattactgccgagagagccgcaggcctcaaagttacgaatttttcccaaagcagagaaagggaaggctcaggctagtttgtgagcagagatgaagaaaagtagcccgagtcatgtggcccagtcgagtgtgaatcgacaaaatattcctgattttagcagctctctccaaagctgtctggctttaccctacctaccagccgcctccccacacacttcccttccctctctgctcccgtttcaatgtccaataaatgcaatggttctctgttatgtgtgtgttttcccctcctgctcggcctttttcgtgggttctttgggtgacggagccacgtttccttcgggataggtacaatatcgtgagggcgccaggcccacagccttggaaacagacctccaaggcgcccctgctcaagctaaacgcaccacgccggctttccacaccaaatgcaaatttccgaaagccccagacggcctcagagatgccgcaggctggcgagtgatttcagctacccctcgctccttgtgggaggcccagcctgcgagcgcgat

SEQ ID NO: 41010 - DNA, 579 bp, Macaca Mulatta
  misc_feature (1)...(579): n = A,T,C or G
gaatacgcagctaacagggaaataagttgtttttgtcacatgtaaaatgagaataatatgggcagtccaaaaacttatagcaaactgtaagagattactgcgaattagacagtgaaggttacgtctgatttagaaaacatagattaacgtaattttagagagggagaaatcttcatgtataacatataatattcttgtggtattttacagataccaaaaacataccaaaaatatactaagggtatcaagtaaagagattcagtgggtctggaatatctgtacatctatattttctgtcctgtacatctgtatttttataaaactccactgacctagaaggtgctagattcaaatgttagaagtaaggttgttaccaagtaaacattttcaatttttgnnnnnnnnnnnnnnnnnnnnnnnnnnnnnnnnnnnnnngagacgaggtattgnnnnnnnnnnnnnnnnnnnctgcagtggctctgtcatagctcactgcagcctcaacctcctgggctcaagcgatctcctgtttcagcttctcaagtagctgggactataggcatgcatcaccatgcccag

SEQ ID NO: 41011 - DNA, 832 bp, Macaca Mulatta
ggacattatttggttattatacaacgtttatagtggtataaacagtattattaaactgaaggcataagttaaaggaagtatgttactttgagctgatgtaggctcttccacttttatctgtattttacttatttggggactttgtattgctagggcttcagaatactaactttgacacagctcccagagaggtttgcaaacttttggtttccctttcaaatccatggtagcagtttcagatgagtttgtggataatggatgtttagtccttatcatttgctgtgtattggcagtttttaatttgcagtattcactcacaaactgttttattttggaataatgcaaaaccaacctttgtccggtgatgacaatagccgtatgataagaaaatttgctcattgtgctttaaatgagtaattgttttaccttatttagtatttcatagactttgcatgacatggtacactccttattatgcattctttggtttccaaatcttaacctaagatactttgttaactggtagcctaagaaagagacttttcttcctgtttttctcctctccccgttttttgggggacatttttgcaaagatcagccgctgcttttcatgatctctaaagcctcttttgggaaagcacagccgtaacctttacaagcttagaacagaaatgggttaattaaaaaattacttttccaagaaacccaaatttttggtccaaaatttatttttggttggggaaaaatcattaaaatcctaacttgggaattcaaaaaatttaagggtgccttaaaaattgtgggggaactttatattttgtgtgggagaaaa

SEQ ID NO: 41012 - DNA, 1059 bp, Macaca Mulatta
atggctgagccccgccaggagttcgatgtgatggaagatcacgctgggacgtacgggttgggggacaggaaagatcaagagggctacaccatgctccaagaccaagagggtgacacggacgctggcctgaaagctgaagaagcaggcattggagacacccccagcctgaaagatgaagctgctggtcacgtgaccgaagctcactagatcagtcaaagcaaagacggaactggaagcgatgacaaaaaagccaagggggctgatagtaaaacgaagatcgccacacccaggggagcggcccccccaggccagaaaatccaggccaacgccaccaggattccagcaaaaaccccgcccgccccaaagacaccacccagttctggtgaacctccaaaatcaggggatcgcagcggctacagcagcctcggctccccgggcactcctggcagccgctcccgcatcccgtcccttccaacccctccagcccgggagcccaagaaggtggcggtggtccgtactccacccaaatcgccgtcttccgctaacagccgcctgcagaccgcccccgtgcccatgccagacctgaagaacgtcaagtccaagatcgactccactgagaacctgaagcaccagccgggaggcgggaaggtgcaaatagtctacaaatcagttgacctgagcaaggtgacctccaagtgtggctcattaggcaacatccatcataaaccaggaggtggccaggtggaagtaaaatctgagaagctggacttcaaggacagagtccagtcgaagatcgggtccctggacaatatcactcatgtccctggcggaggaaataaaaagactgaaacccacaagctgaccttccgcgagaacgccaaagccaagacagaccaccgggtggaaatcgtgaacaagtcgccggtggtgtctggggacacgtctccatggcacctcagcaatgtctcctccaccggcagcatcgacatggtagactcgccccagctcgccacgctagccgtcgaggtgtctgcctccctggccaagcagggtttgtga

SEQ ID NO: 41013 - DNA, 642 bp, Macaca Mulatta
cgtttacaaatgaatacttaccttagaaatattcaccttaggaaaaaagactttgctctgcccttttatattcctttacgctgcaagtggcgacatgttcagatttctaatttggttcattgtggcctatctggtttaagtatttcattcaaaatgtctcgttagagtatttgatgtcatgcaccaaaaaaataaaaccccaccttgcaaaagctgacctcgttgcatggaattaaaagagaaggaaaaacacaaggatgaagcccttctgaattcattcttgtgggaactggccttcggagccagccagcactttgggcaaatgcaaacaacaatgagtgcttgagataaaagaaagtgtgacgtcatggtcactggtactcaggcacttcacagtttacttgaaagaggctttggaaaatagataaagtgaaagaagaataaatacatatttttaataatgtaattttaaaaatcctttagaatcaggactcagtcttggtttgcagaagctgtcatttaccctgaaacacagtatcaaaagggaaacttaaaacatactgtttgattttttagtccctcttcaatccatgttttcagatagaattatgactttcccccccactgttacacatttcttta

SEQ ID NO: 41014 - DNA, 790 bp, Macaca Mulatta
  misc_feature (1)...(790): n = A,T,C or G
ggnnnnnnnnnnnnnnnnnnnnnnnnnnnnnnnnnnnnnnnnnnnnnnnnnnnnnnnnnnnnnnnnnnnnnnnnnnnnnnnnnnnnnnnnnnnnnnnnnnnnnnnnnnnnnnnnnnnnnnnnnnnnnnnnnnnnnnnnnnnnnnnnnnnnnnnnnnnnnnnnnnnnnnnnnnnnnnnnnnnnnnnnnnnnnnnnnnnnnnnnnnnnnnnnnnnnnnnnnnnnnnnnnnnnnnnnnnnnnnnnnnnnnnnnnnnnnnnnnnnnnnnnnnnnnnnnnnnnnnnnnnnnnnnnnnnnnnnnnnnnnnnnnnnnnnnnnnnnnnnnnnnnnnnnnnnnnnnnnnnnnnnnnnnnnnnnnnnnnnnnnnnnnnnnnnnnnnnnnnnnnnnnnnnnnnnnnnnnnnnnnnnnnnnnnnnnnnnnnnnnnnnnnnnnnnnnnnnnnnnnnnnnnnnnnnnnnnnnnnnnnnnnnnnnnnnnnnnnnnnnnnnnnnnnnnnnnnnnnnnnnnnnnnnnnnnnnnnnnnnnnnnnnnnnnnnnnnnnnnnnnnnnnnnnnnnnnnnnnnnnnnnnnnnnnnnnnnnnnnnnnnnnnnnnnnnnnnnnnnnnnnnnnnnnnnnnnnnnnnnnnnnnnnnnnnnnnnnnnnnnnnnnnnnntttaatctgcgtttatcccgccaaacttattaattacctttacgttgaaacaaatcctttcgggtttcaagggcttgcccccttgaaaatttgacactttcctaaaaattgttggctgtactaactccctctaaaatttt

SEQ ID NO: 41015 - DNA, 708 bp, Macaca Mulatta
  misc_feature (1)...(708): n = A,T,C or G
agcaaatgaagtttggccttgggtttccctnttctggaggaagaggctgagggggatttggagataaaggtagaggtcaggaggctttttccctctacttttcttgtctcccttctccgcggaactgtttataacttgggcttggtgttctgttacagtcttggtgatgccttggacagcagcaactccatgcaaaccatccaaaagaccaccacccgccggatagtggatggcaaagtggtgtctgagaccaacgacaccaaagttctgaggcattaagccagcagaagcagggtaccctttggggagcaggaggccaataaaaagttcagagttcattggatgtcactttttcttcttttggctgttttcattgcgcacaaatgccctaacccaacagtcccatctgatcccagcagaaaccacctctgacccctgagggtttcatatagattggggtgtagaaggaagagggctctgtattcttggaaacacttctcagagacagaggagggagcggtagatgtgatgggtcacaggcagtggggatccctccaagagaattgtggaatctttgccttgaagcagtctggtgttcataaggtccctgactgatcattagcagaatttaaagcaaaggaggaaattaggccaaagacagaggacatagaaggcagacacatctggccctaccctaccctgctgctt

SEQ ID NO: 41016 - DNA, 610 bp, Macaca Mulatta
ccccatctgtaatatggggtcagtgatgctgagccctcctgtgtcttgagccgcgatgaacttcagaggcaaagtaaacaccttaagtgcagcacattaaaaccgcacttaccaaagaaaacaaacaagaacactacaaggaagccactgtcattacatcattttctcttgtgttttcttttcagggaaagtcctggtcagcagcgaaatgggcatcagccggtcagcagttctagtggtcgcctacctgatgatcttccacaatatggccatcctggaggcgttgatgactgtgcgtaagaagcgggccatctaccccaacgacggcttcctgaagcagctgcgggagctcaacgagaagctgatggaggagagagaagaggactacggcagggagggggaatcagctgaggctgaggagggcgagggcatggggagcatgctcggggccagagtgcacgccctgacggtggaggaggaggacgacagcgccagccacctgagtggctcctccctggggaaggccagccaggcctccaagcccctcaccctcattgacaacgaggaggagaagaaactgtacgaggagtggaagaaggggcagggcctc

SEQ ID NO: 41017 - DNA, 645 bp, Macaca Mulatta
  misc_feature (1)...(645): n = A,T,C or G
tagaatctggcctgaggcctcaagtcttattacctgntatgaaaaatccccttattagcctcatttaatctcaatagaagcctgctgtgtaccctcagggaacaagtagttttcaaaattgagctcctccaaggtcattggccaatactgtgtgcaagcattggtcatctttgtaaactcatggcattatttcctcgtatgcattataatactaagaaattcatccccaacctgtatgaaaagcacagcccagggccctaattgaggctagcgtgaatgcctttgaggggccagggggccataggaggcccatgcaatttaactgaagctcaggtgccacgttggatttttattcttattaggccgcaacccttctgaatgagtttaggacaggggctgctgatccggctgtggattcagggagctctaaaatgaatctctaccgttcctttaaaggtctttctggttcctcccagtgttgtcattgccgaggtcgatctcgtagttgttcagttgtgctctttttgctgtcttgtgagtcttagccagtgatccagctgcccaaggacagggcctccagagggcctagcaccgtcctggtaccaagcgtgtgctcccggcctgtgtgacagtgtctttccagag

SEQ ID NO: 41018 - DNA, 970 bp, Macaca Mulatta
atggtcgttagcgtggcgtgtgttgggttcttcttggtccagagggcctgtccacacacgggagtccacagaaaaccttctctcctggccctcccaggtcccctggtgaaatcagaagagacggtcatcctgcagtgctggtcagatatcaagtttgagcacttccttctgcaccgagtggggaagtttgaggagcccttgcatctcatcggagagctccatgatgggggctccaaggccaatgtctccatcagtccagtgacacctgccctggcagggacctaccaatgctacggttctgtcactcaccccccctatgtgttgtcaactcccagtgatcccctggagatcgtgatcacagggaactcttcaaatggttggccttcacccactgaaccaagttccaaaactggatgctgctgtaatggaccaagagcctggagtggaaagaacagtgaatccggaggactctgatgaacaagaccctcaggaggtgacatacgcacagttggatcactgcgttttcacacagggaaaaatcactcgcccttctcagaggtccaagagacccccaacagataccagcgtgtacatagagcttccagatgctgagcccagatcgaaagttgaccacagtcaggccttgagggggtcctccagggagacaacagccctgtctcaaacccagcttgccagttccaatgtaccagcagcaggaatctgaagctgtgagtctgcatcttagggcattgctcttcctcacaccacgaatctgaacgtgcctctctctcgcttacaaatgtctaaggtccccactgcctgctgcagagaaaacacactcctttgcttagcccacaattctccacttcacttgacccctgcccacctctccaacctactggcttacttcctagtcctactggaggctgcagtcacaccaaggaactcacaattccaaacatacgagagg

SEQ ID NO: 41019 - DNA, 558 bp, Macaca Mulatta
gactcacagagtgaattcagctcttctgaattaagacccactcagtctctttcattcagacctgttgctaacaaacatatatttgccaaggatattaggcaaaagaggctacttgattggtggccaacctcatgcccacgtggaaggtatcattaatagggtcttttcaaaccttagtggaggagtgtcagctcaatttgagcaatgtatttattcccagtttcattttcctcctgggaattaactcatcgtttcattccttcagtcatcttctgtttaggtgaccagagcactgagaggcagctctgatgcactattgtgtatcagcagctcaaaggccctaaaacactgaaggttctgcatttgaagtattagattgttagcagtaaaaaagacaagatgaggtggacagttctctaagccctatttagggaaccttttccaagtcacaatgttaactacctacccaaaagatttgcattggcccccccgattctgtgccaataaccttttaaggaaatacagtctttgggaaatcagtttcaatggtgaataggg

SEQ ID NO: 41020 - DNA, 1128 bp, Macaca Mulatta
  misc_feature (1)...(1128): n = A,T,C or G
gggggctgcggggggctgcaggagaagatggcggtctccacaggagttaaagttcctcgtaattttcgcttgttggaagaacttgaagaaggacaaaaaggagtaggcgatggtacggttagctggggccttgaagatgatgaagatatgacacttacaaggtggacaggcatgattattgggccaccaaggacaaattatgaaaacagaatatatagcctgaaagtagaatgtggacctaaatacccagaagctcctccgtcagttagatttgtaacaaaaattaatatgaatggaataaataattccagtgggatggtggatgcccggagcataccagtgttagcaaaatggcaaaattcatatagcattaaagttgtacttcaagagctaagacgtctaatgatgtccaaagaaaatatgaagcttccacagccaccagaaggacaaacatacaacaattaattttagtggatctcaaacttgtcttaaatcaacaaccttctactcatgttaatgtcttgattaaatatcacaatgaaaaatacccacacattaagtaaaagaattccagctggtaaacatgacctggacatttgtaagaatatatttaatacatgtacacccattatgttttcaggtaacaggaggaaaaatgcagcacaattttttttctcttgttaaggcactgtcatttaaacataaacctggagtactcaaagtagaattcaggtgtttacaaagatggaaagcgtgtgggagaagtgtcagaatggcagtgggaagcatgtgtgtttctaaaaaagtgaaaaatctcaagaaaaggaaaacggaaaatggccatggctttacccatcttgcttagtgaaagagagctgcagttgaaattgtctaaaaagtagcaggtacaacgaatattgtcccagaatgtggttaattttttgaaccggtgtgggtgcctgacctactactagtatccaaaaatatggttcagggaatggttttgaaaccctgcaannnnnnnnnnnnnnnnnnnggggggcaaatttgccttaatcttcctgctaaaaccctggctccttggggggtttcccatggataacaaaacaaggctaaactattcttgct

SEQ ID NO: 41021 - DNA, 113 bp, Macaca Mulatta
  misc_feature (1)...(113): n = A,T,C or G
nagatatgctagtctatatttttgctgtgctattgaggatcaggacaatgaactaattaccctggaaataattcatcgttatgtggaattacttgacaagtatttcggcagtg

SEQ ID NO: 41022 - DNA, 3881 bp, Macaca Mulatta
  misc_feature (1)...(3881): n = A,T,C or G
tgcttgcagtggggcccgccatggacagggattacccgcagcatgagcccccgccggcgggcagcctcctgtacagcccgccgcccctgcagnnnnnnnnnnnnnnnnnnnnnnnnnnnnnnnnnnnnnnnnnnnnnnnnnnnnnnnnnnnnnnnnnnnnnnnnnnnnnnnnnnnnnnnnnnnnnnnnnnnnnnnnnnnnnnnnnnnnnnnnnnnnnnnnnnnnnnnnnnnnnnnnnnnnnnnnnnnnnnnnnnnnnnnnnnnnnnnnnnnnnnnnnnnnnnnnnnnnnnnnnnnnnnnnnnnnnnnnnnnnnnnnnnnnnnnnnnnnnnnnnnnnnnnnnnnnnnnnnnnnnnnnnnnnnnnnnnnnnnnnnnnnnnnnnnnnnnnnnnnnnnnnnnnnnnnnnnnnnnnnnnnnnnnnnnnnnnnnnnnnnnnnnnnnnnnnnnnnnnnnnnnnnnnnnnnnnnnnnnnnnnnnnnnnnnnnnnnnnnnnnnnnnnnnnnnnnnnnnnnnnnnnnnnnnnnnnnnnnnnnnnnnnnnnnnnnnnnnnnnnnnnnnnnnnnnnnnnnnnnnnnnnnnnnnnnnnnnnnnnnnnnnnnnnnnnnnnnnnnnnnnnnnnnnnnnnnnnnnnnnnnnnnnnnnnnnnnnnnnnnnnnnnnnnnnnnnnnnnnnnnnnnnnnnnnnnnnnnnnnnnnnnnnnnnnnnnnnnnnnnnnnnnnnnnnnnnnnnnnnnnnnnnnnnnnnnnnnnnnnnnnnnnnnnnnnnnnnnnnnnnnnnnnnnnnnnnnnnnnnnnnnnnnnnnnnnnnnnnnnnnnnnnnnnnnnnnnnnnnnnnnnnnnnnnnnnnnnnnnnnnnnnnnnnnnnnnnnnnnnnnnnnnnnnnnnnnnnnnnnnnnnnnnnnnnnnnnnnnnnnnnnnnnnnnnnnnnnnnnnnnnnnnnnnnnnnnnnnnnnnnnnnnnnnnnnnnnnnnnnnnnnnnnnnnnnnnnnnnnnnnnnnnnnnnnnnnnnnnnnnnnnnnnnnnnnnnnnnnnnnnnnnnnnnnnnnnnnnnnnnnnnnnnnnnnnnnnnnnnnnnnnnnnnnnnnnnnnnnnnnnnnnnnnnnnnnnnnnnnnnnnnnnnnnnnnnnnnnnnnnnnnnnnnnnnnnnnnnnnnnnnnnnnnnnnnnnnnnnnnnnnnnnnnnnnnnnnnnnnnnnnnnnnnnnnnnnnnnnnnnnnnnnnnnnnnnnnnnnnnnnnnnnnnnnnnnnnnnnnnnnnnnnnnnnnnnnnnnnnnnnnnnnnnnnnnnnnnnnnnnnnnnnnnnnnnnnnnnnnnnnnnnnnnnnnnnnnnnnnnnnnnnnnnnnnnnnnnnnnnnnnnnnnnnnnnnnnnnnnnnnnnnnnnnnnnnnnnnnnnnnnnnnnnnnnnnnnnnnnnnnnnnnnnnnnnnnnnnnnnnnnnnnnnnnnnnnnnnnnnnnnnnnnnnnnnnnnnnnnnnnnnnnnnnnnnnnnnnnnnnnnnnnnnnnnnnnnnnnnnnnnnnnnnnnnnnntgggctgaggccctgaacgtgttccagcaggcggccgactggatcggcctggagtcacgcaagtccctgtggggccagttctggtcggcgcaccagcgcttcttcaagtatctgtgcatcgccgccaaggtgcgccggctggtggagctggcccgagaggagctggcgcgagacaagnnnnnnnnnnnnnnnnnnnnnnnnnnnnnnnnnnnnnnnnnnnnnnnnnnnnnnnnnnnnnnnnnnnnnnnnnnnnnnnnnnnnnnnnnnnnnnnnnnaggcgtgttcctgtcgctaattcagaagcactttccatccnnnnnnnnnnnnnnnnnnnnnnnnnnnnnnnnnnnnnnnnnnggcgacctcggggacgcggggccaaagccccccggctggcgtgcgaggcggcgggcatcatccgcatcagcgatgacagcagcacagagtcagaccccggcctggacagcgacttcaactcctcccccgagtccctgatggacgacgacgtggtcatcgttgatgccatcgggctccccagtgatgaccgggnnnnnnnnnnnnnnnnnnnnnnnnnnnnnnnnnnnnnnnnnnnnnnnnnnnnnnnnnnnnnnnnnnnnnnnnnnnnnnnnnnnnnnnnnnnnnnnnnnnnnnnnnnnnnnnnnnnnnnnnnnnnnnnnnnnnnnnnnnnnnnnnnnnnnnnnnnnnnnnnnnnnnnnnnnnnnnnnnnnnnnnnnnnnnnnnnnnnnnnnnnnnnnnnnnnnnnnnnnnnnnnnnnnnnnnnnnnnnnnnnnnnnnnnnnnnnnnnnnnnnnnnnnnnnnnnnnnnnnnnnnnnnnnnnnnnnnnnnnnnnnnnnnnnnnnnnnnnnnnnnnnnnnnnnnnnnnnnnnnnnnnnnnnnnnnnnnnnnnnnnnnnnnnnnnnnnnnnnnnnnnnnnnnnnnnnnnnnnnnnnnnnnnnnnnnnnnnnnnnnnnnnnnnnnnnnnnnnnnnnnnnnnnnnnnnnnnnnnnnnnnnnnnnnnnnnnnnnnnnnnnnnnnnnnnnnnnnnnnnnnnnnnnnnnnnnnnnnnnnnnnnnnnnnnnnnnnnnnnnnnnnnnnnnnnnnnnnnnnnnnnnnnnnnnnnnnnnnnnnnnnnnnnnnnnnnnnnnnnnnnnnnnnnnnnnnnnnnnnnnnnnnnnnnnnnnnnnnnnnnnnnnnnnnnnnnnnnnnnnnnnnnnnnnnnnnnnnnnnnnnnnnnnnnnnnnnnnnnnnnnnnnnnnnnnnnnnnnnnnnnnnnnnnnnnnnnnnnnnnnnnnnnnnnnnnnnnnnnnnnnnnnnnnnnnnnnnnnnnnnnnnnnnnnnnnnnnnnnnnnnnnnnnnnnnnnnnnnnnnnnnnnnnnnnnnnnnnnnnnnnnnnnnnnnnnnnnnnnnnnnnnnnnnnnnnnnnnnnnnnnnnnnnnnnnnnnnnnnnnnnnnnnnnnnnnnnnnnnnnnnnnnnnnnnnnnnnnnnnnnnnnnnnnnnnnnnnnnnnnnnnnnnnnnnnnnnnnnnnnnnnnnnnnnnnnnnnnnnnnnnnnnnnnnnnnnnnnnnnnnnnnnnnnnnnnnnnnnnnnnnnnnnnnnnnnnnnnnnnnnnnnnnnnnnnnnnnnnnnnnnnnnnnnnnnnnnnnnnnnnnnnnnnnnnnnnnnnnnnnnnnnnnnnnnnnnnnnnnnnnnnnnnnnnnnnnnnnnnnnnnnnnnnnnnnnnnnnnnnnnnnnnnnnnnnnnnnnnnnnnnnnnnnnnnnnnnnnnnnnnnnnnnnnnnnnnnnnnnnnnnnnnnnnnnnnnnnnnnnnnnnnnnnnnnnnnnnnnnnnnnnnnnnnnnnnnnnnnnnnnnnnnnnnnnnnnnnnnnnnnnnnnnnnnnnnnnnnnnnnnnnnnnnnnnnnnnnnnnnnnnnnnnnnnnnnnnnnnnnnnnnnnnnnnnnnnnnnnnnnnnnnnnnnnnnnnnnnnnnnnnnnnnnnnnnnnnnnnnnnnnnnnnnnnnnnnnnnnnnnnnnnnnnnnnnnnnnnnnnnnnnnnnnnnnnnnnnnnnnnnnnnnnnnnnnnnnnnnnnnnnnnnnnnnnnnnnnnnngcatcaagatccccgagggctgcgtgcgccgcgtgctacaggagctgcggctgatggatgcggacgtgaagcgcaggcnnnnnnnnnnnnnnnnnnnnnnnnnnnnnnnnnnnnnnnnnnnnnnnnnnnnnnnnnnnnccccggagaggtgctggacctcacctacagtcttctgggcgaggcattcccgccgcccccgcacttctccttcccggcgccgctgcccctggacaccggccccggcctggcgccgctgggcgccccggacgc

SEQ ID NO: 41023 - DNA, 630 bp, Macaca Mulatta
  misc_feature (1)...(630): n = A,T,C or G
gggagtcagggctcggtgagattcttgccttaggaagctggagcctgcctgggaataaaaccaacccagagggccaggcgtggtggctcacgcttgtaatctnnnnnnnnnnnnnnnnnnnnncaggcannnnnnnnnnnnnnnnnnnnnnnnnnnnnnnnnnnnnncnnnnnnnnnnnnnnttagctgggcgtggtgtgggcacctgtaatcccaactactcgggaggagtattgcttgaacccaggaggcggaggttgaggtgagccaagactatgccagtgcactctagcctgggctacaaaagcgagactacatctgnnnnnnnnnnnnnnnnnnnnnnnnnnnnnccctaggggaatggagagaatgagtcctggaggtgctattgtgagccgctggatccaattgtgcctgaaactcacccaacccctggacttttcagtaacatgagctgataagctctctctgtcgcttcagccactttgaattgggaattttgtcacttgcagctgggagccctgactgataaataggccttttctctccccttatttcataaaacaccacacgtggaacaagcaaaattaattcccctgcttccntaacagccggatgagcaatggctan

SEQ ID NO: 41024 - DNA, 2113 bp, Macaca Mulatta
  misc_feature (1)...(2113): n = A,T,C or G
atgcagtaccacaagctgacagagcacttcgatgagaagcctttctcctgtgaagagtgtggggcgaagtttgcagccaattccaccctgaagaaccaccttcgccttcacaccggggnnnnnnnnnnnnnnnnnnnnnnnnnnnnnnnnnnnnnnnnnnnnnnnnnnnnnnnnnnnnnnnnnnnnnnnnnnnnnnnnnnnnnnnnnnnnnnnnnnnnnnnnnnnnnnnnnnnnnnnnnnnnnnnnnnnnnnnnnnnnnnnnnnnnnnnnnnnnnnnnnnnnnnnnnnnnnnnnnnnnnnnnnnnnnnnnnnnnnnnnnnnnnnnnnnnnnnnnnnnnnnnnnnnnnnnnnnnnnnnnnnnnnnnnnnnnnnnnnnnnnnnnnnnnnnnnnnnnnnnnnnnnnnnnnnnnnnnnnnnnnnnnnnnnnnnnnnnnnnnnnnnnnnnnnnnnnnnnnnnnnnnnnnnnnnnnnnnnnnnnnnnnnnnnnnnnnnnnnnnnnnnnnnnnnnnnnnnnnnnnnnnnnnnnnnnnnnnnnnnnnnnnnnnnnnnnnnnnnnnnnnnnnnnnnnnnnnnnnnnnnnnnnnnnnnnnnnnnnnnnnnnnnnnnnnnnnnnnnnnnnnnnnnnnnnnnnnnnnnnnnnnnnnnnnnnnnnnnnnnnnnnnnnnnnnnnnnnnnnnnnnnnnnnnnnnnnnnnnnnnnnnnnnnnnnnnnnnnnnnnnnnnnnnnnnnnnnnnnnnnnnnnnnnnnnnnnnnnnnnnnnnnnnnnnnnnnnnnnnnnnnnnnnnnnnnnnnnnnnnnnnnnnnnnnnnnnnnnnnnnnnnnnnnnnnnnnnnnnnnnnnnnnnnnnnnnnnnnnnnnnnnnnnnnnnnnnnnnnnnnnnnnnnnnnnnnnnnnnnnnnnnnnnnnnnnnnnnnnnnnnnnnnnnnnnnnnnnnnnnnnnnnnnnnnnnnnnnnnnnnnnnnnnnnnnnnnnnnnnnnnnnnnnnnnnnnnnnnnnnnnnnnnnnnnnnnnnnnnnnnnnnnnnnnnnnnnnnnnnnnnnnnnnnnnnnnnnnnnnnnnnnnnnnnnnnnnnnnnnnnnnnnnnnnnnnnnnnnnnnnnnnnnnnnnnnnnnnnnnnnnnnnnnnnnnnnnnnnnnnnnnnnnnnnnnnnnnnnnnnnnnnnnnnnnnnnnnnnnnnnnnnnnnnnnnnnnnnnnnnnnnnnnnnnnnnnnnnnnnnnnnnnnnnnnnnnnnnnnnnnnnnnnnnnnnnnnnnnnnnnnnnnnnnnnnnnnnnnnnnnnnnnnnnnnnnnnnnnnnnnnnnnnnnnnnnnnnnnnnnnnnnnnnnnnnnnnnnnnnnnnnnnnnnnnnnnnnnnnnnnnnnnnnnnnnnnnnnnnnnnnnnnnnnnnnnnnnnnnnnnnnnnnnnnnnnnnnnnnnnnnnnnnnnnnnnnnnnnnnnnnnnnnnnnnnnnnnnnnnnnnnnnnnnnnnnnnnnnnnnnnnnnnnnnnnnnnnnnnnnnnnnnnnnnnnnnnnnnnnnnnnnnnnnnnnnnnnnnnnnnnnnnnnnnnnnnnnnnnnnnnnnnnnnnnnnnnnnnnnnnnnnnnnnnnnnnnnnnnnnnnnnnnnnnnnnnnnnnnnnnnnnnnnnnnnnnnnnnnnnnnnnnnnnnnnnnnnnnnnnnnnnnnnnnnnnnnnnnnnnnnnnnnnnnnnnnnnnnnnnnnnnnnnnnnnnnnnnnnnnnnnnnnnnnnnnnnnnnnnnnnnnnnnnnnnnnnnnnnnnnnnnnnnnnnnnnnnnnnnnnnnnnnnnnnnnnnnnnnnnnnnnnnnnnnnnnnnnnnnnnnnnnnnnnnnnnnnnnnnnnnnnnnnnnnnnnnnnnnnnnnnnnnnnnnnnnnnnnnnnnnnnnnnnnnnnnnttgtcagttgtcagcccttcccaaaacaaagctcttgaagtttctgctggacgtgttgaatgtgaggcatcagctgctagccagtctctgcctttccaggacattcttcttggtattccttacctgaaggctggttcccacagctcttccgtgtcatcttcatccccttcctttaatcaaaggctgaaatctgcctgacttggcagcctcgctccctctggg

SEQ ID NO: 41025 - DNA, 188 bp, Macaca Mulatta
cccgcgctcctgtgcgccccgcaagccgaggtgctagaagacgtgttgcgggagcagttcgggccgctgccccagctggccgctgtctgccggctcaagcggctgccctcaggcggctactcgtctaccgaaaacctccagttggtgctggagcggcggcgtgtggccaacgccaaggagcgtgagcg

SEQ ID NO: 41026 - DNA, 783 bp, Macaca Mulatta
  misc_feature (1)...(783): n = A,T,C or G
gggtgtgccaccatgcttggctaattttttatagagttgatgtgtcactatgttgcccaggatacnnnnnnnnnnnnnnnnnnnnncaatcctgccgtctcagcctcccaaagcactgtgattacagacatggacaattgcacctggctcaatatttgtttcaaaaaatacagttttcatatttttaatgaaaagaattaaaaatatctacattgttgttttgatttgatcattttctgttgtcccataccattttttctgagtcctcttcagaatttgatgtctgtcttcccttagttctgtaccttatttcatgtccttttggataaggcaccactcttaaatatctaaaagtgtagtcttctgttttgctgcttttccattctggtcattggttagatctgtttgtatttcctgatatgaacccatacctcatttttttccccttctttaccactcttcactggttttaacttaaattcttgattacttttgaaatgaatactatcttgagtctgtctcaagttttttctattgagaggtattttgagactttctaacttgttcttatgttttcaaagagaagtgctttgaccgcatgttcacagattatcttatacgatgagagatactgtgaaaaataagtatttttgcctaataacctggaatgtagaaatgtaaaaaaattattgaaatggggcaaaaatttttaaggtttggtaattaaataaaaaatttttgtaagccatggtgcttaaaagaactggcccccttctcttaagt

SEQ ID NO: 41027 - DNA, 1256 bp, Macaca Mulatta
  misc_feature (1)...(1256): n = A,T,C or G
atggccttcacagacctgctggacactctgggcggcatgggccgcttccagctcannnnnnnnnnnnnnnnnnnnnnnnnnnnnnnnnnnnnnnnnnnnnnnnnnnnnnnnnnnnnnnnnnnnnnnnnnnnnnnnnnnnnnnnnnnnnnnnnnnnnnnnnnnnnnnnnnnnnnnnnnnnnnnnnnnnnnnnnnnnnnnnnnnnnnnnnnnnnnnnnnnnnnnnnnnnnnnnnnnnnnnnnnnnnnnnnnnnnnnnnnnnnnnnnnnnnnnnnnnnnnnnnnnnnnnnnnnnnnnnnnnnnnnnnnnnnnnnnnnnnnnnnnnnnnnnnnnnnnnnnnnnnnnnnnnnnnnnnnnnnnnnnnnnnnnnnnnnnnnnnnnnnnnnnnnnnnnnnnnnnnnnnnnnnnnnnnnnnnnnnnnnnnnnnnnnnnnnnnnnnnnnnnnnnnnnnnnnnnnnnnnnnnnnnnnnnnnnnnnnnnnnnnnnnnnnnnnnnnnnnnnnnnnnnnnnnnnnnnnnnnnnnnnnnnnnnnnnnnnnnnnnnnnnnnnnnnnnnnnnnnnnnnnnnnnnnnnnnnnnnnnnnnnnnnnnnnnnnnnnnnnnnnnnnnnnnnnnnnnnnnnnnnnnnnnnnnnnnnnnnnnnnnnnnnnnnnnnnnnnnnnnnnnnnnnnnnnnnnnnnnnnnnnnnnnnnnnnnnnnnnnnnnnnnnnnnnnnnnnnnnnnnnnnnnnnnnnnnnnnnnnnnnnnnnnnnnnnnnnnnnnnnnnnnnnnnnnnnnnnnnnnnnnnnnnnnnnnnnnnnnnnnnnnnnnnnnnnnnnnnnnnnnnnnnnnnnnnnnnnnnnnnnnnnnnnnnnnnnnnnnnnnnnnnnnnnnnnnnnnnnnnnnnnnnnnnnnnnnnnnnnnnnnnnnnnnnnnnnnnnnnnnnnnnnnnnnnnnnnnnnnnnnnnnnnnnnnnnnnnnnnnnnnnnnnnnnnnnnnnnnnnnnnnnnnnnnnnnnnnnnnnnnnnnnnnnnnnnnnnnnnnnnnnnnnnnnnnnnnnnnnnggttctccaactctgtggcttactatggcctggccatggacctgcagaagtttgggctcagcctttacctggtgcaggccctgtttggaatcatcgacatcccggccatgctcgtggccaccgccaccatgatttacatgggccgccgggccacagtggcctccttcctcatcctggccaggctcatggtgatcgccaacatgtttgtgccagaagg

SEQ ID NO: 41028 - DNA, 809 bp, Macaca Mulatta
  misc_feature (1)...(809): n = A,T,C or G
ggtgtggtggctcatggctttaatcccaggactttaggaggacaaggcagacggattnnnnnnnnnnnnnnnnnnnnnntcagannnnnnnnnnnnnnnnnnntnnnnnnnnnnnnnncatacaaaattagccaggtatggtggcgcccacctgcnnnnnnnnnnnnnnnnnnnnnnnnnnnnnnnnnnnngcatgaatccgggaggcannnnnnnnnnnnnnnnnnnnntgcaccagnnnnnnnnnnnnnnnnnnnnnnnnnnnnnnngnnnnnnnnnnnnnnnnnnnnnnnnnnnnnnnnnnnnnnnnnnnnnnnnaaaacggttcaatatctaggaacacatttgtgttctaacgtttgtcctgaatattaaagcatataattacacttttaaaaaaccaacaaaactagttgtaatatacccgtattacaaaatttcaaaagttgtatagaaaaatagtaacattaaaaatatgagaaataacttgttcagcagcaataaaaaaattagaagatagaaaaagcaaactaaaaaacagtacatataatccaattacgtaaaaatcttaatatgtgtaaagtgcaaggaaaagattagaggactacagatcccgatgtttaatggtagttctctctgcgtggtgaactttagaaataattttggctgtgtcagtatcnaccaaaacctgaaaaaacgggcagattaccttgagccccaaaagttggggaaccaccatggggcaacttggtttttttgtagaaacccttctccttcaaaaaatcctaaaattttgcccaggggttggg

SEQ ID NO: 41029 - DNA, 678 bp, Macaca Mulatta
aagttaaaaaaatgtctttctgatgttgtgttgtcattttcattcttgcatttttttgtttgcatatgaggagaaaagagaaaagagaaagcaagagacagaaatcaggactaagtcctctgcttcagtttcattgttaatgggccttattctgatctcacctgtcgcgtagctctaatattcacataaactgaaataaagaagtggaatgaggagctttgacattcaaattatgtgatgtaatttatcttccataggaattttgatggatacatctcaaaatatatagccagacttgagaggtgacaattaaagatctaaaaaagagaggagattccccaaacaacaatatttaattttcttagtaaaaagaataacaaaatgcatcatggcaatccttcagcaacattatctatgtggactgcttaaatcagcaaaacaccagaagtttggttaacttgggcaatatggcaagtattactttttgggcaaaactactcattaagcaatttctctagtgtgtcggacacaaataggttctttatttttggcatgtatgcctttttattttcattcaattttttttttctcagacagacatagtagtaatgactagcattggaaaatacatatcactattcttgggaatatttatggtcagcctacttgttagtagaa

SEQ ID NO: 41030 - DNA, 269 bp, Macaca Mulatta
tgatacttgtatattacacagtcctgatttcagacaatttcaaccttaatctatttaaaaaaaatattctatacaagctgtttttaagccttttaccatttgaaatgcatgtgttgtgcgcgttgagggatgggaggaggggctgagaggcggctcagtgtcacctcccacagccaccggccctgacccttaatccagacaccgatggaagtcgacttttcatatctttctcctgaaatgaactctgttttaaattggaataaattttg

SEQ ID NO: 41031 - DNA, 647 bp, Macaca Mulatta
  misc_feature (1)...(647): n = A,T,C or G
ggggggatcttcccccatgacccaaacacttcccatcaggccccacctccaacattgggatcaaatttcgacatgaaattttgggggacaaacatccaaactatagcagcaaccaaccaccattctaaaactgccatgtgagtttaggattttaaaaaagggccacatttaggttaaacaaaaagtgaaaatacagtaagagaaaatactttcataaaggctttaaaaagtgttcataaaaagcagttcctacatttttcacgtaagattcatcaatagatgctaaaactattggatgaaaatctgttgtggaataggaatcttcacaaggatttaaatataatcctacagaagatatatcagttatacaggggaaaatgtacctttacaatggtcaccacaataaccaagtgattcaatttagcagcacccaaggtggagcaccctaacattatgcccctcctgatgtgatttaagaattttacttatttagttttcttgcacaaagtgttaaactggaatttaagcatgangaaattattagacaaatcatgaatgtagtcattctataagatgattgacttgngcttctcaaaaagtcagtgtcatnnnnnnnnnnnnnnnnnnnnanannnnccttgtcggcc

SEQ ID NO: 41032 - DNA, 680 bp, Macaca Mulatta
tgaaagaggaagtggactgacaagagacaagattctgatcaaaaggaatcccctagagccaaagatgaaaggtgcgccaaaggtccatctgctgtatgagggtagatttcttggagtctttggtgttcccagtttgtgaagagtgaagatatcatccaaatcatggcagattatgagctcatatgtattacttgatatatattaccacgggaaattcagattaaattggaaatgatgctcagaaattcatctatgaatctgatgtgttgtggaaacaccagagcaacattcatatggtaaatgaatgaatgactaaggacatctcattcacaaatctggagagtcctcagaagggaccagagcatttgctagttggcaccagatcttgtccaataatacactgaaaagcacaatttgtacagctctgagagtgaagacaggaacgttgggatcatcctgcccctttgcagagaaacactgcagaagctaaggcataggaattctacagcatgatgttttggacttcccttttggggatttgaaacaatctgggtattggtaacgggggcaagatattgtgatccgtagcataaaataaagcttaaaagtttagtaaaaatcagtggcaagttaaaatcaggatttatttttattagaagttgctaagatgaatgttttcc

SEQ ID NO: 41033 - DNA, 31043 bp, Macaca Mulatta
  misc_feature (1)...(31043): n = A,T,C or G
ctaagcgatgtagaaacaagtgctgaaaaggtcagaagtacaatttcctctctggggactccatctacatccacagagcagacagcagagactatccttaccttccgtgccttcgctgagaccacggatacacctggcacccacatagccaagactttggcttcagaatggtcagggagtccaggtaccctcagtggcaccagcacttcagcggtgacaaccacatctccatctaccactttagtctcagaggagaccaacacccatcactccatgagtagaatggaaacagaaggaactttgaatacatccatgactccacttgagacctctgctcctggagaagagaccgaaatgactgccaccttggtccccaccccaggttttactactctttacaagaagattagtagtccatctcaggtctcttcatcacacccaacaagagagctcagaaccgcaggcagcacctctgggaagcagagttccagaggagctgcccacaggagctctgacatcctgaaggcaaccacttccagcacctcaacagcatcatcatggaccagtgaaagcacagctcagcaatttagtgaaccccagcacacacagtgggtggagacaagtcctagcatgaaaacagagagacccccagcatcaaccagtgtggcagcccgtgccaccacttctcctgttccctcagtgggggctggcttcaccaccctgaagaccagctccccttaaggggatttggcttaaataaacatctgctgacacacnnnnnnnnnnnnnnnnnnnnnnnnnnnnnnnnnnnnnnnnnnnnnnnnnnnnnnnnnnnnnnnnnnnnnnnnnnnnnnnnnnnnnnnnnnnnnnnnnnnnnnnnnnnnnnnnnnnnnnnnnnnnnnnnnnnnnnnnnnnnnnnnnnnnnnnnnnnnnnnnnnnnnnnnnnnnnnnnnnnnnnnnnnnnnnnnnnnnnnnnnnnnnnnnnnnnnnnnnnnnnnnccaggagggacaaatccatcatatacaatggtttcttctgtcatccctgagatgtcatctttagagtccccagcttctagggaaggaaccagcctgggactgactccattaaacactagacatccctcctcttcccctgaaccagactctgcaggacctaccaagataagcaccagcgttcctctgttgttatctgcttcagctcttgaggatacagtgtcagcgattattatattctcacaccacagaggcacctcatctatgaccacagggactcctgaaatctcaacaaagacaaaggccaggtcagccattcttttctccatgtnnnnnnnnnnnnnnnnnnnnnnnnnnnnnnnnnnnnnnnnnnnnnnnnnnnnnnnnnnnnnnnnnnnnnnnnnnnnnnnnnnnnnnnnnnnnnnnnnnnnnnnnnnnnnnnnnnnnnnnnnnnnnnnnnnnnnnnnnnnnnnnnnnnnnnnnnnnnnnnnnnnnnnnnnnnnnnnnnnnnnnnnnnnnnnnnnnnnnnnnnnnnnnnnnnnnnnnnnnnnnnnnnnnnnnnnnnnnnnnnnnnnnnnnnnnnnnnnnnnnnnnnnnnnnnnnnnnnnnnnnnnnnnnnnnnnnnnnnnnnnnnnnnnnnnnnnnnnnnnnnnnnnnnnnnnnnnnnnnnnnnnnnnnnnnnnnnnnnnnnnnnnnnnnnnnnnnnnnnnnnnnnnnnnnnnnnnnnnnnnnnnnnnnnnnnnnnnnnnnnnnnnnnnnnnnnnnnnnnnnnnnnnnnnnnnnnnnnnnnnnnnnnnnnnnnnnnnnnnnnnnnnnnnnnnnnnnnnnnnnnnnnnnnnnnnnnnnnnnnnnnnnnnnnnnnnnnnnnnnnnnnnnnnnnnnnnnnnnnnnnnnnnnnnnnnnnnnnnnnnnnnnnnnnnnnnnnnnnnnnnnnnnnnnnnnnnnnnnnnnnnnnnnnnnnnnnnnnnnnnnnnnnnnnnnnnnnnnnnnnnnnnnnnnnnnnnnnnnnnnnnnnnnnnnnnnnnnnnnnnnnnnnnnnnnnnnnnnnnnnnnnnnnnnnnnnnnnnnnnnnnnnnnnnnnnnnnnnnnnnnnnnnnnnnnnnnnnnnnnnnnnnnnnnnnnnnnnnnnnnnnnnnnnnnnnnnnnnnnnnnnnnnnnnnnnnnnnnnnnnnnnnnnnnnnnnnnnnnnnnnnnnnnnnnnnnnnnnnnnnnnnnnnnnnnnnnnnnnnnnnnnnnnnnnnnnnnnnnnnnnnnnnnnnnnnnnnnnnnnnnnnnnnnnnnnnnnnnnnnnnnnnnnnnnnnnnnnnnnnnnnnnnnnnnnnnnnnnnnnnnnnnnnnnnnnnnnnnnnnnnnnnnnnnnnnnnnnnnnnnnnnnnnnnnnnnnnnnnnnnnnnnnnnnnnnnnnnnnnnnnnnnnnnnnnnnnnnnnnnnnnnnnnnnnnnnnnnnnnnnnnnnnnnnnnnnnnnnnnnnnnnnnnnnnnnnnnnnnnnnnnnnnnnnnnnnnnnnnnnnnnnnnnnnnnnnnnnnnnnnnnnnnnnnnnnnnnnnnnnnnnnnnnnnnnnnnnnnnnnnnnnnnnnnnnnnnnnnnnnnnnnnnnnnnnnnnnnnnnnnnnnnnnnnnnnnnnnnnnnnnnnnnnnnnnnnnnnnnnnnnnnnnnnnnnnnnnnnnnnnnnnnnnnnnnnnnnnnnnnnnnnnnnnnnnnnnnnnnnnnnnnnnnnnnnnnnnnnnnnnnnnnnnnnnnnnnnnnnnnnnnnnnnnnnnnnnnnnnnnnnnnnnnnnnnnnnnnnnnnnnnnnnnnnnnnnnnnnnnnnnnnnnnnnnnnnnnnnnnnnnnnnnnnnnnnnnnnnnnnnnnnnnnnnnnnnnnnnnnnnnnnnnnnnnnnnnnnnnnnnnnnnnnnnnnnntgcttactcttctgggtcttcgcctgagatgacagctcctggagagactaacactgatagtacctgggcccccaccacctacatcaccactacggatcctaaggatacaagttcagctcaggtctctacaccccactcagtgagnnnnnnnnnnnnnnnnnnnnnnnnnnnnnnnnnnnnnnnnnnnnnnnnnnnnnnnnnnnnnnnnnnnnnnnnnnnnnnnnnnnnnnnnnnnnnnnnnnnnnnnnnnnnnnnnnnnnnnnnnnnnnnnnnnnnnnnnnnnnnnnnnnnnnnnnnnnnnnnnnnnnnnnnnnnnnnnnnnnnnnnnnnnnnnnnnnnnnnnnnnnnnnnnnnnnnnnnnnnnnnnnnnnnnnnnnnnnnnnnnnnnnnnnnnnnnnnnnnnnnnnnnnnnnnnnnnnnnnnnnnnnnnnnnnnnnnnnnnnnnnnnnnnnnnnnnnnnnnnnnnnnnnnnnnnnnnnnnnnnnnnnnnnnnnnnnnnnnnnnnnnnnnnnnnnnnnnnnnnnnnnnnnnnnnnnnnnnnnnnnnnnnnnnnnnnnnnnnnnnnnnnnnnnnnnnnnnnnnnnnnnnnnnnnnnnnnnnnnnnnnnnnnnnnnnnnnnnnnnnnnnnnnnnnnnnnnnnnnnnnnnnnnnnnnnnnnnnnnnnnnnnnnnnnnnnnnnnnnnnnnnnnnnnnnnnnnnnnnnnnnnnnnnnnnnnnnnnnnnnnnnnnnnnnnnnnnnnnnnnnnnnnnnnnnnnnnnnnnnnnnnnnnnnnnnnnnnnnnnnnnnnnnnnnnnnnnnnnnnnnnnnnnnnnnnnnnnnnnnnnnnnnnnnnnnnnnnnnnnnnnnnnnnnnnnnnnnnnnnnnnnnnnnnnnnnnnnnnnnnnnnnnnnnnnnnnnnnnnnnnnnnnnnnnnnnnnnnnnnnnnnnnnnnnnnnnnnnnnnnnnnnnnnnnnnnnnnnnnnnnnnnnnnnnnnnnnnnnnnnnnnnnnnnnnnnnnnnnnnnnnnnnnnnnnnnnnnnnnnnnnnnnnnnnnnnnnnnnnnnnnnnnnnnnnnnnnnnnnnnnnnnnnnnnnnnnnnnnnnnnnnnnnnnnnnnnnnnnnnnnngaaagaggaagttctacagccactgtctccatggctgggactgtgggactcctagttactagtgctccaggaagaagcatcaaccagtcattaggaagagtttcctctgtcctttctgagtcaactactgaaggagtcacagattctagtaagggaagcagtccaaggctgaacacacagggaaatacagctccctcctcctcttttgaacccagctctgctgaaggaagccagatgagcacaagcatccctctaccctcatctcctccaactcctgatgtggaattcatagggggcagtacattttggaccaaggaagtcaccacagttatgatctcagacatctccaagtcttcatcaaggacagagtccagcttagctacccttatgtccacagctttgggaagcactgaaaataccnnnnnnnnnnnnntcagaactgcctctatggatcttccatctccaactccatcaatggaggtgacaccatggagttctctcactctcagtaacacccccaagaccacagattcacctgacctcagccatggggtgcacaccagctctacagggactttggtcactgacaggccattgaatactggtgtcactagagccttcagattggaaaacagctccagcacctcttctgagtccctgtctgtgggaaccagcactcacacatccatgatttacatagagaagagtgaagtgccttcttcaatacgtccccaacctgagacctcagctcctgaagcagagaccactttgacttccactcctggaaacaaggccacaagcttaacattgcctttttcatccattccagtggaggaagtcatttctacaggcataacctcaggactagacatcagctcagtacccatgacacattctcccatcaccccaccaacaattgcatggaccagtacaggcacaattgaacagttcactgaaccactacatgcagtttcttcagaaaacgtttctgggcagacacagtcaactccatatgtcaatgctgtggcagtgtctgcttcccctacccatgagaactcagtctcttctggaagcagcacgtccgttccatattccttagcctcacttgaatccttggattccacaatcagtacnnnnnnnnnnnnnnnnnnnnnnnnnnnnnnnnnnnnnnnnnnnnnnnnnnnnnnnnnnnnnnnnngtactagtttatctgaggcattgtcctcagctcattctggggtttcanacccaagttcaactatgactgaatttccactcttttcagctgcattcacatctgctgctaagcaaacaaatccagaaacagagacctatgggnnnnnnnnnnnnnnnnnnnnnnnnnnnnnnnnnnnnnnnnnnnnnnnnnnnnnnnntttctgagacttctgtgggggcaactatcagctctgaagtccttcttccaatgaccgtaacttccagatcagatgtttctggccttatgtctgagagtactgctaacctgagtttaggcacagcctcttcaggagggaccaaattaactaggacaatatccctgcccacttcagagtctttggtttcctttagaatgaacaaggatccacggacagtgtcaatccctttggggtcccatccaactattaatacagaaacaagcttcccagtaaacagtgcaggttcacctggcttgtccacagtagcatcagatgtaattgacacaccttcagatggggctgaaagtattcccactgtctccttttccccctcccctgataatgaagtgacaactatctcacatttcccagaaaagacaactcattcatttagaaccatttcatctctcactcctgagttgacttcaagagtgacacctactcctggggattggaccggttcagctgtgtccacaaagcccacagaagccagttcttccattacactgggagagagaatgacaatcacctctgctgctccaaccacttcccccatagttctcactgttagtttcacagagaccagcacagtttcacgggataatgaaactacagtaaaannnnnnnnnnnnnnnnnnnnnnnnnnnnnnnnnnnnnnnnnnnnnnnnnnnnnnnnnnnnnnnnnnnnnnnnnnnnnnnnnnnnnnnnnnnnnnnnnnnnnnnnnnnnnnnnnnnnnnnnnnnnnnnnnnnnnnnnnnnnnnnnnnnnnnnnnnnnnnnnnnnnnnnnnnnnnnnnnnnnnnnnnnnnnnnnnnnnnnnnnnnnnnnnnnnnnnnnnnnnnnnnnnnnnnnnnnnnnnnnnnnnnnnnnnnnnnnnnnnnnnnnnnnnnnnnnnnnnnnnnnnnnnnnnnnnnnnnnnnnnnnnnnnnnnnnnnnnnnnnnnnnnnnnnnnnnnnnnnnnnnnnnnnnnctggtctagaccagtaggaactttcagcaccatggtcagcactgacactgccaccggagaaaatcctacctctagcaattctgtggtgacttctgttccagcaccaggtatatggaccagtgtagacagcactactgacttacccgccatgggctctctcaagacaagtcctgcaggagagacacactcacttccagcatcaactattgaaccagccactgccttcactccccatctctcagcgacagtggtcactggatccagtgctacatcagaagccagtcttctcactatgactgaaagcaaaaccattcattcttcatcacagaccccaactacaaccacctctggagcaagctgggaaacttcagctactcctgagagccttttggccgtcactgagacttcagacacatcactcacctcaaagatttcagtgacagataccatcttgttttcaactgtgtccacaccaccttctaaacttccaagtacagggactctctctggagcctcctcccctactttactcccggacactccagccatcccactcaccaccactgagccaacaagttcattagctacatcctttgattctaccccactggtgactatagatttggatagacttggcacagtcccagagactaccctgaccatgtcagagacctcaaatggggatgcactggttcttaagacagtaagtaacccagataggggcatccctggaatcactatccaaggggtagcagaaaatcgactccatccttcttctacttcnnnnnnnnnnnnnnnnnnnnnnnnnnnnnnnnnnnnnnnnnnnnnnnnnnnnnnnnnnnnnnnnnnnnnnnnnnnnnnnnnnnnnnnnnnnnnnnnnnnnnnnnnnnnnnnnnnnnnnnnnnnnnnnnnnnnnnnnnnnnnnnnnnnnnnnnnnnnnnnnnnnnnnnnnnnnnnnnnnnnnnnnnnnnnnnnnnnnnnnnnnnnnnnnnnnnnnnnnnnnnnnnnnnnnnnnnnnnnnnnnnnnnnnnnnnnnnnnnnnnnnnnnnnnnnnnnnnnnnnnnnnnnnnnnnnnnnnnnnnnnnnnnnnnnnnnnnnnnnnnnnnnnnnnnnnnnnnnnnnnnnnnnnnnnnnnnnnnnnnnnnnnnnnnnnnnnnnnnnnnnnnnnnnnnnnnnnnnnnnnnnnnnnnnnnnnnnnnnnnnnnnnnnnnnnnnnnnnnnnnnnnnnnnnnnnnnnnnnnnnnnnnnnnnnnnnnnnnnnnnnnnnnnnnnnnnnnnnnnnnnnnnnnnnnnnnnnnnnnnnnnnnnnnnnnnnnnnnnnnnnnnnnnnnnnnnnnnnnnnnnnnnnnnnnnnnnnnnnnnnnnnnnnnnnnnnnnnnnnnnnnnnnnnnnnnnnnnnnnnnnnnnnnnnnnnnnnnnnnnnnnnnnnnnnnnnnnnnnnnnnnnnnnnnnnnnnnnnnnnnnnnnnnnnnnnnnnnnnnnnnnnnnnnnnnnnnnnnnnnnnnnnnnnnnnnnnnnnnnnnnnnnnnnnnnnnnnnnnnnnnnnnnnnnnnnnnnnnnnnnnnnnnnnnnnnnnnnnnnnnnnnnnnnnnnnnnnnnnnnnnnnnnnnnnnnnnnnnnnnnnnnnnnnnnnnnnnnnnnnnnnnnnnnnnnnnnnnnnnnnnnnnnnnnnnnnnnnnnnnnnnnnnnnnnnnnnnnnnnnnnnnnnnnnnnnnnnnnnnnnnnnnnnnnnnnnnnnnnnnnnnnnnnnnnnnnnnnnnnnnnnnnnnnnnnnnnnnnnnnnnnnnnnnnnnnnnnnnnnnnnnnnnnnnnnnnnnnnnnnnnnnnnnnnnnnnnnnnnnnnnnnnnnnnnnnnnnnnnnnnnnnnnnnnnnnnnnnnnnnnnnnnnnnnnnnnnnnnnnnnnnnnnnnnnnnnnnnnnnnnnnnnnnnnnnnnnnnnnnnnnnnnnnnnnnnnnnnnnnnnnnnnnnnnnnnnnnnnnnnnnnnnnnnnnnnnnnnnnnnnnnnnnnnnnnnnnnnnnnnnnnnnnnnnnnnnnnnnnnnnnnnnnnnnnnnnnnnnnnnnnnnnnnnnnnnnnnnnnnnnnnnnnnnnnnnnnnnnnnnnnnnnnnnnnnnnnnnnnnnnnnnnnnnnnnnnnnnnnnnnnnnnnnnnnnnnnnnnnnnnnnnnnnnnnnnnncaggcacatccccaggaagcccagaaatgtctacagctctcaaaatcatgagctccaagaaacccagcatcagcccagagatcaggtccactgtgagaatttctccttggaagactgcagaaacaactgttcccatggagaccactgtggaaccagtcacccttcagtccacagccctaggaagtagcagcaccagcctctctcacctgcccacaggagccacatcaccaaccaagtcaccaacagaaaatatgatggctacagaaagggtctccctctccccatccccacctgaggcttggaccaatctttattctggaactccaagagggaccaggcagtcactggccacaacgctctctgtctccttagaatcaccaactgctagaagcacgacagggactggtcagcaaagcagtccagaattgatttcgaagacaactggaatggaatcctctatgtggcatggctctactggaggggccacagtagacacacatgtctctctgagcacatctcccaatatccttgaagaccgtgtaaccagcccaaactctgtgagctcagtcacaaataaatccaaacataaaaccgagtcatgggtcagcaccacagccattccctccacaatcctgaatcacaagacaatggcagctgaagaacagacaagtcgatctgtggatgaggcttattcatcaactagctcatggtcagatcagacatctgggagtgacatcacccttggtgcatctcctgatgtcacaaagacattatacatcacctccacagcacaaaccacctcactagcatctctgccctctggagaccaaagcattaccagcctcaccagtccctcaggagaaaaaagaagctctgcgtcatctgtcacatnnnnnnnnnnnnnnnnnnnnnnnnnnnnnnnnnnnnnnnnnnnnnnnnnnnnnnnnnnnnnnnnnnnnnnnnnnnnnnnnnnnnnnnnnnnnnnnnnnnnnnnnnnnnnnnnnnnnnnnnnnnnnnnnnnnnnnnnnnnnnnnnnnnnnnnnnnnnnnnnnnnnnnnnnnnnnnnnnnnnnnnnnnnnnnnnnnnnnnnnnnnnnnnnnnnnnnnnnnnnnnnnnnnnnnnnnnnnnnnnnnnnnnnnnnnnnnnnnnnnnnnnnnnnnnnnnnnnnnnnnnnnnnnnnnnnnnnnnnnnnnnnnnnnnnnnnnnnnnnnnnnnnnnnnnnnnnnnnnnnnnnnnnnnnnnnnnnnnnnnnnnnnnnnnnnnnnnnnnnnnnnnnnnnnnnnnnnnnnnnnnnnnnnnnnnnnnnnnnnnnnnnnnnnnnnnnnnnnnnnnnnnnnnnnnnnnnnnnnnnnnnnnnnnnnnnnnnnnnnnnnnnnnnnnnnnnnnnnnnnnnnnnnnnnnnnnnnnnnnnnnnnnnnnnnnnnnnnnnnnnnnnnnnnnnnnnnnnnnnnnnnnnnnnnnnnnnnnnnnnnnnnnnnnnnnnnnnnnnnnnnnnnnnnnnnnnnnnnnnnnnnnnnnnnnnnnnnnnnnnnnnnnnnnnnnnnnnnnnnnnnnnnnnnnnnnnnnnnnnnnnnnnnnnnnnnnnnnnnnnnnnnnnnnnnnnnnnnnnnnnnnnnnnnnnnnnnnnnnnnnnnnnnnnnnnnnnnnnnnnnnnnnnnnnnnnnnnnnnnnnnnnnnnnnnnnnnnnnnnnnnnnnnnnnnnnnnnnnnnnnnnnnnnnnnnnnnnnnnnnnnnnnnnnnnnnnnnnnnnnnnnnnnnnnnnnnnnnnnnnnnnnnnnnnnnnnnnnnnnnnnnnnnnnnnnnnnnnnnnnnnnnnnnnnnnnnnnnnnnnnnnnnnnnnnnnnnnnnnnnnnnnnnnnnnnnnnnnnnnnnnnnnnnnnnnnnnnnnnnnnnnnnnnnnnnnnnnnnnnnnnnnnnnnnnnnnnnnnnnnnnnnnnnnnnnnnnnnnnnnnnnnnnnnnnnnnnnnnnnnnnnnnnnnnnnnnnnnnnnnnnnnnnnnnnnnnnnnnnnnnnnnnnnnnnnnnnnnnnnnnnnnnnnnnnnnnnnnnnnnnnnnnnnnnnnnnnnnnnnnnnnnnnnnnnnnnnnnnnnnnnnnnnnnnnnnnnnnnnnnnnnnnnnnnnnnnnnnnnnnnnnnnnnnnnnnnnnnnnnnnnnnnnnnnnnnnnnnnnnnnnnnnnnnnnnnnnnnnnnnnnnnnnnnnnnnnnnnnnnnnnnnnnnnnnnnnnnnnnnnnnnnnnnnnnnnnnnnnnnnnnnnnnnnnnnnnnnnnnnnnnnnnnnnnnnnngtcacaagttccgaacatgcttctcattctactgtcccagctcactcagagtcatccaaactcacatctccagtggttactgcctccaccagggaccaagcaatagtttctgcatcagcaaccacaaggccagagtctacaaggactggaacagagcctaattcctccttgactactgaactgaaggatttcagcccttacatggagtccagctcaaccacacaaacaagtattatctcttccccaggttccactgcgatcaccaaggggcctagaacagaaattacctcctctaagagaatatccagctcattccttgcccagtctgtgaggtcatcagacagcccctcagaaaccatcaccaggctgtctaacttccctgccacgacagaatctggaggaatgaccctcactatgcaaacaagtccacctggcgctacatcactaagtgcacctactttggatacatcagccacagcctcctggacagggactccactggctatgactcagagatttacatactcagagaagaccactctctttagcaaaggtcctgaggatacatcacaaccaagccctccctctgtagaagaaaccagctcttcctcttccctggtacctatccatgccacaacctcaccttccaatattttgttgacatcacaaggacacagtccctcctctactccacctgtgacctcagttttctggtctgagacctctnnnnnnnnnnnnnnnnnnnnnnnnnnnnnnnnnnnnnnnnnnnnnnnnnnnnnnnnnnnnnnnnnnnnnnnnnnnnnnnnnnnnnnnnnnnnnnnnnnnnnnnnnnnnnnnnnnnnnnnnnnnnnnnnnnnnnnnnnnnnnnnnnnnnnnnnnnnnnnnnnnnnnnnnnnnnnnnnnnnnnnnnnnnnnnnnnnnnnnnnnnnnnnnnnnnnnnnnnnnnnnnnnnnnnnnnnnnnnnnnnnnnnnnnnnnnnnnnnnnnnnnnnnnnnnnnnnnnnnnnnnnnnnnnnnnnnnnnnnnnnnnnnnnnnnnnnnnnnnnnnnnnnnnnnnnnnnnnnnnnnnnnnnnnnnnnnnnnnnnnnnnnnnnnnnnnnnnnnnnnnnnnnnnnnnnnnnnnnnnnnnnnnnnnnnnnnnnnnnnnnnnnnnnnnnnnnnnnnnnnnnnnnnnnnnnnnnnnnnnnnnnnnnnnnnnnnnnnnnnnnnnnnnnnnnnnnnnnnnnnnnnnnnnnnnnnnnnnnnnnnnnnnnnnnnnnnnnnnnnnnnnnnnnnnnnnnnnnnnnnnnnnnnnnnnnnnnnnnnnnnnnnnnnnnnnnnnnnnnnnnnnnnnnnnnnnnnnnnnnnnnnnnnnnnnnnnnnnnnnnnnnnnnnnnnnnnnnnnnnnnnnnnnnnnnnnnnnnnnnnnnnnnnnnnnnnnnnnnnnnnnnnnnnnnnnnnnnnnnnnnnnnnnnnnnnnnnnnnnnnnnnnnnnnnnnnnnnnnnnnnnnnnnnnnnnnnnnnnnnnnnnnnnnnnnnnnnnnnnnnnnnnnnnnnnnnnnnnnnnnnnnnnnnnnnnnnnnnnnnnnnnnnnnnnnnnnnnnnnnnnnnnnnnnnnnnnnnnnnnnnnnnnnnnnnnnnnnnnnnnnnnnnnnnnnnnnnnnnnnnnnnnnnnnnnnnnnnnnnnnnnnnnnnnnnnnnnnnnnnnnnnnnnnnnnnnnnnnnnnccacagacatagagacaattcatccttccataaacaaagcagtgaccaatatggggaccaccagttcagcacatgaactgcattccactctcccagtcagctcagaatcatccacagccacatctccaatggttcctgcctctgctatgggggatgctcttgcttctacatcaacacctcgttctgagaccacagacactgggggagagccaacatcctccctgactgctgaacaaaaagagaacagcactctccaggagatgaactcaactacagagccaaacatcatcctctccaatgtgtctgtgtggattgctactgaagcctccaaagtggaagtcccctcttttgatgcaacattcataccaactcctgctcggtcaacaaagttccaagatattttctcagtatccggcagtagactttcaaactctcctcccatgacaatatctacccacatgaccaccacccagacagggtcttctggagctacatcaaagattccacttgccttagacacatcaacgttggaaacctcagcagggactccatcagtggtgactgaggggttttccccctcaaaaataaccactgccatgaacaatgatgccaaggatgtatcacagacaagccctctctaagaggaggaagccagctctccctcttctcaggcacctgtccttgtcacaannnnnnnnnnnnnnnnnnnnnnnnnnnnnnnnnnnnnnnnnnnnnnnnnnnnnnnnnnnnnnnnnnnnnnnnnnnnnnnnnnnnnnnnnnnnnnnnnnnnnnnnnnnnnnnnnnnnnnnnnnnnnnnnnnnnnnnnnnnnnnnnnnnnnnnnnnnnnnnnnnnnnnnnnnnnnnnnnnnnnnnnnnnnnnnnnnnnnnnnnnnnnnnnnnnnnnnnnnnnnnnnnnnnnnnnnnnnnnnnnnnnnnnnnnnnnnnnnnnnnnnnnnnnnnnnnnnnnnnnnnnnnnnnnnnnnnnnnnnnnnnnnnnnnnnnnnnnnnnnnnnnnnnnnnnnnnnnnnnnnnnnnnnnnnnnnnnnnnnnnnnnnnnnnnnnnnnnnnnnnnnnnnnnnnnnnnnnnnnnnnnnnnnnnnnnnnnnnnnnnnnngactgagggagaccagcatctcccnnnnnnnnnnnnnnnnnnnnnnnnnnnnnnnnnnnnnnnnnnnnnnnnnnnnnnnnnnnnnnnnnnnnnnnnnnnnnnnnnnnnnnnnnnnnnnnnnnnnnnnnnnnnnnnnnnnnnnnnnnnnnnnnnnnnnnnnnnnncatctccacagaaaccatcaccaggnnnnnnnnnnnnnnnnnnnnnnnnnnnnnnnnnnnnnnnnnnnnnnnnnnnnnnnnnnnnnnnnnnnnnnnnnnnnnnnnnnnnnnnnnnnnnnnnnnnnnnnnnnnnnnnnnnnnnnnnnnnnnnnnnnnnnnnnnnnnnnnnnnnnnnnnnnnnnnnnnnnnnnnnnnnnnnnnnnnnnnnnnnnnnnnnnnnnnnnnnnnnnnnnnnnnnnnnnnnnnnnnnnnnnnnnnnnnnnnnnnnnnnnnnnnnnnnnnnnnnnnnnnnnnnnnnnnnnnnnnnnnnnnnnnnnnnnnnnnnnnnnnnnnnnnnnnnnnnnnnnnnnnnnnnnnnnnnnnnnnnnnnnnnnnnnnnnnnnnnnnnnnnnnnnnnnnnnnnnnnnnnnnnnnnnnnnnnnnnnnnnnnnnnnnnnnnnnnnnnnnnnnnnnnnnnnnnnnnnnnnnnnnnnnnnnnnnnnnnnnnnnnnnnnnnnnnnnnnnnnnnnnnnnnnnnnnnnnnnnnnnnnnnnnnnnnnnnnnnnnnnnnnnnnnnnnnnnnnnnnnnnnnnnnnnnnnnnnnnnnnnnnnnnnnnnnnnnnnnnnnnnnnnnnnnnnnnnnnnnnnnnnnnnnnnnnnnnnnnnnnnnnnnnnnnnnnnnnnnnnnnnnnnnnnnnnnnnnnnnnnnnnnnnnnnnnnnnnnnnnnnnnnnnnnnnnnnnnnnnnnnnnnnnnnnnnnnnnnnnnnnnnnnnnnnnnnnnnnnnnnnnnnnnnnnnnnnnnnnnnnnnnnnnnnnnnnnnnnnnnnnnnnnnnnnnnnnnnnnnnnnnnnnnnnnnnnnnnnnnnnnnnnnnnnnnnnnnnnnnnnnnnnnnnnnnnnnnnnnnnnnnnnnnnnnnnnnnnnnnnnnnnnnnnnnnnnnnnnnnnnnnnnnnnnnnnnnnnnnnnnnnnnnnnnnnnnnnnnnnnnnnnnnnnnnnnnnnnnnnnnnnnnnnnnnnnnnnnnnnnnnnnnnnnnnnnnnnnnnnnnnnnnnnnnnnnnnnnnnnnnnnnnnnnnnnnnnnnnnnnnnnnnnnnnnnnnnnnnnnnnnnnnnnnnnnnnnnnnnnnnnnnnnnnnnnnnnnnnnnnnnnnnnnnnnnnnnnnnnnnnnnnnnnnnnnnnnnnnnnnnnnnnnnnnnnnnnnnnnnnnnnnnnnnnnnnnnnnnnnnnnnnnnnnnnnnnnnnnnnnnnnnnnnnnnnnnnnnnnnnnnnnnnnnnnnnnnnnnnnnnnnnnnnnnnnnnnnnnnnnnnnnnnnnnnnnnnnnnnnnnnnnnnnnnnnnnnnnnnnnnnnnnnnnnnnnnnnnnnnnnnnnnnnnnnnnnnnnnnnnnnnnnnnnnnnnnnnnnnnnnnnnnnnnnnnnnnnnnnnnnnnnnnnnnnnnnnnnnnnnnnnnnnnnnnnnnnnnnnnnnnnnnnnnnnnnnnnnnnnnnnnnnnnnnnnnnnnnnnnnnnnnnnnnnnnnnnnnnnnnnnnnnnnnnnnnnnnnnnnnnnnnnnnnnnnnnnnnnnnnnnnnnnnnnnnnnnnnnnnnnnnnnnnnnnnnnnnnnnnnnnnnnnnnnnnnnnnnnnnnnnnnnnnnnnnnnnnnnnnnnnnnnnnnnnnnnnnnnnnnnnnnnnnnnnnnnnnnnnnnnnnnnnnnnnnnnnnnnnnnnnnnnnnnnnnnnnnnnnnnnnnnnnnnnnnnnnnnnnnnnnnnnnnnnnnnnnnnnnnnnnnnnnnnnnnnnnnnnnnnnnnnnnnnnnnnnnnnnnnnnnnnnnnnnnnnnnnnnnnnnnnnnnnnnnnnnnnnnnnnnnnnnnnnnnnnnnnnnnnnnnnnnnnnnnnnnnnnnnnnnnnnnnnnnnnnnnnnnnnnnnnnnnnnnnnnnnnnnnnnnnnnnnnnnnnnnnnnnnnnnnnnnnnnnnnnnnnnnnnnnnnnnnnnnnnnnnnnnnnnnnnnnnnnnnnnnnnnnnnnnnnnnnnnnnnnnnnnnnnnnnnnnnnnnnnnnnnnnnnnnnnnnnnnnnnnnnnnnnnnnnnnnnnnnnnnnnnnnnnnnnnnnnnnnnnnnnnnnnnnnnnnnnnnnnnnnnnnnnnnnnnnnnnnnnnnnnnnnnnnnnnnnnnnnnnnnnnnnnnnnnnnnnnnnnnnnnnnnnnnnnnnnnnnnnnnnnnnnnnnnnnnnnnnnnnnnnnnnnnnnnnnnnnnnnnnnnnnnnnnnnnnnnnnnnnnnnnnnnnnnnnnnnnnnnnnnnnnnnnnnnnnnnnnnnnnnnnnnnnnnnnnnnnnnnnnnnnnnnnnnnnnnnnnnnnnnnnnnnnnnnnnnnnnnnnnnnnnnnnnnnnnnnnnnnnnnnnnnnnnnnnnnnnnnnnnnnnnnnnnnnnnnnnnnnnnnnnnnnnnnnnnnnnnnnnnnnnnnnnnnnnnnnnnnnnnnnnnnnnnnnnnnnnnnnnnnnnnnnnnnnnnnnnnnnnnnnnnnnnnnnnnnnnnnnnnnnnnnnnnnnnnnnnnnnnnnnnnnnnnnnnnnnnnnnnnnnnnnnnnnnnnnnnnnnnnnnnnnnnnnnnnnnnnnnnnnnnngctgaggtctccaggacagaagnnnnnnnnnnnnnnnnnnnnnnnnnnnnnnnnnnnnnnnnnnnnnnnnnnnnnnnnnnnnnnnnnnnnnnnnnnnnnnnnnnnnnnnnnnnnnnnnnnnnnnnnnnnnnnnnnnnnnnnnnnnnnnnnnnnnnnnnnnnnnnnnnnnnnnnnnnnnnnnnnnnnnnnnnnnnnnnnnnnnnnnnnnnnnnnnnnnnnnnnnnnnnnnnnnnnnnnnnnnnnnnnnnnnnnnnnnnnnnnnnnnnnnnnnnnnnnnnnnnnnnnnnnnnnnnnnnnnnnnnnnnnnnnnnnnnnnnnnnnnnnnnnnnnnnnnnnnnnnnnnnnnnnnnnnnnnnnnnnnnnnnnnnnnnnnnnnnnnnnnnnnnnnnnnnnnnnnnnnnnnnnnnnnnnnnnnnnnnnnnnnnnnnnnnnnnnnnnnnnnnnnnnnnnnnnnnnnnnnnnnnnnnnnnnnnnnnnnnnnnnnnnnnnnnnnnnnnnnnnnnnnnnnnnnnnnnnnnnnnnnnnnnnnnnnnnnnnnnnnnnnnnnnnnnnnnnnnnnnnnnnnnnnnnnnnnnnnnnnnnnnnnnnnnnnnnnnnnnnnnnnnnnnnnnnnnnnnnnnnnnnnnnnnnnnnnnnnnnnnnnnnnnnnnnnnnnnnnnnnnnnnnnnnnnnnnnnnnnnnnnnnnnnnnnnnnnnnnnnnnnnnnnnnnnnnnnnnnnnnnnnnnnnnnnnnnnnnnnnnnnnnnnnnnnnnnnnnnnnnnnnnnnnnnnnnnnnnnnnnnnnnnnnnnnnnnnnnnnnnnnnnnnnnnnnnnnnnnnnnnnnnnnnnnnnnnnnnnnnnnnnnnnnnnnnnnnnnnnnnnnnnnnnnnnnnnnnnnnnnnnnnnnnnnnnnnnnnnnnnnnnnnnnnnnnnnnnnnnnnnnnnnnnnnnnnnnnnnnnnnnnnnnnnnnnnnnnnnnnnnnnnnnnnnnnnnnnnnnnnnnnnnnnnnnnnnnnnnnnnnnnnnnnnnnnnnnnnnnnnnnnnnnnnnnnnnnnnnnnnnnnnnnnnnnnnnnnnnnnnnnnnnnnnnnnnnnnnnnnnnnnnnnnnnnnnnnnnnnnnnnnnnnnnnnnnnnnnnnnnnnnnnnnnnnnnnnnnnnnnnnnnnnnnnnnnnnnnnnnnnnnnnnnnnnnnnnnnnnnnnnnnnnnnnnnnnnnnnnnnnnnnnnnnnnnnnnnnnnnnnnnnnnnnnnnnnnnnnnnnnnnnnnnnnnnnnnnnnnnnnnnnnnnnnnnnnnnnnnnnnnnnnnnnnnnnnnnnnnnnnnnnnnnnnnnnnnnnnnnnnnnnnnnnnnnnnnnnnnnnnnnnnnnnnnnnnnnnnnnnnnnnnnnnnnnnnnnnnnnnnnnnnnnnnnnnnnnnnnnnnnnnnnnnnnnnnnnnnnnnnnnnnnnnnnnnnnnnnnnnnnnnnnnnnnnnnnnnnnnnnnnnnnnnnnnnnnnnnnnnnnnnnnnnnnnnnnnnnnnnnnnnnnnnnnnnnnnnnnnnnnnnnnnnnnnnnnnnnnnnnnnnnnnnnnnnnnnnnnnnnnnnnnnnnnnnnnnnnnnnnnnnnnnnnnnnnnnnnnnnnnnnnnnnnnnnnnnnnnnnnnnnnnnnnnnnnnnnnnnnnnnnnnnnnnnnnnnnnnnnnnnnnnnnnnnnnnnnnnnnnnnnnnnnnnnnnnnnnnnnnnnnnnnnnnnnnnnnnnnnnnnnnnnnnnnnnnnnnnnnnnnnnnnnnnnnnnnnnnnnnnnnnnnnnnnnnnnnnnnnnnnnnnnnnnnnnnnnnnnnnnnnnnnnnnnnnnnnnnnnnnnnnnnnnnnnnnnnnnnnnnnnnnnnnnnnnnnnnnnnnnnnnnnnnnnnnnnnnnnnnnnnnnnnnnnnnnnnnnnnnnnnnnnnnnnnnnnnnnnnnnnnnnnnnnnnnnnnnnnnnnnnnnnnnnnnnnnnnnnnnnnnnnnnnnnnnnnnnnnnnnnnnnnnnnnnnnnnnnnnnnnnnnnnnnnnnnnnnnnnnnnnnnnnnnnnnnnnnnnnnnnnnnnnnnnnnnnnnnnnnnnnnnnnnnnnnnnnnnnnnnnnnnnnnnnnnnnnnnnnnnnnnnnnnnnnnnnnnnnnnnnnnnnnnnnnnnnnnnnnnnnnnnnnnnnnnnnnnnnnnnnnnnnnnnnnnnnnnnnnnnnnnnnnnnnnnnnnnnnnnnnnnnnnnnnnnnnnnnnnnnnnnnnnnnnnnnnnnnnnnnnnnnnnnnnnnnnnnnnnnnnnnnnnnnnnnnnnnnnnnnnnnnnnnnnnnnnnnnnnnnnnnnnnnnnnnnnnnnnnnnnnnnnnnnnnnnnnnnnnnnnnnnnnnnnnnnnnnnnnnnnnnnnnnnnnnnnnnnnnnnnnnnnnnnnnnnnnnnnnnnnnnnnnnnnnnnnnnnnnnnnnnnnnnnnnnnnnnnnnnnnnnnnnnnnnnnnnnnnnnnnnnnnnnnnnnnnnnnnnnnnnnnnnnnnnnnnnnnnnnnnnnnnnnnnnnnnnnnnnnnnnnnnnnnnnnnnnnnnnnnnnnnnnnnnnnnnnnnnnnnnnnnnnnnnnnnnnnnnnnnnnnnnnnnnnnnnnnnnnnnnnnnnnnnnnnnnnnnnnnnnnnnnnnnnnnnnnnnnnnnnnnnnnnnnnnnnnnnnnnnnnnnnnnnnnnnnnnnnnnnnnnnnnnnnnnnnnnnnnnnnnnnnnnnnnnnnnnnnnnnnnnnnnnnnnnnnnnnnnnnnnnnnnnnnnnnnnnnnnnnnnnnnnnnnnnnnnnnnnnnnnnnnnnnnnnnnnnnnnnnnnnnnnnnnnnnnnnnnnnnnnnnnnnnnnnnnnnnnnnnnnnnnnnnnnnnnnnnnnnnnnnnnnnnnnnnnnnnnnnnnnnnnnnnnnnnnnnnnnnnnnnnnnnnnnnnnnnnnnnnnnnnnnnnnnnnnnnnnnnnnnnnnnnnnnnnnnnnnnnnnnnnnnnnnnnnnnnnnnnnnnnnnnnnnnnnnnnnnnnnnnnnnnnnnnnnnnnnnnnnnnnnnnnnnnnnnnnnnnnnnnnnnnnnnnnnnnnnnnnnnnnnnnnnnnnnnnnnnnnnnnnnnnnnnnnnnnnnnnnnnnnnnnnnnnnnnnnnnnnnnnnnnnnnnnnnnnnnnnnnnnnnnnnnnnnnnnnnnnnnnnnnnnnnnnnnnnnnnnnnnnnnnnnnnnnnnnnnnnnnnnnnnnnnnnnnnnnnnnnnnnnnnnnnnnnnnnnnnnnnnnnnnnnnnnnnnnnnnnnnnnnnnnnnnnnnnnnnnnnnnnnnnnnnnnnnnnnnnnnnnnnnnnnnnnnnnnnnnnnnnnnnnnnnnnnnnnnnnnnnnnnnnnnnnnnnnnnnnnnnnnnnnnnnnnnnnnnnnnnnnnnnnnnnnnnnnnnnnnnnnnnnnnnnnnnnnnnnnnnnnnnnnnnnnnnnnnnnnnnnnnnnnnnnnnnnnnnnnnnnnnnnnnnnnnnnnnnnnnnnnnnnnnnnnnnnnnnnnnnnnnnnnnnnnnnnnnnnnnnnnnnnnnnnnnnnnnnnnnnnnnnnnnnnnnnnnnnnnnnnnnnnnnnnnnnnnnnnnnnnnnnnnnnnnnnnnnnnnnnnnnnnnnnnnnnnnnnnnnnnnnnnnnnnnnnnnnnnnnnnnnnnnnnnnnnnnnnnnnnnnnnnnnnnnnnnnnnnnnnnnnnnnnnnnnnnnnnnnnnnnnnnnnnnnnnnnnnnnnnnnnnnnnnnnnnnnnnnnnnnnnnnnnnnnnnnnnnnnnnnnnnnnnnnnnnnnnnnnnnnnnnnnnnnnnnnnnnnnnnnnnnnnnnnnnnnnnnnnnnnnnnnnnnnnnnnnnnnnnnnnnnnnnnnnnnnnnnnnnnnnnnnnnnnnnnnnnnnnnnnnnnnnnnnnnnnnnnnnnnnnnnnnnnnnnnnnnnnnnnnnnnnnnnnnnnnnnnnnnnnnnnnnnnnnnnnnnnnnnnnnnnnnnnnnnnnnnnnnnnnnnnnnnnnnnnnnnnnnnnnnnnnnnnnnnnnnnnnnnnnnnnnnnnnnnnnnnnnnnnnnnnnnnnnnnnnnnnnnnnnnnnnnnnnnnnnnnnnnnnnnnnnnnnnnnnnnnnnnnnnnnnnnnnnnnnnnnnnnnnnnnnnnnnnnnnnnnnnnnnnnnnnnnnnnnnnnnnnnnnnnnnnnnnnnnnnnnnnnnnnnnnnnnnnnnnnnnnnnnnnnnnnnnnnnnnnnnnnnnnnnnnnnnnnnnnnnnnnnnnnnnnnnnnnnnnnnnnnnnnnnnnnnnnnnnnnnnnnnnnnnnnnnnnnnnnnnnnnnnnnnnnnnnnnnnnnnnnnnnnnnnnnnnnnnnnnnnnnnnnnnnnnnnnnnnnnnnnnnnnnnnnnnnnnnnnnnnnnnnnnnnnnnnnnnnnnnnnnnnnnnnnnnnnnnnnnnnnnnnnnnnnnnnnnnnnnnnnnnnnnnnnnnnnnnnnnnnnnnnnnnnnnnnnnnnnnnnnnnnnnnnnnnnnnnnnnnnnnnnnnnnnnnnnnnnnnnnnnnnnnnnnnnnnnnnnnnnnnnnnnnnnnnnnnnnnnnnnnnnnnnnnnnnnnnnnnnnnnnnnnnnnnnnnnnnnnnnnnnnnnnnnnnnnnnnnnnnnnnnnnnnnnnnnnnnnnnnnnnnnnnnnnnnnnnnnnnnnnnnnnnnnnnnnnnnnnnnnnnnnnnnnnnnnnnnnnnnnnnnnnnnnnnnnnnnnnnnnnnnnnnnnnnnnnnnnnnnnnnnnnnnnnnnnnnnnnnnnnnnnnnnnnnnnnnnnnnnnnnnnnnnnnnnnnnnnnnnnnnnnnnnnnnnnnnnnnnnnnnnnnnnnnnnnnnnnnnnnnnnnnnnnnnnnnnnnnnnnnnnnnnnnnnnnnnnnnnnnnnnnnnnnnnnnnnnnnnnnnnnnnnnnnnnnnnnnnnnnnnnnnnnnnnnnnnnnnnnnnnnnnnnnnnnnnnnnnnnnnnnnnnnnnnnnnnnnnnnnnnnnnnnnnnnnnnnnnnnnnnnnnnnnnnnnnnnnnnnnnnnnnnnnnnnnnnnnnnnnnnnnnnnnnnnnnnnnnnnnnnnnnnnnnnnnnnnnnnnnnnnnnnnnnnnnnnnnnnnnnnnnnnnnnnnnnnnnnnnnnnnnnnnnnnnntaacttctgccttatctgacactaggaaaattcagacagagccagcttcctcactgaccaccagattgagggagaccagcacctctgaagagaccagcttagccacagagacaaacactgttccttctgaagtgtccactggtgctactactgaggtctccaggacagaagccatctcctttatttttacatccatctcagaccctgagcagtccacagtgtcacaaaacatctccacagaaaccatcaccaggatttctgcctcctctgtcatgacagaatctgccaaaatgaccatcacaacccaaacaggtcctccggggtctacaccagaaagtatccttaattcggacacagcaaccacatcctcttgggaagaaacccactctacagtaactcagggatttccacacccagagatgaccacttccatgggcagaggtcctggaggtgtgtcatggcctagccctcccgttgggaaagaaaccagccctccatcttccccgctgtctttacctgctgtgacctcacctcatcctgtttnnnnnnnnnnnnnnnnnnnnnnnnnnnnnnnnnnnnnnnnnnnnnnnnnnnnnnnnnnnnnnnnnnnnnnnnnnnnnnnnnnnnnnnnnnnnnnnnnnnnnnnnnnnnnnnnnnnnnnnnnnnnnnnnnnnnnnnnnnnnnnnnnnnnnnnnnnnnnnnnnnnnnnnnnnnnnnnnnnnnnnnnnnnnnnnnnnnnnnnnnnnnnnnnnnnnnnnnnnnnnnnnnnnnnnnnnnnnnnnnnnnnnnnnnnnnnnnnnnnnnnnnnnnnnnnnnnnnnnnnnnnnnnnnnnnnnnnnnnnnnnnnnnnnnnnnnnnnnnnnnnnnnnnnnnnnnnnnnnnnnnnnnnnnnnnnnnnnnnnnnnnnnnnnnnnnnnnnnnnnnnnnnnnnnnnnnnnnnnnnnnnnnnnnnnnnnnnnnnnnnnnnnnnnnnnnnnnnnnnnnnnnnnnnnnnnnnnnnnnnnnnnnnnnnnnnnnnnnnnnnnnnnnnnnnnnnnnnnnnnnnnnnnnnnnnnnnnnnnnnnnnnnnnnnnnnnnnnnnnnnnnnnnnnnnnnnnnnnnnnnnnnnnnnnnnnnnnnnnnnaagacatcacctccatcccaggtcccgctccatccacaatatcaccagacatctccacaggaaccatcagttggttctctacatcccctgtcatgacagaatcaacagaaataaccatgaacacccacacaagtcctttaggggccacaacacaaggcaccagtactttggacacttcaagcataacctctttgacaatgacacactcaactctatctcaaggattttcacactcacagatgagcactcttatgaagaggggtcctgaggatgtatcatggatgagccctccccttctggaaaaaactagctcttcttctctgatgtcttcaccagccacaacttcaccttctcctgtttcctccacattaacagacagcatctcttcctctccttttcctgtgacatcactccttacatctggcctggcaaaaactacagatacgttgcacaaaagctcggaacctgtaaccaactcacctgcaaatttgagcagcatctcagttgaaatactggccacctctgaagtcaccacagatatggagaaaattcatccttcttcaaacagagcagtgaccgatgtgggtacctccagttctggacatgaatccccttcctctgtcctagctgactcaaagacattcaacgtcacgtctccaatggttattacctccaccatggaggatacaagtgtctccacatcaactcttggcttttttcagactagcaaaattcggacagaatcaacatcctccctgacccttggagtgagaaagaccagcagccctggggcgaccagctcagccacagagatgagcactgtcctttctggagtgcctgctgatggcactaaagaagtctccaggacagaagtcacctcctctagcagaacatccatccctggcccttctcagtccacagtgttgccagaaatatccaccagaccaatgacaaggctctttgcctcgcctaccatgacagaatcagcagaaatgaccatccccacccaaacaggttcttctgggtctacatcacaggatacccttaccttggacacatccaccacaaagtcccaggcaaagactcattcaactttgactcagagatttccacacccagagcagaccactcttatgagcagaggtcctggagatatgtcatggcaaagctctacctctgtggaaaaacccagctctctcccttccctgctgtctttacctgccacaatctcacctcatcccgtttcctccacattaccagtgagtatctcctcctctccttttcctgtgacttcacttctcacctctggcccggtgacgaccacagacatgttacgcacaagctcagaacttgtaaccagttcacctccaaagctgagccacacttcaggtgagagactgaccactggcaaggacaccacagttacagaagctgtgcatccttccacaaacacagcagtttccaatgtggagacttccagctctggacatgaatccccttcctctgccttagctgactcagagacatccaaaaccacatcaaaaaggtttattatctccacacaggaggacacaactcttgnnnnnnnnnnnnnnnnnnnnnnnnnnnnnnnnnnnnnnnnnnnnnnnnnnnnnnnnnnnnnnnnnnnnnnnnnnnnnnnnnnnnnnnnnnnnnnnnnnnnnnnnnnnnnnnnnnnnnnnnnnnnnnnnnnnnnnnnnnnnnnnnnnnnnnnnnnnnnnnnnnnnnnnnnnnnnnnnnnnnnnnnnnnnnnnnnnnnnnnnnnnnnnnnnnnnnnnnnnnnnnnnnnnnnnnnnnnnnnnnnnnnnnnnnnnnnnnnnnnnnnnnnnnnnnnnnnnnnnnnnnnnnnnnnnnnnnnnnnnnnnnnnnnnnnnnnnnnnnnnnnnnnnnnnnnnnnnnnnnnnnnnnnnnnnnnnnnnnnnnnnnnnnnnnnnnnnnnnnnnnnnnnnnnnnnnnnnnnnnnnnnnnnnnnnnnnnnnnnnnnnnnnnnnnnnnnnnnnnnnnnnnnnnnnnnnnnnnnnnnnnnnnnnnnnnnnnnnnnnnnnnnnnnnnnnnnnnnnnnnnnnnnnnnnnnnnnnnnnnnnnnnnnnnnnnnnnnnnnnnnnnnnnnnnnnnnnnnnnnnnnnnnnnnnnnnnnnnnnnnnnnnnnnnnnnnnnnnnnnnnnnnnnnnnnnnnnnnnnnnnnnnnnnnnnnnnnnnnnnnnnnnnnnnnnnnnnnnnnnnnnnnnnnnnnnnnnnnnnnnnnnnnnnnnnnnnnnnnnnnnnnnnnnnnnnnnnnnnnnnnnnnnnnnnnnnnnnnnnnnnnnnnnnnnnnnnnnnnnnnnnnnnnnnnnnnnnnnnnnnnnnnnnnnnnnnnnnnnnnnnnnnnnnnnnnnnnnnnnnnnnnnnnnnnnnnnnnnnnnnnnnnnnnnnnnnnnnnnnnnnnnnnnnnnnnnnnnnnnnnnnnnnnnnnnnnnnnnnnnnnnnnnnnnnnnnnnnnnnnnnnnnnnnnnnnnnnnnnnnnnnnnnnnnnnnnnnnnnnnnnnnnnnnnnnnnnnnnnnnnnnnnnnnnnnnnnnnnnnnnnnnnnnnnnnnnnnnnnnnnnnnnnnnnnnnnnnnnnnnnnnnnnnnnnnnnnnnnnnnnnnnnnnnnnnnnnnnnnnnnnnnnnnnnnnnnnnnnnnnnnnnnnnnnnnnnnnnnnnnnnnnnnnnnnnnnnnnnnnnnnnnnnnnnnnnnnnnnnnnnnnnnnnnnnnnnnnnnnnnnnnnnnnnnnnnnnnnnnnnnnnnnnnnnnnnnnnnnnnnnnnnnnnnnnnnnnnnnnnnnnnnnnnnnnnnnnnnnnnnnnnnnnnnnnnnnnnnnnnnnnnnnnnnnnnnnnnnnnnnnnnnnnnnnnnnnnnnnnnnnnnnnnnnnnnnnnnnnnnnnnnnnnnnnnnnnnnnnnnnnnnnnnnnnnnnnnnnnnnnnnnnnnnnnnnnnnnnnnnnnnnnnnnnnnnnnnnnnnnnnnnnnnnnnnnnnnnnnnnnnnnnnnnnnnnnnnnnnnnnnnnnnnnnnnnnnnnnnnnnnnnnnnnnnnnnnnnnnnnnnnnnnnnnnnnnnnnnnnnnnnnnnnnnnnnnnnnnnnnnnnnnnnnnnnnnnnnnnnnnnnnnnnnnnnnnnnnnnnnnnnnnnnnnnnnnnnnnnnnnnnnnnnnnnnnnnnnnnnnnnnnnnnnnnnnnnnnnnnnnnnnnnnnnnnnnnnnnnnnnnnnnnnnnnnnnnnnnnnnnnnnnnnnnnnnnnnnnnnnnnnnnnnnnnnnnnnnnnnnnnnnnnnnnnnnnnnnnnnnnnnnnnnnnnnnnnnnnnnnnnnnnnnnnnnnnnnnnnnnnnnnnnnnnnnnnnnnnnnnnnnnnnnnnnnnnnnnnnnnnnnnnnnnnnnnnnnnnnnnnnnnnnnnnnnnnnnnnnnnnnnnnnnnnnnnnnnnnnnnnnnnnnnnnnnnnnnnnnnnnnnnnnnnnnnnnnnnnnnnnnnnnnnnnnnnnnnnnnnnnnnnnnnnnnnnnnnnnnnnnnnnnnnnnnnnnnnnnnnnnnnnnnnnnnnnnnnnnnnnnnnnnnnnnnnnnnnnnnnnnnnnnnnnnnnnnnnnnnnnnnnnnnnnnnnnnnnnnnnnnnnnnnnnnnnnnnnnnnnnnnnnnnnnnnnnnnnnnnnnnnnnnnnnnnnnnnnnnnnnnnnnnnnnnnnnnnnnnnnnnnnnnnnnnnnnnnnnnnnnnnnnnnnnnnnnnnnnnnnnnnnnnnnnnnnnnnnnnnnnnnnnnnnnnnnnnnnnnnnnnnnnnnnnnnnnnnnnnnnnnnnnnnnnnnnnnnnnnnnnnnnnnnnnnnnnnnnnnnnnnnnnnnnnnnnnnnnnnnnnnnnnnnnnnnnnnnnnnnnnnnnnnnnnnnnnnnnnnnnnnnnnnnnnnnnnnnnnnnnnnnnnnnnnnnnnnnnnnnnnnnnnnnnnnnnnnnnnnnnnnnnnnnnnnnnnnnnnnnnnnnnnnnnnnnnnnnnnnnnnnnnnnnnnnnnnnnnnnnnnnnnnnnnnnnnnnnnnnnnnnnnnnnnnnnnnnnnnnnnnnnnnnnnnnnnnnnnnnnnnnnnnnnnnnnnnnnnnnnnnnnnnnnnnnnnnnnnnnnnnnnnnnnnnnnnnnnnnnnnnnnnnnnnnnnnnnnnnnnnnnnnnnnnnnnnnnnnnnnnnnnnnnnnnnnnnnnnnnnnnnnnnnnnnnnnnnnnnnnnnnnnnnnnnnnnnnnnnnnnnnnnnnnnnnnnnnnnnnnnnnnnnnnnnnnnnnnnnnnnnnnnnnnnnnnnnnnnnnnnnnnnnnnnnnnnnnnnnnnnnnnnnnnnnnnnnnnnnnnnnnnnnnnnnnnnnnnnnnnnnnnnnnnnnnnnnnnnnnnnnnnnnnnnnnnnnnnnnnnnnnnnnnnnnnnnnnnnnnnnnnnnnnnnnnnnnnnnnnnnnnnnnnnnnnnnnnnnnnnnnnnnnnnnnnnnnnnnnnnnnnnnnnnnnnnnnnnnnnnnnnnnnnnnnnnnnnnnnnnnnnnnnnnnnnnnnnnnnnnnnnnnnnnnnnnnnnnnnnnnnnnnnnnnnnnnnnnnnnnnnnnnnnnnnnnnnnnnnnnnnnnnnnnnnnnnnnnnnnnnnnnnnnnnnnnnnnnnnnnnnnnnnnnnnnnnnnnnnnnnnnnnnnnnnnnnnnnnnnnnnnnnnnnnnnnnnnnnnnnnnnnnnnnnnnnnnnnnnnnnnnnnnnnnnnnnnnnnnnnnnnnnnnnnnnnnnnnnnnnnnnnnnnnnnnnnnnnnnnnnnnnnnnnnnnnnnnnnnnnnnnnnnnnnnnnnnnnnnnnnnnnnnnnnnnnnnnnnnnnnnnnnnnnnnnnnnnnnnnnnnnnnnnnnnnnnnnnnnnnnnnnnnnnnnnnnnnnnnnnnnnnnnnnnnnnnnnnnnnnnnnnnnnnnnnnnnnnnnnnnnnnnnnnnnnnnnnnnnnnnnnnnnnnnnnnnnnnnnnnnnnnnnnnnnnnnnnnnnnnnnnnnnnnnnnnnnnnnnnnnnnnnnnnnnnnnnnnnnnnnnnnnnnnnnnnnnnnnnnnnnnnnnnnnnnnnnnnnnnnnnnnnnnnnnnnnnnnnnnnnnnnnnnnnnnnnnnnnnnnnnnnnnnnnnnnnnnnnnnnnnnnnnnnnnnnnnnnnnnnnnnnnnnnnnnnnnnnnnnnnnnnnnnnnnnnnnnnnnnnnnnnnnnnnnnnnnnnnnnnnnnnnnnnnnnnnnnnnnnnnnnnnnnnnnnnnnnnnnnnnnnnnnnnnnnnnnnnnnnnnnnnnnnnnnnnnnnnnnnnnnnnnnnnnnnnnnnnnnnnnnnnnnnnnnnnnnnnnnnnnnnnnnnnnnnnnnnnnnnnnnnnnnnnnnnnnnnnnnnnnnnnnnnnnnnnnnnnnnnnnnnnnnnnnnnnnnnnnnnnnnnnnnnnnnnnnnnnnnnnnnnnnnnnnnnnnnnnnnnnnnnnnnnnnnnnnnnnatgatgaagaccacagacatgttggatgcaagcttagaacctgagaccacttcacctcccagtttgaatatcacctcagatgggagtctggccacttctaaagccactgtggagacagaggcaattcaggtttttgaaaacacagcagtgtcccatgtggaaaccaccagtgctagagaggaactctattcctcctccccaggcttctcagagccaaccaaagtgacatctccaatggtcacctcttcctctataagagacaacattgtttccacaacaatgcctgtctcctctggccttacaaggattgagatagagtcaatgtcatctctgatccctggactgagggagaccagaacctcccaggacatcatctcattcacagagacaagcactgtcctttacaagatgccctctgatgccactcctgaggtctccaggacagaagttatgtcctctagcagaacatccattcctggccctgctcagtccacaatgtcaccagacatctctgatgaagttgtcaccaggctctttacctcccccatcatgacagaatctgcagaaataaccatcaccacccaaacaggttcttctctggctacatcccaggttacccttcccttgggcacctcaacgacctttttgtcagggacccactcaactgtgtctcaaggactttcacactcagagatgaccaatcttatgagcaggggtcctgaaaatctgtcatggacgagccctcgctttgtgganacaactagatcttcctcttctctgacatcattacctctcgcgacctcactttctcctgnnnnnnnnnnnnnnnnnnnnnnnnnnnnnnnnnnnnnnnnnnnnnnnnnnnnnnnnnnnnnnnnnnnnnnnnnnnnnnnnnnnnnnnnnnnnnnnnnnnnnnnnnnnnnnnnnnnnnnnnnnnnnnnnnnnnnnnnnnnnnnnnnnnnnnnnnnnnnnnnnnnnnnnnnnnnnnnnnnnnnnnnnnnnnnnnnnnnnnnnnnnnnnnnnnnnnnnnnnnnnnnnnnnnnnnnnnnnnnnnnnnnnnnnnnnnnnnnnnnnnnnnnnnnnnnnnnnnnnnnnnnnnnnnnnnnnnnnnnnnnnnnnnnnnnnnnnnnnnnnnnnnnnnnnnnnnnnnnnnnnnnnnnnnnnnnnnnnnnnnnnnagactaggaggattccgacagagcccacattctcactgactcttgtattcagggagactagaacctctgaagagaccagctcctttacagaaacaagtgcagtcctttttggagtgcccactagtgctactactgaggtctctgtgacagaaatcatgtcctctaacagaacacacatccctgaccctgatcagtccacaatgtctccagacatcatcactgaagtgatcaccaggctctcttcctcatccatgatgtcagaatcaacagaaatgaccatcaccacccaaacaagttctcctggggctacaacacagagtacccttaccttggccacaacaacagcacccttggcaaagacccattcaactgttcctccaagatttttacactcagagatgacaactcttatgagcaggagtcctgaaaatccatcatggaagagctctccctttgtggaaaaaactagctcttcctcttctctgttgtccttacctgtcaagacgtcaccttctgtttcttccacattactacagagtatctcttcctcttcttttcctgtgacttcgctcctcaccccaggcatggtgaagactannnnnnnnnnnnnnnnnnnnnnnnnnnnnnnnnnnnnnnnnnnnnnnnnnnnnnnnnnnnnnnnnnnnnnnnnnnnnnnnnnnnnnnnnnnnnnnnnnnnnnnnnnnnnnnnnnnnnnnnnnnnnnnnnnnnnnnnnnnnnnnnnnnnnnnnnnnnnnnnnnnnnnttcctctgtttcaatccactgggagccatccaaggctacatacccagtgggtacttcctcttccatggccgaaaccactatttccacatcaacgcctgccaatattgagaccacaagatctgaggcagagccattttctcatttgacttctgcatttaggaagactaacacgtccctggacaccagctcagtcacaccaacaaatacaccttcttctcctgggtctactcatcttttacagagttccaagactgatttcacctcttctgtgaaaacatcatccccagaccggcctccagtctcacagtatactgaaattccagtggacataatcaccccctttaatgcttctccatctattatggagtccactggagtaacctccttcccagaatccaagtttactatgtctgtaacagaaagtactcatcatctgagtacagatttgctgccttcagctgagactatttccactggcacagtgatgccttctctatcagaggctgtgacttcatttgccaccactggagttccacgagtcatctcgggttcaggtagtccattctctaggacagagtcaggccctggggatgctactctgtccaccattgcagagagcctgccttcatccactcctgcgccattctcctcttcaaccttcactaccactgattcttcaaccatcccagccctccatgggataacttcctcttcagctactccacatagagtggacagcagtcttgggacagagagcagcactactgaaggacatatgggtatggtcagtacttggacacttnnnnnnnnnnnnnnnnnnnnnnnnnnnnnnnnnnnnnnnnnnnnnnnnnnngagagcgctgagctgtgaacagtgacaagtgcttatcaagttccttcactctcaacacggttgacaagtaag

SEQ ID NO: 41034 - DNA, 784 bp, Macaca Mulatta
  misc_feature (1)...(784): n = A,T,C or G
nnnnnnnnnnnnnnnnnnnnnnnnnnnnncacattgggaggccgaggcaggtgaatcacaaggtcaggcgatcgagaccatcctggctaacacgnnnnnnnnnnnnnnnnnnnnnnnnnnnnnnnnnntaggcaggcgtggtggcaggcgcccgtagtcctagctatnnnnnnnnnnnnnnnnnnnnnnnngtgnnnnnnnnnnnnncgnnnnnnnnnnnnnnnnnnnnntgnnnnnnnnnnnnnnnnattcaagagatcctcacnnnnnnnnnnnnnnnnnnnncaggactataggcacgtggggcctgtgccaccatgcctggatgattttgtgtagaaaggtctatgttgcccaggctgccctccatcaaggctcttcttaaactagtccttcctatcttttcagatccatcttccagatctgtggcatgcaccctgagtctgaatcangaggtgaggggcctgggaatctgtgcttttggcaagatccccaggagacctttattggcagaaattttggaaaacatttccatcctgttcatggcccattcacagacaatggtaactctgaccctcctggggcaactcaccatcttacaggcacatttacctactctctcaacttttccgccagggctcatgcccccttctccagcctggaaatgtatgttctcaatgcctttccttcccaaggcctgggctcaaaaggtcttcctttttggaaagcctttccttggctgggcttctgtttaaaaaatttggtcatgggtccccccctgccc

SEQ ID NO: 41035 - DNA, 519 bp, Macaca Mulatta
  misc_feature (1)...(519): n = A,T,C or G
acatagcattcaacccagcatcctgttactgggtgtatacctaaaggaatataatcattctgccataattacaaacacgtgtatgttcatgcagcactattcacaatagcaaagacgtggaatcaacgtaaatgcccatcaacagtagaccagataaagaaaatgtggtacatatacactatggaatactatgcagccataaaaaggaacaagattgtgtcctttacagcagtatggatggagctgaggctcttatcctaagtgaattaatgcaggaacagaaaacaaaataccccatgttctcacttataagtgggagctaaacattgattacacatggactcaagggaacagtagacactggggcttacgggtggaggttgggaagagcatgaagattgaatannnnnnnnnnnnnnnnnnnntgattacctggtgacaaaattaactgtacaccaaactcctgcaacatgcagttgaccgatgtacacatactccttgaacctaaaataaaacatg

SEQ ID NO: 41036 - DNA, 636 bp, Macaca Mulatta
cctgaagacaggatgtcactgctggaagcattcgccttctcgtccttctgggcacttggacttggattatcgaaagtggagcagttccagctatccatttccacggaagtcacagaaaagtattgacatatcttgcaagataaggagcacaaactttgaaaacgatgtcattcactggtaccggcagaaaccgaatcaggctttggagcatctgatctatattatctcaacaaaatccgcagctcatggcagcatgggtaagaggagtaacaaagtggaagcgagaaagaattctcaaaccctcacttcaatccttaccatcaagtccatagagaaagaagacatggccatttactactgtgcaggatgggattatagtggtagcacttggtggatcaagaaatttgctgaagggactaggctcatagtaacttcgcctgataaacaccttgatgcagatgtttcacccaagcccactatttttcttccttccattgctgaaacaatactccataaggctggaacatacctttgtcttcttgagaaatttttcccagatgttattgagataccattggccagaaaagaacagcaacaaggttctgaaatcccaagaggggaacaccatgaagacta

SEQ ID NO: 41037 - DNA, 1290 bp, Macaca Mulatta
  misc_feature (1)...(1290): n = A,T,C or G
ttcacactggagagaaaccttacaagtgtagtgagtgtgnnnnnnnnnnnnnnnnnnnnnnnnnnnnnnnnnnnnnnnnnnnnnnnnnnnnnnnnnnnnnnnnnnnnnnnnnnnnnnnnnnnnnnnnnnnnnnnnnnnnnnnnnnnnnnnnnnnnnnnnnnnnnnnnnnnnnnnnnnnnnnnnnnnnnnnnnnnnnnnnnnnnnnnnnnnnnnnnnnnnnnnnnnnnnnnnnnnnnnnnnnnnnnnnnnaattcatactggagagaaaccatacaaannnnnnnnnnnnnnnnnnnnnnnnnnnnnnnnnnnnnnnnnnnnnnnnnnnnnnnnnnnnnnnnnnnnnnnnnnnnnnnnnnnnnnnnnnnnnnnnnnnnnnnnnnnnnnnnnnnnnnnnnnnnnnnnnnnnnnnnnnnnnnnnnnnnnnnnnnnnnnnnnnnnnnnnnnnnnnnnnnnnnnnnnnnnnnnnnnnnnnnnnnnnnnnnnnnnnnnnnnnnnnnnnnnnnnnnnnnnnnnnnnnnnnnnnnnnnnnnnnnnnnnnnnnnnnnnnnnnnnnnnnnnnnnnnnnnnnnnnnnnnnnnnnnnnnnnnnnnnnnnnnnnnnnnnnnnnnnnnnnnnnnnnnnnnnnnnnnnnnnnnnnnnnnnnnnnnnnnnnnnnnnnnnnnnnnnnnnnnnnnnnnnnnnnnnnnnnnnnnnnnnnnnnnnnnnnnnnnnnnnnnnnnnnnnnnnnnnnnnnnnnnnnnnnnnnncccttgagacacataaggtaattcatactggagagacttatacaaatgtaaggtttgtgacaaggcttttgcatctcattcctatctggcaaaacatactagaattcatagtggagagaaaccttacaagtgtaatgagtgcggcaagaccttccgtctgaagtcataccttgtatgccatcgtagagttcatagtggtgaaaagccttacaagtgtaatgagtgcagcaagaccttcagtcagaggtcataccttcattgccatcgtagacttcatagtggtaagaaaccttacaagtgtaatgagtgtggaaagaccttcagtcacaagccatcccttgtataccatcgtagacttcatactggagagaaatcttacaaatgtacactttgtgacaaggcctttgtgcgtaattcatacctagcaagacatactagaattcacactgcagagaaaccttacaagtgtaacaaatgtgggaaggcttttaatcaacaatcacaactttcacttcatcatagaattcatactggagagaaa

SEQ ID NO: 41038 - DNA, 828 bp, Macaca Mulatta
  misc_feature (1)...(828): n = A,T,C or G
gggcatatatcagataaaggacttgtaactagaatatgtaaagaannnnnnnnnnnnnnnnnnnnnnnngtgtcacacagnnnnnnnnnnnnnnnnnnccnnnnnnnnnnnnnnnnngctccgccttctgggttcaggcggttctcctggctcggtccnnnnnnnnnnnnnnnnnntaggcatgtgctaccatnnnnnnnnnnnnnnnnnnnnnnnnggtggagatggggtttcaccttgttggccgggatggtcttggtctcctgacctcatgatccacccgccttggccttcncnnnnnnnnnnnnnnnnnnnnnnnnnnnntacgcaactcttacaactctnaaagaagacagaaaatccagtaaaaagatgggcaggccagacacggtggctcatgtctggtatcccagtgctttgggagtccaaggcgggaggatcacttgaggccgggcatttgagaccagcctaggccataaaaccccatctcnnnnnnnnnnnnnnnnnnnncggcccacaaatgggccctcaactgggtgaacgggaaaagcaacatggcggccctctcctataaaatgggataattaactccgcccttaaaagggatttgaattacggaacacgtggtttccaccggggaatgtcgaaaccattttggcctaactgggatgggaggaaaccccttttctcttggaaaaaggccaaaaaagggctttgggaaacccccgccactcttttgtagagggctctaaggtggggcccaaattttacttggaagggtctcggggaatctccagaaaatataacccccgtggccccggagaaaaa

SEQ ID NO: 41039 - DNA, 373 bp, Macaca Mulatta
tctgaaagacagaaggagggcagccctctcccaggcaaaatggggcccctgtggggaacagaggggtgtctctgtcaacaaagttgatgccacatccctttcaaccatgctgacgcctctggtttttgtaaaggtgctcactcctgtggccacggtgatgcacaggcacctgcaccccgtgcctaaaccctgcagctggcatgggccctgtctgctcttcattcaccattctcacgagttgtaatgacaagttcagccctccatgtcacactgtgttttccatcccggggagtgtttcacagctatcccaagccccacgctgacgaatcagggccgaaaacacactccgatgccagcacagaccacggagcaa

SEQ ID NO: 41040 - DNA, 345 bp, Macaca Mulatta
cacttcccagtgtctccatagacagacttctgcagcgacaaatgtggtctccagctcagctttccccagcgccacccccacagctctctctgttctttcctccttcctgtttcttcttgttctctggctcccctctgttttccacctcctgcaagaagtgttagtttcacttaggttgagatcagagccatgatgatgattggatattccattttcctgccctttttgttcatttgcttttggatgtgtgctgatagtaagagtgagggagaacacttgtgggaaattatatgatgcagcagcaaacacatttaagtgacctgaagaactttaagacttaaagcc

SEQ ID NO: 41041 - DNA, 1393 bp, Macaca Mulatta
  misc_feature (1)...(1393): n = A,T,C or G
ggtgtggctactaaggttgaggagtgaagtgtcctttggcagggtgacacagctagtacatagtggacttggggttcagattctgggcatctgattccagcacccaccttaatcgttgtctgggatttattcgtggaaaaagttacgaattgtatcttaggcttttcatcctaagcactgattgagaaccatctcatgcatttgacacaatgcttcctaatacttcagatcatagatacctttgaaatttctgttaaaggctattagaagatagaaaatatctatctaaagaataatacatatcattcctagaaaataatatatattcaaacaaactttgcatacaaaaactcaagcataggatgataatctctaagaaagttcatttaatttcttaatttactnnnnnnnnnnnnnnnnnnnnnnnnncttttccccctaataccccatacttccttaataaacccttgtaaactgaaccattttataaaaagaagtttatctccctattccctaaaatgaaagcgttttagacaacagaccctatttttgggcgggtttttctcaaaacacaagaaaaattttagagtgggttgggtgtctgatggccacgcaggagaaaaacacgataagacgattctacatctattttattcgcccatgcctaatgaacccccgcaccggcacatgggggggttggggccgttgaaaatcctaaatagncgaaaacaaaaatatttttttattaggaaaatataaacttgatagacccaattagagaaggcaacccaccaaaaataacccggtacaaatgtttataccacgataaggaagaccattgtgtgggatgaaatattatttacaaacatcatcaattttttattactccctgctgaaacattttcaagtttttgtataaagacagccctctatatttttccaccccancgataaataaaaagagtatattttttctttcagattccgctacccacaagaacgaggacgatgtaatataataaccactattattgttgatagaacaataaaccactttcannaacccttcgttgtcggagtgcggccaaaaatctattattattggcaaatgtatattaaaaaagaaaaanagatcttccctctgacagtnctaacagaattatattccacggcgcctctattttcctaggaagttatctaagagactccccagtaggggagaaatatatagtgggcgataaacatttatgtctgacacagcaattcgaggagagccgtactgtcatcgagaaagtatattgatacctctgtctacggaaatacaaattgtatgctacatgttacgcgatgtacatgaaatgtgtgatatgtataccacttccaatcgcgataa

SEQ ID NO: 41042 - DNA, 813 bp, Macaca Mulatta
  misc_feature (1)...(813): n = A,T,C or G
gggaaattattttgattaaatatattttatttgatctgggtatttttggaccacattattaaattaattgttaagctgcagttgagttgttcaagtgagagttttgataagccacgtatgggccgcattgtgaatcacttgccagttgtactttatggagcttattttatgatttaaaatactgtactgtacataggaggtatgttaccttctccttatttgtatgtttaccatatactttgatatttgaaatgttatgtactggaaaggccacttatatttctagaacagattggattttatgcaaccttttttccttgaattaacagcaataaaaaaatgaaaaacagctnnnnnnnnnnnnnnnnnnnnnnnnnnnnnnnnnnnnnnnnnnnnnnnnnnnnnnnnnnnnnnnnnnnnnnnnnnnnnnnnnnnnnnnnnnnnnnnnnnnnnnnnnnnnnnnnnnnnnnnnacgcagagggcaaaaaagaaattttcaaaaaaatttntttgggagggggggncccnnnnnnnnnnnnnnnnnnnnnnnnnnnnnnnnngaaaaaatttgtgggggggccgcgcccctgnnnnnnnnnnnnnnnnnnnnncctcgttttcaaaaaagatttgcggaacaaagcggggggggtttccccacccaaaaaaagagccccnnnnnnnnnnnnnnnnnnnnnnnnnnnnnnnnnnnnnnnagatgtcccgggggtgttcctttgtttgttttataaagggggggggatccccggaggccccttttttttagaaaatttcgccccccccctcccaaac

SEQ ID NO: 41043 - DNA, 507 bp, Macaca Mulatta
cagctgtctgaagacctcattaaagatccttgcaataactaactgtgtgcttttggaatcagacttgaggcatctgtccaagtgcccgagcatcggtcaactaaagaccctggacctgactggcatcagactggccaatttcagccttgtgcctctccaagttctgctagaaaaagttgcaggcacccttgagtacctggacttagatgactgtggcatcgtagactcccaagtcaacaccatcctgcctgccctgagccgctgctttgagcttaccaccttcagcttccgtggaaatcccgtctccatggccaccctagagaacctgctgtgccacacaatcagattggacaatttatgcctggagctgtatcctgccccgcgggagagttatgatgctggtggtactctctgccggagcagatttgcccaacttggggctgagctgatggggagagtgagggatttaatggagcccaagaggatcttgtaatgtactgactactg

SEQ ID NO: 41044 - DNA, 507 bp, Macaca Mulatta
  misc_feature (1)...(507): n = A,T,C or G
tggcgagaggtcaggtttgcgggctttcgcctgcttttccaaagaccaacaaagagccctttcctaactctcaacccaaccgcttttggaactatgcggtggtgggaaccctgtggcgcttctttgtcgctcctgtccttcccatgcnnnnnnnnnnnnnnnnnnnnnnnnnnnnnnnnccatctcttttcttctctatgcgagggtttgaattggcagtgagaatgagagataacgattcgcgtctactttctaggatgacttctgtgtgctccatctcgcgcgtccctgagcatgttgaatttccaaatcctaaataagccgcgcggtgtagtttgtattatgttgcgtttctctttcaaatttcctcaccttttctccgtcatcctttaggctctacagagtgaaggtttaaatccaaggtcatggcaaaacatctgaagttcatcgccaggactgtgatggtacaggaagggaacgtggaaggtgcatacaggatcctaaaca

SEQ ID NO: 41045 - DNA, 513 bp, Macaca Mulatta
ctggcagaaacctggaagaactgatcgttgaggagctttttgttgaatggcaaactgcaatgtcagcttgttgtgaagaaagtggcagaccgggctcacaagagaccatggaggatggcaagaccatggactatgctgaagtatcaaacacatttgtacgactggcagacacacactttgtacaacgctgcccctcagtacctaccactgagaattcagaccctgggccaccaccacctgcccccacacttgtcattaatgaaaaggacatgtacctggttcctaagctgagcttgataggaaaaggtaaaaggcgcagatcatctgatgaagatgctgctggggaacccaaggccaagagaccaaaacatactacagataacaaggagcccattccagatgacgggatttattggcaggccaaccttgacagattccaccaacacttccgtgatcaagccattgtgagtgcagttgctaacaggatggaccagacgagatgcagcgactatg

SEQ ID NO: 41046 - DNA, 716 bp, Macaca Mulatta
accgggcctcctgctccttcgtagcccctgtccggggtgtctacagcttccggttccatgtggtgaaagtgtacaaccgccaaactgtccaggtgacctcagcactggtccccatccctggctcaggaggggagggagggggaagaagtggagcccagctgacctccaggtggaccctccactgacctgtgtcctggaagccaggaccaggggaggaatgggcctaccttgcattgagtgtggaggatgtgcagagtccaatgctggccactcctcagccctcccaggagagcccattaagacccagcttcccaagaggaagcccctgggaaagtgggggtcctgagctaaggactggggaatggaggctaactgggctcccctccccaggtgagcctgatgctgaacacgtggcctgtcatctcagcctttgccaatgaccctgatgtgacccgggaggcagccaccagctctgtgctactgcccttggaccccggggaccgagtgtctctgcgcctgcgtcggggaaatctactgggtggctggaaatactcaagtttctctggcttcctcatcttccctctctgaggacccaagcctttcaagcacaagaatccagcccctgacgactttcttctgccctccttgccccagaaacagcagaggcaggagagagacccccctctggctgcccatatcccacctccttgcatggg

SEQ ID NO: 41047 - DNA, 730 bp, Macaca Mulatta
gcttttcgaaaccatccccagttgtccgccatgattaggggccaagatgcagagatgttaaggtacataaccaatttagaggtgaaggaactcagacaccctagaaccggctgcaagttcaagttcttctttagaagaaacccctacttcagaaacaagctgattgtcaaggaatatgaggtaagatcctccggccgggtggtgtctctttctactccaattatatggcgcagggggcatgaaccccagtccttcattcgcagaaaccaagacctcatctgcagcttcttcacctggttttcagaccacagccttccagagtccgacaaaattgctgagattattaaagaggatctgtggccaaatccactgcaatactacctgttgcgtgaaggagtccgtagagccagacgtcgcccactaagggagccagtagagatcccgaggccctttgggttccagtctggttaacatttgcccttgggaatactcctgcacaaggtctcctaccaccttctgctggacttgtgcttgggcatcagcaatgggtatgtcttctactgtgttttgtttttgctgacttttctgcaccctctttcctttggatattcagttctctcaacctcaagattgagacggtggtgggtatgcgtctccacttccatatgaccttcatgctgttctggaatatcacatgctacgaggtcatccttcacgctactgtaagcca

SEQ ID NO: 41048 - DNA, 744 bp, Macaca Mulatta
aggaaaagaggccaaagtggctaaccaagaaactaaagaacatttatctgcagaaaacagagaagtgaaaactaaggagagtccaacctctgaagaaacaagagagaaagaagccaagcctgattaatactacataccatgtcttatcagtggtccttgcctctccttcttgtacaatccagaggaatatttttatcaactattttgtaaatgcaagttttttagtagctctagaaacatttataagaaggagggaatcccacctcatcccatcttctaagtgtaaatgctttatttaagagatgaaatcatttgctggttgtttattttttggtacaaccagaaaatagtgtgggttattgaattacgggaggctttgactgtctttggtgtcatcttaaccgtccatagatgggaggttagtttttatatcctataatacaatgcatattaaatgacaatatggagtcagtcctgcatttaatgtcttgaacattttaaattacttctatgttgttttttggtagacttgtttcctaaagaaaaccactccttgatcatggctctccctgtcagaactgtgtgcactctgtaacatctttgcttgcggtagtcctgttttcctaataacttggttactgtgctgtgaaagattaaaaatctgaatatgtagtgtacatgctgttcagttgtgaattggtgggacgtatgtaacagcttatcaacatgtgaggatgccggtac

SEQ ID NO: 41049 - DNA, 1185 bp, Macaca Mulatta
  misc_feature (1)...(1185): n = A,T,C or G
tccccaggatttttgtcaaccgcagcctggcactggggaagattcgttgctttggcttcgacatggaccatacactctggctgnnnnnnnnnnnnnnnnnnnnnnnnnnnnnnnnnnnnnnnnnnnnnnnnnnnnnnnnnnnnnnnnnnnnnnnnnnnnnnnnnnnnnnnnnnnnnnnnnnnnnnnnnnnnnnnnnnnnnnnnnnnnnnnnnnnnnnnnnnnnnnnnnnnnnnnnnnnnnnnnnnnnnnnnnnnnnnnnnnnnnnnnnnnnnnnnnnnnnnnnnnnnnnnnnnnnnnnnnnnnnnnnnnnnnnnnnnnnnnnnnnnnnnnnnnnnnnnnnnnnnnnnnnnnnnnnnnnnnnnnnnnnnnnnnnnnnnnnnnnnnnnnnnnnnnnnnnnnnnnnnnnnnnnnnnnnnnnnnnnnnnnnnnnnnnnnnnnnnnnnnnnnnnnnnnnnnnnnnnnnnnnnnnnnnnnnnnnnnnnnnnnnnnnnnnnnnnnnnnnnnnnnnnnnnnnnnnnnnnnnnnnnnnnnnnnnnnnnnnnnnnnnnnnnnnnnnnnnnnnnnnnnnnnnnnnnnnnnnnnnnnnnnnnnnnnnnnnnnnnnnnnnnnnnnnnnnnnnnnnnnnnnnnnnnnnnnnnnnnnnnnnnnnnnnnnnnnnnnnnnnnnnnnnnnnnnnnnnnnnnnnnnnnnnnnnnnnnnnnnnnnnnnnnnnnnnnnnnnnnnnnnnnnnnnnnnnnnnnnnnnnnnnnnnnnnnnnnnnnnnnnnnnnnnnnnnnnnnnnnnnnnnnnnnnnnnnnnnnnnnnnnnnnnnnnnnnnnnnnnnnnnnnnnnnnnnnnnnnnnnnnnnnnnnnnnnnnnnnnnnnnnnnnnnnnnnnnnnnnnnnnnnnnnnnnnnnnnnnnnnnnnnnnnnnnnnnnnnnnnnnnnnnnnnnnnnnnnnnnnnnnnnnnnnnnnnnnnagctgcttggggttcgggggaagggcatcctgtatattgtttaccacatttttgggggacttctgaagtccaagaagcggcagggctggcggacttgcctggtggttcctgagctgtcctgggagctggacatctgggcccgggaggagggtgagctgttggtgttgtgaacagtcagaggggtactggccgcctgtgcagaggccccagcactgccttcccctttt

SEQ ID NO: 41050 - DNA, 507 bp, Macaca Mulatta
  misc_feature (1)...(507): n = A,T,C or G
cccccaatgcccggagcaggaaggcaaagcatcatgaagaggatattgggagctctgctggggctcttgagtgcccaggtttgctgtgtgagaggaatacaagtggagcagagtcctgcagacctgattcttcaggagggagccaattccacgctgcggtgcaattattctgccgctgtgagcaatttgcagtggtttcaccaaaacccttggggacagctcatcaacctgttttacatcccctcagggacaaaacagaatggaagattaagcgccacgactgtcactaaggaacgctacagcttattgcacatttcctcctcccagaccacagactcaggcatttatttctgtgctgtggancgtgctcatggtgctggatctgacaagctgatctttgggacagggaactcagcttaacagtgagatccatnnnnnnnnnnnnnnnnnnnnnnnnnnnnccagctgagaggctctaaatccaatgacacgtctgtctgcctattt

SEQ ID NO: 41051 - DNA, 804 bp, Macaca Mulatta
  misc_feature (1)...(804): n = A,T,C or G
atgtctaagtcagagtgtcctaaagagcccgaacagctgaggaagctcttcattggagggttgagctttgaaacaactgataagagcctgagaagccattttgagcaatggagaatgctcacggactgtgtggtaatgagagatccaaacagcaagcgttccaggagcttcgggtttgtcatgtatgccactgtgaaggaggcggatgcaccatgaatgcaaggccacacaaggtggatgaaagagttgtaccaaagaaagctgtctcaagagaagattctcaaagaccaggtgcccatttaactgtgaaaaagatatttgttggtggcattaaagaagacactgaannnnnnnnnnnnnnnnnnnnnnnnnnnnnnnnnnnnnnnnnnnnnnnnnnnnnnnnnnnnnnnnnnnnnnnnnnnnnnnnnnnnnnnnnnnnnnnnnnnnnnnnnnnnnnnnnnnnnnnnnnnnnnnnnnnnnnnnnnnnnnnnnnnnnnnnnnnnnnnnnnnnnnnnnnnnnnnnnnnnnnnnnnnnnnnnnnnnnnnnnnnnnnnnnnnnnnnnnnnnnnnnnnnnnnnnnnnnnnnnnnnnnnnnnnnnnnnnnnnnnnnnnnnnnnnnnnnnnnnnnnnnnnnnnnnnnnnnnnnnnnnnnnnnnnnnnnnnnnnnnnnnnnnnnnnnnnnnnnnnnnnnnnnnnnnnnnnnggcccctatagtggtggacgccaatatttgccaaaccacgaaaccaaggtggctaaggcagttccagtagcagcagtagctatggcagtgccagaagattt

SEQ ID NO: 41052 - DNA, 1482 bp, Macaca Mulatta
  misc_feature (1)...(1482): n = A,T,C or G
agatatttggtttccaggcaggactgacatctttggattgcagtggatcttactgcttacctgtaccaattattccgtctttcagcactgctctttatggtaaacttctgaaactccccacnnnnnnnnnnnnnnggaccaaaagatctcagattgctataactgaaggtatatttgaacttccaaatctcacaattcaagctacaagagcacagacacttctcttgcaagcaatatatcaaagttggtctcatcttggaagtgtcagctcttctgcagtgattgaagctttgataaatgaagtcttcctaagtataggtntaggtgtgaaatctaagaatctcctgccaactcttgaaggctcaatccagaatgttgaattgaagtactgcagcacatcattggtcaaatgtgcctctgggaccatgggatcaataaaaatttgtgccaaagccccagncagttgataatggaaaagagaagttgattcccttgcttcagggtccttccgacactaaagaccttcatggcaccaagtggctcaatgagagtagaaagccagagtctctcttagctccagatttgatggccttcacaatccaagttccacaatatattgactactgccacaattcnnnnnnnnnnnnnnnnnnnnnnnnnnnnnnnnnnnnnnnnnnnnnnnnnnnnnnnnnnnnnnnnnnnnnnnnnnnnnnnnnnnnnnnnnnnnnnnnnnnnnnnnnnnnnnnnnnnnnnnnnnnnnnnnnnnnnnnnnnnnnnnnnnnnnnnnnnnnnnnnnnnnnnnnnnnnnnnnnnnnnnnnnnnnnnnnnnnnnnnnnnnnnnnnnnnnnnnnnnnnnnnnnnnnnnnnnnnnnnnnnnnnnnnnnnnnnncagaatcccgcccattgtcagttcctgttaaagccatgttgaatatatctgaaagctgtagaagtcctgaagaaagaatgaaggaatttattggaatagtttggaatgcagtgaagcatctcacactacagnagcttgaagtacaatcttgttgtgtgtttattccaaatgatagcctgccttccccaagtacaattatatctggtgacattcctggaacagtgagaagttggtaccatggacaaaccagtatgccaggaacacttgtcctctgtttgcctcaaataaagattattagtgctgggcacaagtacatggaacctcttcaggagattccatttgttatcccacgacccatcctcgaagaaggtnnnnnnnnnnnnnnnnnnnnnnnnnnnnnnnatttcagcatatatacccttcttgggaaaacaagtgacactttgcctagtggaacttatgggttgcacctccactctagctgtcacgtctcaaaaactacttgctacgggacctgatacacgacattcatttgttgtctgtctccatgttgacctagagtcactagagataaaatgctctaatccccaggt

SEQ ID NO: 41053 - DNA, 789 bp, Macaca Mulatta
aatgtccctttatccttcaccctgaggcgtgagtgttttgggggctacaaacacctcccggtagaggctggacctgaggacccttccgacctgtgcccgacccttcctgaagtcctggccacagcccatcttccatgagtcccagcagctataggccatgcccttcctctgtcacctatctgcccctcaccttgtcatccacggacccagaccatgcaccttccatgcgggcccacagatcaatggcaggtacctgaggtgcaccattgagtgtcgaatttggggttaacatctagaaagaagaacgcacatgaggctctgtgaaggctggaactcaggtcttcagggaagagaaaggaagactggattgcaccttgatgcctcctgaggaggcagccctcctcttgaggtgggcttgggccccgcccagacttatccgcgtcgctctgtccacctcccccttaaaggcccccaccctgcctctgtgtctcccagaagccctccctgtgctccacctgcctccgtagaaggaactttctttctcctttttcctgggcgagggggctggcaggtggctaaccccatttagcatctccaggccctgccatggtgtctcatcttgctgttctctctggctctttctctcttcccatttcctttagtagttgaattttgcaaagctcgtagcagtagctcagttgcctgcagcatccttgtgtgtagataaattagtctagtcgacagaaactcagcactggggacaggattgcaaagtctgggacatagatg

SEQ ID NO: 41054 - DNA, 723 bp, Macaca Mulatta
tcataactcctattgtccttattatttcctaagtgaacaaaacatgtcttttgttaaaattatttgtacttctgtctttggttcctgaagtagcttcagaatggcttcagagccatgaaggtgaaagcagtcttttgttataatgttgggggactttaggcgtcagaagacagaattgctctctctgaccttcttcatttcacctgcttctttttctccccaaggcaggccgtagaaattaaagatatattctaattaccccccatctttccgtcttggagctagccataaagaaattctctgacttatttaattgcaggtcataaaatcctcatttcagaggggtcttgccccatgccctggaggaaggaatactgcacagaaaggctaagaagaatctgaacagacaggccttgctgggtttccccactcagtctattagtatcagattataccctttttgtctatcacatttctacacatttgtccttataccaatcatgtctatccaatgaagtctccataaaaggcccaagaggagaggtttgggggagtttctggacagctcaactcataggaaggtgaacaagaactcatccacgtgcccagaggatgttgtagcccaactccacaagaatggaagctcctgttcttaggattcttccagacctcgccccatataatcccttcatctggctatttatttgtattatttaaataaag

SEQ ID NO: 41055 - DNA, 794 bp, Macaca Mulatta
  misc_feature (1)...(794): n = A,T,C or G
ggtacatttagtacaggtaccataaccaaaagagatttcttagttttgatggattaagagatagcattctgctgtatattatggcaggtacagatatgattacaaaactgaaccagaatttggattatagaagtgcacttcctagctgttttttatttaggtataggaacacacaatgagaaccttatgattagaatgtagcagtaacaacagagggtaactacactgcaagacttaaatggtttgagcatgtgacactatcctattgttggggggagcagggtataaaaatatacatacaggaaattagtttaatagtaaagttttatatgtatgtttaacttccatgatatttattattttgtagagacatttgtgattgtttagagttcttgtttttattatatttatgtataaggttgactttttttaaataaataagccaaaaattaaacncaattccatacgactacaaaaaaatatctaaattacccccaaaaccacataatcaacggccactcgtcctgtaacccccccacatataaatattataataaatatttaaaaatttggggcccccccctnnnnnnnnnnnnnnnnnnnnnnnnnnnnnnnnnnnnnnngtgggcccggcgggcccccccgtgggggaaaagaagacaaaacgggcgcaaaaaactgtttttcccacaaagaaaaaacctcggggaccagaaaaaagaaggggcgttgggattactcccccccaacaataaaaaaagaacaccgccccgcggcggaggagcaaacaaaat

SEQ ID NO: 41056 - DNA, 142 bp, Macaca Mulatta
gcttgtgaccaatcctgtgagacttgtgggcctagtagccccaggtgtcttacctgtactgagaagacagtgctgcatgatgggaaatgcatgtctgaatgccctggcgggtactatgctgatgccattggcaggtgcaaag

SEQ ID NO: 41057 - DNA, 502 bp, Macaca Mulatta
tgaaagaaatagcaattatgtagtcaggttcactggctctttcttctccctggtaacaggctaagtcttaaccttgattaggcagcatcacatctgatctaagttctccccagctttcagcccagcccctgcttcccaggctccagagcgcagctctgcaccaccctctccacccctgcttaacatcagaacattgccaaagctaagcatctataaaatgtttcttttgaatagttgtctacctacttggattatctttttccttcccccagaggcaaaaattggaccacttaatctatactgtaggacagtcttgcccctcagaaaatacttgagcatattaagttgttttgaaatggatctgagaagcggagttctgaaccatgcccacaaacttcctagcctcatcacactggcattctttcatagccccaaagtacttcccacttgcccttcctatgaatgcaagtaaagcaaaaccttttgacaaaggaaattaaga

SEQ ID NO: 41058 - DNA, 768 bp, Macaca Mulatta
cctcccgagggctggcagcagtcactgtcacccttcatggggtctggttcatgggctcacctggtcttagacaagggcagctgcagtccccgcaccaggcagaactgcagtttgagtggctggggatagatggagtggcggcctggccacactgccctgggcagcagcacatcagttaacagtttgccttcaaactagtcattactctgtcttgtgggacaattagactagaggagccaaaggaatgtgcaggggcagtgggtttctgtttggagagtggctttcggtaaacagagttcgcattcctccagattctgtgggaccagagtaaacatcattgtgccacagcccggctgaagccatctgcagtgctgttcccgcagcgcaccgctgctccctctgtctcggctaatgaccttcaaggctgtcctaggcaggttctccccgaggagctccccagaccaaggctccctaactctgcaaagcaaccagagcaacagagaacagcgggtggtcgccgccgcagtcctcccggcgttctaggtgcatggggctgttgtgctccagtccctgtgttctgtcgctggagtgcagcttaagtgcgaatcatctcttggaaagttgagagataattttgtcaactacccacgatatatatgtgtggaatagattactcttatttcatgatttaaaggcccactggaaaacttcacatttgtggttataccagggactgaagtgattgcttggtggccctggcagcttatc

SEQ ID NO: 41059 - DNA, 240 bp, Macaca Mulatta
catagacgaagattactgaggaaatgttggtgctgtactgtttaattttggcaaagaaaagtttaaagtcagaaaaagtgatcgcattgcacagctcatttgtgaatgaatttttaatccagaaatagaagaagttcaagctttggatgatgctaacaggcattcagaagaattaggttctaccagaaagaattaaaatttatgctaagaatagaaaatgagaactcatacttttttctt

SEQ ID NO: 41060 - DNA, 3515 bp, Macaca Mulatta
  misc_feature (1)...(3515): n = A,T,C or G
ataggtctgtctgcgggtcggatttcccaggttattgttggagatgagcgacagcaatacctcttggtgattgggcgggatgtagatgatgtccggttagctcagcgtttggctcaggcaaatgagattgtcctatcctggaactgctggatgctctgcgagcagtatatgtttgaagtggaaatcatgagggaggatgaagctgtgaannnnnnnnnnnnnnnnnnnnnnnnnnnnnnnnnnnnnnnnnnnnnnnnnnnnnnnnnnnnnnnnnnnnnnnnnnnnnnnnnnnnnnnnnnnnnnnnnnnnnnnnnnnnnnnnnnnnnnnnnnnnnnnnnnnnnnnnnnnnnnnnnnnnnnnnnnnnnnnnnnnnnnnnnnnnnnnnnnnnnnnnnnnnnnnnnnnnnnnnnnnnnnnnnnnnnnnnnnnnnnnnnnnnnnnnnnnnnnnnnnnnnnnnnnnnnnnnnnnnnnnnnnnnnnnnnnnnnnnnnnnnnnnnnnnnnnnnnnnnnnnnnnnnnnnnnnnnnnnnnnnnnnnnnnnnnnnnnnnnnnnnnnnnnnnnnnnnnnnnnnnnnnnnnnnnnnnnnnnnnnnnnnnnnnnnnnnnnnnnnnnnnnnnnnnnnnnnnnnnnnnnnnnnnnnnnnnnnnnnnnnnnnnnnnnnnnnnnnnnnnnnnnnnnnnnnnnnnnnnnnnnnnnnnnnnnnnnnnnnnnnnnnnnnnnnnnnnnnnnnnnnnnnnnnnnnnnnnnnnnnnnnnnnnnnnnnnnncagttattggtccaaaagtgagtcttgcggccagaatgataactgcttatccaggtttggtgtcctgtgatgagataacatatctaagatccatgctacctgcttacaacttcaagaaactaccagagaaaatgatgaaaaacatctccaacccagggaagatatatgaatatcttggccacagaagatgtatnnnnnnnnnnnnnnnnnnnnnnnnnnnnnnnnnnnnnnnnnnnnnnnnnnnnnnnnnnnnnnnnnnnnnnnnnnnnnnnnnnnnnnnnnnnnnnnnnnnnnnnnnnnnnnnnnnnnnnnnnnnnnnnnnnnnnnnnnnnnnnnnnnnnnnnnnnnnnnnnnnnnnnnnnnnnnnnnnnnnnnnnnnnnnnnnnnnnnnnnnnnnnnnnnnnnnnnnnnnnnnnnnnnnnnnnnnnnnnnnnnnnnnnnnnnnnnnnnnnnnnnnnnnnnnnnnnnnnnnnnnnnnnnnnnnnnnnnnnnnnnnnnnnnnnnnnnnnnnnnnnnnnnnnnnnnnnnnnnnnnnnnnnnnnnnnnnnnnnnnnnnnnnnnnnnnnnnnnnnnnnnnnnnnnnnnnnnnnnagtggcatatccccaggaattatatccatgtgttcttgagttggttacaatttctttattttttaaccctaccttcctgttcccttaccacagaatatatcatttgaaaccagcatctggatctcaaaagctttcagaggtctaggatttatggggtatccagtagtgaacaagctaaaaattcactggtccacaatttgttttatttatcctctatcacttctcctaatctacccaccctgcagagtattttggaatggaaccctaagatcnnnnnnnnnnnnnnnnnnnnnnnnnnnnnnnnnnnnnnnnnnnnnnnnnnnnnnnnnnnnnnnnnnnnnnnnnnnnnnnnnnnnnnnnnnnnnnnnnnnnnnnnnnnnnnnnnnnnnnnnnnnnnnnnnnnnnnnnnnnnnnnnnnnnnnnnnnnnnnnnnnnnnnnnnnnnnnnnnnnnnnnnnnnnnnnnnnnnnnnnnnnnnnnnnnnnnnnnnnnnnnnnnnnnnnnnnnnnnnnnnnnnnnnnnnnnnnnngaaatagcagtaagccaactggatcaactgagcccagaggaacagttgctggtcaagtgtgctgcaatcattgggcactccttccatatagatttgctgcagcacctcctgcctggctgggataaaaataagctacttcaggtgttgagagctcttgtggatatacatgtgctctgctggcccgacaagagccaagagcttcctgctgaacccatattagtgccttcctctatcgacttaattgatgnnnnnnnnnnnnnnnnnnnnnnnnnnnnnnnnnnnnnnnnnnnnnnnnnnnnnnnnnnnnnnnnnnnnnnnnnnnnnnnnnnnnnnnnnnnnnnnnnnnnnnnnnnnnnnnnnnnnnnnnnnnnnnnnnnnnnnnnnnnnnnnnnnnnnnnnnnnnnnnnnnnnnnnnnnnnnnnnnnnnnnnnnnnnnnnnnnnnnnnnnnnnnnnnnnnnnnnnnnnnnnnnnnnnnnnnnnnnnnnnnnnnnnnnnnnnnnnnnnnnnnnnnnnnnnnnnnnnnnnnnnnnnnnnnnnnnnnnnnnnnnnnnnnnnnnnnnnnnnnnnnnnnnnnnnnnnnnnnnnnnnnnnnnnnnnnnnnnnnnnnnnnnnnnnnnnnnnnnnnnnnnnnnnnnnnnnnnnnnnnnnnnnnnnnnnnnnnnnnnnnnnnnnnnnnnnnnnnnnnnnnnnnnnnnnnnnnnnnnnnnnnnnnnnnnnnnnnnnnnnnnnnnnnnnnnnnnnnnnnnnnnnnnnnnnnnnnnnnnnnnnnnnnnnnnnnnnnnnnnnnnnnnnnnnnnnnnnnnnnnnnnnnnnnnnnnnnnnnnnnnnnnnnnnnnnnnnnnnnnnnnnnnnnnnnnnnnnnnnnnnnnnnnnnnnnnnnnnnnnnnnnnnnnnnnnnnnnnnnnnnnnnnnnnnnnnnnnnnnnnnnnnnnnnnnnnnnnnnnnnnnnnnnnnnnnnnnnnnnnnnnnnnnnnnnnnnnnnnnnnnnnnnnnnnnnnnnnnnntgggacacatcactttagccaaaaaattggctaggaaagcccttcggctgctgaaaaggaatttcccttggacctggtttggtgtccttttccagacattcctggaaaagtattggcatccctgtaccctgagccaacctccaaacaaccctagtgagaannnnnnnnnnnnnnnnnnnnnnnnnnnnnnnnnnnnnnnnnnnnnnnnnnnnnnnnnnnnnnnnnnnnnnnnnnnnnnnnnnnnnnnnnnnnnnnnnnnnnnnnnnnnnnnnnnnnnnnnnnnnnnnnnnnnnnnnnnnnnnnnnnnnnnnnnnnnnnnnnnnnnnnnnnnnnnnnnnnnnnnnnnnnnnnnnnnnnnnnnnnnnnnnnnnnnnnnnnnnnnnnnnnnnnnnnnnnnnnnnnnnnnnnnnnnnnnnnnnnnnnntgttggttctccagggagggattgttggccacagctcagctcatgcaggccctggcctacaccaagctctgccttggccatcttgacttctccatcaagctgggtnggttttcaagctcgtgagatatgtttacacctcaagaaaccagctctggagaatctggttctctcagttctcttcagatctgcatttctgaagaa

SEQ ID NO: 41061 - DNA, 647 bp, Macaca Mulatta
attttgtattctttttcgagtataagcttttaaaaggcagagataataccttttaaaccatgtgtatcacttatcatttataccagcatgaaatttataaaaacttggatattttttctaattttttatgggtatgtcttataagtagaattcattcagcatagatatgtattacatagaaaaattaaggaaagtaatttgttgctttctcttctgactttggagataatcattaagaatagaattttagtaaaattttctaaatgctggtttttgtttttgatttttccttgagtaagaggtttaattttttgttctaagtgcaaagcagtatcactcagtttgggagcaggaaggaatcttacatgatttgcatatctgctgtgtgccgcgcgttgtgttgagggtatttccacaataaaaaacattttccgtggcacatgaacatgatctttgctggggtatggaatgcatggagttgttgagagaactttctgaattcatatgtgcaccaaaaatggctttcacaaaagggaagaaaatagttcattgccatatgtagacttgcaatatttttgaatgaccaagggaattttcaacatggatgtaacgggtaatctgtaaatacctatattttaaactaacag

SEQ ID NO: 41062 - DNA, 210 bp, Macaca Mulatta
cctgagaaaccatatacagacgaaaccataaacaggccgagaaaaggaactgtaatgatcattagcggcagataatttgtaacctaattgtggaaagcacacctgaaaattaacaaagattgaatgaactagttgagaaaaatagcaatgaaagataggaaatttacagaggcgatatctgaatatccagtgaataataaaaagattctg

SEQ ID NO: 41063 - DNA, 637 bp, Macaca Mulatta
tccttattggtatctttgacttttatcacttgtttaaaatggagtctgcaaagtttctttactattaagttgtccttccccctgaaattgctttgtgtggagatactttgaaactatgtgattgtatcatttcttgttcactttcagctgctagttttagcatccactgatggttttgcccaagttaattattaatattatggacatagtatttatgtcccctcaaattcatgttgaaatcttagctccccactgtgatggtattaggaggtaggccttttgggaggtaagatttggtcataaaggtggattcctcatgaatgggattggtaccttattgagaagagacataagagcttgctctccaccatgtgaggatacaatgagaagacaaccattgtcaaaccaagaagaaggtcctcactggacaccagatctgctcgtaccttgatcttggatttcccagctctagaactatgagaaatataaatagtttgttgtttaagcctatgataatttgttatggcagtccaaccctactaaacaaatatgataggttttaatgggtggttagcccattctttatttattatgctggcgttctattgtaaggaagaactttctcttcacctctttt

SEQ ID NO: 41064 - DNA, 205 bp, Macaca Mulatta
tggccaggcaaaatcagagttgagcctcagcaaaacgtgtagccacttgaaattgatagagctttcctttgtgtttagttttatggttctctctgtatgtcattgttcctcttagttgagtttttgcctgtcaaagagatagaggactgcttttatgctgagatcctcaagccaaaacccacagtaaaagcaaagtaaaactttg

SEQ ID NO: 41065 - DNA, 337 bp, Macaca Mulatta
tcatagattttacccacaacgaagtatatacaaataacaagaatccagacttacagcactctgtcttttctgaacaagctatgcttaactgagtatctgtaactcaagaaaggctggaaagcacaacagttatcattcatgggactcacacacagaataaagctttaggaatacctacactatcttgtagaatagcttctgttctaaacaaaaaggttattattgattctggaaaaaaatacacactgaagaaaatttttaaaaactgtacgcatgagtgttattaactcatgaaccgctaatgtgaaaaatctcccctcccaccaaattggaaaat

SEQ ID NO: 41066 - DNA, 536 bp, Macaca Mulatta
ggtggttggccttttagtgtggactgaaggtgaaaaacttttctggctggtcattttcaaagagctgagaggggatgaagtggtgccctccctgaccatggctaagctgtcatcctctcttacagagggagacacagctggtggcggggatgcatgctcacaatcgaagctccagtggcaaaaagtcctttccagccccaatctatggacagacatgacccttgtcctgcactgatgcgaaggcctcgaggttccaggtcgcagtgggtgtgaagcactgtgcgtctgcagagtggggctgcaaaccaggggcagggtcccagctggagaccctttggaccttgagcagtctccatctgcagtcctgtcccgtggcttaaatgcctactggtatctgtatatttaagttaaacacaataatgtatgttacctaagcctctggtgggttatctccgagatggagaaaatggccagatttcaataaatgttgttaccggcatcctccagtgcttattaaatggtaaaaggccggctgg

SEQ ID NO: 41067 - DNA, 855 bp, Macaca Mulatta
gggaataaaaaaataaaggaaattggaaggccttataagctgcctcagaaccaaggacttcctaactttctcttgtttctccccatctcccaagcacggggaggggctctctttttatagttcccttatgtgactgatgaaaacttcttccaaaagaaatgcagttgtcttaagatgacccctccctaagaatctcatcaaatatccaagaaatattaaccattggcaaagagaaaagactaaatattgtcaacagacttcatctactcttctgtgggcagcttggagattacatgggagactttatctgtataataagacagcctttattcaatataaagttctgcccctcacctttctgtcgccctcctcaaaggttagaggaactttgtcccaggccattgtctgttcattgggctcctacaatccccctgaaaatatttatttcccctcaaagctgcctacactctccatttctctctcctctaagaaaaaagtattttaagccccaaccatctgggcctttctttgagtcccaatttttttcccttttctccctcccttcccccggaaacagggaagccccccctcctgtcccccaccggtctgggttttttccctaaacccccgaaatctccccccatgggcgtttccagccgctggggtggttcaagaaacaccccccctctcgggccaagacatggccactacctctcccttcttctaacaaagcggccccgcttcccgtctgccaatccccccaccgccaattatcctcaaatctctttcccgcaacccatataatcgcggctgccctacccctgtactgtgcaaacctgtcccaggcacccccct

SEQ ID NO: 41068 - DNA, 801 bp, Macaca Mulatta
ggatgattatctgcctgctcctcttcaaagctgaccttactttagaaatagttttaactagtttagttttctggtttccaaaactgaaacagattaaatcctacaaatttaaggacagttgtgacagtaatctgaccactgtctataaacacactggtttccaaatctccctttcttcttcagttccttccttgctcaatatataaccttctctaaactgtgcaggtaaaaggaatgactttccttgagagaaccattagttcatcaaaggtttatgtagttttgtagctctaccctaactttgatattaagggaggtaagaaaggtaacagaaaaccagcatatttaagccaaagcacgaagtaatcactgacagttaaatgtgaccaaaataattaaaattcacaattttttaaatgtagtcattttgggttatctctagtaaggcaaatacccacgttggtaaatttttaggatattgtgttgcgctagaaaactaagtagttcatctttctaatgaggaagattaatgaaagaacattattatattctgcatggtatattttaaagtttaagaaggcatgttaaacattatttcctctatggtagttaaaatacaaaattagattttttaaaggtgtcatttgactaaagaacgtttaggtagaatgcatcatacttgagtgatgctggataaggtattattatatttcaacaatggactatgccttggtttttcacctatcaaaaatcaaatttctcttttacatggagaatgaaattgcccattttagtatgcta

SEQ ID NO: 41069 - DNA, 795 bp, Macaca Mulatta
gggaggaagaattggatcctagctcggcctggcgaggagcagctggaggagaccgagagagaaagaaatctcgttacagggagaactgggagctccatgataagaaagggttgcataattagcgcaagggaggagcttcaaatcctggcaatctaacacagagattgttcgcttaagactacacagtactacttgtgaaacaaaactggcagaagaggtgtgagaaaagaagaaactcctgctttcgggaaacctgtattgagtttggtctgatattgaagaattttgcccttcctgaattgtggaggtcatctcaccctccagataagccaagtagagggtgacaatgaatccatatatgacaaagaaagtactcatgcttcaatcctggatctaagtcatttagctaaatgcttttccactggaataagattttggactttattttaatcagcatgtttttcctttgagaggaatttcaaatctccctcttaggaaggtcatgcttcctttgccttgctaggcctcgggatacgaaatagtactctctggtaaaagctatcattgagccaataattgatatggctactgctttggatttgattcgctgagaaccttcgacactcactgtggcaggcctcaagaatgaatacaaagtgtgtgccggcttttaaaaattcggcggtctaagccaaggcagagggatgtcttagccgggccaaaagtgtttccttaacccctggtttgttttggtttaatggttccgcaagccctttggacattcgaattgccacc

SEQ ID NO: 41070 - DNA, 819 bp, Macaca Mulatta
  misc_feature (1)...(819): n = A,T,C or G
ggcattagaaccccatttggtaattcttcgaaaaaatggattgtatttttcttnnnnnnnnnnnnnnnnnnnnngatttgccccgaatccggggtattttaaggcttattttcacgtgatgggcagaggatataactattggaatccaatttaaaaattaaaaacttataagttcctttatgtaattaaataactcataacttgaagggactcaaaacatcagggtctgaattaacatgcaaaatttnnnnnnnnnnnnnnnnnnncaaaaagagcagtgccttaggttatttcagatgatacagtgttctgataacctttaaattggagtagagagtcataaaaggtttccttttttcccatcttactttgttattgttattaggttgattcacagtttatttatttttcataattttctgatttgctacttaatttctagtgcaaatcatacattatggattaaattaacaagtttacttagaacactgaagttacgnnnnnnnnnnnnnnnnnnnnnngtacaatgtactaaaccttttcgttatgattgagaagggaatttctgtgttgtctggttgccaggctggggtgactatatgagttaaattgtttgatgataaaacagttgttgaactattgtaaatctccttcctctttctcatgtgccagatagagtcatgttatgttataaaattacatagaaatacctgaaagattaaaaagatgctcatattttaagatatgtttttatcttcaattttactaataaagaannnnnnnnnnnnnnnnnnnnnnnncccttccacagtttgtacc

SEQ ID NO: 41071 - DNA, 334 bp, Macaca Mulatta
tatgaccaaatccttgaccaggccatgaatataagaatgatgatttgaatttgtttattacctatgttgcacagggtttcagcctgacagctctgaggacaaataagttagtaaaaatgatgtgtgggctggtagaatgtttgaattatctgcattgttgattttgtctcctgatacattctttcataaggttgaattaactgatgtgcatttcaagttctcagctaccacaagcaacttaatgaatctcagagaactgctgctgtcacagaggccagaaagcaagtagcttcactcttatcaaagcatctcaaaaaagaacagaattttagga

SEQ ID NO: 41072 - DNA, 386 bp, Macaca Mulatta
ctgatccatggaatagtaaacacaaattctttctaacagagtgtaagtgcaatcttagtcttcagaaaattcccatagataaagttccaaagaacatgagttcacagtcaaaaaccccaaaacgcacaagaacccaaggaacaaccactgaaagcatccaaaacaataataagcaaagtccgaccagtaaagattctagacaatggtattcctagacacagaatacaaaatatctatgtcttacatgcttaaagaaatgtttaacagtctttaaaatgtgaacagaaaaccaagagatttaagaatagccaaacagattgggaaaagaaccatataattcatccagatattaaaagtatcttctatcttccacctaggatcgcaac

SEQ ID NO: 41073 - DNA, 617 bp, Macaca Mulatta
ggtgcagggctgccagagtaaaacgccgttatgacaggacctccgggggctgcacaggcaggtggcagctggggactgggcacaggcgacacgcccacctgaccgggagccagcagtggggcttggcctgctgagagacagagaaggagaagcaggagaccaagttagggcccagactgcctcagccccaccctgggtccccagcactgcctgccaggccgcccctcacctgagagcaggggctgcacgaaggcggggccactgggccccagcgaggtgaagcctagagctacagagctcgtgggcccgtacgaggtgactgttccagcctggctggatgcagggctggtacccaggggcagcgcgtgcccgcccgctgactgcacataggtgattctgccgcagggagaggaaatggggaggagtgaggtaagctggccccgccccaccccttccctggcctctgagtgtgggctcagctgcaattacctggtggaggagggcagcaggaccttctgaggctgtgaagtgggtccagggagtgtggctgggctcaggggcggcaccaggccgctgggtgtgctcacaggcaccggggtcagctggatgatttgtgg

SEQ ID NO: 41074 - DNA, 587 bp, Macaca Mulatta
  misc_feature (1)...(587): n = A,T,C or G
attagctgggcgtggtggtgcacattnnnnnnnnnnnnnnnnnnnnnnnnnnnnnnnctagaatcacttgagcctgggaagtggagattgaggcatctgcactgcagccttggtgactgattgagactctgtctcagaaaaaagtatatgaaaatctaatgtacagtttaaatagtcatgcttcattaaactagtccagttcaagtggttttatatttattaatgaaaaattcactgtcattagttctaaccatgatcaggtaattgaatttccaaactagaagagccaaaaagcatccctaacatatcttactaatatatgcagcagtttgcctatgcatggacttttaattttnnnnnnnnnnnnnnnnnnnnggatttaggaggtacaagtccagttgtgttacaaaaatatagtatgtagtggtgaagttcgggcttttaaaatagtaaacattgtacccagtgggtagtgtttcatccgttgccgcctcccagcttccccttttttggagtctccagtgtctattatttcactctctctgtccacgtggacccattgtctagctcccacttataagtaagaa

SEQ ID NO: 41075 - DNA, 779 bp, Macaca Mulatta
  misc_feature (1)...(779): n = A,T,C or G
gggtcatatagataacaagctattgaagactaataggatcattccaaaagaagactctcaagagccaacttaaagaggctcccaatggccaaagatgtgacaatttgagtatcagtagggataacaacagcaatagattgaagcacatcaaacatgtttatgagttcataatgatgctcaaaaattggtcatatttagaagataattgggaattgttaaatggaagactggtaaataaattcttttttcctgacattcctatgtgaactgtatacctgaatgactacatagtacatgatgtgaagctcctctttatagaaataatccagctgctaaatgacaaaggaatgatagagtgtcccttttctacaacctctaatgttgtggtgtgatcatagctgactgcagcctcaaactcttggcctcaaggaatcctccctcttctnnnnnnnnnnnnnnnnnnntggttacaggcatgagccactgtgcccagcatttgtacttaaatttttaaaactctaaaagaaattacatttatgagaaaattgataatttgagcaatgactncatgtttgatgatgttaagaaaatgttaatattttagatgtgttaataatatggtttttttaaagtcctttatttttattgatgaaattatatggttctggggatttttgcttcaaaatactatggcaatgggggttgggggattagagagggaaaacggaatttggcccctgaagttggataaattaattgggattttggggggatgggaa

SEQ ID NO: 41076 - DNA, 781 bp, Macaca Mulatta
  misc_feature (1)...(781): n = A,T,C or G
gggtttgtcctgtggttaaatatgagtattcatgataaaacattttcagaaggggtaagccgtgagttattatccacaattgaaagcaaattttgaatgaatctttaagttaggtatctaccttccccccaaccccctaaagaaacctctcagtagtttctatcaataatgtacaaaatgatgagcatttttctatgatgaggttttaacgattattcagggtggtcttttgtttttaaatctttttttaactaataatatttacggtgtatattttatacagaaatgcattgtaatgtttttaattgtgttgttttttgcagtcttttaagtgccatgccaattgtttttatattctataaaagttcgctgaaaatactcaacaggggaataggcagcggacagtcagaatggttggaattttggcgttctaagaaaaactttattttgcataagcatttggtcagatcattttgtgcatatgcagcctggattggatgttaagtaaatgcttgttcagtgccggtacatttacttaaatctgtttttatttttgtcatgtagaatactactgtggtcatcataatgtaatctgtatttctgtnnnnnnnnnnnnnnnnnnnnnnnnnnnnttgaagtctttaaataaaatgtataaatacccaaaaannnananaannannnnnnnnnnnnnnnnnnnnnnnnnnnnnnnnnnnnnnnnnnnnnnnnannnnnnnnnnnnnnnannnanacnnnnnnannnnncccaccaaaannaatn

SEQ ID NO: 41077 - DNA, 632 bp, Macaca Mulatta
  misc_feature (1)...(632): n = A,T,C or G
aggaaattctttttccactattttttttattttggttaatattaattagcatgatgcatccaaataagaaatatgaagaagtgcctaatatagaacttaatcctatggacaaacttactctttctaatctaattcttggatatactccagtgactaatgttacaagcagcatcatgcaaaaagtgtctgctgatcatctacctgatgnnataattactgaagaatatacaaatgaaaaagaaatgttaacatccagtctttctaagcacagcagctttgtaggtgtggttttcaaagactccatgtcctatgaacttcgtttttttcctgatatgattccagtatcttctatttatatggattcaagagnagctggctgttcaaatcatgtgaggctgctcagtactggtcctcaggtttcacagttttacaagcatccatagatgctgccattatacagnagttgaagaccaatgtttctctttggaaggagctggagtcaactaaagctgttattatgggagaaactgctgttgtagaaatagatacctttccccgaggagtaattttaatatacctagttatagcattttcaccttttggatactttttggcaattcatatcgtagcag

SEQ ID NO: 41078 - DNA, 222 bp, Macaca Mulatta
gagggggcaggtggtgcttttcacaagagcaaagaacaaaggaagaaggaaggaaggagcatgatgaattctcttgaaactgtaatcctactgaatctgaggtgtcacaggtcacccagatgggtgcatctagcaggtctttgaatgtgttagtgcaggtttgaactctgagaaaggtaagagataaaagcttaggagtcatttacatagaattaatagttg

SEQ ID NO: 41079 - DNA, 125 bp, Macaca Mulatta
gtaccagctactcctactggggaggctgaggcaggaaaatcgcttgaccctatgaggctgaagtgcagtgagctgagattgcaccactgtactccagcctaggcgacagagcgagatgccatctc

SEQ ID NO: 41080 - DNA, 123 bp, Macaca Mulatta
tctgattcggcctgacggagagaggaaggctgatgttcaaccgactcctggttaccatgctttggatgttgccaacaaaattgggatcatctaaactgagtccagctggctgattctaaatat

SEQ ID NO: 41081 - DNA, 885 bp, Macaca Mulatta
  misc_feature (1)...(885): n = A,T,C or G
tcaggaaagtattatttttacgacaactactttgacctgccaggagctcttctatgtgccagggtggtggactatttaacaaaannaacaatggtcaaaaaacatttgatttttggaaggatatagttgctgctatacaacacaattataaaatgtcagcttttaaggaaaactgtggaatatattttccagaaataaaaagagatccaggcagatatttacacagttgtcctgaatctgtgaaaaagtggcttcgacagctaaagaatgctgggaaaattcctctgttaattaccagttctcacagtgattactgtagacttctctgcgaatatatccttgggnnnnnnnnnnnnnnnnnnnnnnnnnnnnnnnnnnnnnnnnnnnnnnnnnnnnnnnnnnnnnnnnnnnnnnnnnnnnnnnnnnnnnnnnnnnnnnnnnnnnnnnnnnnnnnnnnnnnnnnnnnnnnnnnnnnnnnnnnnnnnnnnnnnnnnnnnnnnnnnnnnnnnnnnnnnnnnnnnnnnnnnnnnnnnnnnnnnnnnnnnnnnnnnnnnnnnnaggttgtttattttggtgacagcatgcattcagacattttcccagctcgtcactatagtaattgggagacagtcctcatcctggaagaactcagaggggatgaaggcgcaaggagtcagaggcctgaggagtcagagcctctagagaagaaaggaaaatatgaggnagggaccaaaagcaaagcctttaaatacttcatctaaaaaatggggctctttttttattgattcagtttggggactggaaaacacagaagactccttggtttatacatggtcttgtaagagaatcagtacttacagcactattgcaattccaagtattgaa

SEQ ID NO: 41082 - DNA, 666 bp, Macaca Mulatta
tttttatttaatttttgaaattgcttcactttttaaaacccattttatattcccagtcaccaatttaaacaaataaactgacaggtgcgcaggtgtggacgccttccttctttgcaaacgtcctggctgtactactccctgctctgtagacattgtctcctgcacccagtcccggctgctaaatctccaactgaaaccaggattctaatgatttgttttctgttttccttagaacgagaccaaaagttcaatacaatggctatgctgggcatgaaaacagcaatggacaagcatcgtttgaaaaccccatgtatgatacaaacttaaaacccacagaagccaaggctgtgaggtttgacacaactctgaacacagtctgtacagtggtatagccctcagtgccccaacaggactgattcatagccatacctctgatggacaagcagtgattcctttggtgccatataccactctcccttccactctggctttactgcagcgatcttcaaccttgtctactggcatacgtgcagcggggatctctactgaaatgtgccagagtcttctgcggatcaaagtacacctgcgttttcattccgaaagtgggttctaaatgcctggctgcacctgtttgacatcaaggcacactccaggaagactgccacg

SEQ ID NO: 41083 - DNA, 801 bp, Macaca Mulatta
atgccgaaaggaaagaaggccaagggaaagaaggtggctccggcccctgctgtcgtgaaaaagcaggaggccaagaaagtggtgaatcccctgtttgagaaaaggcctaagaattttggcactggacaggacatccagcccaaaagagacctcacccgctttgtgaaatggcctcgctatatcaggttgcagcggcagagagccatcttctataagcggctgaaagtgcctcctgctattaaccagttcacccaggccctggaccgccagatagctactcagctgcttaagctggcccacaagtacagaccagagacaaagcaagagaagaagcagaggctgttggcccgggccgagaagaaagctgctggcaaaggggacgtccccactaaaagaccacctgtccttcgagcaggagttaacaccgtcaccaccttggtggagaacaagaaggctcagctggtggtgatcgcacatgacgtggatcccatcgagctggttgtcttcttgcctgccctgtgtcgtaaaatgggggtcccttactgcattatcaaggggaaggccagactgggccgtctggtccacaggaagacctgcaccactgtcgccttcacacaggtgaactcggaagacaaaggcgctttggctaagctggtggaagctatcaggaccaattacaacgacagatacgatgagatccgccgtcactggggcggcaatgtcctgggtcccaagtctgtggctcgtatcgccaagctcgaaaaggcaaaggctaaagaacttgccactaagctgggttaa

SEQ ID NO: 41084 - DNA, 688 bp, Macaca Mulatta
actcatgatctgcccgcctcagcctgccattattgaccatttatatgtttatttacctatgtggttttcttttctcataaaatgcttgttcatatattttccccatttctacttatctttttcttattaaattgtcaaagtgcattatgtgatctgtattctgaaaatttgttgatgtgccagtcagtgtcaacgcagtaaacaataaccattctagaaatttcaaacaagaaaggatttaattcacttacagttaagtgctactaaatgattggttttacagttacacttcagagactataatcccgaggtcaggaatttatggtgctacaccatccctattaccatggcagcatcatttccataaagctggagacgatattggaaaaaggaccatatgatattgactacaagagacatttttgtctatccagttttatttaccagccactatatcaacagaaaaatggtctcagctcacttctgccttctatatctccctgaaatgcctctcactggtaaaattttaatcttatccacaacttcagctgcaagacatctggacaatgtagtttgagacttttcgcccgtgggacggaggccagaatatgaaaggggacagaaataaataaattagtgccagtggttcatagaacacattccataatagatgttccaatctgtattc

SEQ ID NO: 41085 - DNA, 410 bp, Macaca Mulatta
gtggcaatagtgcttcgaagactgagggagctacagctacaggaagtggctttgcggcaggaaaacaagcgtcccagtccacggaagctctcttctgaaccccttttgcctctggatgaggaggctgtggatatggactatggtgacatggctgtagatgtagtggatggagaccaagaggaagcttctggagacatggagatctcctttcatcttgattcaggccacaagaccagtagcagagtgaactcaacaaccaaacctgaggatggaggattaaagaaaaacaagtcagcaaaacagggtgacagagagaactttaggaaagccaagcaaaagttgggtttctcatcttctgatccagatcgcatgtttgttgagctgtctaacagcagctggtcagaaatgtc

SEQ ID NO: 41086 - DNA, 443 bp, Macaca Mulatta
ccgagccttcagagtgaggcattattttctcctctctcttgtcagatactgactcccacgcaggaaaaaggaagcaccttttgtcagatgctgtggccacttcctcttcagaaggctccagccaacctttcgctttgcagaatgacgggacccgccgcggtgccggactgcctgtgtaccaggccactggccgccgcctgggttttgttcttggcctggccctgactgggagctggcccctcggctgcttctctggctcagggggaactttctctggctcagatccggacccctgaactggacctggctgtcgtgcccccttcgcttctcagcccctctggggttcctccctcctctccgcccactctttgaacactgccccatgtccctcagtcagtcggcctgtcttttcctctctatagctcggtcaaggagtgtgatga

SEQ ID NO: 41087 - DNA, 452 bp, Macaca Mulatta
agccacttccatgtctgccttccaggggcttgaatatcagaccgatgagccttcggaagaaccgataaagaccatcaggaactggctgaaggagaacttgcatgtcttcttggagaagttagaggaagaggtgcgagagctggagcagctagtgcgggacctggaactgtggctggatgctcttctgggagagccacacctggaggagcactgctccacacataaaagtcacatgtgaggggtgggcctgggtcctggggagagcacaaaggtggggaggggttgccagggatttctctaagcagagcagaggtctgatgcttgaagttccaggcaggcaagaaaataaagtagttgggaaatgaagtccgctgttcacattcatgaatgctgacagaaacagccttggcgaaacaccagagcccggctgagatattctccctggcaccatg

SEQ ID NO: 41088 - DNA, 810 bp, Macaca Mulatta
  misc_feature (1)...(810): n = A,T,C or G
ggnnnnnnnnnnnnnnnnnnnnnnnnnnnnnnnnnnnnnnnnnnnnnnnnnnnnnnnnnnnnnnnnnnnnnnnnnnnnnnnnnnnnnnnnnnnnnnnnnnnnnnnnnnnnnnnnnnnnnnnnnnnnnnnnnnnnnnnnnnnnnnnnnnnnnnnnnnnnnnnnnnnnnnnnnnnnnnnnnnnnnnnnnnnnnnnnnnnnnnnnnnnnnnnnnnnnnnnnnnnnnnnnnnnnnnnnnnnnnnnnnnnnnnnnnnnnnnnnnnnnnnnnnnnnnnnnnnnnnnnnnnnnnnnnnnnnnnnnnnnnnnnnnnnnnnnnnnnnnnnnnnnnnnnnnnnnnnnnnnnnnnnnnnnnnnnnnnnnnnnnnnnnnnnnnnnnnnnnnnnnnnnnnnnnnnnnnnnnnnnnnnnnnnnnnnnnnnnnnnnnnnnnnnnnnnnnnnnnnnnnnnnnnnnnnnnnnnnnnnnnnnnnnnnnnnnnnnnnnnnnnnnnnnnnnnnnnnnnnnnnnnnnnnnnnnnnnnnnnnnnnnnnnnnnnnnnnnnnnnnnnnnnnnnnnnnnnnnnnnnnnnnnnnnnnnnnnnnnnnnnnnnnnnnnnnncggtccgggaataccccgaacgcctactctgaattatcccgaatgcctaacccttcattgaaaataccctatcatcaaatagggcctccttcatctaaccaggtagacagcagagttaaagaaacccgccggaatctgaaaaaaccattggcttcaaaaacgtaaaagtgcctaccgaattgcaaaaatcccctttactagccctagagaggatttt

SEQ ID NO: 41089 - DNA, 815 bp, Macaca Mulatta
  misc_feature (1)...(815): n = A,T,C or G
aggagaaaggggaataatttttggccagaaaaatcccacccagacaaggcttaaatgggcaaaggtttaaaaccttccgaaaggctttcaggggctgggggagcccacacaaaagccattttctgtggtttctgaaactcaaatatttctccttgccgaaagagttcgctggtcaccagtaaatgaaagggtttcaaaatcacatgtgtttcttacttcaggtttgcacgtgctcataattaaaaacatagactgggtggctcaaaataacgaccatttatttcttgcagtttcagaggctaggaagtcccagatctagatgctggagtgatctggttcctggatggaccaaattccaggtttacagatggcaccttcttgctgtgtctttccatggtagtgagagagtgtgcatctttcttgtatttcttctaataagggcactaatcctatcatgaaggctccagcctcatgacttaattagctccaaaaagccacctccaaataccatcacattggggatttagaatttcaacataggaattttggtgggtgattaaaacattcagtccacagcaatacgacacaagttgtttcaagccaacagtaccaagtttaagtccaaatccaggagtcagttgagctgaagtcttcctcagctgtcagcaacaccaataaaaaggggagaagagggcgtggtgannnnnnnnnnnnnnnnnnnnnnnnnnnnnnnnnnnnnngggcannnnnnnnnnnnnnnnnnntgagatcatcctaactaacacggtgaaacccagtctctaccaaaaaatacc

SEQ ID NO: 41090 - DNA, 779 bp, Macaca Mulatta
  misc_feature (1)...(779): n = A,T,C or G
ggatttatatgtacttcctaatactatgcttcccaatattttctcttactaaaaataacaaaaatatttaaaccttctgaaatctattccgttatcattaggatttgcacacaatgcaactaacaattcatgctttaaaaaagtaggttatttctgttgaagagaaaattatcagcaaggaagagtctactagaaaattcatgtgctagtcactcttggggatttaatatttcactggagttaattcactatatccagacctatatctttcatttattgctgagccatgtgcagtctggtatctcaacaacctcaacaacctccaagacatgtcagtttctgtagtgttcacctcaaatttgacatttgaatcggaactgatttagaaacaaccacttcattcatctagtatagattcatgacttctcactaacaatgatagtataattctgcctgttcttcaggattgaaattttgaactcagtttagatttcttgttttccctcatataccacatctaaacagtctccaaatccttatgcttttttttcaaaaaaattcacccaatccctaggcttttttctnnnnnnnnnnnnnnnnnnnnnnnnnnttttgttatgttttcttagacaggttcccactctgtcaccccaggctggaatgcaatggtgcaatcacgggtcactgaaacctccacctagctgggactacagggtgcagccaccacaccagctaattttagtaaatttttgtaaaaaatgagctttccctaaggtaac

SEQ ID NO: 41091 - DNA, 787 bp, Macaca Mulatta
  misc_feature (1)...(787): n = A,T,C or G
gggtggacgtggatgtaaatgtaaaagaagtcaagttaggcaaggattcaagagctggacaaggctagagagattaatgtacaagatgcaaaaagaaaggacactagaagagtaaatgttcaaaaaggcaataaaggaaatggccaaggccacaagacaaagaggccattggccaagggctgccgcaccttgaaggaaccaaatactgctctgatcagactgacaggagctgaaaaatgtaaagactggggcagactaagtaccttctcattaggctcccaggagcccatggtcacattagaagtcaaaagcagcaagattctgccatatctggattccaatttctcactgaaggctaagccactaaatagagttacggggggcggggggcgggggagaaaaacccctcctctaagcaacttaaacagtaaaaagagccataccttgtgaaaacttgcttatagactttataaaactaccctatgctggagactattgtacatgcctagtggtttgtttgctcgttttaaaataaaaatcaggttttttgcctttggtccttcctcccaattcagggtgcaccccccacccaaacaaacttaaggtattttgccctatcaaaaattttgctttgggtcggggcatccccccaaaaatcgatagggtccaaattataagggtggaacccccccgaaaacnnnnnnnnnnnnnnaannnnnnnnnnnnnnnnnnnnnnnntgccngggttttttataaaaaataagcacttttaccgagatgttggttg

SEQ ID NO: 41092 - DNA, 954 bp, Macaca Mulatta
acctaatcagtatcacacagctaataaggagtcaaatgcaggcctgcctgtccccaaagtccagattcttcctttcctagaatgtcagggctagggaagtgctgagaccctctggtctacccccaccccctaattttatggaagacaaggataaagtcccagggaaacaatgtgttcaaggctacccaatgacgcatgaccccatacaggctttataaggatgttacactcggtcatctctacatccctgatacctagcacaggatctggcacattggagatgcttgaataactgtgaatgcaggaacacagtcatttaatagctaagctagagccctgtcccccaaggctggcttactgcctccccttcgcctcatgcctggcatcccacctggatgtatgcatggttggttggatgaaactcctccccgacaggattaggacactcgccctcgcagcgataggcgttgtactgcttggggtagatgatccaggagccccatccgatcaggttgaagtccacctggaacttgaccttccgacacagttgacttctgtctggcaagtgatgtcgacggtgcctcttgccccactcccaggacagctgtccctcctgggcccgccaggagctctcggcttcccacagcaaggtggacccacccagctgtctctgctcctgcgagaggttggagtagagcataaggagcacatcggttgcaggcggtgtggggggccgctgccagcactctccagctaccctggacatctgcttctccagggtcccagggtgcttcagccacttggagagtggcctggtcacctccaagaccatgttgcccaaggaaaaggtgacctgggacaaagtgacagtgaacaggtccatctgaaaccgctcaaagcagctggctgaagcctgctctgtgtcaggctttggctggtggaaatctcaatggc

SEQ ID NO: 41093 - DNA, 1037 bp, Macaca Mulatta
  misc_feature (1)...(1037): n = A,T,C or G
gggggcgagacttggcgaaggccttgctttttcgtctgggctgccgacatgccatccagactgaggaagacccggaaacttcggggccacgtgagccacggccacggccgcataggcnnnnnnnnnnnnnnnnnnnnnnnnnnnnnnnnnnnnnnnnnnnnnnnnnnnnnnnnnnnnnnnnnnnnnnnnnnnnnnnnnnnnnnnnnnnnnnnnttggtatgagggcattaccacttaaagaggaaccagagcttctgtccaactgtcaaccttgacaaattgtggactttggtcagtgagcagacacgggtgaatgctgctaaaaacaagactggggctgctcccatcattgatgtggtgcgatcgggctactacaaagttctgggaaagggaaagctcccaaagcagcctgtcatcgtgaaggccaaattcttcagcagaagagctgaggagaagattaagggtgttgggggggcctgtgtcctggtggcttgaagccacgtggagggagattcattaaatgctgactacttctgtaaaagagaagcacacgacacaaaaaaatgtaggccgggcgtccctgaaagcttctagacatcgtttgggcgcggcccgtagtacgggcggatcacctggttgggagtctgagaccaacctgaccaacatggtgaaaaccnnnnnnnnnnnnnnnnnnnnnnnnnnnnnnnnnnnagtgtagtggagtagtcccatctactcgggagannnnnnnnnnnnnnnnnnnnnnnnnnnnnnnnnaaaggttgcaatgggccgaaatctctccattggcnnnnnnnnnnnnnnnnnngaatgaaaattcctgtccccaaaaataaataacctttttacacattttatacatatctatcttcctatttggggggggggactacctaccttcatctatatccatccttcttccgggcgcgcggacctcggcgccagttgcggtaaccgccagccgaccctttgacgcgcctagtgtttggcccccgttgcccttccgcgccgcctgt

SEQ ID NO: 41094 - DNA, 664 bp, Macaca Mulatta
  misc_feature (1)...(664): n = A,T,C or G
gtgtgggttgatgatttgtttcggtaaagcccgagtatgaaatcaataccgtgctttgtgcatcttggctgcaatgagtgttttttatgtgattgcagggaccggtgggagaggcggccatccggagggctctctgaggggtcatttagaatgcagctgctctgggcagaggatggtctgggctggcctccgctgcactgagaggcttgcagagtggagaaacgtccactagcatggcttctgtgaggtgtgggcagctcttttcttggcgtggggctctgtttggtgtgatataagagatatcgcagggctttcctgtcccggaagatcttggtgggtgacacctgtgggggttgccagctggattaggtgaggcagagcacacagctctacctaacaagtcccattctcatctgggaatattccaggacatagggcactacccaagaggcagagcctggagtgccgttatacaggtgaaagatctgagtgccaggtccatgtaaatgaggtgggttggggtggtcgaggtgcttanagaacaggagaactgccacaggaagggatggtacccacagggaggaagacccatgtctcagaccccttcctttatacctcttcctgggacctcctcggagtctgcagatcagctgctgcttctccg

SEQ ID NO: 41095 - DNA, 442 bp, Macaca Mulatta
  misc_feature (1)...(442): n = A,T,C or G
tacctgcattaaagggtcttggagttgtacccaaaatgaatgtcaaaccatctgccacatctatggggaaggtcatgttagaacttttgatgggaaaagttacagttttgacggtctctgccagtattcatttcttgaggnnnnnnnnnnnnnnnnnnnnnnnnnnnnnnnnnnnnnnnnnnnnnnnnnnnnnnnnnnnnnnnnnnnnnnnnnnnnnnnnnnnnnnnnnnnnnnnnnnnnnnnngatcagaatgttgtcttgcaagatggtaaagtaacagcagtcaaatctacagaaagtaagaaatgtgaactcaatacaaatgcatactccatacatactgttggcctgtacttaattctgaaatttcaaaatggaataatcatgatttgagacaaaaatacaagactgtctgttattctggatccaaactggaatgta

SEQ ID NO: 41096 - DNA, 654 bp, Macaca Mulatta
  misc_feature (1)...(654): n = A,T,C or G
gggggtcacaattgtggccagctcaccaggaagcaggcagagcaggaaaggctgggtctacactgcaagtccagagagcagggaactaccttgagtactctactcaaacttatgtctctgagttccccaatttcccaagaaggcagtgatagaggccacaacccagggggtcatctctcaaggtaccaatagctttgcagcccagtaggagtaatgcacatggtgtaagacttggaggaaatgcagggacccttctgttttctcccgcaaagttgaaaaagctacatgcagttggaaaggatcttcagatggtgctggtgactttctgttcctttgggagttaacacgcatatggattggaggaaaaataatcaacatatattctccttttgtattgtttaaaatacaggaagaagcggctttaagacnaagatcaaaccaaaatgaccactgctcaattttactgtcaatactgcacagcatcacctctgggaaagaatatgtactaaagatgacgtctgttctgggttactgtaagatcggggattccaactatgggagaatgaaaaacccattgatctgattcaaggatcttgtaaaaaaccgcctgcccaaagaactcagggcccaatgaacccccttgggaaactttgc

SEQ ID NO: 41097 - DNA, 764 bp, Macaca Mulatta
  misc_feature (1)...(764): n = A,T,C or G
ggatttttagtagagactgagtttcaccatgttgggcaggctggtcttaaactcttgaccttgtgatctgnnnnnnnnnnnnnntnnnnnnnnnnnnnnnnnnnnnnnnnnnnngcgtgcccagccattgcatttttactcacatacacgttgttaatatggaaaaatgtgttaacactaatctcatcagagagtaagataaatgtggcaattgctcattttattttgcatatattaaattgagtaggttcagctttaacataccttaagaaaaatgcatatcagtgcactgtatgtatttcagaatgcctttcctatgattgtcatatcctactttaaggcttttccctcaatttatgacaaatttagtatttttagtacttgatgactctaattacatgaatgcacctggaatgacatttgtatcaggagacagtctgacttgctttcagtattcacaagttctttccagtttccaagtctttccctagcagtaattcaggggagggggggggtttcacgtaaagagcgtgcagtttggagtcagaacctgggtatgtgactctgtggccttgatgaagcaagttatttaaactctttgagtttcagctttctcctttataatgcatgaatgcccatcctcctacaacacaaagattgatgatgtatgccaacgtgctttgtatattgtaaagtgctatctaattataagatgttcttaatttttcaaggatctaaaacangggattgggcaaacgtttttc

SEQ ID NO: 41098 - DNA, 801 bp, Macaca Mulatta
ggggcttttctcgctctgactacgatgtgaagaaggtccttgcctccccttcatattctgggaggcttcccagtcgtgcttcctgttaaacctgcagaactcaagtatgttttggatactactacgggacctacatgcccagggacactgcgatgagccgcacagtccgtgcctgaggacctggggtctgatagctgcagtcatcggtgtcatcactgagacccttagaggagtctgcaaggtcaacactaatttcacagtgatggcaagacctgattcccccgctttgcactcctcccctttcatgagcgtgtggtgcagcttttcagaggcgatgtgatattgcagcagacgggatgccggcagatcagaggatacaggccttttatgttaagccaggcctcaggcatcaaagacatttgccaaatgtaaatcaatgccactctcctcactatttattctgaaaatagccattttttaatatgttaatgttaattatgcttaacagggtgtggatttattgttgttattttaaataaatgtatgaacattataaaatcttctcagttttagagaagaatagtggttgctagggggtgggaaaggttggggggcagatagcaagaagttgggtttacggatattacagtaaagctagagaagaaatgccctctagcatttctacagcacccttagggggggactacgggtaacaaatttattaaaaaatttttcaatttgctaatggttccccaaccccaaattaaatggataaaggtgtaaggaagaaaattaaatttt

SEQ ID NO: 41099 - DNA, 372 bp, Macaca Mulatta
  misc_feature (1)...(372): n = A,T,C or G
tttaaaatattcttcatccagagatagaggtagttcttcctcttatggactgcaaccttcaaattcagctgttgtgtctcggcaaaggcacgatgataccagagtccacgctgacatacagaatgacgaaannnnnnnnnnnnnnnnnnnnnnnnnnnnnnnnnnnnnnnnnnnnnnnnnnnnnnnnnnnnnnnnnnnnnnnnnnnnnnnnnnnnnnnnnnnnnnnnnnnnnnnnnnnnnnnnnnnnnnnnnnnnnnnnnnnnnnnnnnnnnnnnnnnnnnnnnnnnnngagagatcgatgtcttattctgatgagtctcgactgtcgaatcttcttcggaggatcacccgggaagacgacagagaccgaag

SEQ ID NO: 41100 - DNA, 877 bp, Macaca Mulatta
  misc_feature (1)...(877): n = A,T,C or G
tcggacgagcgaactggtnnnnnnnnnnnnnnnnnnnnnnnnnnatgagtaccaaagttaaccaaataaaagagacagaaatggaaaatttgtaaaaagaaaagaaaattggacaaccatagcctaaattgcgagttttctctgataccattctgtgtctaataagtagtggatatattagttggatgctctgttgcctagctaaaacttacatttcattgccttcctgatagtaaggtttgactatgtgacaaggctttggtaatttgggatgcaaattgaaatatgtgtaacttctaggtcatgcctgtaagaggaaaggggatatgccattttctttctctttcttcctttctgtgaactggaatgtaaacatggcgatgagatatttttccctctgtagaagacggcaatactcttaaggatgatagagcaataagacataagagcttggctgtctcagactgcctagctgccaaacaagactgtcctgtgaaaggaaaataaccctgaatttggttaagccacttttgagtctcttattaacagcagccttgtctatgtcttaactatttcaagaagagcatgaaaaggtctaataactagaatttcagatatgaggaaaagccaagtagatacagtatttaaggagatttcaattagaattttcaaaactgcaaaaagatacaaattcaagaagtcaaataaatcctaagcagagtaaatagacatctaaacctaaagtcttcgtagttaatttgcagatgatcagagatctcaaaattacccgaaggacagacagatctttcaaaagtctggaataggtatgattacgccgtagcatcccaccgagaatngaaacacgcgtcggccataa

SEQ ID NO: 41101 - DNA, 845 bp, Macaca Mulatta
  misc_feature (1)...(845): n = A,T,C or G
ggtataaggggagtgaagtattaaaaataacttttttgtttgagaacttgagaatttagaagattttgccaagtatgtgttgttgcttgactttttaagtatggcattgatgaatttaaagtaggagcatcagttattacttctgattcattaatggccagaattttgtgtttggtctaatagttgtgtcaacattcttgttgctttttaaaaatcaggctatgcctgtggtccatgtctattcaaagcttgacctgcacaaatgccgtatttctgtttggaccacatattctccattttgcattaagcagtagagtacagtggaaagggaataagaatactgattattnnnnnnnnnnnnnnnnnnnnnnttggaatcattgtgggttatttatttttagtgggatggaggatcttaaaaacacctagttgtgagagaatcaatttctgaaagtattaaaatttctgaaaataaatgcttaattacacatacaggaaatttaaaacagtttggaagagggttggactgtcattaaccctttataatactgtaaaaatcgaaagtttcctcggaacctccgttattcatcctagacataaaattgtttttcttttataggaagttgtttggggtttgtttccgaatggtttaaattttttgaaaacaaaatgttaaaatttgggcttcagtaccctaaaaaaattggaaagggtaagggttccaagtttccgggaagaataaatctggaaaaacccttaagccaattccccggccaaaaattttatgttgaggtaaaaatgggccgaaaacctgacccccaattttttccgggttttaaccctcc

SEQ ID NO: 41102 - DNA, 363 bp, Macaca Mulatta
  misc_feature (1)...(363): n = A,T,C or G
tttacttcttgcttagtggagacaaaaattgtgagataaagagaaaggaatatgatgtacacatttacccacaaatatagtgcccagtgttatttcagcaggacccttctattagcatctaaggtaaggttaggacagtcaagataaacactggatgttggccaggcgcagtnnnnnnnnnnnnnnnnnnnnnnnnnnnnnnnnnnnnnnnnnnaggtnnnnnnnnnnnnnnnnnnnnnnnnnnnnnnnnnnctaacacagtgaaagcctnnnnnnnnnnnnnncnnnnnnnnnnnnnnnnntgtggtggtgggtgcctgtagtcccagctattggagcaggagatggcgtgatctgggaggc

SEQ ID NO: 41103 - DNA, 1012 bp, Macaca Mulatta
  misc_feature (1)...(1012): n = A,T,C or G
actataattnaatttttgtcattccgggnaaatatttgtgaagccagccaatgaataaagcactttagcatctgttcaggtagttttgaaaacaaacttttccccttcaggataagaacttccaggttacctaaaaatgcaataaaaatctttatagtctaagcttcttggcatataatttttcatcagggttttcttttactaaatgagcacaatactgttttgattttatttttttccctcaaaccaccagctccttacatagttttaaattatatagctatatgaaagaggtggctaagacatttgctgcacacacttgaactaatgctgggtcagtaacttcgtgttactgccctgacaccagtgtaattcaggtgaaaaggtatttttatcttacagggatatgtagctatgtattttactaattgtgaaacactggaaattaatgatgcagacaacttggtgtggtctttgaacagctctctgcannnnnnnnnnnnnnnnnnnncctgttaccatatattgtatttaagtgctcgctttctacttaagttgtaccaatagaaccggtaactcccagccctccctgttcgacactccttagcttagattgatgtagttgtttttgttatccccataatgtgacttttatttttaagtcatcgtgtactgcatttgtttgtcactagttgggcacgtgccaatatattctctccattccttaactgccatctctgttttgcctgatttctcttcagctgaataatggctttttgcatggaaaaaatagtatttactattagatgggtaaagggaagagagagctaatgtattggactttgtgagcctacaaggaatattttggatccctccaataaataagggctatgtactatatgtactatatagagtaatcatgtggtggaagatacttgcaagtcatagatttatgggcaggaggatttgtactccctgtatctaggctgaatgtaaattcccttatgttgta

SEQ ID NO: 41104 - DNA, 742 bp, Macaca Mulatta
gtcatggcgacccgaacgctcttctatgctctcgggggtctggccgctgacccagatctgcgcagagacagaatccacagtccaccctaggtccctcctagaaacaactgcccctgctgctgagcacagacgccactgctcacacctctgacaccctggtgctggacactgggccctgagactaggacagatgtcactgctgcacctggaaactggacatcaccactgtcactcagtcatctttactaaaatgcattctgcacagtcacagcctcgtcctgggtcggggtcccgtaggtggtcgtctgactggtggagcctaagcctcatgtccatgaccaacagccagggtgactggggcactgttctgttccagggagggaagtggtttctgtctcctctcaagactttaagtgtcataaagcaaaaataaacttcaaagacccccaacccaaccccaaacatcttcttaatggacactatcctcacccgcggcactcaaaatttaacctgaaagaccaattcaggccatgatggcaagggggcactgaacattcttcattatggtctcttccctttcagaattattctctctgaagcctgccacctggaggcatcatcggcatgataaactttggttctccaaaacctcttatcataacccagacattcctttctattgataacagccaattgccaatcagaacatttaaaatctacctaaaacctagaagctcctcct

SEQ ID NO: 41105 - DNA, 744 bp, Macaca Mulatta
  misc_feature (1)...(744): n = A,T,C or G
ggaatgccccagttagatacatcaacatgattcaccactattatgacgatgcttcccacactatatcttatcatgcagctaaagctactaaacacaaatcaccaccaaccaccccttacaaaaacccccacccttcagtctcacaatgtccgctgacaaccaaaatgaacgaaaacttgtttacccctttctcagccccaacaattctaaaccaacccgctacaatccccattatcctattccccaccctactaatcttaacccccaaacatcccattaataatcgactagctaccattcaacaaaaatctgactcgaattccctctaaaaccaaataattaataacctcaccaacgcctaaagggacaaaaccctgaatcccttaaatacttaaccttccccctaaattccccccttttactgggcttaaaaaacaaaaccctcccctaagggaaattttagggcccctttaccccccgnnnnnnnnnnnnnnnnnnnnnntacccccaaaacctttttttccccaataaaaacccccttgagccttataaaaagacagnnnnnnnnnnnnnnnnnnnaaattaaaaaacgggggggcccaccaaggtgaaaattaaaatcgggggggggggcctctttccccccttttttttaacnnnnnnnnnnnnnnnnnnnnnnnnnnncccccccccaagaaagaaacccccacaacgagcactgcccggaaataagaacagagaaaa

SEQ ID NO: 41106 - DNA, 767 bp, Macaca Mulatta
gggtttgtgattttaaaaattgatatagaatttcaatgtacaggtgtgctattacctgtttaccattctgtgttgagggtcttttaggcagtttgcaatttggggacattgtaagttgatggacatccttatacattaaaaaaattatatggctgattatttcattacaataaattcctagaagtaaaattacttaaaagatataaacattttgaaagcttttgatacatatttccaaactgttctcttgaaagatttttttaaaataacagttttattgagatataattcacataccataaaattcatccatttaaagtatacaatgcagtggcttttagtatgttcacagggttgtataaccatcaccacaatcagttttagaacatttccagaaaggtttgaaccagtttaaacccagcaatattataaagttttgttttaaaaatagcatttattcgtaacatctaaagtgtagtacagtatacaggaacacaacagcttgtgtgacatatactttatatgcatttgggtgacattttagaaagtcctccatgaaaagatgatgctcctatgtcccattttaagaaagcctgacatattaagtttaagctgatgaaacaaaatatgaggtatattttttgaattataaaattattctcctggacagtgagaatttctttattgagagagtattgtgtatagtttaaaatgttttttttaaaattcaaatttgatttagaaacactttattttagaaaacatcc

SEQ ID NO: 41107 - DNA, 532 bp, Macaca Mulatta
gttttattttgttttaaaaactctgttggagaagatggtttcacaaaaccatggccaccataatacttttatcccatgacagtgactcatgaaaatgagctgggattgaagaattcctctaaaataaatgcagcggaggtaaatttagtacatttgttttgggaaaatcatgtacagaaaaggcagaaaaagagtagtgcagaataagtgagaaaatgtttaagaactataaaaattttccatgccaaagctaccctgtcagacataaaagagaaacagaattaattctgatttatatctgccatgcccctgctgaacacaagttagattttggttgatttacttttgcctcagaatatactgtgaactcttctactctccattattgacttaaaattgaaacaaagaactagagaattagacataatgggtgaagtacataaaataatattaaagtacctacctaaatacaaatatatattgtttgatttcatagagctgtaagttcacttgacctgataaactaaactta

SEQ ID NO: 41108 - DNA, 854 bp, Macaca Mulatta
  misc_feature (1)...(854): n = A,T,C or G
ggagcacaaaggtatacatcaaatataagcaaatgtatacttcaagacctaaccatgccacgtcataacagaaacacttttttccaggactcttgttggcatcaccccttaggatccagatatgttggagaagatacaaatcattctgacttaaagaatcttcaaatcaataaatattttttgaggatcattgctgtaccacgtaccatgcaaaatgccaggaatacaacagttaaacacaaaacacacatggttcctgcatttgtggaccatgttcttatgaacctcatagtaccagctagaattgtgaaatcactgtaagcaccatctctactctactgcagagaagaaaacttttgcatatatttagagaactgagcctctagtcatatttcaatattgttctccaactcccttttaaatcaaggcctttcttcattacaatccacgtccnnnnnnnnnnnnnnnnnnctactaaataaccccacaagaagttgacaagggcagaaaatannnnnnnnnnnnnnnnnnnnttgttaaaaatttatccaaaattcaccaacaattgctatatcctccagatgaatatcaaaaaagcgttttctccttggttaaattaaagaaaattcgcctctttggacaattaaatgcaaggaacccgtattgtcatggaattttatataaaagtgtgaattttcgacagaacccaaaaacacacatttttaaaccctgcggggaagaaatattaagtagggccgcccaaaaagtgggccaagtctccttccaatcaataagatcccatttattcctaaggatggccagacacaatatactctgaataaaaaaaatttttt

SEQ ID NO: 41109 - DNA, 239 bp, Macaca Mulatta
aggacaggactccacacagcccatttgctcagaaaccacaagcaaaatctggaatcttgggactccagacttacagcaccgaccagcgcgtaacaggaaactgggaatctcataggaagagccaggacatgaagaacaggaaatacgatccatcttaactgtaggcgcagccacgcgaatggactgtcacaaagggactttggaaaactgctttttcgtcatgaaattgttcatctctc

SEQ ID NO: 41110 - DNA, 182 bp, Macaca Mulatta
caggcacctgacgttggctccagctctctgggccagccctgggtaaccacagggcctgtggcctgggtggtcgcccccaaaatgcaaagtgctacctgcgtctggaggcgcccccacccgaggcttccaggtttccacctgcccacctgtgcctggctgggatcggggcggtcaaggctcct

SEQ ID NO: 41111 - DNA, 254 bp, Macaca Mulatta
ttcgcctagccccagccccgctggttgataaacgggtgggcctcctcagcagcgcggctgcctttcaccttgatttccccagggctctccgcagcatcgacaaactagcctcgcccgccagctgggtcctccccccacccagtctgccaggctgggagctggggcctgctgagtctggaatgcccttctagaaggcttctctagaggctcccctggcaagagagggtcccaaggggagccctgcaaagcaaagg

SEQ ID NO: 41112 - DNA, 771 bp, Macaca Mulatta
  misc_feature (1)...(771): n = A,T,C or G
gggagtgggggccggggaagtgtctgtagcgtccctccctctcaaccacaataacagacggagggtcggcgtaggtactttgaactcaagtaaacaaaagggaagattttctctttgatactggagactgcacaacaatggggccacgaaagaaaagtgtgaaaacatgtatcatgaataatgaaattccagaagaaatgacagcagatgaaacaaaggactatatgaatcaactttcacatgaagtactttgccatatttttaggtacctccctctgcaggatatcatgtgtatggaatgtctttcccggaagctaaaggaagcagtgaccctgtatctgcgagttgtgagagttgtagatctctgtgcagggcggtggtgggaatacatgccaagtggctttacagattccagttttctaacactattaaagaagatgccagatgttgaacagctatatggccttcaccctcgataccttgagaggcgaagagtaaggggccatgaggcttttagcattccaggagtcctagaagctttgcaggcatgcccaaacttagtgggtgtggaaacttctcatttggaattggtagaatccatttggacatatatgccccaatgttcatatttttgggggaaatttccgtaatccgtaatgggagccctttcccaattccctnnnnnnnnnnnnnnnnnnaaaaatttccctattggggagcccacaaaatttcaaaccctttaacattttttaagttgggggggtgaaaatt

SEQ ID NO: 41113 - DNA, 637 bp, Macaca Mulatta
  misc_feature (1)...(637): n = A,T,C or G
ccatttttcaaaatgtacattctctgaagaggaagcagctggttggacaagattgcttgaagaaccaggtgctaagggcatcaagtcgacatccttagtaaccatgtgccataacatctacacatttccacttgttttacagacaaagaaacaggcagaaggaaaatccagagtcttgcagtaagcagatgacaagacttcaatatgcttgggcaccacttaggtgaccccagggagatttagtgtggccttaggaaagcaaaagagcactttttattggaaatatgagcttgttactgggaaagatttgtaaacttggtcaagaacttgatttataattacgcctnnnnnnnnnngttctcatttagtagtggagcaatctagaaaacataccttttttgtttgtttggaagatcctttttctctggctatattgtagtgtttgctatttgatgtggaaataataacttaagattttggaacagaacaccctttagatttccaaaacacaattcttatttcagggaagacagaccaaaaatatctcctgagatcatcagtttctttataaattgtggtaccattctatcattgaagagaaaccactaccacaccacgagcaccatacaaaaccttt

SEQ ID NO: 41114 - DNA, 594 bp, Macaca Mulatta
  misc_feature (1)...(594): n = A,T,C or G
gggtagatggcagcactttcttcctaaaactgcaaggaggaggagttgcctgggcttgtcactcagattctggcacttttcatagaaagagtctgaattatctggaaaattctttggtagcataggtcagaatcttttcagctctattgttattctgcacagatggctgttgattatgaaaacaatctctcagcctctagtccaggatattactcattcctcagttcaagaaactctagaatgacaggagaaaggggttcaattacagaactgttatcaaaatgcattggtttatgcatatccatgttttggaaatggtgactccaagagacacttagtaaaacttttcaaagtagatgagagacagtttttccctcgcatgctgtggcaatattaatctatgttttcattttccactggactttgtaattgaattttaaggaatgcatatatggcttcatatttatatataagatatccatatccagtgttgaagacattaacaataaaaatatttacctgtnnnannnnnnnnnnnnnnnnnnnnnnnnnnnnnnnnnnnnnnnnnnnnnnnnnnnnnnnnnnnnnnnnnnn

SEQ ID NO: 41115 - DNA, 351 bp, Macaca Mulatta
caccctccaaccaagagccagttctgttaacacagcagagagccctccccaggtctcaaagtctccctgcctttgctgccacaggtaaaagggggtggttttgctgattggaaaccacaggacagaaacaacacctgcttgggcatgggcacttaaccctggaacaggaaaggtgaaagtagtttctgtttattttgatctcgagcgtaaaatgaagagcaatcatgtccctggagtcttggcagaggacaaacaaagcttatggaggaagacaaaatctgctttttcaggatgcttcacaggaggctggggtgttaagcgctcctcagcctgcctgtctgatctgagaaa

SEQ ID NO: 41116 - DNA, 253 bp, Macaca Mulatta
ggggctcggcatctggggacgctctcagctctcggcgcacggcccagcttccttcaaaatgtctactgttcatgaaatcctgtgcaagctcagcttggagggtgatcactctacacccccaagtgcatatgggtcagtcaaagcctacaccaactttgatgctgagcgcggtgctttgaacattgaaacagccatcaagaccaagggggagagcacatgcatttacaccacagcaacgtgctccaaagaagat

SEQ ID NO: 41117 - DNA, 681 bp, Macaca Mulatta
ttatgccattgcacttagcctggtgggtgacagagcaagaccctgtctcaaaataaaagtaggtgacatttattgaacactcattacatgctagacactttacatatgttttcttttttaactttcataacaccttcacaaggaagtagctgttaatctccttttttaagaggaggaagcctgaaagtcacattaagtgctagagccagatatgaacccaagaaggtaaagtccagagcctcttctgcctcccatttggaagtgtagcaccagacatttatcaagcattgcctagttcattatcacagcagagatggcattgtttaccctcatcgtggtgagatagcatgagactcagaaaagccacgatacttgctcatggcagtattaatgtgtgcctgggcctagactcaaacccagatctgattgcctccaaaatcagacttttccctccactctaccatgtaccttaaagtatgaataaattccttttccaaatcaacagagtattacattgcctccaaactggaagaaacctcggttcccagcatgcggctccattaaagtcaggtgttttgtagcagtttctcatttgggcttcagcagacagcaagcaatgcacttttgatttttaagtctggcaaatcctctggaatagccagggtgtcgtggtgctgataa

SEQ ID NO: 41118 - DNA, 334 bp, Macaca Mulatta
  misc_feature (1)...(334): n = A,T,C or G
cagatgcattgataactccatttgtgggtttaatagaccacaacttccaggcccagccgaatcctgctgaagttaaggatgtattcctggtgcctctggcctatttcctgcatccacaggtccatgaccagcattacgtcacacgtctcggtcaccgttttattaatcatatctttgagtacacaaaccctgaagatggtgtcacttaccagatcaagggaatgacggcaaaccttgcagtgttagtggcctttatcattttggaaaaaaaccccacctttgaggttcattttatcttaangatgtattatcatcctctggagagttattcctg

SEQ ID NO: 41119 - DNA, 783 bp, Macaca Mulatta
  misc_feature (1)...(783): n = A,T,C or G
gggtgcattacaaccattgagaatttaatactgaaatgttaaaccaatcttgcactcctaagataaatttctcttggtcaatatacattattattttttatatattgctggatttgatttactaaaattttgttaaggatttttatctccatgtagttttctctttctctagttttggtgtcaggacctcatcaaatgagttgaggaatgttcttctcttctgcttttttggaagcatttgtgcagaattcaaatcatgtcttccttaaaggtttagtagaattcacaaatgaaaccatctgagcagggacttctttgtctgaaaatatttaactacagattcagttccttcggtaaatactgtaaaggcctattcaggcaactatttcttcctaagttttggtagtttgtgtccttcaaggaatttgttcattgtatccctgtttttttaatttattggcataaagttgtttataatatccacttcttatccttttaatactttgggatctgtagcaataccccccttccatttttgatagtactaatttgagccttttcctgaactgtccagctataagtttatcaattttattcatcttctcgaagaaccagtttttgttatctgagcctttagaactgtaaatttccctttaagtgctgatttaggtgaatttcccagattttgatatgctgtgttttcattttcatttagttgcatctatcaattctctttgtgacttcctttgaagcattggtggnnnnnnnnnnnnnnnnnnnctc

SEQ ID NO: 41120 - DNA, 134 bp, Macaca Mulatta
  misc_feature (1)...(134): n = A,T,C or G
gctgataaactcattaaaatttggggcgcgtatgatgggaaatttgagaaaacnnnnnagcctggtcgtcagattctaaccttcttgtttccgcctcagatgacaaaaccttgaagatatgggacgtgagctcg

SEQ ID NO: 41121 - DNA, 315 bp, Macaca Mulatta
aaggccaaaagcaaacacatcgagaagtcagacaaagaacattccaaggagaggaagtcctcgagaagtgccgacacggaaaaaagcctgcttgaaaagttggaagaagaggctctccatgagtacagagaagactccaatgataaaatcagtgaggtctcctctgacagcttcacggaccgagggcaggagccggggctgactgccttcctggaggtctccttcacagagccacccggagaggacaagccgagggagagcgcctgcctccctgagaagctgaaagagaaggagaggcacagacactcctcatcc

SEQ ID NO: 41122 - DNA, 522 bp, Macaca Mulatta
  misc_feature (1)...(522): n = A,T,C or G
atgaacataaatgttattgtctcataacatgcgtatttactaagtataatttcatttttagttgtttatgacaaatcttccatttgtactttgtaagactaatgaagacttgataatgtggaatttcccagtggctttctgaacgtgtatgtgcgtgcgtgcnnnnnnnnnnnnnnnnnnnnnnnnnnnnnnnnnnnnctgtatgtatgtatccttgaagtagatagaggctgccagaaatttcttcgaaaaacataatttatatagtagtaagatgtttggcaatgcctgatgtaaaactatggttgaaaatacaaatcagcatgggattttatctctgtcattcagcatcagtcacttaatactgttgaattatagcactcatattacaatatcctagatttctttctcaaaaataatattatcttgttgaagtgttcatgcctgaaacactagaattatcattgcatacacatctatagattcaatcgttaaatctgagtaagaaatgagtggatggtc

SEQ ID NO: 41123 - DNA, 814 bp, Macaca Mulatta
gcggtggggtctgttccatgtctcccgggggcgggaggccggatatgtcctgccaggttccctgggggggattattaccccccacatttttggcaggctgtccaaggctttccccaggaactagtttctggggccttgtaactgatgcaggggcaggggttaccaaagaccaaacctgtttttgtcaagaggagggggtttttttggacaaatagaatttgggctggagggagtaattatccagtcttcaaagttattctttgaactttattccacacggcatggttcctactcaatcttccttccttctttgtcccccaagtgattggaaggctgtgccatccttctgcttgccccatttttccctggtagccatttttccccaattaaatctcttggccgtttaaacacattttattgtcattgttttttgggaacctgaactaatgaaattaatttataaattcacctttcggaggtaagattagaaggaaggtcacttctgaatttttacttccctctaattaataatatttactgtagttataattatgttttggaatggttttgttattgagataacgccataaatttaagccctcactgccctgcacacaggcagtttagtatctgttttggtcccttctttgaggagagaaacaggaaagttttgatgattaaaatccaaaaacagattcctaaattgctgtttgacatctaagtgcaggctgttcttaagtaaccttgtcctcttcctaattctttcccttttattccttacctatgagtgtttttaaaaactggtttccctgcc

SEQ ID NO: 41124 - DNA, 443 bp, Macaca Mulatta
caggtcctccagcacggtgagccgggtgccgtctccaaagtacagcgcgcggtgccttccctgcaccccggttggctgctggcgcagagatacagggctgagtcttctggctgcagggcgcgtaggtgaaggtataagagagagctcttggagcattcaggtgagaagcgactgggcacactttcattaatagagagtttctcatagttgtagataaacatgagctccggcggcttcttagctttctgcttgtaccagtacatagcattgtgtcccatatgttgttcacatttcaaagacttcttatttgtcattcccatgaccaggtgctttggtgtctgggtaactccagtgtctgtggggactgctcccaggagacagagaaccgcacagcagagcagcctgcagcccatgctagcctcgggtctgagatgaggcctctc

SEQ ID NO: 41125 - DNA, 424 bp, Macaca Mulatta
gcccgtcccgccccagccgctgcggcctgcaccggacccagagccgccatgcccaagtgccccgcgtgcgacaaggtgtacttcgccgagagggtgacctctctaggcaaggactggcatcggccctgcctgaagtgtgagaaatgtgggaagacgctgacttccgggggccacgctgagcatgaaggcaaaccctacggcaaccacccctgctacgccgccatgtttgggcctaaaggctttgggcggggtggacccgagagccacactttcaagtaaacttgggtgggggagactccattcttggccgcttcctgggccactgtccaggcaaatgccaggcctcgcccccagatgcccagggctcccttgtagcccctaatgctgtcaataaacctgaacacttgggagaaaaaaaaaaaaa

SEQ ID NO: 41126 - DNA, 3063 bp, Macaca Mulatta
  misc_feature (1)...(3063): n = A,T,C or G
agaattctccctctgaagcacagaatttagatgagaatacaactgagggctgggaaaatcggataagactatggactgaccagtatgaagaagctttcactaatcagtacagtgcagatgtacagaacgcccttgaacaacacctacattctagcaaggaatttgtgggcaaacctactattttagacactattaataagactgaattggcctgtaataacacagttattggttcccaaatgcannnnnnnnnnnnnnnnnnnnnnnnnnnnnnnnnnnnnnnnnnnnnnnnnnnnnnnnnnnnnnnnnnnnnnnnnnnnnnnnnnnnnnnnnnnnnnnnnnnnnnnnnnnnnnnnnnnnnnnnnnnnnnnnnnnnnnnnnnnnnnnnnnnnnnnnnnnnnnnnnnnnnnnnnnnnnnnnnnnnnnnnnnnnnnnnnnnnnnnnnnnnnnnnnnnnnnnnnnnnnnnnnnnnnnnnnnnnnnnnnnnnnnnnnnnnnnnnnnnnnnnnnggtgcgacacatgattgcagatgggatgattcacctgtgcatctatgctgtgtctgccatcaccaaggatgctgaggtcaccatagcatttgattatgagtatagtaactgnnnnnnnnnnnnnnnnnnnnnnnnnnnnnnnnnnnnnnnnnnnnnnnnnnnnnnnnnnnnnnnnnnnnnnnnnnnnnnnnnnnnnnnnnnnnnnnnnnnnnnnnnnnnnnnnnnnnnnnnnnnnnnnnnnnnnnnnnnnnnnnnnnnnnnnnnnnnnnnnnnnnnnnnnnnnnnnnnnnnnnnnnnnnnnnnnnnnnnnnnnnnnnnnnnnnnnnnnnnnnnnnnnnnnnnnnnnnnnnnnnnnnnnnnnnnnnnnnnnnnnnnnnnnnnnnnnnnnnnnnnnnnnnnnnnnnnnnnngttatagatgaccaggagaacctagctcatagcaggagnnnnnnnnnnnnnnnnnnnnnnnnnnnnnnnnnnnnnnnnnnnnnnnnnnnnnnnnnnnnnnnnnnnnnnnnnnnnnnnnnnnnnnnnnnnnnnnnnnnnnnnnnnnnnnnnnnnnnnnnnnnnnnnnnnnnnnnnnnnnnnnnnnnnnnnnnnnnnnnnnnnnnnnnnnnnnnnnnnnnnnnnnnnnnnnnnnnnnnnnnnnnnnnnnnnnnnnnnnnnnnnnnnnnnnnnnnnnnnnnnnnnnnnnnnnnnnnnnnggatattgctgcagaaaaaccagtccccaggccacctccagcaaagccttctaggccccggccgaagagtcgaatttctcggtacaggaccagttcagcccaaagactaaagcgtcagaaacaggccaatgcacagcaggcagaattgtcacaagctgccttagaagagggaggaagtaacagtttagtaactcctactgaagctggaagtatagacagttcaggagaaaacaggccattaacagggtctgacccaactgtggtgtcaattactggatcccatgtcaaccgtgctgcatctaaataccccaaaaccaaaaannnnnnnnnnnnnnnnnnnnnnnnnnnnnnnnnnnnnnnnnnnnnnnnnnnnnnnnnnnnnnnnnnnnnnnnnnnnnnnnnnnnnnnnnnnnnnnnnnnnnnnnnnnnnnnnnnnnnnnnnnnnnnnnnnnnnnnnnnnnnnnnnnnnnnnnnnnnnnnnnnnnnnnnnnnnnnnnnnnnnnnnnnnnnnnnnnnnnnnnnnnnnnnnnnnnnnnnnnnnnnnnnnnnnnnnnnnnnnnnnnnnnnnnnnnnnnnnnnnnnnnnnnnnnnnnnnnnnnnnnnnnnnnnnnnnnnnnnnnnnnnnnnnnnnnnnnnnnnnnnnnnnnnnnnnnnnnnnnnnnnnnnnnnnnnnnnnnnnnnnnnnnnnnnnnnnnnnnnnnnnnnnnnnnnnnnnnnnnnnnnnnnnnnnnnnnnnnnnnnnnnnnnnnnnnnnnnnnnnnnnnnnnnnnnnnnnnnnnnnnnnnnnnnnnnnnnnnnnnnnnnnnnnnnnnnnnnnnnnnnnnnnnnnnnnnnnnnnnnnnnnnnnnnnnnnnnnnnnnnnnnnnnnnnnnnnnnnnnnnnnnnnnnnnnnnnnnnnnnnnnnnnnnnnnnnnnnnnnnnnnnnnnnnnnnnnnnnnnnnnnnnnnnnnnnnnnnnnnnnnnnnnnnnnnnnnnnnnnnnnnnnnnnnnnnnnnnnnnnnnnnnnnnnnnnnnnnnnnnnnnnnnnnnnnnnnnnnnnnnnnnnnnnnnnnnnnnnnnnnnnnnnnnnnnnnnnnnnnnnnnnnnnnnnnnnnnnnnnnnnnnnnnnnnnnnnnnnnnnnnnnnnnnnnnnnnnnnnnnnnnnnnnnnnnnnnnnnnnnnnnnnnnnnnnnnnnnnnnnnnnnnnnnnnnnnnnnnnnnnnnnnnnnnnnnnnnnnnnnnnnnnnnnnnnnnnnnnnnnnnnnnnnnnnnnnnnnnnnnnnnnnnnnnnnnnnnnnnnnnnnnnnnnnnnnnnnnnnnnnnnnnnnnnnnnnnnnnnnnnnnnnnnnnnnnnnnnnnnnnnnnnnnnnnnnnnnnnnnnnnnnnnnnnnnnnnnnnnnnnnnnnnnnnnnnnnnnnnnnnnnnnnnnnnnnnnnnnnnnnnnnnnnnnnnnnnnnnnnnnnnnnnnnnnnnnnnnnnnnnnnnnnnnnnnnnnnnnnnnnnnnnnnnnnnnnnnnnnnnnnnnnnnnnnnnnnnnnnnnnnnnnnnnnnnnnnnnnnnnnnnnnnnnnnnnnnnnnnnnnnnnnnnnnnnnnnnnnnnnnnnnnnnnnnnnnnnnnnnnnnnnnnnnnnnnnnnnnnnnnnnnnnnnnnnnnnnnnnnnnnnnnnnnnnnnnnnnnnnnnnnnnnnnnnnnnnnnnnnnnnnnnnnnnnnnnnnnnnnnnnnnnnnnnnnnnngatggttcccacatcagtagaacgactccgagaaggaggaagtatccccaaggtcctccgaagcagtgtgagggtggcccaaaagggagagccctctcccacgtgggagagtaacatcacagagaaagactcagn

SEQ ID NO: 41127 - DNA, 584 bp, Macaca Mulatta
gcatcagtctggcatctcgcaagataagttatgtgggttttctttccctcctcttgagctctcagccttctgactacaaggtttggcgtgagccttagaatctaaaaaatatcagccaggctattctaccttccaagacctggctgaatcatgaaccagttctaaatctaaagagagtgagagagggaagaaacctggcacaaacttacagtctctttaattacatgtaaaatgcatgtgattgtatttgctattggcttagccccatggagggtttagaaaaatgttcagtctctgtggaagctatccagttttccttctcccaaaaagatgttttaaatgtggaatagtatcacattcccctgcccctttatgagtccttcataacttactaaagccgatcaattgtcatttatataacttggctcattcagtgtcaactaagaacctaattatatgcaatttattatttaaaaaaaactataaaaatatattttgatagctaatattttagaggacaactgatgttgggtgcagtctataaatggggagaaaagtataagtagtatgtagattccaaggat

SEQ ID NO: 41128 - DNA, 794 bp, Macaca Mulatta
  misc_feature (1)...(794): n = A,T,C or G
gggacggtcaatttttacatttttttgttgcaattttttcttcaatggttgtaagtnnnnnnnnnnnnnnnnnntaaaagggttcactagttaatactctagaaatatctgtgtgttgcaattcaaatgtatgttgagattgtgaaaagtgcttcagtgccactagcttaccagtacactagactaagcctttgatgacttattgcatgatacagtaacaggaacgacaggtggcctaaatacgtgaaaagcagtataagctagtgacactaaagccagtcttgtattactgtatttttgacagaatggttttgaaaactgtgctacagggactgatgtggcaaatatatctctttatgcagaaggaannnnnnnnnnnnnnnnnnnnnnnnnnnnnnnngtatggctttttatgcatccttcatcgagggcattgaagttgcatggactgataaaagttgatgccaaacgagaaagaaacaaaccaaaaataaccagcaaaatgtttaccaaaaaactcaaacaaatgagcagtgcctgttcaatttcccagtctctgttgagttcagttgtaaatatgtttcaaatgacattttcnnnnnnnnnnnnnnnnnnnnnnnnnnnnnnnnnnnnnnnnnnggaggggtaactacatccccaggcataggttttttccaaaacctgcaacaaaattaatgccttcattcaaagcggttaaatttggcgctttaaannnnnnnnnnnnnnnnnnnnaaccaccccttgggaaaagagggtgcccccccccctttaat

SEQ ID NO: 41129 - DNA, 851 bp, Macaca Mulatta
tggtctgcatcttcgtggcctgcatcctgatcggctgcgccatgaacttcaccacgctgcactgcacctacatcaactcggccgtgaccaccagcttcgtgggcgtggtaaagagcatcgccaccatcacggtgggcatggtggccttcagcgacgtggaacccacctctctgttcattgccggcgtggtggtgaacaccctgggctccatcatttactgtgtggccaagttcatggagaccagaaagcaaagcaagtacgaggacctggaggcccaacccaggggagaggaggcgcagctaagtggagaccagctaccattcgtgatggaggagctgcctggggagggaggaaatggcccgtcagaaggtggggaggcagcagatggccccaatcagcagagcaagcaagaggtcaggggcagcccccgaggagtcccgctggtggctgggagctctgaagaagggagcaggaggtcgttaaaagatgcttacctcgaggtgtggaggttggttaggggaaccaggtatatgaagaaggattatttgatagaaaatgaggagttacccagtccttgagaaggagatgcatgtatgtacctatgtgcatacacttattttatatgttagaaatgacacgttttaatgagaggcctccccattttattctttgaggagtgggaaagggaagaaaagaaagaagctgaaaggtactgacacagagcgacaaaattagcacctgtgtgaattatttagtgtgactccacctgaggcatcacagagacaaaagaatgtgaaggtacttaacaaagtaaggcaatggtttctgcttcagactcctggcacatttaa

SEQ ID NO: 41130 - DNA, 239 bp, Macaca Mulatta
  misc_feature (1)...(239): n = A,T,C or G
ggcggttgcagtgcgctgagagtttgcccactgcactccaacctgggcgacagagggagactctgttnnnnnnnnnnnnnnnnnnnnnnnnnnnnnnnnnntctgggcttcttgtcagccctttagatagttctgaaatccttttcactgacttgtagattgctcaacaactttccagcaagatctgacctccangataagtcgaagttaagggattacattaatgtctatttgtgtct

SEQ ID NO: 41131 - DNA, 144 bp, Macaca Mulatta
aacgcgcaaccagtcacaagccctcatcacccctatctccaataaccaattaccttaaatctttcctgccaaaagctgagtccactattcagctaactggttagcctaaattcacctctattccccttctccacacaagcggtc

SEQ ID NO: 41132 - DNA, 569 bp, Macaca Mulatta
tctgtgcaggtgctgggggcggtggtcctggatctccgtgtcccattccaccagtttccagggtggcaatggaatcccggggcctggctgtggggatggccaggggtctggcaggaatgggagacatccagaatgagaaggagaccatgcaaagcttgaatgaccacctggcctcctacctggacagagtgaggagccctggagaccttggaacaggaagctggagaacaaaatccaggagcacctggggaagaagggaccccaggttagagactggagtcattactttaagaccatcgacgacctgagggctcagatcttcccaaatgctgtggacaatgctggcatcgttctgcagatcaacaatgcccgtcttgctgctgatgactttagagtcaagtatgagacagagctggccatgtgccagtctgtggagagtgacatccatgggctccacaaggtcactgatgaccaatgtcactcggctgcagctggagacagagattgaggctctcaaagcggagctgctctttatgaagaagaaccacgaagaggaagtaaaaggccta

SEQ ID NO: 41133 - DNA, 811 bp, Macaca Mulatta
  misc_feature (1)...(811): n = A,T,C or G
ggaatgccccagttagatacatcaacatgattcaccactatcatgacgatgcttcccacactatatcttatcatgcagctaaagctactaaagcacaaatcaccaccaaccaccccttacaaaaacccccacccttcagtctcacaatgtccgctgacaaccaaaatgaacgaaaacttgtttacccctttctcagccccaacaattctaaagcaacccgctacaatccccattatcctattccccaccctactaatcttaacccccaaacatcccattaataatcgactagctaccattcaacaaaatctgactcgattcactcgtaaaacaaataataataactcacaacgctaagggacaaacctgatccttaatactaacatccctaagcacctttactgctcacaactcagtctctcctacannnnnnnngngggcgcagacaacaaagcagagaacccaaaacaaaaaacgagaggacnnnnnnnnnnnnnnnnnnnnnnngggaacaaaaaaaagaacaacgaaccnnnnnnnnnnnnnnnnccnnnnnnnnnnnnnnnnnnncaaaaagaaggaggaaaacaaaagaacggacaagaaacaagaagaagagaaacaaacaaagagcacgacaaagaaaggacaaaagaggaaaacaaagaaaaagaagccaagaaggaggacgaaaggaagaaaagnagacaacagagaacaccacgagcgagcacaagncaaacccaagangagaaaaccaacagacacagacggggcganaaaaaccaacagaaaaccaaccaaccacnga

SEQ ID NO: 41134 - DNA, 822 bp, Macaca Mulatta
gggaatgcacacatgcagaaatgcagagtcaattttacatgcccataaagacatttgtaaagaaatcagctattatgatctgttgtataaatgtgtatctaggcactttattataactggaatttgacctcatagatgttacaacttcatcagtcatttgacctaatttgtggtagctatctgtatgttttgcaatcttaatacagatacgcgctccaaaaagattaatagagaaccatcctgctgttttggataagtctgtccagctgtgggaagggcaacctgtggtttctctgtactggtgtttaatgggggaagaatatgaacagctttaaagagctgtgtattgtggttactactattaagaaataagagctgcacgagtctgactggcccttgggtggcctttgtggaaggctcatagctggaaagtgttgatctgggttttctggcattcttttaagttaaaaagttaacatggggacgtgggtttgatcttttgttgtacctgatgacagtgcagagattctccacagctggataaaaatgtcagaaagctacttactgtacatgggcagtatcagatttcaaatcctaatatttcagctatgcttttaatactcaaaatataagggggatggggtggttgaagctttcccttttttttgctttaaacaatttatatagatttaccagatgtactgtcttttatgttggcctagcattttaagtttttgagaaccatacacatgggttttacaaccttttaactataataacccttcccttggggcccccaaagttattttttaaaagtggtgc

SEQ ID NO: 41135 - DNA, 849 bp, Macaca Mulatta
  misc_feature (1)...(849): n = A,T,C or G
agtgcagagaaaaggtgtatccaaaatagaatccgttctcttgcgtaactctcctcaatcctttacaagtcagtagcattatttcagaatggctatatgcatcattttcaactaaaacatacctcatccttaaacttccactatttaacagctaatccatttcaaacttggtttgagcctaacaattgcagaaatcataaaatgcttgtgaaattacacaccatattactagcagatacattgcagtgcagcaatcatgctaacagataatagatttttctttaagaagtttgtcaaatatttcactatcttgggaaattttagaggaggggaagcctgtattcaaaatgatagagggagcagagacttactgtctgtcttccacattataaatgaactgcctttccaggtccaacatgctatcaggctgcttcagcttggtgtgaatgtaagtgtggggactcacacacacacacccatacacatacatactaatatgcagaggattttaaacaattgcaaatatcttgtggctatttgatttctacaaaattctactgtaagatgtataccagaaaacataataaagataagctcagttcttcannnnnnnnnnnnnnnnnnnnnnnnnnnntttagaagtttttgctgaattaaataaaatatcttcaattttaattactgcatttggaagttgaaatgccatccttcaatatcactggtctcaaattcattgataagattttttcttaaactaataagtggggtaagtataaatctcctaaattggtacccactggctgctcctggactgattttcagtcatgtccctcctaatatggggttttc

SEQ ID NO: 41136 - DNA, 712 bp, Macaca Mulatta
agcaccataacatggtcgtgggagtaaagacaaatcagatgcctaatgcagtacagaaactcctgttggtgatggacaagagagcctcaggaatgaatgactcattggagttgctgcagtgtaatgagaatttgccatcttcacctggatataactcttgtgatgagcacatggagcttgatgaccttcctgaacttcaggcagttcaaagtgatcctacccaatctggcatgtaccagttgagttcagatgtttcacatcaagaatacacaagaccatcttggaaccaaaatacctcagacataccagaaactacttaccgtgaaaatgaggtggactggctaacagaattggcaaatatcgcgaccagtccacaaagtccactgatgcagtgctcattttacaatagatcatctcctgtacacatcatagccactagcaaaagtttacattcctatgcacgccctccaccagtgtcctcttcttcgaagagtgagccagccttccctcatcaccattggaaggaggaaacaccagtaagacatgaaagggcaaatagtgagtcagaatctggcattttctgcatgtcctccctgtcagatgatgatgatttgggatggtgcaattcctggccttcaactgtctggcactgttttttgaaaggcacacgactgtgctttcataagggaagcaataaggaatggccagatgt

SEQ ID NO: 41137 - DNA, 848 bp, Macaca Mulatta
tgtgagcccccctctgagccgctgtcctcttccccactttgcccgggcaggtccaggtgctgctgtacttcctgcacttggaggccatccctgccccggacagcaagagacagagcatcctgttctccaccgaagtctaagagccccagttcatctcccggaggcgaacagacggcctggaaacctctggctaatcaggccatccgtagagtgggaaccttcctgaggtgtccttgggccaccaagtgtcgggccatctgccaagaaacagcgacccaaaggcaaaggacaggtggactgggcaaatcccgcctaggtctggaagccccagactggcctcagactgtggtttttttccctgtggccacccgagggcgccccaagccagtgcatctgagaggccaggcctggccctgggagacagggtgaaaacagtggtttttatgaacttaacttatagagtttaaaaggtttctactggatcacttgtcaagatgcactctctgtggggagaagggaatgtgaccagattccctcactgttgtatcttgaataaacgctgctgcttcatcctgtggggccatggccctgtccctgtgtgggtggggcctcttccatttccctgacttagaaaccacactccatttagaacagggtttgagaggcttagtcagcactgggtagcgttttgactccattcttggctttttcttttctttccagaaggattgttgtgcagaaatgggtcttttgttgccatgtttgtcctccttggaaggcagctccaggaggcctgtgaaatgttgggggacaggacccccagggagggagtctcaggctatgcactt

SEQ ID NO: 41138 - DNA, 593 bp, Macaca Mulatta
  misc_feature (1)...(593): n = A,T,C or G
aaaaaagtaaaaggaggtgttatggaatctagagagggaaaaataaatgtaagtgtgaagatttttaataaaagtaatgatagcagtgagtgaataagcaacaaaggaaagaagatcatctgggttgtgagttatagtaaatggaagaaaaaattttaatatgttgggagtatataaaattaaaatagctttttgaaagaacaagaaaagagaatgtctcccggaaggtacattgtataatcactcttttggacaaattaaagtgttcctgagtaatatttatttatatgcaccaggtgggaaaaataattttatgtttgaataacattgtcgtaataaaatagagttaccccccctgaaaaagaaggaaaacccccccaaagcccctctcatagcccccgaaaaataggccccccgcgttggnagaagtaaagaccccccctggacaatttggacttatgcattggtcgttgctccccacatgagtcctgagacaatggattcattccctttttcagcttcatttcccagggaaaagtagagagagctatcctttattgtccatatgttcttccccacccctcggactcccc

SEQ ID NO: 41139 - DNA, 275 bp, Macaca Mulatta
aggtcctggcagatctgggctccaagacactgaccgggctcttcagagcctgggtgcgggcaggcttggggggtcggcatgtggccttcagtggcctggtgggcctggagccggccacactggctcgcagcatgccccgactgctggtgcaggccctgcaggccttccgcgtggctgccctggcagaaggggagcccgagggacactggatggatgtagggcaggggcctggactggagaggaacgggcaccacccactcaaccctcaggtaccc

SEQ ID NO: 41140 - DNA, 786 bp, Macaca Mulatta
  misc_feature (1)...(786): n = A,T,C or G
gggccaatannnnnnnnnnnnnnnnnnnnnnnnnnnnnnnnnnnnnnnnnnnnnnnnnnnnnnnnnnnnnnnnnnnnnnnnnnnnnnnnnnnnnnnnnnnnnnnnnnnnnnnnnnnnnnnnnnnnnnnnnnnnnnnnnnnnnnnnnnnnnnnnnnnnnnnnnnnnnnnnnnnnnnnnnnnnnnnnnnnnnnnnnnnnnnnnnnnnnnnnnnnnnnnnnnnnnnnnnnnnnnnnnnnnnnnnnnnnnnnnnnnnnnnnnnnnnnnnnnnnnnnnnnnnnnnnnnnnnnnnnnnnnnnnnnnnnnnnnnnnnnnnnnnnnnnnnnnnnnnnnnnnnnnnnnnnnnnnnnnnnnnnnnnnnnnnnnnnnnnnnnnnnnnnnnnnnnnnnnnnnnnnnnnnnnnnnnnnnnnnnnnnnnnnnnnnnnnnnnnnnnnnnnnnnnnnnnnnnnnnnnnnnnnnnnnnnnnnnnnnnnnnnnnnnnnnnnnnnnnnnnnnnnnnnnnnnnnnnnnnnnnnnnnnnnnnnnnnnnnnnnnnnnnnnnnnnnnnnnnnnnnnnnnnnnnnnnnnnnnnnnnnnnnnnnnnnnnnnnnnnnnnnnnnnnnnnnnnnnnnnnnnnnnnnnnnnnnnnnnnnnnnnnnnnnnnnnnnnnnnnnnnnnnnnnactggcataaccccaaatccggatcgaaaaccctcacccgataccctaacaagccagggcataagcaaggcacaaaccaagccccatggctaccctttcacctggttaaacccaaccaccaggcatc

SEQ ID NO: 41141 - DNA, 143 bp, Macaca Mulatta
ggtgagtgacagtgcagagggcggggcgtctggaacattccacgtggtgggtggggcgttcagagttagggccaaccctttggattggtgggcgaggcgttcagagtccggccccgcgctccatggagcgtgaagtggtgatg

SEQ ID NO: 41142 - DNA, 264 bp, Macaca Mulatta
ctccactgcccacaatctcccactgacattacttgggaaagctttcctgggactctggctgggccatcccccctttaatatgttctagtgtttgaattggcttacgtgatcctctgcttgatgtccatctcctccgtgaacttaaactccaggagagtagtattcccagtaccaagcacaatgcctgaaatacagagacttccagatattggttgaacaaatgaaagaatgtatgcagggagtggcaagagaggactatgtgaa

SEQ ID NO: 41143 - DNA, 521 bp, Macaca Mulatta
ccagaagagggtgaaccttgcatccaaaattggagagctaaaggtgggatttcaggcaccgggagaggcttgtagaatcaaccaccagaattctaacctggcctcatgtcctgggcttgggcccccaacccaaggtcaatgaggggtcctcggagcctgggtctttccctccctgtccagtgacagtatcccaggccccagtatctcctccttccttgtattttgataagcttcggaggctcttcttcacggacaggaagcacaaattctgagggcctggcatctggcagcccaccagtgggtttcctggtacccaggccatgccaggggttatcgcaaagccctcagctcatttgaaggcaccctttggatcttcagactcatccagcctactacagaactaggcttcgagacagccaaggtgcctgcctgagagcaggtggaagaggaccttccaaccacctgcagctcctggctacgtcctgctttccttgtgcctcccatccatgcataggagggaa

SEQ ID NO: 41144 - DNA, 4261 bp, Macaca Mulatta
  misc_feature (1)...(4261): n = A,T,C or G
caactgaaaccacttctctgagtagcaaggctgagtctgtaaaacctgactttaaatggagtaaagatccctcctccaaaagtggaaatctgttggaaaccaatgaggtaggtttgacatcaaaccctgaagaagtggacctgatcaggctggctctcctgggcaagtcaggtctgagctgtcaggtggggtcagccacatcacgtcctgtgtcctgccaggagcctgtagatgaagatcaaagaataattcctaaagataagtcaactgctggccgtgagtccgggggccaggtttctcatcagaccacctctgaaaaccagtgcactcctgttcccagcagcacagttcgcggctctgtggctgacgtgcaggacgtgcctgctgctgtgcacgcgctcttggcgcagccccctctcagcacagctccctttgctcagcggtatttgggaacgctcccttcggctggaagcaccaccttgcctcagtgtcatgctggcagcgccacagtctgtggcttctcaggaggcctcccctacccagccgtcgcaggagagcctgtgcagagctcgctggctatggggatttgtctggggtcaaatatcggctctggatggacgggcccctcttccctctgtaaccggtattctaataccttnnnnnnnnnnnnnnnnnnnnnnnnnnnnnnnnnnnnnnnnnnnnnnnnnnnnnnnnnnnnnnnnnnnnnnnnnnnnnnnnnnnnnnnnnnnnnnnnnnnnnnnnnnnnnnnnnnnnnnnnnnnnnnnnnnnnnnnnnnnnnnnnnnnnnnnnnnnnnnnnnnnnnnnnnnnnnnnnnnnnnnnnnnnnnnnnnnnnnnnnnnnnnnnnnnnnnnnnnnnnnnnnnnnnnnnnnnnnnnnnnnnnnnnaggtggatctttcaacatatcgttgtttagttttcaagaataaagccatcataaggcctcataccacagaagagataaaagtgctttttatcccatccggtcctggggttttcagatgcacattcagtgttgcttcttggccgtgttcgacagatgctgagaccatcgtacaggcggaagctttggccagcaccgtcactctcactgccattgccgagagtcctgttatcgaggtannnnnnnnnnnnnnnnnnnnnnnnnnnnnnnnnnnnnnnnnnnnnnnnnnnnnnnnnnnnnnnnnnnnnnnnnnnnnnnnnnnnnnnnnnnnnnnnnnnnnnnnnnnnnnnnnnnnnnnnnnnnnnnnnnnnnnnnnnnnnnnnnnnnnnnnnnnnnnnnnnnnnnnnnnnnnnnnnnnnnnnnnnnnnnnnnnnnnnnnnnnnnnnnnnnnnnnnnnnnnnnnnnnnnnnnnnnnnnnnnnnnnnnnnnnnnnnnnnnnnnnnnnnnnnnnnnnnnnnnnnnnnnnnnnnnnnnnnnnnnnnnnnnnnnnnnnnnnnnnnnnnnnnnnnnnnnnnnnnnnnnnnnnnnnnnnnnnnnnnnnnnnnnnnnnnnnnnnnnnnnnnnnnnnnnnnnnnnnnnnnnnnnnnnnnnnnnnnnnnnnnnnnnnnnnnnnnnnnnnnnnnnnnnnnnnnnnnnnnnnnnnnnnnnnnnnnnnnnnnnnnnnnnnnnnnnnnnnnnnnnnnnnnnnnnnnnnnnnnnnnnnnnnnnnnnnnnnnnnnnnnnnnnnnnnnnnnnnnnnnnnnnnnnnnnnnnnnnnnnnnnnnnnnnnnnnnnnnnnnnnnnnnnnnnnnnnnnnnnnnnnnnnnnnnnnnnnnnnnnnnnnnnnnnnnnnnnnnnnnnnnnnnnnnnnnnnnnnnnnnnnnnnnnnnnnnnnnnnnnnnnnnnnnnnnnnnnnnnnnnnnnnnnnnnnnnnnnnnnnnnnnnnnnnnnnnnnnnnnnnnnnnnnnnnnnnnnnnnnnnnnnnnnnnnnnnnnnnnnnnnnnnnnnnnnnnnnnnnnnnnnnnnnnnnnnnnnnnnnnnnnnnnnnnnnnnnnnnnnnnnnnnnnnnnnnnnnnnnnnnnnnnnnnnnnnnnnnnnnnnnnnnnnnnnnnnnnnnnnnnnnnnnnnnnnnnnnnnnnnnnnnnnnnnnnnnnnnnnnnnnnnnnnnnnnnnnnnnnnnnnnnnnnnnnnnnnnnnnnnnnnnnnnnnnnnnnnnnnnnnnnnnnnnnnnnnnnnnnnnnnnnnnnnnnnnnnnnnnnnnnnnnnnnnnnnnnnnnnnnnnnnnnnnnnnnnnnnnnnnnnnnnnnnnnnnnnnnnnnnnnnnnnnnnnnnnnnnnnnnnnnnnnnnnnnnnnnnnnnnnnnnnnnnnnnnnnnnnnnnnnnnnnnnnnnnnnnnnnnnnnnnnnnnnnnnnnnnnnnnnnnnnnnnnnnnnnnnnnnnnnnnnnnnnnnnnnnnnnnnnnnnnnnnnnnnnnnnnnnnnnnnnnnnnnnnnnnnnnnnnnnnnnnnnnnnnnnnnnnnnnnnnnnnnnnnnnnnnnnnnnnnnnnnnnnnnnnnnnnnnnnnnnnnnnnnnnnnnnnnnnnnnnnnnnnnnnnnnnnnnnnnnnnnnnnnnnnnnnnnnnnnnnnnnnnnnnnnnnnnnnnnnnnnnnnnnnnnnnnnnnnnnnnnnnnnnnnnnnnnnnnnnnnnnnnnnnnnnnnnnnnnnnnnnnnnnnnnnnnnnnnnnnnnnnnnnnnnnnnnnnnnnnnnnnnnnnnnnnnnnnnnnnnnnnnnnnnnnnnnnnnnnnnnnnnnnnnnnnnnnnnnnnnnnnnagtatatgatattccccaacggcctaatgatgttcagctcttttatggaagcatgtgtaaaattatactttcagtaattggagaattcagagattgcatttctagcagagaattccttcagccttcttccaaaagtagcttggaatctacaannnnnnnnnnnnnnnnnnnnnnnnnnnnnnnnnnnnnnnnnnnnnnnnnnnnnnnnnnnnnnnnnnnnnnnnnnnnnnnnnnnnnnnnnnnnnnnnnnnnnnnnnnnnnnnnnnnnnnnnnnnnnnnnnnnnnnnnnnnnnnnnnnnnnnnnnnnnnnnnnnnnnnnnnnnnnnnnnnnnnnnnnnnnnnnnnnnnnnnnnnnnnnnnnnnnnnnnnnnnnnnnnnnnnnnnnnnnnnnnnnnnnnnnnnnnnnnnnnnnnnnnnnnnnnnnnnnnnnnnnnnnnnnnnnnnnnnnnnnnnnnagtaaactacaaattcttgtgagtcctaattcctccttatccacaaaacagtcaatgttcccctggagtggtttgatctatatacactgtgatgctggacagaagnnnnnnnnnnnnnnnnnnnnnnnnnnnnnnnnnnnnnnnnnnnnnnnnnnnnnnnnnnnnnnnnnnnnnnnnnnnnnnnnnnnnnnnnnnnnnnnnnnnnnnnnnnnnnnnnnnnnnnnnnnnnnnnnnnnnnnnnnnnnnnnnnnnnnnnnnnnnnnnnnnnnnnnnnnnnnnnnnnnnnnnnnnnnnnnnnnnnnnnnnnnnnnnnnnnnnnnnnnnnnnnnnnnnnnnnnnnnnnnnnnnnnnnnnnnnnnnnnnnnnnnnnnnnnnnnnnnnnnnnnnnnnnnnnnnnnnnnnnnnnnnnnnnnnnnnnnnnnnnnnnnnnnnnnnnnnnnnnnnnnnnnnnnnnnnnnnnnnnnnnnnnnnnnnnnnnnnnnnnnnnnnnnnnnnnnnnnnnnnnnnnnnnnnnnnnnnnnnnnnnnnnnnnnnnnnnnnnnnnnnnnnnnnnnnnnnnnnnnnnnnnnnnnnnnnnnnnnnnnnnnnnnnnnnnnnnnnnnnnnnnnnnnnnnnnnnnnnnnnnnnnnnnnnnnnnnnnnnnnnnnnnnnnnnnnnnnnnnnnnnnnnnnnnnnnnnnnnnnnnnnnnnnnnnnnnnnnnnnnnnnnnnnnnnnnnnnnnnnnnnnnnnnnnnnnnnnnnnnnnnnnnnnnnnnnnnnnnnnnnnnnnnnnnnnnnnnnnnnnnnnnnnnnnnnnnnnnnnnnnnnnnnnnnnnnnnnnnnnnnnnnnnnnnnnnnnnnnnnnnnnnnnnnnnnnnntgaagtttttgagtcccagagagccattctatgtcaaacattccaagtactctctgagnnnnnnnnnnnnnnnnnnnnnnnnnnnnnnnnnnnaccgaagtccgcaggcaaatttgaagccttgcttgtcattcaaacagatgaaggcaagagtattgctattcgactaatgggtgaagctcttggaaaaaattaa

SEQ ID NO: 41145 - DNA, 753 bp, Macaca Mulatta
  misc_feature (1)...(753): n = A,T,C or G
ttcacacctctgaccgctgccgagatggccccctacatgaagcggctttcctgggcgcaaacggtggaggngatctgctggaggttctaagtgacatagacgagatgtcccggcggagacccgagatcctgggcttcttctcgnnnnnnnnnnnnnnnnnnnnnnnnnnnnnnnnnnnnnnnnnnnnnnnnnnnnnnnnnnnnnnnnnnnnnnnnnnnnnnnnnnnnnnnnnnnnnnnnnnnnnnnnnnnnnnnnnnnnnnnnnnnnnnnnnnnnnnnnnnnnnnnnnnnnnnnnnnnnnnnnnnnnnnnnnnnnnnnnnnnnnnnnnnnnnnnnnnnnnnnnagagcatgcggctgtgctgctgcaccgggccttcctggtgggcatgtacggccagatggaccccagcgcacagatctctgaggccctgaggatcctgcatatggaggccgtgatgtgagcctgtggcagccgacccccttccaagccccagctcgtcccatccctggggatcctcaaggcgaagcccagggagcgccgccattgctggtctccgaggaggtgagggcgccgagctccgaggccaggcaggcccaggaataatactccgagccctggggtggctctgggccggctgctggcatgggggccgtccaccaagccctcattcaccttccgggccacagccctgnnnnnnnnnnnggatcccaccgggcgtggcctgggctggttttgaatgaaacgatctgaac

SEQ ID NO: 41146 - DNA, 742 bp, Macaca Mulatta
gagtgtctataatttgcttggggtaaaattgtgttatctctttactcaacttattgaaatttagtacttcctgtgctatctttgtccctaatagaaattacagatattgttatataacattttatttgtggaagttctctcaaattagggtctatgataatcactacactgaaacgacagtatttttagacttacttggatcttgatatttacttctgcaatgataaagcatatatattactttatcacaaatttaaaacattttgacaagtatgttttaacatacttaattgctttatattcttttaaaaatgttttgcccttaaaatattattctgagaaggagtctatacacaaagaggactgatggctcaattaacaggcattcaatggtaatacagccgatattattttgttttggataagcaaccatatgaccacaggtgctttctatacctataagttatggacctcagcagctgtacttgtttggcaaagattagcagtagtcactgagtcttatattcaggatctgtgtatcactgcacctctaaaaaatcataaattattatcacctttccttgaaacagaaaagaatatggttacctcctctttccctattggttttcggttaagttttaattttttccctttgatgggtttttttttggattcctttaaaaccctcaaggttacctttaaaaaattgccctttttaaacctaaaaagggttaattggtga

SEQ ID NO: 41147 - DNA, 539 bp, Macaca Mulatta
  misc_feature (1)...(539): n = A,T,C or G
ggcagactgttgatatttcagaaaatgtcaacatcactctgaagggatgcatagtttttgtgaagggccccagaggaaacctgcagagggacttcagtcacatcagtgtagaacttagtctccttggaaagggaaagaagaggctcaaggttgacagaaggggggaaatagaaagaaagtggctactgtttgcactattcgtagtaacgtacagaacatgatcaaaggtgttacactggacttccattacaatatgaggtctgtggatgctcacttccccatccatgtcattatccctgagattaggtctcgtgtgaaatcagacattccttggataaggnggttcagatgaggccaggtgttgcttgttcagtatctcaagtcctgaaagatgacttagtcctggaaggaaatgacattgaacttgcttcaaattcaactgctttgattcagtaagccacaacagctaaaaacaagagtatcagaaaaaattttgatggcatctatgtctctgtaaaagggacagttcagcaagctga

SEQ ID NO: 41148 - DNA, 785 bp, Macaca Mulatta
  misc_feature (1)...(785): n = A,T,C or G
aggggtgcggggcaagggttgaaaaattacctatagattcaatgttcactagttggggaatggatacactagaagcccgatccccgccagtgtgccatatacccatgtaaaaacatgcacatgtactccctgagactaaaaacaacaacaacacagaactaaggcttnnnnnnnnnnnnnnnnnnnnntacccccttctttctctataagaagcaaccactgttcctcagcctacatagaaaagcagtctgttctgattcatggtttcttttctctaaatcaggcaatgagaatgaaggtgcatgaggtgtctggatgttttcgatgctgctgtcaccatctggagactcccatatagggcccagtgtcacttccctggctgctggtggaggctacgctagctggggacacactgtggagagagtcagggtaaagactgttatttacagagagaaatggagagatgggacatcagttatatttcagttcaccgctggaacacgtccctacttaaacttccaacgactgtgtttttcccagtgacttaaacagtttctttcactaatcacatctgttctcttgtaaaatggtttcaagggttaataagctgtgaactgaaatgtttacattttgaattttagaaatttgaatttttttcccaaaagggagcctaaccccgttttgatatggctttggaaaaaaggtggatggggaaacaacagtaagacttattgggtttgggcaatccatggggaaataagttaaagtgcctcaaaaaaattttc

SEQ ID NO: 41149 - DNA, 1634 bp, Macaca Mulatta
  misc_feature (1)...(1634): n = A,T,C or G
agcagcccaaaacgagatattccaggaagggcaggtgatggttccgaacactgcagcagtcctgnnnnnnnnnnnnnnnnnnnnnnnnnnnnnnnnnnnnnnnnnnnnnnnnnnnnnnnnnnnnnnnnnnnnnnnnnnnnnnnnnnnnnnnnnnnnnnnnnnnnnnnnnnnnnnnnnnnnnnnnnnnnnnnnnnnnnnnnnnnnnnnnnnnnnnnnnnnnnnnnnnnnnnnnnnnnnnnnnnnnnnnnnnnnnnnnnnnnnnnnnnnnnnnnnnnnnnnnnnnnnnnnnnnnnnnnnnnnnnnnnnnnnnnnnnnnnnnnnnnnnnnnnnnnnnnnnnnnnnnnnnnnnnnnnnnnnnnnnnnnnnnnnnnnnnnnnnnnnnnnnnnnnnnnnnnnnnnnnnnnnnnnnnnnnnnnnnnnnnnnnnnnnnnnnnnnnnnnnnnnnnnnnnnnnnnnnnnnnnnnnnnnnnnnnnnnnnnnnnnnnnnnnnnnnnnnnnnnnnnnnngaggcctgttttagacccttttattggctatgatgnnnnnnnnnnnnnnnnnnnnnnnnnnnnnnnnnnnnnnnnnnnnnnnnnnnnnnnnnnnnnnnnnnnnnnnnnnnnnnnnnnnnnnagtttagcagctgaagaatctgaactaagatttcgacaattaacaaaagaatatcaggccctccaaagagcatatgccctcctacaggagcagacgggaggcatcattgacgatgaacgagaagccaagnnnnnnnnnnnnnnnnnnnnnnnnnnnnnnnnnnnnnnnnnnnnnnnnnnnnnnnnnnnnnnnnnnnnnnnnnnnnnnnnnnnnnnnnnnnnnnnnnnnnnnnnnnnnnnnnnnnnnnnnnnnnnnnnnnnnnnnnnnnnnnnnnnnnnnnnnnnnnnnnnnnnnnnnnnnnnnnnnnnnnnnnnnnnnnnnnnnnnnnnnnnnnnnnnnnnnnnnnnnnnnnnnnnnnnnnnnnnnnnnnnnnnnnnnnnnnnnnngatcccctccatttaatctccaaattcacccattctcagatggtgtgagtgctctgcagatctactgtatgaaagaaggtgttaaggnnnnnnnnnnnnnnnnnnnnnnnnnnnnnnnnnnnnnnnnnnnnnnnnnnnnnnnnnnnnnnnnnnnnnnnnnnnnnnnnnnnnnnnnnnnnnnnnnnnnnnnnnnnnnnnnnnnnnnnnnnnnnnnnnnnnnnnnnnnnnnnnnnnnnnnnnnnnnnnnnnnnnnnnnnnnnnnnnnnnnnnnnnnggaacagttctgcaaaataaaaggctatctggaggaagaactagactacagaaaacaagctcttgaccaagcatatatnnnnnnnnnnnnnnnnnnnnnnnnnnnnnnnnnnnnnnnnnnnnnnnnnnnnnnnnnnnnnnnnnnnnnnnnnnnnnnnnnnnnnnnnnnnnnnnnnnnnnnnnnnnnnnnnnnnnnnnnnnnnnnnnnnnnnnnnnnnnnnnnnnnnnnnnnnnnnnnnnnnnnnnnnnnnnnnnnnnnnnnnnnnnnnnnnnnnnnnnnngagaattcgtgacttagaagataaaacagacatccagaaaagacaaataaaggacttagaagaaaag

SEQ ID NO: 41150 - DNA, 871 bp, Macaca Mulatta
  misc_feature (1)...(871): n = A,T,C or G
ggnnnnnnnnnnnnnnnnnnnnnnnnnnnnnnnnnnnnnnnnnnnnnnnnnnnnnnnnnnnnnnnnnnnnnnnnnnnnnnnnnnnnnnnnnnnnnnnnnnnnnnnnnnnnnnnnnnnnnnnnnnnnnnnnnnnnnnnnnnnnnnnnnnnnnnnnnnnnnnnnnnnnnnnnnnnnnnnnnnnnnnnnnnnnnnnnnnnnnnnnnnnnnnnnnnnnnnnnnnnnnnnnnnnnnnnnnnnnnnnnnnnnnnnnnnnnnnnnnnnnnnnnnnnnnnnnnnnnnnnnnnnnnnnnnnnnnnnnnnnnnnnnnnnnnnnnnnnnnnnnnnnnnnnnnnnnnnnnnnnnnnnnnnnnnnnnnnnnnnnnnnnnnnnnnnnnnnnnnnnnnnnnnnnnnnnnnnnnnnnnnnnnnnnnnnnnnnnnnnnnnnnnnnnnnnnnnnnnnnnnnnnnnnnnnnnnnnnnncctaagcaacgatcgaaaacaaaacaatccaaggccctactcatcccaatccctactcggccacctattttccccctaactccaagtcctcaaaattacttttggaagcacccctttccccatcctccgatgggcattctacgggttcaaacctttctttcatttaccacagggccttcccctgggaactccaccggtttatttatttggaattccacattttgcttcttttggtctggccttcattccggccaaacttactaaaacccacctttccacattcgaacccattcccttttcggagtttccaagaacgcgcccccttgtgaatttggacccccttccggggggatgtgttatcctggaccaaccgcccccccaaattttccggggccaattggatggaaggaac

SEQ ID NO: 41151 - DNA, 748 bp, Macaca Mulatta
  misc_feature (1)...(748): n = A,T,C or G
ggggcaacctggttgggtcgtggtcggtgttttggaagtgtgctttcactgtttatagttacagtagctctcattggtgctcgctctttgggtccacattgtctttatgagcagtagcagtcaccacgaaggtctgcagcttcactcctgacgtcagtgagaccacgcacccaccagaaggaagaaactctggacatgtccgaacatcagaaggaacaaactctggacatgtctgaacatcagaaggaacagactggatacacccatctttaaaaactaacactcactgcgagggtccatggcttcatctttgagccatgcaagatgtggcttatatcctccttgccttctgccatgattgtgaggcctcccgagccatgtggaactgtgctggaaaagctgtcagactggactccaattgggtgtttgcgatgccatgctcctgagcaaaacactgcccatgtgtcagtggcagcagagtggacagctgagtgatgggacctctgcacgggtgggcttctagtcagcaatgaaaatgagtaattcatcaacatcatcaatgtcaaagaaaccatggttgggaaagaagcaaaccatggaatatacacaacggtctcctttcaatccattgtgaatttcactgagncaggaacaaaccctgaaaaaaatattttttttggggaaaggggcccacccccccggaagggggccannnnnnnnnnnnnnnnnnnnnnnnnnnnnnnnnnnn

SEQ ID NO: 41152 - DNA, 320 bp, Macaca Mulatta
aggggtgtaaagaccccagggcccattcgggatgtgtgggcttggaatcaggggacatttgaagccagatttaatatatgataaggcaaggagtcattctgtccagatatgagaggccagacagacttccacactggccacagagccttcctttctggggggccctggcgaatggggaaactgaggcccggagagggaggggcgcagcccagggacatgctctgaagccctgccctcctattaccctcggagccccgcccaccccagggtcctccctctctactgccattcttggttccttcccctaatcgatgctaaca

SEQ ID NO: 41153 - DNA, 560 bp, Macaca Mulatta
  misc_feature (1)...(560): n = A,T,C or G
gagctcgtggagacaggctacaggggatggaaccttccagaagtgggcggctgtggtggtgccttctggagaggagcagagatacacctgtcatgtgcaacatgagggtctgcccaagcccctcaccttgagatgggagccgtcttccgagtccaccatccccatcgtgggcatcattgctggcctggttctgcttggaactgtggtcactggagctgtggttgctgctgtgatgtggaggaggaagagctcagatagataaggcgggagctactctcaggctgcaagcagtgacagtgcccaaggttctgatgtgtctctcacggctttaaaggcgagaccctggggggcctgatgtgtgtggggtgtaggggggaacagtggacgcagctgtgctgtggggtttctttgacttggatatattgagcatgtgatgggctgtttaaagtgtcactcctaactgtgacagatgtgaattttttcatgaatatgtnttctatagagtgagacagctgccttgtgtgggactgagaggcaagatttgttcatgccttctcttt

SEQ ID NO: 41154 - DNA, 353 bp, Macaca Mulatta
  misc_feature (1)...(353): n = A,T,C or G
gggtaagttcttaagtttttccctcctttcttatagcaggtcccagggtctcagcttccttgcttctccttagatagctgccatcatctgtacaagcctggctatggagtaggatactctgtcctcatatcacccataccttgctgcttctgaaaacaagagcccaattccttttggttttcagggctttgctgttacctgcttagggaaatagataagaaattgtagttgatttgtaggaatacagccagtcaagataacatttgtttgattcatttactcttcctctgtatcttctacttttctgtcccttacccnnnnnnnnnnnnnnnnnnnnnnnnnnnnnnnnnnnc

SEQ ID NO: 41155 - DNA, 315 bp, Macaca Mulatta
tgactcctgggctcaccttcacatcagccactgtgttcctgcactcttcccattgaggccataacaaaccagtcttacctgcagtttggatggaggctgggtgagaagcaggccctaatctcaaacctatcctcagtggggatatgggagtaactttgaaaggttgctaatggtctcttttgtcatgagagggaaaggaaatacatattggagactggtgtggtctgctttctcaaaacaaaaaaactaaaagccagtaatccaaacaagatgccacagaacaggtctgtgttcctccctttattttattttatt

SEQ ID NO: 41156 - DNA, 548 bp, Macaca Mulatta
aactgatggttctgatgtgtcgtgttcagcattgctgctggaggtgtaatggacgttaatactgctttacaagaggtgctgaagaccgccctcatccacgatggcctagcacgtggaattcgcgaagctgccaaagccttagacaagtacgtgtatcagtctcaatactgtgggttcttgcaaccggaacaaaactgccacccaagggaagaaggcgtggagttcatggtgttagcgcaaaagttctgaatggcatccgtcctacaggaaacctaggaaaaggtatcagaacttagatctataaagcccacttaacatgtgtgggtggctgttggaacggggataagcactcaaaactacagtgtttgaatgatgacttaaattgtcggataccccttcactccttttatgagtgaaatgtaagagtctgacaaacctgtaggttgtggggctagtcagttttatacttaggcggagagatgacatggagagccacattacgtttggcagtttgcaaaaacaagcattacatccatggaatttcaaac

SEQ ID NO: 41157 - DNA, 765 bp, Macaca Mulatta
ggggtagtcattagacacacctcccaacttcctgctaacgtctatatattgctcctcattctcctctgtgacgccaaggaaacgggtctaacttctcttttccacgtggtagctgcacctttatttgaagatacgtcgtgttccctctgcattcactggcccgcctcaaccaggattatcgggatttcagctgccatcctctatagtgagtacaggatctatcctcactctgtggttcacaacagacttcgctgtgactgcccaaggttttaaagcattatatgaagattatcgggatttcagctgccatcctctatagtgagtacaggatctatcctcactctgtggttcacaacagacttcgctgtgagtgcccaaggttttaaagcattatatgaaggctggacaggaagcatgacactggcatctgcgtggcttctggtgaggcctcaggaagcttccaatcatggtggaaggcaaaggaggagccagcgtgacacatggcagaagcagaagcaagagaaagagtaagaggtgccacacacttctcagttcacttttggtgaatctttttcactgtgcccaggagagcaccaaggggatggtgctgaactatttatgagaaatccaccccccacctatgatctactcacctcctaccaggccctacttccaatgttggggattacactttaacatgaggtttgcacgttgacaaatatccagactatatcaggcacattgagatatttaccctattccttt

SEQ ID NO: 41158 - DNA, 235 bp, Macaca Mulatta
ggtgatcttacaaagtaacagactccgtgccgaagtcttcaaaaaggtaatggcctcgtcaccagcaggtgtgatgtgtgtggcgcacagatgctgaatctgaacttgacatctttgtttcccttttcctctagcaattactggaccagctccttcaaaggaatgcggtctaactgcaggctgccctgctgaccacagtaactggacctgggaggacttcaaatgctggataagc

SEQ ID NO: 41159 - DNA, 1018 bp, Macaca Mulatta
  misc_feature (1)...(1018): n = A,T,C or G
gggctttttcgcaacgggtttgccgccagaacacaggtgtcgtgaaaactacccctaaaagccaaaatgggaaaggaaaagactcatatcaacattgtcgtcattggacacgtagattcgggcaagtccaccactactggccatctgatctacaaatgcggtggcatcgacaaaagaaccattgaaaaatttgagaaggaggctgctgagatgggaaagggctccttcaagtatgcctgggtcttggataaactgaaagctgagcgggaaccgtggtatcaccattgatatcttccttgtggaaatttgagaccagcaagtattactgtgactatcaattgatgccccatgaaacagagacttcatcaaaaacatgattacagggaaaacaaacagctgacttgtgctgtctctgactgtttgcttgctgggtgtttggtaaaataaaaaagcttgtaaactacagaaaatggagtaagaaactaaaaagcaatgcaacaatcaaggctatacaaaccggtggtggtgaaatccacctaatattgagtggtgtttaaacaaaaatgggcatatcccgctggaagcaatcctatcatttagccatgaaataaattgaactatagaaagacttcgattaagaggagaaattacagcaacactttacgtgtagcggtaagaataatggctattacataatcacccgaacgatatcaaataaagancatttntgtattgtaccgatatgtaccttggcattgtcgaggaaatgcaagacactaagagagttgtctaggcggatcacaataaggtggagttagcacaccgtgcttcctcagtaggaatgattgaagagagtaacaagaaacatgactcgatccgctatgttagtaagaagtggtgatgacaactactctctattgagtagatcaagcgacacctctgacctcagtcgagaacgtactccaagatatcttcacagcgttcaatgcactagtatacgacancgaggcgtncgatg

SEQ ID NO: 41160 - DNA, 771 bp, Macaca Mulatta
tgcaaatttcttaaaggtagagaccattgaaaacattgtatgttttcttcctatgtcactggtgcctaacacaactatggccatcgtccatattcatttagcagcctttgtggttattgctttgaggagcttcctctcatgtatgaccttgctttctctcctacagagtcatccgcctatatatgacctgactgccatgaaagtgcctactgctatttgggctggtggacatgatgtccttgtaacaccccaggatgtggccaggatactccctcaaatcaagagtcttcattactttaagctattgccagattggaaccactttgattttgtctggggccttgatgcccctcaacggatgtacagtgaaatcatagctttaatgaaggcatattcctaaatgcaatgcatttacttttcagttacaagttgcttccaagcccataagggactttagaaaaaatagtaaccaacaatgatgttgtccccctgggagagatgcacaatggagtctgttttccaagttaattgtgttagtgttatttatgtttagagacatctttgcatgggaccatctacaggtccttataaacaatgaggtagattgggcaaaaaataaataagttgccactctgatatttaagtctaattaaattgtaatttttagggcgtaccatgaagtatagaaatgtatgaagcttcaaaggaacagtgaaattcctttaaggtctaatagggaaacctctattgtcattttatttatatgggttg

SEQ ID NO: 41161 - DNA, 595 bp, Macaca Mulatta
tctggcctttctaaatgtccgggcagcagaggaagccctacccaggactgtggaactgatgggcagagaacagaattgagatgattataagaaacaggaacaacgtgaaacagccaggaagtttctatattatgaaacagactataaatctcgatcagaacagttaacagacggctctgaaattagcctactgccttcagacactgacaggtatatgaagagattttgtaagtttgatgcagaccagaaaggctttattaccattgttgatgttctgcatgtattagagagtatcaatgttcaaatgaatgaaaatacactccatgaaattctaaatgaagtcgatttgaataaaaatgacaggttgaactcaatgaatttttgcagctgatgagtgctattcaaaaaggaagggtgtctggaagccagcttgctatactaatgaaaactgcagaaaagaacctcgacagaagagttccaattccagtggatcatagttacaggagggaccgggcttaggacgtgactggcccgggcagatctgtgtttgttaaaccaggttcttatgtatattgtgctatgaatgaagttcctt

SEQ ID NO: 41162 - DNA, 94 bp, Macaca Mulatta
aggctacagtgtggatgaactggaggaccacattacccagcttcacgagtacaatgacatcaaggatgtggggcagatgctgatgggcaaacta

SEQ ID NO: 41163 - DNA, 1990 bp, Macaca Mulatta
ggggcggccgccatgttctctgtgtgtctttgtcttttgtgtgttctttcattctccaccacgcccggcacggaccccaacaagtggcggagcgagcagggtcagcactgggagcggacctgagtggtttcctacaagatgattgaaaccctgttgaaaagaaaactggattcagcatgcgtttcttcctttgttagatgtgcctcggcgggggacttatttctcttagtgaggctttgtatgaatgttggacttatattccctttccgcctttgtgtcagggagtcgcctggggggaggtggaaattaaggttttcaccaatgacattacttggatgccatccccctatatagacaaggacaatatagaacgggaaacaggaattataatcagcacataccaatttggagtggaaggacttccaatatgtatgggaaatagttctcattgtctccgaaaatcgcatgaagcctgggctgttcactataatcatagtcatgtggctgctaatactgttattattgtaactagaagcttttaatataatcatactgtatatagtaatgaaactattcctagttctttacttttttgtcctattctagaggtttctcctaatattgaggtgctggagtgacaacaatgtcggggaactaaaccccggattttattagaatacaatggaatgtaaataactgattggagtgtgcacagtgattttcaaataaaatttagtcacatacctttgaaatgacactgggtaaataaaagtattgctgctaacagtaatgaaaccttggtatggcgtgaaggaggcctgaagtacagagttatctttggaagttgttagctgcaggtgatgccattagcacttttgtggggaatatgtcccttaatctttctaacccaaataactcctttcatattcagttatatcgaaatacctcctgatatattattgcttgtgtccgtaagccctacctattattagcagggaatttgacatgggataatgatacggggattgttaattgtacagatacgtgtacatttttgtcttgcctcaatcattcctggtggcacaactttactggggatatttatatcctcagggctcgtaaggaaatttggctacctgttaaccttacgtgaccatggggggcatcacctcttgagacttatatttggacttctctccagcgaaaccttccgtgcccttggacttataattgcctcggtgatgagccttgtcgccatcgtctccactgcgagccgtagcagggctcgctcttcatcaaagcatacaaaatgctgaatttatgcagcaatggcacgaacaatctcaccggttatggcttcaacaacgaaacattgactctcaacttgctgaaagattggacaacatggagcaagcattgacatggcttggagatcagctcactgtactcagtactcggatgacattacaatgtgattggaactccactcaattttgtgtaacgcctgtgccttttaacatctctcaaaattggactgtaatcccgaaaattattagtaggccataaaaatattagtttgggacattccaaaagctcactcagaacatttccgaagcatttcgacaacaattacatgtgttgtccggaaactgtaacccttcaagagctgggtcaacgcctttgctgccctttaacccttgggacccaaaggaaaacatgggatttctaccaatctccggaaaaaaattgttttggggccctcaaattgggtccaccttctttttggggatccgaatggctccctccatcgcctttccaaaaccgaaggaaaaccccccggaccaatgtcccgcctcaccttttttgggcttgggcggccaaaaacaacaccaaaaagggggcaaccgctcagggccctttcttaacaccaactactcggcggaaactagcattggggcgttccgcgagaaggtacccccccagttggaca

SEQ ID NO: 41164 - DNA, 741 bp, Macaca Mulatta
  misc_feature (1)...(741): n = A,T,C or G
aggaagaagctaaggccaaggaggaggagggggtccctgacgaggaggggtgggtgaaggtgacccgccggggccggcggcctgtgctcccccggactgaagcagccagcctacgggtgctggagagggagagacggaagcgcgcccgaaaggagctgctcaacttctatgcctggcagcaccgggagagcaagatggagnnnnnnnnnnnnnnnnnnnnnnnnnnnnnnnnnnnnnnnnnggatcgagctgctgcgggcccagcgcaaattccgaccctactgagccgcgagagccgcagtggatggctagaggtgcagggcctggagaaacatgagngtgtccaccaaaggagacagggctgagagcactgcccggggtgcaggtcctccctaatgacagcacgcacgaaagccccgcttctcacattcgattccaggagaagtagcggcgagtccagcaagataagtttattcaccatctcggggaagatacaggaaaactgtgaggacagcagaaggggagaatgaatagggggaagaaggaaaggactctcccgcctttcccaggggaccctggagttcctggaaatatcttttaggctggggggtatgtgctgaccaaggggccagaaggagaatattctatcctaaggtgtgccttccccctcgcaagtctgtacctagcactgagctgcagaccctggtgatggcgggactccagggtgctctgggacagggt

SEQ ID NO: 41165 - DNA, 805 bp, Macaca Mulatta
  misc_feature (1)...(805): n = A,T,C or G
gggaaaaaacatttaaaaattattttaaattaaatatcaacttaactttctcccccaaatcaattaatcctttaattatattaacaacataaaaaaccatatgattatgtattagatacagaaaaagcatttgagaaaactaaacatttttnnnnnnnnnnnnnnnnnnncagcaaactggggatacaagagaatttctttgacatgtcaaagggcatctttaaaatacctaatgctaacatcctatgtaatgatgaaagactgaatgctttcccctaagatcgagaataagacaggcatgtcagctcctaccacttctattcaacactgtactgcagatttgagccactgtaaccactttttaaaagggagttgggagaaggaagaaaggaaggaaggaacgaagaaagggaggaagggaggaagaaagaaatggaggaaaataaaaagcatctagactgaaaagaaatacgtaaaacggtctttatttgcagacataatcatctatgtggaaaaccaaagtgaaatcaattataacggttactgacaccagttgagttttgccacattgcaggatacatgatcaatatacaaaaatcaattataattctatatggtaaaaaataaactgctagggaattgaaattttaaaaaaataatactacttataatagnnnnnnnnnnnnnnnnnnntgggaataatatcttgaacacacttatgcaaaaatatctggcacaatggaaaaaccaaaaaagtctttggttgaaaaaaaatctaaagaaaaaatcctaaaaaaaaaaactn

SEQ ID NO: 41166 - DNA, 810 bp, Macaca Mulatta
  misc_feature (1)...(810): n = A,T,C or G
ggcnnnnnnnnnnnnnnnnnnnnnnnnnnnnnnnnnnnnnnnnnnnnnnnnnnnnnnnnnnnnnnnnnnnnnnnnnnnnnnnnnnnnnnnnnnnnnnnnnnnnnnnnnnnnnnnnnnnnnnnnnnnnnnnnnnnnnnnnnnnnnnnnnnnnnnnnnnnnnnnnnnnnnnnnnnnnnnnnnnnnnnnnnnnnnnnnnnnnnnnnnnnnnnnnnnnnnnnnnnnnnnnnnnnnnnnnnnnnnnnnnnnnnnnnnnnnnnnnnnnnnnnnnnnnnnnnnnnnnnnnnnnnnnnnnnnnnnnnnnnnnnnnnnnnnnnnnnnnnnnnnnnnnnnnnnnnnnnnnnnnnnnnnnnnnnnnnnnnnnnnnnnnnnnnnnnnnnnnnnnnnnnnnnnnnnnnnnnnnnnnnnnnnnnnnnnnnnnnnnnnnnnnnnnnnnnnnnnnnnnnnnnnnnnnnnnnnnnnnnnnnnnnnnnnnnnnnnnnnnnnnnnnnnnnnnnnnnnnnnnnnnnnnnnnnnnnnnnnnnnnnnnnnnnnnnnnnnnnnnnnnnnnnnnnnnnnnnnnnnnnnnnnnnnnnnnnnnnnnnnnnnnnnnnnnnnnnnnnnnnnnnnnnnnnnnnnnnnnnnnnnnnnnnnnnnnnnnnnnnnnnnnnnnnnnnnnnnnnnnnaccctaactaggggaaacttcttttgtaatccacaaacctccattttttcctggatccccatattcaaccattttttgtttgaaagggggccttttaatataacccaaatttaacgggggccctttttaaattctttcttccaagaat

SEQ ID NO: 41167 - DNA, 238 bp, Macaca Mulatta
  misc_feature (1)...(238): n = A,T,C or G
ggtatgagctgcgctgcgtcatctggaaaaccaccaatgtggacctggtggatgacaatttaagtagagagaagacgagcgacatctacatcaaagggnnnnnnnngggctggagaaggacatgcagaagacagatatccactaccactcgctgaccggggaggcgaacttcaactggcggttcatctttaccatggactacctggcggcggagcgcaagtgtgtccagagccagaag

SEQ ID NO: 41168 - DNA, 824 bp, Macaca Mulatta
  misc_feature (1)...(824): n = A,T,C or G
ggatcatcttttaggcctcccaaatcatgtgtttctggttctccatccgtcgatgccagaggttcctaagactggtccatgaaggnnnnnnnnnnnnnnnnnnnngttgcaacctgtgggaaaacatgtgtggggagggacatgggagggagggaactgctcactcacagcagactccaggtctccctgcaaggctgcaggcatttttttggcccagcctctttcctcctgtgtcacttaccactgtggccacctgaggaaactgaagaaagggcttcctctgggctggtcacctgctgacctgctcaggctcttgacagctttcagacagtgaatcctcagccaacacctaaaggggatggctgaggctgaagaaagaggaggcaggatggtttctgcaaagaaccaggatcgcagatgtggcgcttggccacgctccccaccggtccaagctttcgtgtgctcaaatcactgactactccactgtagctgctgcctggctttccctgttccatctcgccactggcacaaccttggggcgtgtgcagaactggaaagaacttaggctgggannnnnnnnnnnnnnnnnnnnnnnnnnnnnngnnnnnnnnnnnnnngggtggatcgcctgangtcgggagttctnnnnnnnnnnnnnnnnnnnnnnnnnnnnnnnnttctactaaaatacaaaattanctgggcntggtggagacactgtatcagctatcngagctagcagaatcctgacggaagtgagtcatactaatcacctgccgctggacacactgtcaaaaaaaaaaacctgcatgaactgcaccagg

SEQ ID NO: 41169 - DNA, 1023 bp, Macaca Mulatta
  misc_feature (1)...(1023): n = A,T,C or G
atctcttggtttcaagtatcatttcacattctgtatacatgactttgttattgtggaatacaagcctgcaatggatgtatatatacagaacattaataattcttataaggatggaagtcaaatggctgcatgatggaaattnnnnnnnnnnnnnnnnnnngaaacttgaatttgctaagcatgtatggggggaaatagaatccttaactcagtgcctctgtctgcgatatggaaaccttcaactttgtacaccaaaactgtattataccnnnnnnnnnnnnnnnnnnnnnnnnnnaatatagtatagtgaatcagacaccatcggttttaagtctctggtagccaaaatttaaataatccatagactatcacatatgttcactccatcttcatctctgaagttagtggagaccatcaaaatgactgtacatttcatgactctgggaaaatttcaaatgtgaagtgcccctgtgcattttgttggccgtagcacagcattcttgctttagctgtgctttcctgggatgagaagatcttggtgtttttaacacataagctttgttagaaatcacctctgaagatcatttcattttctcactttgggttgctgcaagacaaagcaaaggaaaaggataacaacgaaggaggccgtgacacttttagttgccaccgttgtaattcaaacaatatgggtttgttggtgaactgatttatcaagccttctgttacggttttgcatctgtgtgtggggaaaattttaatttatttggaagtatttattagccatgttgttggtcctgaaaataaatctctaagtagcacagttgtgggtatattatgcaggcacttaccaccgtatctgcaaaagtaactgtggttttctttcaagacactgtgataaacagtgaactaagagaatagattctgacacgtctcgataaatcattctctgcaaaagtttcagggctaatgtatttatgtgtatttttaaattctactttctttggcatctcttcatggctc

SEQ ID NO: 41170 - DNA, 2318 bp, Macaca Mulatta
  misc_feature (1)...(2318): n = A,T,C or G
ctttttaagctcctccccttttcttgccatatttactccttaggagtgagaggttagaagttctctgccccagctaaagagagatcatagcagatttctacttacacttctgccctgtttctctcaataattgttttcttccccagagaagaattactactgtttgtaattcctaaagcccctaaaatgaaaatgtacacacttatactcattcttgttcttctatgtaaactatcaggaggaaataaaatnnnnnnnnnnnnnnnnnnnnnnnnnnnnnnnnnnnnnnnnnnnnnnnnnnnnnnnnnnnnnnnnnnnnnnnnnnnnnnnnnnnnnnnnnnnnnnnnnnnnnnnnnnnnnnnnnnnnnnnnnnnnnnnnnnnnnnnnnnnnnnnnnnnnnnnnnnnnnnnnnnnnnnnnnnnnnnnnnnnnnnnnnnnnnnnnnnnnnnnnnnnnnnnnnnnnnnnnnnnnnnnnnnnnnnnnnnnnnnnnnnnnnnnnnnnnnnnnnnnnnnnnnnnnnnnnnnnnnnnnnnnnnnnnnnnnnnnnnnnnnnnnnnnnnnnnnnnnnnnnnnnnnnnnnnnnnnnnnnnnnnnnnnnnnnnnnnnnnnnnnnnnnnnnnnnnnnnnnnnnnnnnnnnnnnnnnnnngtttagatacacaaagatttaccattgtgttacaattgcctacagtatttggtacagtaacatgctgtaagggtttgtagcctagaagcaatagactatataggtcctttagcctaggtgtgtaccaggctgtaccatctaggtttgtgtaagtacactgatgattccatgacagaatcacctaatggctcatttctcagaacgtatacccatccttaagtgattgatgactatatttttattttatacaacagatatacttctgaaaacctaagtttaagtcaacttttgtgagttgtgtaatttcaaataactaggcgtgttagagaaattctgttataattttgtagaacaacggctctgtaattttctaattttattatataaatctaggtatcttataattgggtttgcttaaagtgaagcatagcatacttttcgttgcctgttttgcatttaggttcttaattgatttgtgcagtctgtttaatttaggttattaaatttattccccttattgtaacactcaacttccattgttccaaaggaaaatttaatgctgaggaactttggcttgatgaaaatgtggttttttaaaattaaatacccaggtgtaggtcaggtatggtggctcatgcctataatcccagtactgtgggaggctgaggcaggaggatcgcttgaggctggaagtttgagaccaacctgggcaacatagcaagaccccattactacagaaatataaaaaccaattagccaggcatggtgggcatgtgcttgtagtccagctattggggagcaagagcctgaggcaggaggatggcttgagcccaggggttcgaggctgcaatgagctgtgatcatgccactccagcctgagcaacagagcaagaccttgtctnnnnnnnnnnnnnnnnnnnnnnnnnnagttacagagaataagcgtattttatgaatagagcaaaacaaagtctagaatgggcttccctgtgcaggaataccatattactgtttggaaaagatcagttactacctctagaccaacagtcaagggcccttcagctctggggggaaaaatatacactattcgtttaaaaaatgaaaataagctgtttagcattgctagtattcttcctaaataataattctatcaagacaccctaggaatcgaaaatgttcgttttcatgttctttgtaatgtctaccnnnnnnnacattatacatcttagatggcaagaataacaatattaagaattaaaatttgttacgatggataatgtttataaaaatctcaggatatgttgttttttaaaatgtcttatttttataagctctcacatccagtgtgcaattatttattccaaatactttccctccttacctccccccacctcccttgctgcttagatggtggtctgtcggagaatcaatgttctttttgtctacccatctcccttcagtcttaataaaaggtcttaaacagttacatgagaaccaaaaaaacaacccaacgcttttggagaataaatcaggatctggagttccaaacagtaataccaattccagtgtacagcatgttcagataagagttgcccgcttggaagataatacagccatctcttctagccccatggcagcactgcagattccagtccagatcacccatgtttn

SEQ ID NO: 41171 - DNA, 314 bp, Macaca Mulatta
  misc_feature (1)...(314): n = A,T,C or G
tgaggctccctgatcagctcctggggctcctggtgctctgggtccctggntccagtggagatatagtgatgacccagactccactctccctgcccgtcacccctggagagccggcgtccatctcctgcaggtctagtcagagcctcttggatagtgatggatacactcatttgcattggtacctgcagaagccaggccagtctccacagctcctgatgtatttggtttccaaccgggcctctggagtcccagacaggttcagtggcagtgggtcaggcactgatttcacactgaaaatcagcagggtggaggct

SEQ ID NO: 41172 - DNA, 796 bp, Macaca Mulatta
  misc_feature (1)...(796): n = A,T,C or G
gggcagaacttccagttttgtgagaaaggaaccatgtcagtgataatcacatctgcattcccaccatttatcaagtgcttcgtacaaagccactgcttagtaaatgtttgttgaatagttaagtcaaccattccttgcctagtgttcgttattttcttttctccttcatctgttttatttttcaacaattaattaactcaggctagtttcctgctttccttgtattccttttcctactagatatgattgcttacctctgtcagtgactctcagagcaagaaaaaattagtatgttaaagtgaaaactttagggcannnnnnnnnnnnnnnnnnncnnnnnnnnnnnnnnnnnnnngggcaggcggatcacctgagcccaggagtgcagaccaccctgggcaacgtggtgagaccccatctctaaaaaaaaataataataaattaggtggggtggggtgttgtatgcccatggttcccgctatttggagggttgaggcgggcaaatcactttgagcttaagaggctacactgaagccaaaattggggccactgcactcccgtcctggatgacaaaatgagacnnnnnnnnnnnnnnnnnnnnnnnnngggggcctgggggggggggctccccccaggcctgtaatccccgcacctttgggagggcccaaagcggggcaaattaccctgaaggttggggagttcaaaaaccaaccttgaccaacatggaaaaaacccttgtccctactcaaaaattccaaaaaaccttcccgggaacataaggtccacaggcccggta

SEQ ID NO: 41173 - DNA, 177 bp, Macaca Mulatta
cgggtgactgctgcagggcttctccccagctggactgggcgctactcgaaagcgctctctccactcgcacggcttgttgggctcatcatgaagcgcttgggctccgtgcagcggaaaatgccgtgtgtgtttgtgacggaggtgaaagaggagccttccgccaaaagggagcatcag

SEQ ID NO: 41174 - DNA, 157 bp, Macaca Mulatta
ctactgcagtttctacaggaattctcacagcaaactatctctaggacccatgaaatcaagaaacaagtggacggactaatacgggaaaccaaagccacagattgtcgcctgcataatgtcttcaatgacttccttatgctctctaatacccagttca

SEQ ID NO: 41175 - DNA, 117 bp, Macaca Mulatta
cagtgttacccttagggctgatttctcggcagcctgttgttttccctagacaagtctgtgttcctctcctgaggctgtggaacatttcagccgtattaacagaaaggacactgtgat

SEQ ID NO: 41176 - DNA, 1929 bp, Macaca Mulatta
  misc_feature (1)...(1929): n = A,T,C or G
cggccccctgcccgccaccgcctccagacccccagtttgtcctccgaggcacccagtcaccggtgcatgcactgcacttctgggaaggagcccaggctcaggggcacccggtcctcttctcagggnnnnnnnnnnnnnnnnnnnnnnnnnnnnnnnnnnnnnnnnnnnnnnnnnnnnnnnnnnnnnnnnnnnnnnnnnnnnnnnnnnnnnnnnnnnnnnnnnnnnnnnnnnnnnnnnnnnnnnnnnnnnnnnnnnnnnnnnnnnnnnnnnnnnnnnnnnnnnnnnnnnnnnnnnnnnnnnnnnnnnnnnnnnnnnnnnnnnnnnnnnnnnnnnnnnnnnnnnnnnnnnnnnnnnnnnnnnnnnnnnnnnnnnnnnnnnnnnnnnnnnnnnnnnnnnnnnnnnnnnnnnnnnnnnnnnnnnnnnnnnnnnnnnnnnnnnnnnnnnnnnnnnnnnnnnnnnnnnnnnnnnnnnnnnnnnnnnnnnnnnnnnnnnnnnnnnnnnnnnnnnnnnnnnnnnnnnnnnnnnnnnnnnnnnnnnnnnnnnnnnnnnnnnnnnnnnnnnnnnnnnnnnnnnnnnnnnnnnnnnnnnnnnnnnnnnnnnnnnnnnnnnnnnnnnnnnnnnnnnnnnnnnnnnnnnnnnnnnnnnnnnnnnnnnnnnnnnnnnnnnnnnnnnnnnnnnnnnnnnnnnnnnnnnnnnnnnnnnnnnnnnnnnnnnnnnnnnnnnnnnnnnnnnnnnnnnnnnnnnnnnnnnnnnnnnnnnnnnnnnnnnnnnnnnnnnnnnnnnnnnnnnnnnnnnnnnnnnnnnnnnnnnnnnnnnnnnnnnnnnnnnnnnnnnnnnnnnnnnnnnnnnnnnnnnnnnnnnnnnnnnnnnnnnnnnnnnnnnnnnnnnnnnnnnnnnnnnnnnnnnnnnnnnnnnnnnnnnnnnnnnnnnnnnnnnnnnnnnnnnnnnnnnnnnnnnnnnnnnnnnnnnnnnnnnnnnnnnnnnnnnnnnnnnnnnnnnnnnnnnnnnnnnnnnnnnngggaggtgggcatcgggccccagccttgacctgaaacctcaaagggcctctgaggaccagcaaatcatggcccaaggaccnnnnnnnnnnnnnnnnnnnnngaggttggtgtttccttttgtggagtgtgtcatcacaggacggtgactctgggggccagccagagtcctggctgtccaaggcctacgggagatgttggcttgggcctgctgtgttgccagctgagggtattttataataaatttccattgccaagttgcaggcttgaggtgggagctccctgaggaggccctggtcccctacttagcatcagtgccctcagacccccaccaggcaggatgctcagccccaccctcacccattgttgaatgggccaccccaagtgtgggtttcctgggccaggcctccggagatgataggccccaaccacagctgcctgtcgatgtccacgtgacccctcgccctgaggaagccaggagctcccaacacataggttgaggccaggatcaggatcaggaagtaactgaactccctaaagagtgaagctgatgcagagaaagatgcctgtgagggatggcaaggggggcttgcagcgcacagggccaggccagatgtgggatccaggagcgcatgcctgcccagagagggtgcagtggggaaggcacgcagggtgcgcctccaggtgagtgctgggcagaaggcacgagagcagcgagggagtgacaagcactgcctcacagcggccaaggccacagtcacagctgcagctgcacacagggtggcccccagggcacaacacagcaagaacaggacttagcagccagagcctcacactgcaggcagccgggcccagcctggctggtcgtctcctcctaaacgcgggtgttgattaggaaagaaccatgaccctg

SEQ ID NO: 41177 - DNA, 718 bp, Macaca Mulatta
tcactgagccaccagatgggaagccttgagcagggcgtcagaagctgctattgctttctgaggtttaagtgtcccctgtctgtctgctgctcccaggctgttatcagccacagatccacagcaggggaccgatgtcgaactgtttacatggacggttgctctaagtgaatgtttcaggatgccgaaatgatgaaatcacagccatagcagggatggctttccaggttggggtttcaattgactactattatttcagtctgagcctgattaaaacatacagtgaaccttctaatgaattttgagttctgatactgtacattggtttactttagaagagtttttacttatgtaaattctgttctgttttggtgtttgaatatctagatggtcattgtaatttatacttgctaaaattaatttatattaccattttctctaaagttggccttaaaatgttcttataaagtgaaggggtcacacagttgggcctttattattttgctgaattctatgatgatatttttgctttctacccacaaaacatttattaattcacttcctcccaaacacatgaaagtcaggggtggtagttctgaggattgggtgttttatgtttttagtttgttctttccacatccttaaaaacttgctttcaaacatcaaggagtatcactgtgctttcctcctctttataaccgtgcaggtgggagtgcagagt

SEQ ID NO: 41178 - DNA, 168 bp, Macaca Mulatta
gcagtatctgcatcccccatatgtgttgccacggtgcagcatgactctgtgcccatgactgctgtgccacctttcatggacggcctgcagcctggctacaggcagattcagtcccccttccctcacaccaacagtgaacagaagatgtacccagcggtgactgtataa

SEQ ID NO: 41179 - DNA, 162 bp, Macaca Mulatta
atgcaaaaattgatcactctgaaatccctgtatatttcttattatgatagagatcctagatatttgacctggagaatactgttaattcacttcaaccaatatatgccaaacagttactacagaagaaaatataacgacagaaatacttctatcttcacatag

SEQ ID NO: 41180 - DNA, 801 bp, Macaca Mulatta
gggattaaggcatagggtatcttcctagagtccatccagctgagaaactgacttgatttcatgccgtgtgctataaatgctgtaagtaataatatgtaaattgttgacctcacagttaatttattaagcaaatagtggagaagacgctagtaatttctagacttcgtcgcaggggttgtgaatataggaggggataagataaaaactggctgtttcattggagtatcaattgtggggagagattgaatatactaaataatatcttaattaatatctaaatatatataagaaatatataaattggataataacagagtttttatgaataaaactgaacaaagtgatgtaatggagaatgatagcggtatatggggcatattctttagatggagtcatttaaggaatgccttccttagaaaggggcatcataaacaccaattattcaactgctctactccatcaggtgggaatcacatattcattgttggctagtgtgtctgcagtgcctaggacagagcctggcacttggtaggcatttactgaatgttttttgaataaaagaagaatgaaatggaagacagtaaataagtcttcttttaaaaaaagttgaatgaaggctggtcatagtgtctcatacctgtaatccccacacttttggggggcagatgtgggaaggatcccatgtggctccagagttcaaaaaccatccctgggcaatattagtgaagaccctcgtctccccccgtaaaatagaaatatgtaaattagaaaaataaccacaccgggaaaagttatccgcgg

SEQ ID NO: 41181 - DNA, 1542 bp, Macaca Mulatta
  misc_feature (1)...(1542): n = A,T,C or G
cgccgctgcgctggtaagcttgtgttttggttcgctatggcccgtactaagcagactgcccgcaagtcgaccggcggcaaggccccgaggaagcagctggccaccaaggcggcccgcaagagcgcgccggccacgggcggggtgaagaagccgcaccgctaccggcccggcaccgtggccctgcgggagatccggcgctaccagaagtccacggagctgctgatccgcaagctgcccttccagcggctggtacgcgagatcgcgcaggactttaagacggacctgcgcttccagagttctgccgtgatggcgctgcaggaggccagcgaggcctacctggtggggctgttcgaagacacgaacctgtgcgccatccacgccaagcgcgtgaccatcatgcccaaggacatccagctggcccgccgcatccgtggtgagcgggcttaagaagtgcgcgttcggtcggaggttccatcgtatccaaaaggctcttttcagagccacccacatcagcacttggaagaagctgtaccgcttgccctccgtgctccccctccggcattagagcggggaaggcacttccggttgggctcccaacaaaannnnnnnnnnncccctgctgcggtgccatcttgagctctgccgacttcggccagttggcctatccggactggccgggctgcggccgctttccttggcgccggcttgggggctgtgacggtccggctcttcctgcgcgtgaccggggccctgcgtggcggggggaggcagggcaggagggacggggcgtcggtcccgaggccaggggtcaccaggcggacgctcagggctcgcggtcctgagagcgcctggcctttgcggaagtggagggccacacgcccgtgcttcgcgcccaaaccggcctcacccggcgcggccctccggctagcgagggaaatgaccacctcggcctcgccggggttctgcgggcaaacgtggggagaactgcgctggggctgccggtcgggcccacgccacctccaccagcacagtggtaacccccacatcctgcccctaagccaaaattcccggggtcacggggtgtgggcggaattttgtgaatctgggcttaatcgagctgttcnnnnnnnnnnnnnnnnnnnnnnnnnnntattccaatgagggcactcggttctcttagaagctgcatggtgtgtctggattttctgtccagactcagtagttccttgacattgttttcgtcggacacgtgggcagacgctggtccccgaggtcagatccttgggaagacagtagatcaaacaggcagaacgtgggcctccgttgggcaaatgaagttcctcaccttaggaaatcgtgacaggaggcctcagaggcgatctctatagtctctgggagctgggaagtccaaggcctcttagtgggaaagtgaggcagggtcttgcagagcccactctacacagggcgagatacaaatggccgtagaggtcttaggtaacaccttctcggtcatttagttgcaccgcaaagaagccagggctt

SEQ ID NO: 41182 - DNA, 446 bp, Macaca Mulatta
cccagtcatgctgaaactggcttgcgcagatacctccgccctggagatggtggggttcatcagcgtgggcctcatgcccctcagctgtttccttctcatcctcacctcttacagtcgcatcgtcttctccatcctgcagatccactctgccgagggccgacgccatgccttctccacctgcagcgcccacctcactgccatcctgcttttttacatgccagtggtcctcatttacctgaggccaacccccagcccctggttggatgcaactgttcagattctgaataatctggtcacccccatgctgaaccccttaatctacagtctcaggaataaggaggtgaaatcatcactaaggagggtcctacatcagctgggcttcctccctgagcagttgtagagagaaataagtaactaccacttcaaccacacctcatagcttataa

SEQ ID NO: 41183 - DNA, 718 bp, Macaca Mulatta
  misc_feature (1)...(718): n = A,T,C or G
ggatattttaccatactttttaccattaattaacattcattgagcaagctatgagccagaaactattccaagcattttatgtggaggaaacccttacaacatttatttcttacaaaaactccatatggtaagtgttatgttatcctcattttactaatgaggaagctgtgattcagaaaagttgcacagcaaatttgtagctgagctgagatttgaatcttggaactctggttccagagcttcagggcctggtggacacatggtatctccagagatttaatctttaaatgtatatatatgtgcatgtatgtgtatgtgtacatggaggagtacacacacacccatacatccacgtctattcaagtttcagcttacagattctgtgctaacttgagttatatcagtcctttggaaagtaaggagtgtcaattaagagactcattccttcaactccttagaaccatattatgcccagctaaaggaatcaaaccattagaagcagtagacatcctacaattgaaagaggatgaaattttcattcatgagatttttaggatgatgatgatcactggatcaagcagaattttaacacatgtataaatataaatactgatattattctaaataattatttttaagtagttttaatgaataacacgctactttcaaaggcacgtgannnnnnnnnnnnnnnnnnnnnnnnnnnnnnncatgtcgg

SEQ ID NO: 41184 - DNA, 743 bp, Macaca Mulatta
gggacttccgttttctctgggcaagcggtcgaacggagggccggcgaggtgccgggtctggttctccgagctgcgcctctcggcaagatttcgcgttgcccatcctgggctttcatcagtaatcgatagtggatcactctgccaagcggcaggaagaattaaggaaacgacaaggagacgcttggctgcctcccgctttgctccttgcggactcctcttcccttcgctccggcccggtgaaactgaacttataatcgtcactggattgtaagtacccgaggcgaagagagctcactgagccctgatgttttgagtgtttgttccgggagagtttgtaaattgagagtatctctgctggcctttctgggccgaaaaccgttccgcgggagccgccatttgctttcctgcttcctagctaggtagctgtctccgcgttgtcgggcagcggcacctagaggttgggacttggcattgcatctgatttaatgaacttaagtctgtgaataagccttttgtgttaacgactggtatttggtcacagcatatttagagaaaagaattggagcttaaatagaaacgaaggcaaaatagacgcttagctggctgatctacagagaaacttccttgtaattaaaataattgtcaattcatagccgagatgggggggtttgaaagctatttgcaactagcttggaaaacttttttaccggtgaacccagtcattttattttgggagaaaagat

SEQ ID NO: 41185 - DNA, 557 bp, Macaca Mulatta
gctccaacgcacaatcctgactgtgccctttccacccccacactcacaccagtttgcagaaacctcttccctggggtggaagccagagagcttagaggaaaaaggtcagctctgttcctgttatacatggttgaggtttcaaagcacaaagagaaacctctccatcctggctttggtggccatctttttccatctgaggtggggacttgatcttatttaaggtccccaaatagcccccaccacacttagaaagtgtgctttcttagtgttagaagtcaggccctgagtccccagcactcacctgaactgtggctgatttggtcccagtccatctggggagaaggtgtttggctaactgactaggaggcaagagatcccctcccagggaacaggaggactgggcttagcacagagccatcatcatgttccttatttgtgaagagacttctaacactgcactcacccatttgtgtacatacatggcctcagccctgggccacatgtgcctgatggaaacggacttgcagggctatgcaggccagactttgtgccttaac

SEQ ID NO: 41186 - DNA, 471 bp, Macaca Mulatta
ggtttctacagaggtttgtagagaagctgtgtggatggtgggtactgggcatgttccaagcaaatacaccccattgcttctaatggaaacagcaataataggggcaggacagagtcagcgcatgaggggattggattctcctatgtctttcctggacagatcaaccctgcaggtcccatattctgttttgaaaaagatagtgtggttctgagatgccaggggaaagggaacagaagaagataatgaatatggcttacaaggataaaagaagcatattcactttgaataaaacttcaagcttcaccatctccaatgccaactccagtgacagtcttcaatattattgtactggcttcaagaacggtacttttggtttatggataggaacttcaaaaaataataagatccaagtcaaaggtaagggttgccttctgcaagataacactgcacaggggcaggatgtaccaggcg

SEQ ID NO: 41187 - DNA, 180 bp, Macaca Mulatta
caggccctggagctccacccacgtctccttggtgctgccgctgcttgtacttctgctgctgggcccagctaggcaggccgccgcccagcgatgcccacaggcctgcatctgtgacaactccagatggcacgttgcctgccggcaccagaacctcactgaggtgccagacgccatccctga

SEQ ID NO: 41188 - DNA, 810 bp, Macaca Mulatta
  misc_feature (1)...(810): n = A,T,C or G
ggatgcttagcactcaaattatgctttctaatagcattgcccacttgaagaaaaccaggtctctttggagaagtggctgattccagctcttgggcagtaaatgtcatgttgaacctgggctatcttatgccagaaagcaggggaaccgtcaaagactgctggggtcctgtcagtaagactcaggagctaccttgaaggagtgtccagtggccacagatgaaactgctcacatcaaaaagaatagtgaatgcaaaagatttatacacattgaatgcataaatatccatgagttcataaaaacactttgaaaggcgttaacatcattgaaggttgttagggtatccaagtcgttactgtgaaaggaaagcagcatatttatccacactttccggtataaactgtgttgaaaataaccataaccaaatggataactaagagnnnnnnnnnnnnnnnnnnnnnnnnnnnnncagggtcttactctgtcgccccaaactggaatgccatggcatgatctttggctcaaccaaaacctccggcttcccaacctcaaatgattctcctggcttcagccccctaagtagctgaaattacaggggtggtgcccaaaacgggacgggataactatttttgaaattttaaggaagagagcgggtttttcacacatgttggctaagcttggactcctaaacctcctaaaacttaacatgtaacaacccaccatctgtttacccaaagaggaatgggaataaatgggccggtaaccaaacgggcctcgataccataaaaggtactctatctaagctagattgt

SEQ ID NO: 41189 - DNA, 651 bp, Macaca Mulatta
ggggatacacatcaggaggtggccttgagaagctgagcggagaccagctggactttaatcagagaaaccaagagactgttaccatggcggggaagcccaagcttcactacttcaatggacggggcagaatggagcccatccggtggctcttggctgcagctggagtggagatgggagtttgatgttccagcaagtaccaatggttgagattgatgggatgaagctggtgcagaccagagccattctcaactacattgccagcaaatacaacctctacgggaaagacataaaggagagagccctaattgatatgtatacggaaggtatggcagatttgaatgaaatgatccttcttctgcccttatgtcgacctgaggaaaagatgccaagattgccttgatcaaagagaaaacaaaaatcgctacttccctgccttcaaaaaagtgtacaaagccatggacaaaataccttgttggccacaagctgaaccggcctgactttaccctggggggaacttccctccttgggggagaacttgatcccgcccttattccagctcccctggtggagggccctgaaacccaaatcccacatgcccccgggaaaaaattctcacccgggccccaaggaacccccccaaggaaaacttaa

SEQ ID NO: 41190 - DNA, 1073 bp, Macaca Mulatta
gggaacaggcttgtccaagtgcttggtgtggggcccatgaccaaagcccaggatggcttggtgggagtgtccctgctgcatctgcatgaagcccctgctttctaggcctcgctcccatcagaaccctgcctgcccacctgcaactcccccacagcaatgccattcccacttgccccagagaagctactcagccaaacctagccagggtccattcatgtgaaccagagccagcctagtcattatttgctgtcgggtttccagtttcaccgtgtgttagggtgagggatgactgtaaaatttgctcctcagaggaatcaggccagactcaattttggagggcaagacagggaggaagctgcttcatctcggactctgttctagggcttcccaccatcagcccctcccacttgagactggtctttgggagataataggccaccatgcttggtcagcaccaattcaagccatgccaggaatctgcctacctgccaggttcagttcttttaaggtgcctcttcagggacacagtgtgtctctctgattgggcttctaaatcaaaagcctgatgttcgtgtccctctcatagggggagctttggacacaggaccagtttggaaaagggtcaggtaaaggtttccactctgcacattgtaaaggggacactctgtaggcccatgggtcccttaataaaaaggttgagtgaatttgcccttcattaacctgggatcttctgtttagcttcctttctgcctccccaagatttttagcctttttgtaaatgttaaaaactcaccttctggtaacattgggccccgaaagctgcctttgcggctaaaaagcatggggaaattggtatagggccaatcttttcccctgggcaaatgggaatgttaactcctatatcggactcgccccataacctagttatcatgaagggcctcattcttagaaataaaaaagtccccccttcatagaaggcagtcctggggcaaattagtagggccgaagtccaagagatcaacgtattatatgagaaaacgggtgagggttacatgttttgcccccgctggagg

SEQ ID NO: 41191 - DNA, 1034 bp, Macaca Mulatta
  misc_feature (1)...(1034): n = A,T,C or G
gggaagacaggcatctcaaatcggctgattctgcatctggaaactgccttcatcttgaaagaaaaggtcccttctccagccacccagccccaagatggtgatgctgctgctgctgctttccgcactggctggccttttcggtgcagcagagggacaagaatttcgtcttgggaagtgcacctcgcctccagtgcaggagaattttgacccgaataagtatttcggaagatggtacgagattgagaagatcccaacaacctttgagaagggacgctgcatccaggccaactactcactaaaggaaaatggaaagatcaaagtgttaaaccaggagttgagagccgatggaactgcgaatccgattgagggtgaagcctccccagttaacatcgacggcagcctgcccaagctgggaagttaagtttctctctgggtttatggccatccggccacccgcacccggggttcccgggcccacccgcccctaatgcagtaattcgccggccacgcctagcccttctccccgcgtgttccaccccctcacgtcctatttcccgtttctcacggcgcgtgtggattgtgccgcgtatcatgcatatttctctggggggatacacacaatcaagcgcggcatcagacgcacctcctattctgttcatgcaacaacatcgnnacggtgtcatactttcacgcttgcagggagctatccgccgtccacctgccctcttcgccgcggcaaaggtcactgtcacctaccggccggtgcgcgaatacagccgggtcgcgtgtcccatccgcgagacccacccgctagacccaacacgcgcccgtcaccccactgcccgcctttggtcccatggcatttccccaccaacaacgtgagagcgcgcgggagctagggcccgccgttcacgtcgggctctccactagatctcttcacctatttccccccccttccttcctacttaccgctgcctctccgtccccgctctggcacactaggctntcctcacgcctcgaccgctccgcgattg

SEQ ID NO: 41192 - DNA, 854 bp, Macaca Mulatta
  misc_feature (1)...(854): n = A,T,C or G
tgggaaattgtaaccctcttattgtaactgtccgtaaccctggttcagctcaatggtattgtggcatgtcatggggattgaggctttgtatctcgagatttgatgttggaactgtgttcaccatttaggaaaaggtcctggtcccatggagccctcctaagccaattggacctttaatgattttggtgaccnnnnnnnnnnnnnnnnnnnnnnnnnnnnnnnnnnnnnnnnnnnnnnnnnnnnnnnnnnnnnnnnnnnnnnnnnnnnnnnnnnnnnnnnnnnnnnnnnnnnnnnnnnnnnnnnnnnnnnnnnnnnnnnnnnnnnnnnnnnnnnnnnnnnnnnnnnnnnnnnnnnnnnnnnnnnnnnnnnnnnnnnnnnnnnnnnnnnnnnnnnnnnnnnnnnnnnnnnnnnnnnnnnnnnnnnnnnnnnnnnnnnnnnnnnnnnnnnnnnnnnncatctctagcccagcctaatgtccattctggacggggtacgttacctccttaatctcacccagcctcaactagcccaagattgttggttgtgcctaaaagcaaaacccccatattatgttggtttaggagtagaagccaggctaaaattgactctcttccttgtcgtacacgcccccatgcccttacactaggatacgtgtcaggaaacgcctcctgtctaattagcaccaggtataacttgtctgcgtctccctttcaggccacctgtaatcaatctctacttacttccttaaacacctcagtctcctaccagacacctaacaatacctggttggcccatacttcaggcctcactcgctgcatcaatgggactgaacctgggcctctcctgtgcatgtt

SEQ ID NO: 41193 - DNA, 1348 bp, Macaca Mulatta
  misc_feature (1)...(1348): n = A,T,C or G
tctgtaccctcgtggggcctctctgtgaacacccagggcaagggtatgagggagcgtcctgggccatggtcttgtcattcacccccagggaacagcccatagactgagggcctcacacaccctgtgcttggctttccaggccctgccagaggtgcagcctgccaagcctggggctgaagggtaggctccccggaggaaggggcgacctggaactgctggggctgtggagtctcctccaaaatgagagacatggtgttaactctgggctccacagagctggccgtgacccagggctcggaggcaggggtgcacagggagctggtgggcgtctatcccttcctccccgagcagccgtggactgcatgccagagtgaaggcaggttctaattctggtggtctcgcccgcctgtggctaaactcagggtagcagtgtgggctggggaacgtgtttgtgggtgtctcccagtagccccggagtctctgaagcnnnnnnnnnnnnnnnnnnnnnnnnnnnnnnnnnnnnnnnnnnnnnnnnnnnnnnnnnnnnnnnnnnnnnnnnnnnnnnnnnnnnnnnnnnnnnnnnnnnnnnnnnnnnnnnnnnnnnnnnnnnnnnnnnnnnnnnnnnnnnnnnnnnnnnnnnnnnnnnnnnnnnnnnnnnnnnnnnnnnnnnnnnnnnnnnnnnnnnnnnnnnnnnnnnnnnnnnnnnnnnnnnnnnnnnnnnnnnnnnnnnnnnnnnnncctgcgctccttccttgctttcagcagttgcagtggtggtcctcccgtgcgtcccccttctgccctcactgccctgtgggtccttgtcaccgaccccctaactcggcagcctaggcaccaccaccccgcacctttccacagtgcagctctgctcacgcctgtgaagcctcccaccgcctgggaaggaaaactcagacttgccagaccttgcctcagctaggactttgaagcccgccaggttacctaaccaggcnnnnnnnnnnnnnnnnnnnnnnnnnnnnnnnnnnnnnnnnnnnnnnnnnnnnnnnnnnnnnnnnnnnnnnnnnnnnnnnnnnnnnnnnnnnnnnnnnnnnnnnnnnnnnnnnnnnnnnnnnnnnnnnnnnnnnnnnnnnnnnnnnnnnnnnnnnnnnnnnnnnnnnnnnnnnnnnnnnnnnnnnnnnnnnnnnnnnnnnnnnnnnnnnnnnnnnnnnnnnnnnnnnnnnnnnnnnnnnnnnnnnnnnnnnnnnnnnnnnnnnnnnnnnnnnnnnnnnnnnnnnnnnnnnnnnnntgtgggtcggaacaaagtttggattatttatgtggcaagtaaccaaaatctcaagtgaaactg

SEQ ID NO: 41194 - DNA, 787 bp, Macaca Mulatta
gggaaacaatcctcttacatcaatttattcattgttctttgaagtctgatgtggataggtgtataaactttggtgatgattaatttaagttcagatcctgaaatattcagtctctaaaacatcattttacctgttcaaaaaaaggttattaactacctcctcatggttttttggaagattcagagggataatgcatacaaagttgttgacaaaatgcctggtccgtctcagtaggactcgagaaatgttaacatgtattaagcctcctgataggccttttttggtttcccactcatttatttaagaaatgatttttaaaatgcttactacttattaggtgctagaattacaaagatgagtaaaacacaacatctgccctcgaagaatttatagtttagtgaggatatgcacatacctatgttgaaaatcaagaagaataatacagcctggcaaatgctttagtggagagttttggtgagaaaataagaactgagaaaagaagctaccaaatctattttggtacattaggaaagtgttcttcagggaggactgacatgaagaatgaagagcagtttgctggtttggaagttggagagtagagaagagtaaagctttcccggagtcaggaagaacatattccaaaggagggtcaagggtaacatgatttgtttcagtaaaagaacgatgattaaaaaaaaatttacccccttaaggagaaaggagtttgaaacttgaaggtactcaagggggaaattcttgtaatttaaaaattccccccagaagggcc

SEQ ID NO: 41195 - DNA, 781 bp, Macaca Mulatta
  misc_feature (1)...(781): n = A,T,C or G
ggaagagtaagaattttaatttaattttgaaaataaatggcccacagggtaaacactgaacttactcaacctacaggaggccactgcatcaacacgccacggtcttcccatggcaaccgaatcattccttgttcaaaacatttaatcatcttaagcagtggggcttcaacacacgctttggttgaaatgtgcagtcagcactctccagggactagaatgggggaaagaatccactatttgcacagggtttatctttatcattctaaaatgctgagcgagtggagatctgggaacgaaaatcggaaggctgctgcttctttcaatgcataagcctcactgaaatcagaccacatttaactatttatatatcaaaaacgtccccaaacaccataagaccagtacagagttgctgccctaaaatgtataattagtgaaaaatgtacctctgcttccatttaaatcatggcagtgggttgggtgtcattatgtagtataaaaactggactagataaactgctattttagagcattattagcattctctgaatatatannnnnnnnnnnnnnnnnnnatatatatgctcatatactcccaattaaaggtcatatggaaagccacaccgggattaacagaaggcatctatattatcccttttgctctttgacaaatcttatgctggttttggtttttgaggagaaaaagggcctggggtgtaagtnnnnnnnnnnnnnnnnnnnnnnnnggacaaatttgcccacacaacagaaacaatctggaatt

SEQ ID NO: 41196 - DNA, 651 bp, Macaca Mulatta
tgtgttcacttgataaagcaggattgccggaagtctgcccttgtcttgcagaaaattcacaggattacacagatacttctgtcctgctttcaagcatccctgtgaaataagtaagttttgaaaagcaggtgcttggctttcaacctaagccaaaaggcctggatgtctcctggaaaaagagtatcactttggacaaaatgcgaatccatttagcaaccaagacagcaggaacttttttctaagtggaaatgcaccctggttgaggaggccagggcagagggtcagaagggtgctgtctagagcactcagcagccaggcactgagctgcccccatggctgggggcttacagatatatgttgctagaacattctctttccctccaccaacgcccctacacacacattacggaagcagctgtcagggcactctccctaaagaagactgaatttgctccgtggatattgattaagtatctggacttaagaccggagaagcaggtaaaattaagctgaagtccaccatctttctacctgcacttcctctgtgcagggacagaaccattgtttcatgcttctcacatgtgcagtcttccagtgaggtgaatcacggaaaaatactttgaccattcagagaacctttggactgagaga

SEQ ID NO: 41197 - DNA, 107 bp, Macaca Mulatta
gttcaaccccagcctgtcctccaccttcagaaacaatggacaaacctatacactgtcctatgggagtggcaacctgagtgtgttcctgggctatgacactgtgactg

SEQ ID NO: 41198 - DNA, 776 bp, Macaca Mulatta
  misc_feature (1)...(776): n = A,T,C or G
gggaataatgttgagtatactatccagatgaagagagactagagacataatcataattagatcctagaaagggaaacctacaataaagacacatttggggacggggtaaatctgaatatatatttggtattacattaatgttagttttcttagatgcgataatggtattgtgcttataaagaaaaatgtcttactcttaggatacacatgctaggagctgccgtgtctgtatgtctgcaaaacatacagttttttaaaaaaagtatgtgaagtttcagagacataaatgctgtaaattttaataactggtcaacatagggtaagggtatatgatgttcactgtaccattcttccaacttttctttaggtttcaaaatcgccaaaataaactttgggaaggaaaatccctatttggaggggggaaagtccccagtactttaaccagactccaagatgagtcatgtgcattgtgaagttggagaaatgctgctctagacacagcatgcttcaaaatattatataaagtcaacaagactatagacagaaccaaagcaatgagtgaacttttatcaacaaaataaaaannnnnnnnnnnnnnnnnnnnnnnnnnnnnnnnnnnnnnnnnnggagggagggaagggaaggagggnnnnnnnnnnnnnnnnnnnggaaggaagggaaggaaaagagttgttggcaaaaaggtaaaacatgtattnaantggtaactctttcttttcanaactctttcttgtgggtgcgcttgaaaaaaggtt

SEQ ID NO: 41199 - DNA, 620 bp, Macaca Mulatta
  misc_feature (1)...(620): n = A,T,C or G
ggcatgtaaagagtctttcgtagtgccttgtcctttgtagatgctcaatatagatatggtgaatgaatggagaatccttgaggatttaaacagcttgcaaatgcctcattgaaaaagtgacagaagttagaccttgaataatgggcagaacaggataaagagtggggacactttagttgggaggaggaagggatacacagtgggctgagcaaaacttgggagtcaggtctaaatgtggaaggttgggactggctgtcttcgtctcttcaggctgctataacaaaataccaaaaagcgggtggcttataaataacagaaatatatttttcacagttctgaaggctgggaaatccaagaacaagacgccagcatttggtgtctagtgagagcccactttctggatcacagaaagtgcctttttgccatgtcctcgcttaaaggaaggggcgaccaaatttctttgggcttgttttataatggcacaaatcccattcatgagggcaccaccctaattccctcccaaaggctacatcatctaataccaacaccttggggatttagatttcaacatatgagtttggggggacattcaaaacctgcantgagtgtatggtattaga

SEQ ID NO: 41200 - DNA, 177 bp, Macaca Mulatta
  misc_feature (1)...(177): n = A,T,C or G
tatgaactgcggtgttgattcaaagtattttgtttgttgatatctcctttgtgaatctggaagctgcagatctgctggacgcaataaatttatatactttttganggggttcttctgggggtgctaatcaggcccctattatgcttagggggagccctgngtgctacttgcttgaag

SEQ ID NO: 41201 - DNA, 346 bp, Macaca Mulatta
tctcggctcctgctgcaaagttggccatgtttcacagggaaacttttggaagagtggctgcttatgagattccaaaatgaagtgttggccaacatcgctcatggccatcccggatttccccggtggcttcctttcctgcctgctcgcctccctgaacaggggagaaaacttaacctctcttctcctctccaaacctttcaccttgagtgggcaatgtttggtgggggctgttccttcttggagatgccttgagtcagaccattttgagatcatggaggaaggatgaagaagtgaaaatgacaataatgactctcaagaggctgggggaggacatggcaaatgtaga

SEQ ID NO: 41202 - DNA, 879 bp, Macaca Mulatta
  misc_feature (1)...(879): n = A,T,C or G
ggagcttaaatttcagctctcactgtccaccttgggcgtatcatctctccgtagcttaaaattgcaaacatctttgattaaatgacttaaagttgaaaaataacagtgcatgcgtaatacatagtaaatacggtannnnnnnnnnnnnnnnnnnngattggtgctttttatctgaggcagcgtcttgttctgttgcccaggctagagtacagtggtgtgatctcagctcattgcagcctccactttcgtgctcaggtgtttctcccacctcagccaccccactaactggcactacaggtgtctgccaccacannnnnnnnnnnnnnnnnnnnnnngtagagactgttttgccacattgcccaggctgatttcatgatttcaaggaatgctattgtgcctgaccccagcnnnnnnnnnnnnnnnnnngtagagggagggtcttgttatgttgtccaggctggtctaaagtaagacttggcacaaggctttgtacaactaaattctggcaaattgaataccttaattaaatcaccgaaggagtaaccaccgtaggactgtgattccttcaagtaggaacaccaataagatttttggcaccggttaaggcaggtgcctgtaaaacccaaaatgggtttttttggttggttttttggagacaggagtctcgccttctgcccacccaagactgggcggggtaatgggcacccaattttcgggctcccatggccaaccctcttggtcactcccaaacgctttcaaggtggggttcctccctgccccgccaagccccccctaagtcnactctcacgggatttttacagggcaccgtgtgggtatatcgcacgtctccggtggcctactcctttttgtggcaatatc

SEQ ID NO: 41203 - DNA, 692 bp, Macaca Mulatta
  misc_feature (1)...(692): n = A,T,C or G
cgctttcgggttgggtccggcgaccatagtgggtcgctccgcctcattccntagagcgaccgcggcggcgccagagcgcggcgaggccctcacttccggcggcgcgggaggcgcccagcgagccagggtcgtggctgatcccgcgcgaaaattctgagctgtgcaccgctaggaaatgaaacagtagttcagaagaagcctgtaaactctcttacaaatacatttggttattcaccatgaggttagcaaagcctaaagcgggtatttctcggagctcaagccaaggaaaggcctatgagaacaagcgcaaaacaggccggccacggcagaagtggggcatgactattcgatttgactcaagcttgagtagactcagaagaagcttggatgacaaaccctataaatgtactgaatgtgaaaagagtttcagtcagagttcaactctttttcaacaccagaagatccatactggaaagaaatcccataaatgtgctgattgtgggaaaagtttctttcagagttctaatctcattcagcatcgacggatccatactggggaaaagccctacaaatgtgatgagtgtggagaaagctttaaacagagctcaaatctcattcagcaccagagaattcatactggagaaaaaccctatcagtgtgatgagtgtggccggtgtttcagccagagctcc

SEQ ID NO: 41204 - DNA, 330 bp, Macaca Mulatta
aagcatccacagccccacacaaaaaggggtgtctgcacttcacccaccttccagcacctcaaaacactacagctctagagacaacccagataccctcagaagagtgcctccaggagaaacaagcttgactactctgcctgattccccctgaccattgagtgtgccatgaagaagacagaagataacgacacacttgaggtcattgtggatggcaaagccaacaagcagcagagcgaacaggatgtggagcagatctgtgacactgatgtggcctgatcaatcaggcccagtggagagaaggcgtgtgtttgactggctcctgtttatgat

SEQ ID NO: 41205 - DNA, 858 bp, Macaca Mulatta
  misc_feature (1)...(858): n = A,T,C or G
gggggccaggaagcattaatcacattttaagaagcaggaaaaaaacaaaaaggtaagtaacccaggaagtgggaaatgtcttgagtgaaatcacagagacatcggagtgcagggcttctgtggtgagcagtgagtgacgaggctagagcattggaaaggtgtggccagaaatgaggctaaacaagtacgttcgtgtcagatagtgaagggccttaaataacacatattctctctgatcattcttagtctgatttttctcagtctcggcctttctcacatcccacctcagtnnnnnnnnnnnnnnnnnnnnnnnnngtcagccactatgcctgactaatttttgtaagtttttgtagaggcacagttttatcatgttctccgataaaaaattttcagctttcctgctatgtcatgtgttgaatacatgcccaaagattttggtcatataggtttttcccttaattgcctgaaaagagaccaacactttccatctgggtttaaatttatttacggaaaggtaagcctcgcttgggccacaattaacttccttaaccccatattccccagggccatttgcccttatgaagaaggaagcttttggattcctccacgtgggtttttnnnnnnnnnnnnnnnnnnnnnnagtaaactcccctttccctatataaaaaaaaggggtttggggggaatgactaccaacccttcaatttaattttaattggggaggaaaatgttaaaatttaaaaacccggccgggggaaatttaatagggtcttttaaggtttcccccccaattggagcaataaaatttaaaagccccggacacaaaaaatattttggggaaaaggaatgtgaaat

SEQ ID NO: 41206 - DNA, 769 bp, Macaca Mulatta
  misc_feature (1)...(769): n = A,T,C or G
gggagttctcagcctatcatcccgggtaggcagcttagtatcacctgggatcttgtttgtaatgcaaaatctgggccccacccagatctcctgaatcagaaacctgagtttgggtcttagctccttttgacaggccttgcaggaaattctgacgcaggctcaagttagagaattactggtttaattctttactccctaaccctagcagcaccttaggatcagttgggagttctgtataaaagttgcctgggcttgtctccagagattctaattcagttgatctgagatgtagcctaaatgctggtagttgtaaaaatggatcaggtgcttctaatgtgttgccatggttgagaaccaatggcttaattgaaagagctaaccaagaagaagtgctgtaaaaagagctgaactggtttagtaccaagaaataaggagtaaacttacttggatatgcctgatatttttccagaaagttctttacttctaggattataaaacaattcccttagtgcctttaaagtttcatatatttaatttctggagcatttaaggacaccaagattactgcatattaaataaaccagactcaagaaacctaataaactggacctccatagctcacattgctttgttgttcttgaagaaatttatctactaaatttatatttgtaaaagccttaaagaataaaatacttttgtgtcttgannnnnnnnnnnnnnnnnnnnaattnnnnnnnnnnnnnnnnnnnnnnnnnnnnnnnnnnnnnnn

SEQ ID NO: 41207 - DNA, 418 bp, Macaca Mulatta
  misc_feature (1)...(418): n = A,T,C or G
ggggtttgtgttaaatctaaatcacattgggttatataattacttaacaatactaatttttcaaaactatcaatatgggttgtatctgtttttaaccattttgatcaacatttgtagatttcaaggtacaaacttctcggctttgtacgtttattcgtatttctttaagttctctatcaaatggaagtgtttaaattttcttttaaaattgcttattgttaatgtatggaaattcaagtaatttttggtgctgatattgtgcaaatccactgaatttatttagtaccagtaatattttggttgactcattgtaattttctacacagaatatcatgtcatctacaaacaaatataaatttctttctnnnnnnnnnnnnnnnnnnnnnnnnnnnnnnnnnnnnnnnnnnnnnnnnnnnnc

SEQ ID NO: 41208 - DNA, 323 bp, Macaca Mulatta
gatgaaccgttgcccacattctgttctctgagtcaaagaggagaaagacctgtccatcgaaaccgaactgccaagatccactgctgtgtccttcagctttctgctcacaagacatcctggtctgcagggtgagaggttctgcccccatcaaaggagagagatcaagtctggtcttgacacattttgaggccccatcctgttccccttacaatttcctggccttactctctgccacatcctggccttgcctctacacctcttgcagggtaagatgaccttcccatttgtacttttacataaaaactataaatgcctctaaccta

SEQ ID NO: 41209 - DNA, 815 bp, Macaca Mulatta
  misc_feature (1)...(815): n = A,T,C or G
taaattttaagagtcttaggagttccttctgtagctggaaagtgggaaaaatgacactttctgcctttcttgctaaactttaagttatctttaaaaacttaagaatctaacagtaacaacaaccattgaatctactactaacaaccactgaattgtacacntaatggatggacttacagtatacaaattatacttcaatgaagctgttcaaaagaaaaattaacccagcagaggagttgtttttttattgcctgagggtagttattcagtttattacatgtccatatgcaaaataaaaccaagaaattaaatatattaaaccaaagaagatggcactatttttgtggcttctatcttcaatttaacatattatacttttaaaaatgttaaacaaatctannnnnnnnnnnnnnnnnnnnnatcccaagctttgctccagacacaccttttaccattccacagaactttcacactgcctgcctacatgttgtactctctgcccagaataatgcatttatctttctttagctgggtaactaccactcatgtctcaaaatccaactcatgtgcccttgtctatgacaccctctagaacactgctgtccatcagcaatataatacaagccacatgtggaatttaataaaaatgggtaaaaataggtgaaattaatatatttaatcaacctaatatatccaaatcttatcatttccacatgtaatcaatatgaaaaattgttaagatagttnnnnnnnnnnnnnnnnnncctaagtctttgaattctgctatgtagttacacatttacaccacaactccc

SEQ ID NO: 41210 - DNA, 3888 bp, Macaca Mulatta
  misc_feature (1)...(3888): n = A,T,C or G
tgctagaagttggtcttccgccagggctagagtttcctcgcggtaacagcctccgtggcctnnnnnnnnnnnnnnnnnnnnnnnnnnnnnnnnnnnnnnnnnnnnnnnnnnnnnnnnnnnnnnnnnnnnnnnnnnnnnnnnnnnnnnnnnnnnnnnnnnnnnnnnnnnnnnnnnnnnnnnnnnnnnnnnnnnnnnnnnnnnnnnnnnnnnnnnnnnnnnnnnnnnnnnnnnnnnnnnnnnnnnnnnnnnnnnnnnnnnnnnnnnnnnnnnnnnnnnnnnnnnnnnnnnnnnnnnnnnnnnnnnnnnnnnnnnnnnnnnnnnnnnnnnnnnnnnnnnnnnnnnnnnnnnnnnnnnnnnnnnnnnnnnnnnnnnnnnnnnnnnnnnnnnnnnnnnnnnnnnnnnnnnnnnnnnnnnnnnnnnnnnnnnnnnnnnnnnnnnnnnnnnnnnnnnnnnnnnnnnnnnnnnnnnnnnnnnnnnnnnnnnnnnnnnnnnnnnnnnnnnnnnnnnnnnnnnnnnnnnnnnnnnnnnnnnnnnnnnnnnnnnnnnnnnnnnnnnnnnnnnnnnnnnnnnnnnnnnnnnnnnnnnnnnnnnnnnnnnnnnnnnnnnnnnnnnnnnnnnnnnnnnnnnnnnnnnnnnnnnnnnnnnnnnnnnnnnnnnnnnnnnnnnnnnnnnnnnnnnnnnnnnnnnnnnnnnnnnnnnnnnnnnnnnnnnnnnnnnnnnnnnnnnnnnnnnnnnnnnnnnnnnnnnnnnnnnnnnnnnnnnnnnnnnnnnnnnnnnnnnnnnnnnnnnnnnnnnnnnnnnnnnnnnnnnnnnnnnnnnnnnnnnnnnnnnnnnnnnnnnnnnnnnnnncacgagctagagacagcatgagagcatgttatggcctcacaagaagtcgaagagcagtattgtcctacaaaagatttggatgccacagtcaccgcacttaaagaacagnnnnnnnnnnnnnnnnnnnnnnnnnnnnnnnnnnnnnnnnnnnnnnnnnnnnnnnnnnnnnnnnnnnnnnnnnnnnnnnnnnnnnnnnnnnnnnnnnnnnnnnnnnnnnnnnnnnnnnnnnnnnnnnnnnnnnnnnnnnnnnnnnnggtcagtacaagagatggctcagctacaattccagctgcagcaagcacagaaggcacatactatgagtgaaaacatgaacaaggctttgcaagnnnnnnnnnnnnnnnnnnnnnnnnnnnnnnnnnnnnnnnnnnnnnnnnnnnnnnnnnnnnnnnnnnnnnnnnnnnnnnnnnnnnnnnnnnnnnnnnnnnnnnnnnnnnnnnnnnnnnnnnnnnnnnnnnnnnnnnnnnnnnnnnnnnnnnnnnnnnnnnnnnnnnnnnnnnnnnnnnnnnnnnnnnnnnnnnnnnnnnnnnnnnnnnnnnnnnnnnnnnnnnnnnnnnnnnnnnnnnnnnnnnnnnnnnnnnnnnnnnnnnnnnnnnnnnnnnnnnnnnnnnnnnnnnnnnnnnnnnnnnnnnnnnnnnnnnnnnnnnnnnnnnnnnnnnnnnnnnnnnnnnnnnnnnnnnnnnnnnnnnnnnnnnnnnnnnnnnnnnnnnnnnnnnnnnnnnnnnnnnnnnnnnnnnnnnnnnnnnnnnnnnnnnnnnnnnnnnnnnnnnnnnnnnnnnnnnnnnnnnnnnnnnnnnnnnnnnnnnnnnnnnnnnnnnnnnaggaacttaaagaaactgaagaaaaactgagaaatacaaatcaagacttatgtaatcaaatgagacaaatggtacaagattttgaccatgataaacgagaagctgtggataggnnnnnnnnnnnnnnnnnnnnnnnnnnnnnnnnnnnnnnnnnnnnnnnnnnnnnnnnnnnnnnnnnnnnnnnnnnnnnnnnnnnnnnnnnnnnnnnnnnnnnnnnnnnnnnnnnnnnnnnnnnnnnnnnnnnnnnnnnnnnnnnnnnnnnnnnnnnnnnnnnnnnnnnnnnnnnnnnnnnnnnnnnnnnnnnnnnnnnnnnnnnnnnnnnnnnnnnnnnnnnnnnnnnnnnnnnnnnnnnnnnnnnnnnnnnnnnnnnnnnnnnnnnnnnnnnnnnnnnnnnnnnnnnnnnnnnnnnnnnnnnnnnnnnnnnnnnnnnnnnnnnnnnnnnnnnnnnnnnnnnnnnnnnnnnnnnnnnnnnnnnnnnnnnnnnnnnnnnnnnnnnnnnnnnnnnnnnnnnnnnnnnnnnnnnnnnnnnnnnnnnnnnnnnnnnnnnnnnnnnnnnnnnnnnnnnnnnnnnnnnnnnnnnnnnnnnnnnnnnnnnnnnnnnnnnnnnnnnnnnnnnnnnnnnnnnnnnnnnnnnnnnnnnnnnnnnnnnnnnnnnnnnnnnnnnnnnnnnnnnnnnnnnnnnnnnnnnnnnnnnnnnnnnnnnnnnnnnnnnnnnnnnnnnnnnnnnnnnnnnnnnnnnnnnnnnnnnnnnnnnnnnnnnnnnnnnnnnnnnnnnnnnnnnnnnnnnnnnnnnnnnnnnnnnnnnnnnnnnnnnnnnnnnnnnnnnnnnnnnnnnnnnnnnnnnnnnnnnnnnnnnnnnnnnnnnnnnnnnnnnnnnnnnnnnnnnnnnnnnnnnnnnnnnnnnnnnnnnnnnnnnnnnnnnnnnnnnnnnnnnnnnnnnnnnnnnnnnnnnnnnnnnnnnnnnnnnnnnnnnnnnnnnnnnnnnnnnnnnnnnnnnnnnnnnnnnnnnnnnnnnnnnnnnnnnnnnnnnnnnnnnnnnnnnnnnnnnnnnnnnnnnnnnnnnnnnnnnnnnnnnnnnnnnnnnnnnnnnnnnnnnnnnnnnnnnnnnnnnnnnnnnnnnnnnnnnnnnnnnnnnnnnnnnnnnnnnnnnnnnnnnnnnnnnnnnnnnnnnnnnnnnnnnnnnnnnnnnnnnnnnnnnnnnnnnnnnnnnnnnnnnnnnnnnnnnnnnnnnnnnnnnnnnnnnnnnnnnnnnnnnnnnnnnnnnnnnnnnnnnnnnnnnnnnnnnnnnnnnnnnnnnnnnnnnnnnnnnnnnnnnnnnnnnnnnnnnnnnnnnnnnnnnnnnnnnnnnnnnnnnnnnnnnnnnnnnnnnnnnnnnnnnnnnnnnnnnnnnnnnnnnnnnnnnnnnnnnnnnnnnnnnnnnnnnnnnnnnnnnnnnnnnnnnnnnnnnnnnnnnnnnnnnnnnnnnnnnnnnnnnnnnnnnnnnnnnnnnnnnnnnnnnnnnnnnnnnnnnnnnnnnnnnnnnnnnnnnnnnnnnnnnnnnnnnnnnnnnnnnnnnnnnnnnnnnnnnnnnnnnnnnnnnnnnnnnnnnnnnnnnnnnnnnnnnnnnnnnnnnnnnnnnnnnnnnnnnnnnnnnnnnnnnnnnnnnnnnnnnnnnnnnnnnnnnnnnnnnnnnnnnnnnnnnnnnnnnnnnnnnnnnnnnnnnnnnnnnnnnnnnnnnnnnnnnnnnnnnnnnnnnnnnnnnnnnnnnnnnnnnnnnnnnnnnnnnnnnnnnnnnnnnnnnnnnnnnnnnnnnnnnnnnnnnnnnnnnnnnnnnnnnnnnnnnggtcattgtcagcaggggccattgaaaatacttgcctgccatgcagtgggggagccttggaagaacttcgtgggcagtacattaaagctgtnnnnnnnnnnnnnnnnnnnnnnnnnnnnnnnnnnnnnnnnnnnnnnnnnnnnnnnnnnnnnnnnnnnnnnnnnnnnnnnnnnnnnnnnnnnnagaaaccgcccgaaagatgcgcaaatattatttgatttgcctccaacagattttgcaggatgatggaaaagaagggngggctgagaacaagattatgaatgctgctagcaaacttgctaccatggcaaaattgctggaaacacctatttctagtaagtcccagagccaaactactcagtcaggtatgtcgaagtg

SEQ ID NO: 41211 - DNA, 860 bp, Macaca Mulatta
  misc_feature (1)...(860): n = A,T,C or G
cccctccctccccccctattaaacgcgccgcnnnnnnnnnnnnnnnnnnnnnnngggccccctcaataataaaaaaaattctcctctcccccccccagtgtttttttcccccccacagcggggggggccccccccctctgtagaaaaaaatatcnnnnnnnnnnnnnnnnnnnnnagnnnnnnnnnnnnncnnnnnnnnnnnnnnnnggggggggtaaaaccggataactcccccccggtgttttttannnnnnnnnnnnnnnnnnnnaagggggaaatgtgggggggccccagaaaaaaggtttataagggggaggcccttttcttccagggagagtttttggaaaaattttatnnnnnnnnnnnnnnnnnnnccgggggtgcacatttgggggaaaaggccccccttgttgaaaaaagggattaaaagtttaaagttaattggggaaaggttttgggggagttccccaaattccggcctgggttcccgaggggatttcaaggagggcttggttttgcccaggttgttttcagggaattgtagaatttttcaggaannnnnnnnnnnnnnnnnnnnnnnnnnnnnnnnnnnnnnnnnnnnnnngnnnnnnnnnnnnnnnnnnnaacgtnnnnnnnnnnnnnnnnnnnnnncnnnnnnnnnnnnnncgcnnnnnnnnnnnnnnnntnnnnnnnnnnnnnnnncctacaggcgcccgccaccgcgcccggctagnnnnnnnnnnnnnnnnnnnnnnnnnnatttcaccgtgttagccaggatggtctccatctcctgaccttgtgatccgccagccctggtnnnnnnnnnnnnnnnnnnnnnnnnnnnnnnnnnnnntgcc

SEQ ID NO: 41212 - DNA, 833 bp, Macaca Mulatta
gggctttctcactgctagagtgctcgggtggttgttcgctgtatgcttcctgctgtggctttctcggaacccctggccaccgcttcatgattttctgccgtctcttggcaaaaatggcaaataatgatgctgttctgaagagactggagcagaagggtgcagaggcagatcaaatcattgaatatcttaagcagcaaatttctctacttaaggagaaagcaattttgcaagcaactttgagggaagagaagaaacttcgagttgaaaatgctaaactgaagaaagaaattgaagaactgaaacaagagctaattcaggcagaaattcaaaatggagtgaagcaaataccatttccatctggtactctactgcaagctaattctatggtttctgaaaatgcggtacagtctacaccagtaacagctgtatcttctggtaccaaagaacagataaaaggaggaacaggagatgaaaagaaagcaaaagagaaaattgaaaaaaaaggagagaagaaggagaaaaaacagcaatcagtagctggaagtgccgactctaagccaatagatgtttcccgtctggatcttcgaattggttgcatcataactgccagaaaacaccctgatgcagattctttgtatgtagaagaagtagatgttgggagaaatagccccaaggacagttgtcagtggcttggtgaatcatgttcctcttgaacagatgcaaaatcggatggtgattttactttgtaacctgaaacctgcaaagatgaggggagtattatctcaagcaatgctcatgtgtgctagttcaccagagaagtactgccagctcga

SEQ ID NO: 41213 - DNA, 666 bp, Macaca Mulatta
  misc_feature (1)...(666): n = A,T,C or G
ttggaagtggcagaggcatgtgtaggggatgtggtctgtaatgcacagttggcctcttaccttaaagcttgctcagcaaatggaaatccgtgtgatgtgaaacactgccaagcagccatacggttcttctatcaaaatataccttttaacattgcccagatgttggctttttgtgactgttctcaatctgatataccttgtcagcagtccaaagaagctcttcacagcaagccatgtgcactgaacatggttccaccccctacttgcctcaatgtaattcgcagctgccaaaatgatgaattatgcaggaggcactatagaacatttcagtcaaaatgctggcagcgtgtgactagaaagtgccatgaagatgagaattgcattagcgccttaagcaaacaggacctcacatgttcaggaagtgatgactgcaaagctgcttacatagatatccttgggacagtccttcaagtgcaatgtaactgtaggaccattacacaaagtgaggaatctttgtgcaagattttccagcacatgcttcatagaaaatcatgtttcagtaagttccccgactaaaataatctatctgtctgnnnnnnnnnnnnnnnnnnnnnnnnnnnnnnnnnnnnnnnnnnnnnnnnnttcgttcttgcctgtacagtacaa

SEQ ID NO: 41214 - DNA, 379 bp, Macaca Mulatta
  misc_feature (1)...(379): n = A,T,C or G
gggggcacagaacaagaaaatgagaagaattttcaaggcccaaatattttttgtggaggtgttctgggccaggatttttaaaggattgtgaaacgcaggggttggaacatttagggtcatctactggtcagggtaagggggatgaaatcatcagaatgtggtaactgcattctatcatgtgtcagtttctcaccggacccccttacccccgagaactttgcagctttccttcctgccccatttttcatgtcctgctgaaaaatgtgtgtgaagaattatttattttcgcgaaagcacatgtaataaatgctgcagcnnnnnnnnnnnnnnnnnnnnnnnnnnnnnnnnnnnnnnnnnnnnnnnnnnnnnnnnnnnnnnc

SEQ ID NO: 41215 - DNA, 252 bp, Macaca Mulatta
  misc_feature (1)...(252): n = A,T,C or G
natgggaaccggattggttgcagtgtggcacagacctggaaccttcctgaaagaggttggggcaggcagtgactgttcagacgtccaatctctttgggacacctcttcagcgctgtcttccctgcctctgcctttaggacgagtctcaaacaccaacaaactcaaggcacgtcccctctctcaggtcagctgcgaagggacgggagcaagagagagcctctccctccttctacgtcgagtttttgtttgttt

SEQ ID NO: 41216 - DNA, 786 bp, Macaca Mulatta
  misc_feature (1)...(786): n = A,T,C or G
gggcagacagagtttataagagtgaaccagtaaattgctgtcttcaccttggattttgaattcttttgttaaagtttagtgcaaacatttgagtgtgccaagaatttctataggctcaaggtatgtaaagatataatatcacctaagaagtttatacctgggaggatggtttatggaaatggagattttcctgccctggtggtttatgggtttgggtcagatgctgtgttctgggtacaacttcctgccaacttaagggagaataaaaaatacttagaggagctgatgtttcctgtaccttcactgatcttaggccattcagtaactggtatttataaaggactagaagttaaattcctctgtttggcttggaactgaggcttgcatgcctattatataaagaaagaaaaaagcaaaaggcttgaaagtctgttaaccttgcctcacttactttttccttattttccagaactctggtaatgaacatcattatttaagagtcaagataaataagtaagaactgttgacctatcctgaccaagctcttgaaggtcagacagttcagttttgcttctgaggtggtaacaactgaggaaagactaagtctccatagttatctaggtagatacagcgtaagaagccggcgcattgttttgagaggactagggtaaaacttctttagaattagggaaaagtgaaaaggtagaaaattcctacagaactctttttctccntaccctagcttcttagaacattttcttttccgaattgtaaaaatggttggcc

SEQ ID NO: 41217 - DNA, 213 bp, Macaca Mulatta
ttatgaatctgttatttatgaggctgtggcttctgcaacatcaaaatccatactgtaaagcccggcaagctggatgtgggagccacggagggccacgaactgcagcacatcagcaaccaaaacatgcccacaggtaaaaaagccacgggtgccgtttactctctggcacacctatggccaccctcacccccttcccatagcctcatccccaga

SEQ ID NO: 41218 - DNA, 1099 bp, Macaca Mulatta
  misc_feature (1)...(1099): n = A,T,C or G
ttcccgggatgccgggttagggtggggcctggaaatgtgcattttgcagaaacttttgagggtcattgcaagactgtgtagcaggcctaccaggtccctttcatcttgagaggggcatggcccttgttttctgcagcttccacgcctctggccctagtgtaacactccctgcccctggcaagtgcccccatcaccccggtgcccaccatgacctcccagcacttgtggctccccccacatccagggacagcctggaaccagcggcttattcttgaaggagccccatcaatcctattaatcctcagaattccagtgggagcctccctctgagccttgtagaaatgggagcgaggaaccccagcctcagctgagtctttttggtctcctgcaccccccgtccacatgcttccccagcctgcagggggaattggtgaggtcctgtcctgaggctgctgtccggggccggtggctgccctcaaggtcccttcctgagctgctgtggttgccattgcttcttgcccattctggcaccaggcacctggattgagtggcacggctttgctttatctgggcttgtgtgcagggcctggctgtgttccccatctgcacatcctgaggacagaaaaagctgggtcttgctgtgccctcctgggcttagtgttctctccctcaaagactgacagccatcgttctgcacggggctttctgcacatgacgccagctaagtgtagtaagaagtccagcctaggaagggaaggattttggaggtaggtggctttggtgacactctcacttctttctgagcctccaggatacttgggcctgttttaagagacacctcttttttctacgatgaattctcaaaagatgaattctcagatgacaggtgaacctgaattgcaaaataaccaacttccgcttgattttcccaatgacaaaaataacttcctaaaaaactttttgggaactaggaaccttgggttccctaaaaggtttctcaaccccgaaattgggnnnnnnnnnnnnnnnnnnnngnnnnnnnnnnnnnnntcttttccccccccttttggaaaaaaccgcaaatttggccctttttaaa

SEQ ID NO: 41219 - DNA, 793 bp, Macaca Mulatta
  misc_feature (1)...(793): n = A,T,C or G
ggcagacaggagtagtgactggtccaaggaccaggtccaagagtgtccaggttcctggaccatggccggtccacaagtctatgcacccaggcctccggggcttgcttcatctctgctggacttgtttccgcagcgttattacttttctatgtgtgctacacctcccttcatccatggcagggactcctagaaagagactttcactcccatggaaggcagctccatatttccaacccgcctcagcacaggcgaatggaaagcgagttggaacaggtattcccgatgctgtttcagaatctatccttccannnnnnnnnnnnnnnnnnnnnnnnnnnnnntggtttgtcctgtttgtgaaacttgcctgctctcccttgtggaacttgccagccccacacatcccaagtgtcacccaaaagaagttggagacaaaatcattctggaaaagttaccagatggggcatatttcacctccctgttttttcctggggagaggggggcgagtggaggccgggagatttcactggctcgctggagttgccgttgcggaaggaagagaactcagatgtccctgccagcctaccttttccggaccagcaccaaaaggcctccgggcccaaaaagtactgggccttgggacctattcacccagggctgtccccccacccaccatttgggagatccctgaatattttggggaaaggaactctgggaattctcttctacaaaagctgaataacagggtagttatcccatacaactaacaaattctctcactcacaccccgtgagtt

SEQ ID NO: 41220 - DNA, 338 bp, Macaca Mulatta
ggtctgcaccctgaccaaggaagacaatcgctgcgtgggcaagattcccgaggatgagcagttgcacgttctccccctgtacaagatggccagcacggatgagtttgggagcgaggagaaccaaaatgcaaaggttggcagcggagccatccaggtgctcaccgccttcccccgcgaggtccgacgcctgcccgagcctgccaagtcctgccgccagcggcagctggaagccagaaaggcagcggccgagaagaagaagattcagaaggagaagctgagcactccggagaagatcaagcaggaggccctggagctggcgggcgttacgtcggacccag

SEQ ID NO: 41221 - DNA, 423 bp, Macaca Mulatta
ccacatggagagctgcagctctaaccagggattttgagaggcctcagtggtctttaagtggcacttccaggacacccatcctgagctcccacaaagggctaaaccttcccaagagtgtctaattgtcattggaacagccagggttaggcagcttctgctagggctgacatggagtctgacccttggtgggttgccagacattccttcctgtttctgccatgggaagctggcactgggaatggtatggagctggagccccctttctgccctaagccttgggttccttctgcttccaagtcagaaatggacacttctggtcctgcccagccactactgcaccacaacccatgctcatagtctccagggatgtgtagaacagccatggcaggacagcaaacaactggcgatttccccaggtcccac

SEQ ID NO: 41222 - DNA, 430 bp, Macaca Mulatta
gaagcccaaacactttgcacgctgtgctgcagacattctggcctggtgtgtctgaaagttgcatcagtcctcacggtgcaaacacggttcatttaggaagtcacataatgacactgaaatcctacagaccaaaatccacttgtcagcaggagcagcagcccaggcccagcaccagcggtcttccggctcctctgagggctgccatgttgggcgaggggagccatgccaagggtccaggctgctttaggccatctgtgccccactcatctggggacagatggtttttctttattgtaaaattgtggacttttaaaacctgttgactaaacagtaattaatttatatttgtgaaaaatgccactgtcctagtgatttctgatgtaaataatgttgtttatatagtatgtattaaattttcctacattgtaaa

SEQ ID NO: 41223 - DNA, 794 bp, Macaca Mulatta
  misc_feature (1)...(794): n = A,T,C or G
ggatgtgcaatttagtgttttttaatgtattcacaagattgtgcaactatcaccatcatctaattctagaacattttcagaaattaaaaaccccctcaaaacccataaccatagcagttactactcattgtgtccttcctcccactccacggcaacaactcatctttctgtttctacggatccacctattgtggacatttcatatgggcggaatcatataatgcatggccttttgtgtctagtttctttcactcagtttaatgtcttcaaggtttatgcatatatagtatgtatcagcacttcatttctttctatggttgaaccatcttttattctttgagtatggttacataaaaaattgcttgtctagttccttagaaggccatttaaatgggattccactgcaactttcgttcccttttctgattctcctgttaatgtagatatatcttcggcccctgctaactcctaatgggaagagaaccacagtagaagcttacttgtttagattcagcagtttccaaaaccttagacttattgcgtttatattgaatacttttaataacagtaggtatggggatagtcacattttccgtttcgctattttgggtaaccggcaatggggggatacataggtggccaattttcatgggatgtgcctggccgtggaaaaacccaatccattcctggtggggaaaatgagaaaagcgcgggggaaaggggttttttattggtgggccctttttgttggcgtgttttggggaaaagaaaagagggaggagcacgccgggngt

SEQ ID NO: 41224 - DNA, 577 bp, Macaca Mulatta
ttgtttatttctcaaaccaaataactttctataaaaagagcatttatactgctagaacaagaaaccagctgaacaaaagcaattgtctgataaatgactaaataaggtttatttttaccatattatgtttctagaatgaaacaattttatagctaatctgacatgtgtaatgtgacaattgtcttctcacataaatctctggtaaatgtttatacacttttgggtaatacagaaaaatgacaaatattccaatttttaaaatgcaaaatatgtatgtagagaatgcattaaaactttaaaataattttcacacatgtttgatattttgataaacattgaattcataattattttgcccaatcccccaagattaccaaagaaaatagacgagcaaggccttttctaccatatgagaggaaaaaactagctaataaaatcagagaataatatataacaactcgcaagttcaaatataccatgcataccagatttttctccctgtttacttttagaaattttgacaagttttatttaattttaaaagaaaaaaacagccacagacaaaaccagcttataa

SEQ ID NO: 41225 - DNA, 622 bp, Macaca Mulatta
  misc_feature (1)...(622): n = A,T,C or G
gactcagatgtccaggctgttgtaagatgtgaagtgagaaggaaactaggattaaacttgatatttgcccacaaacccattgctttaatcaacaagcagtttggagcaaagccacactatgtctttcttggcccccaaataaaatgtgggaataagtttttgctatatgttgaacaatattgagnnnnnnnnnnnnnnnnnnnnnnnnnnnnnnnnnnnnnnnnnnnnnnnnnnnnnnnnnnnnnnnnnnnnnnnnnnnnnnnnnnnnnnnnnnnnnnnnnnnnnnnnnnnnnnnnnnnnnnnnnnnnnnnnnnnnnnnnnnnnnnnnnnnnnnnnnnnnnnnnnnnnnnnnnnnnnnnnnnnnnnnnnnnnnnnnnnnnnnnnnnnnnnnnnnnnnnnnnnnnnnnnnnnnnnnnnnnnnnnnnnnnnnnnnnnnnnnnnnnnnnnnnnnnnnnnnnnnnnnnnnnnnnnnnnnnnnnnnnnnnnnnnnnnnnnnnnnnnnnnnnnnnnnnnnnnnnnnnnnnnnnnnnnnnnnnnnnnnnnnnnnnnnnnnnnnnnnnnnnnnnnnnnnnnnnnnnnnnnnnnnnnnnnnnnnnnnnnnnnnnnnnnnnnnnnnnnnnnn

SEQ ID NO: 41226 - DNA, 543 bp, Macaca Mulatta
cctgaccatcattcaactctatgcactatgtcactttgatttcttctatgcatgtgccatataattacataaaattagatattctttgtaaaattttaaatacaaattaaaacaatgtttgagaatctgctactccttgccactaacatgcaaagctaatgtgattaaatggaaaatgtatacctctaccattggtacaatcttattcatttctgcagttagaacaaaacatcaacaaacaaaacttattaattataactctcctttggaatgaaggctgttttaaatcaatgaaacctggaattggatagtgaaaggaaatataagcttttacatcaagtttggggagcaaagaaaacacactttaaatttaagggaaaaagaatacaaatagaatgtcttataggcaaatctctgaaatttattaacatcgactttatgagctagaaagcacttcaggcctctaatttaaccttattttacagatcaggaaaaatatcagagtatatgcccaagaccaaattattcacaaaatgggacaca

SEQ ID NO: 41227 - DNA, 768 bp, Macaca Mulatta
  misc_feature (1)...(768): n = A,T,C or G
ggggaggttgaggcagagggattgagcccaagaattgggggctgcactgaactttgatggcatcactactccagcctgggtaacaaagacagacactgtctcttaagaaaaaaaaggttgattctaggactgtagaatagataaacagcatggatatgagggaaatcctcagcagtattaattttgcattccaatttcatgttgacgatatatatgatggctttttgttttaaaggcttttatcttgagaacatgatgtctggagttaaaggtattggcaaaaaccacacatctgtaccattcttgagtgatcgcttaggaatgaatgtgatttgaactcattcatgttgagagggtgtcaaattgagaaccaggcagatccccaccacctacaatcaaaaggaccctaaagcaaattggttgaagaaattagatcccaaagattcttggtgaattttgaagtcttcatcagtatacccatattaaaaggagatgacagaagccaaagtaattatgggctgacaggacagctggatcagtttcattaaaaagggcaaacttgaagatcttttgactccagctttttaggggatctaaagtgaccttgatggacagtggaagaaatcacaacatggaattccttngaataaaatttattgactttaaataattttgtctaatgctacatatacacaatttaaaaaaacctctttacactggtttctagaaagtcagcatgtatttctgggctcgaagtttctctagtgt

SEQ ID NO: 41228 - DNA, 920 bp, Macaca Mulatta
  misc_feature (1)...(920): n = A,T,C or G
ggagtgatgacttttaaagaaacttaccttccaggtgtgaacctcaaatggactgaataaccctgagttggttgcagtcccaggagcctgatgttaatggaggctgccaggatgaaatactccaaaactgttggggatacaaattcgggtctcaccctagcagaactgatccaagaacgtcacaacttttgaagtcgattggccagatcaagaccaattgcccttgtctgatannnataagtagaggaacttggtgtgagttaacttttttttccccgcatgggctgagtnnnnnnnttcccattcatccaatagaaagattagagaattttaggagtgaatttcttccttttgatttgggcaaggggaatttgtcaataaggaactatgaattgggccaacctctggaaannnnnnnccnnacnnacagtggtgcaaatggtagggtgttgttgggaatttggggggaaagaacggtgccccttaaatccccccccgggaccttttaaaacttttttgtnnnnnnnnnnnnnnnnnnnnnnnntctctgtcctttctctattcctcgtcgccctttttaaaaaataatggcgaatttgtccccctaaatataataaattttccgaagaacttttattggggttttttccccggggggcnnnnnnnnnnnnnnnnnnnngcccgtttctcgtggaaaaagtgattttggttannnnnnnnnnnnnnnnnnnnncnnnnnnnnnnnnncttctatttctccccgggggtttattttttcacaaannnnnnnnnnnnnnnnnnnnnnnnnnnnnnnntctctcttccctagccggttttctttcttttagcgagattccacctcaccctcttcgataattaatcatccctccagacaacttatagaaagaactactaattan

SEQ ID NO: 41229 - DNA, 882 bp, Macaca Mulatta
  misc_feature (1)...(882): n = A,T,C or G
ggaggctcagatgggagaatcgcttgagcccagaagtcgaggctacagtgaactgtgctctcaccactgtnnnnnnnnnnnnnnnnnnnnatgagacnnnnnnnnnnnnnncnnnnnnnnnnnnnccagtagggtatagtattattaagatttatatggaagaataagtgactaagaaaaaccaatagaannnnnnnnnnnnnnnnnncaggaattgtcctacttcctataaaactgtaacagttataccacatggcttcaagtgcagggacaggcagattaatgaagcagagtctagaaacaagccatatatgtgtttatggaaactgtaaatatctgacatagtgtttcagatcagtagggaaagagtagaatatttaataaattgtgtttacacagttaactgtttaaaaaattagatccatctaacattagacacaaaatttatttctaggtgaattataatcccaaatatgaaaagcaaatcttccaaattcttttaggataaaaatgagagaatatccctaacaccanacaaagttaaaagtataaactgcaaaggaaaaactgataaaacttgacccaaatttaaaacctggtgtaatgccaaagaaacaaagttttanaatatttagaaaaatttgtagctcccgtataactggaaaacttttaccaaaatattaagggacccgatggaaattggaaaaaatagggtaggttccttcaaaaaccaggaaacacccatatatagcccaggtaaaaccttgttgaaaaagggattcccccacttcatttttattaaacccaggaacctttaccaaggtggaaaattccgcggggttaacccattttttggttacccccacttccacgaattttttc

SEQ ID NO: 41230 - DNA, 189 bp, Macaca Mulatta
gctctgagaagtccaaacatggacatatcttcttccccaaacatcaggcttagaagacatagtagtcaaattgaaggtgttagacaaatgcataacaatgctcctcggagccagatggccactgaaagagatctcatggcatggagcagaagagtggtggtcaatgaactaaataatggggttagtagg

SEQ ID NO: 41231 - DNA, 2143 bp, Macaca Mulatta
  misc_feature (1)...(2143): n = A,T,C or G
ttgacaggtgctctctggctgcctgtcctctgggcactcttgtcccaggtctattgttttcatgacccaccaggatggcgctttacctcctcagaaattgtgatccccaggaaagtgccccacaggaggcgtggagttgagatgccagaccaactctcttacagcatgcgtttccggggccgaaggcaagtgattcacatgaagctcaagaagaacatgatgcccagacatttacctgtttttactgataatgaccagggggccatgcaggaggactacccttttgtcccgcgagactgttactatgactgctacctggaaggggttcctgggtctgtggccacattggacacctgccatggagggctgcgtggcatgctgcaggtggatgacttgacttatgaaatcaaacccctggaggcttcttccaaatttgagcatgtagtatccctgcttgtgtcagaagaaagaccaggagaggctagtagatgtaagactgaaggggaggagagagatcaagaatctgaaaaggtaaaactgtctgaaactcccagagcaggccatgtttatttgtggaggcatcatagaaaaaacttgaaaattcactacacggttactaatggattattccagcggaaccctaatgtgtcacacataannnnnnnnnnnnnnnnnnnnnnnnnnnnnnnnnnnnnnnnnnnnnnnnnnnnnnnnnnnnnnnnnnnnnnnnnnnnnnnnnnnnnnnnnnnnnnnnnnnnnnnnnnnnnnnnnnnnnnnnnnnnnnnnnnnnnnnnnnnnnnnnnnnnnnnnnnnggtgtgtggaaatatcataaatggtatacaaatattaaacatgatacctcagttgtttttacagcatatcaacttgaaaaccgggactgttatgccaactttaatggaatgtgcaaccccaactggggagcaatgtttgtgtatttaatgaggtatcacttatttaggggggcatgtttaacagcacatgcactaggtcataacttgggcttgtcacatgattctgcaggttgttattgttttcgacgaaccaactgtctcatggctcctgttcctgatcttaatgatatgatgagcaattgttcttatgataggattcaacacaggttgaataaatgggatctttgtttgagtgaaccaaatattccatacactaattttccttatgtagctgatcgttgtggagacaagatcaaaaatcagagggaagaatgtgactgtggctcccttaaagattgtgccaatgatagatgttgtgagacctcttgtatcctttctcttggcagtgtttgcaatacaggactttgctgccatgagtgtaaatatgctgcccctggagtgctttgcagagacttgggtggtatatgtgatctaccggaatactgtgatgggaaaaacgaagagtgtccaaatgacgtctatgtccaggatggaaccccatgttcagcagtatctgtttgtgtaagaggaaactgcagtgaccgtgatatgcagtgtcaagccctttttggctacgaagtgaaagacggctccccagcatgctatcaacaattgaataggattggtgaccgattaggannnnnnnnnnnnnnnnnnnnnnnnnnnnnnnnnnnnnnnnnnnnnnnnnnnnnnnnnnnnnnnnnnnnnnnnnnnnnnnnnnnnnnnnnnnnnnnnnnnnnnnnnnnnnnnnnnnnnnnnnnnnnnnnnnnnnnnnnnnnnnnnnnnnnnnnnnnnnnnnnnnnnnnnnnnnnnnnnnnnnnnnnnnnnnnnnnnnnnnnnnnnnnnnnnnnnnnnnnnnnnnnnnnnnnnnnnnnnnnnnnnnnnnnnnnnnnnnnnnnnnnnnnnnnnnnnnnnnnnnnnnnnnnnnnnnnnnnnnnnnnnnnnnaacatgcaattacaaaggagtatgtaacaacagaaaacattgtcactgtgtgtntgggtggcaaccaccaacatgtgaactgagaggaacaggaggtagtatagatagtggccctccacctgacaaacaatatcgtatagcaagcagcatacttgtgaatataaaccgagcactacttttaatatttactcgttacatcctttttctagtttcgcttctctttgg

SEQ ID NO: 41232 - DNA, 850 bp, Macaca Mulatta
  misc_feature (1)...(850): n = A,T,C or G
nnnnnnnnnnnnnnnnnnnnnnnnnnnnnnnnnnnnnnnnnnnnnnnnnnnnnnnnnnnnnnnnnnnnnnnnnnnnnnnnnnnnnnnnnnnnnnnnnnnnnnnnnnnnnnnnnnnnnnnnnnnnnnnnnnnnnnnnnnnnnnnnnnnnnnnnnnnnnnnnnnnnnnnnnnnnnnnnnnnnnnnnnnnnnnnnnnnnnnnnnnnnnnnnnnnnnnnnnnnnnnnnnnnnnnnnnnnnnnnnnnnnnctctatatactatcgaggtacggttcgcacttggaagccaagggggtgattctgagatcaggatttgagagccccatgacggacatggggaaaccccatctttactaaaaannnnnnnnnnnnnnnnnnnnnnacagtggcatctgcatgtgnnnnnnnnnnnnnnnnnnntnnnnnnnnnnnnnnnnnnnnnnnngnnnnnnnnnnnnnancantgaaccangatcnnnccnttncantcctgcctgggtgatgagtgaaaatctgtannnnnnnnnnnnnnnnnnnnnnnnngcaaaggtcagaacgtcaactttttagttccatgtaaaaactgtttatttggtcacagtccctcgtgcggccattcctggttatcccttgccattctcactatcagtcaccatagacccttaatttttcccatttccctctgagctccctgcctctagccacctgcttgatccagtctgtcctgcccagcactaccagatatgtggtcctcagaggccttgtaatcataccactgtcttctcagacaccttcatggggggaaggccatggttgcttttggggccttccagcctcccctcagcacaccttcc

SEQ ID NO: 41233 - DNA, 234 bp, Macaca Mulatta
gttctggaaattttttcaagtgtgatttcttttaaagtatgtcttccagagatgggtcatgtaagactcaatgggggagaaattgttcttttccttagaactgactgttgacctgtggagaattgaaatatttgtttaaggaatgattttaattccctctagtatgctggctgctcattctctatttcatttcctagagggtcttttgttttgtttcctagagggtcttttatc

SEQ ID NO: 41234 - DNA, 723 bp, Macaca Mulatta
  misc_feature (1)...(723): n = A,T,C or G
atggcaaaatttagggcctttattaaagttccaagacaattttttcgtgccttcagcccttcccaaggtaggcggggatttacagaacatccaccaacatgcccaggtaatttttggcattttagtaagagatgggttttcactgnnnnnnnnnnnnnnnnnnnnnnnccctgacctcagatgatccacctaccttggcttcccagnnnnnnnnnnnnnnnnnnnnnnnntaccacaccaggccttgaatcttgatttctgagcactttccttgactccactgctgctctttggtccaagttacctcatctgcagtttaaattgccaccagagcctcctagctgatccagttgtctccactcttgtccttcaagaccacctctctatgcagcagcagaacaatcctttaaaaacataaccaacgttatttctactatatacactccccagtggcacttaaagtaagaaacaagctcattttgtcctggcacatgagaccctacatgacccagctcagacccacttctctgaccacatacccaactctcttctcactcactgcactccagcccaacaaactcctatttttcagacataccatacttatttcctgcctcgggatctctgcacctgctgtcctcagatcttcaaacggctggtgtccttatgacccttccatccaaatgaaccccttaccccactcactcttcatcccaccccacc

SEQ ID NO: 41235 - DNA, 280 bp, Macaca Mulatta
gtccaggcttttacgagatgagtgacggtggatcctgctccctgtccacgtcctgtgcctctgtctgcagtgaccacatctccccctcgctgggcagtttgttgcctatggcccaggcccccaaggccaggcccagcatgggggactggaggccccggtcggttgatgagactactgtgccagcgtggagaccccaggctaccgaggagggcaccaggccccggggcagcatggagaatgcaggccagccgtggggcacattctggcccaggccggtgtc

SEQ ID NO: 41236 - DNA, 613 bp, Macaca Mulatta
  misc_feature (1)...(613): n = A,T,C or G
cagctgcctgcctctgccgcagggccgcctgctccgcctgtgcccgtcgtgctgcctcttgttcggcttccttgcgcagcttctctgcagccgcctgcgcctgagcccgggcctgtgcctgctcctctgccgactgcttcagccgctcggcctcttccacctgccgccgggactgtgccgcctcacgctccgcctgcacccgggcctcctccgcctcctcagccgcccgccgggcagcctctgcctcgcnnnnnnnnnccgcttctgggcagcctcctgggccagctgcagctgccgcgccgactcctgctctgctcgctcccgcagccgccgcgcctcctccaccttggctttcagtcgctcaacttcctccaacgccgccttccgctgccgtgcggcctcttcctcggccgccaggctcttctgcacgcgctcctcagcctcacggcgccgctgctcctcctctgccgccagctgccgctgcctggcagcctccagctcggcctgctccttgctgcgcagtgtgtcctccgcattgctgcggatacgccccagctccagctccagctccgccttgccagcggccgccttctcgaagctcgccttcagcgcc

SEQ ID NO: 41237 - DNA, 525 bp, Macaca Mulatta
gtggctgtgggctctgctgtgggacacacactgggtcatgccattactgggggcttcagtggatgaagtaatgctgagcctgcgagtcctgacatcacttaccaggagccacagggaacccagctggcacagcagcagcagccttgcttctatgagatcaaacagtttctggagtgtgcccagaaccagggtgacatcaagctctgtgagggtttcaatgaggtgctgaaacagtgccgacttgcaaacggattggcctaatcaagaagttcaacctggagagatggaaaatcagctctcataccttaagttaatttagtgtaaaaatagaattgatagtgaaggtataaagtgtaaccgtcagttaaacctctcctgtcattcctcgcttccttcagaactgaaatggaagggggtgtgttcctactctgtagaatttgggactgggcaaaatgtgttacctccttaaactagctgttatgattttattctttgtgagttaattagaatgaaatcattttcttc

SEQ ID NO: 41238 - DNA, 793 bp, Macaca Mulatta
  misc_feature (1)...(793): n = A,T,C or G
gaaggcaagagtgtggcaaaaaaaccccctttccagtggggagaacattattttttccattcaaaataacccggggtggcaagcgggatccagagggggtatgaaaggtagaagctgttatgagtgtggatccaggaatgatagggagggggtgaaacctgcctgggctttctgggtcagggtggggacttggagaacttttctgtctagctaaaggattgtaaacacaccagtcagcgctctgtgtctagctaaaggtttgtaaacacaccaattagcactctgtaaaaatggaccaatcagcactctgtaaaatggaccaatcagcaggatatgggcggggccaaataaggtaagaaaagctggccacctttgccaccactggcaacatgctggggtacccttccacactgtgaaagctttgttctttggctcttcacaataaattctgctgctgctccttgctctttgggtccgcactacctttatgagctgtaacactcactgggaaggtctgcggcttggctcctgaggtcagcgagaacacgaacccaccaggaggaacaagcaactccagacgcgcctcctgtagtcccaannnnnnnnnnnnnnnnnnnncgnnnnnnnnnnnnnnntgagaggtggaggctacagtgagccatggtcacacaactacactccaacatgagagagagagagggagaccctagttccacatggctggggaaggcctcataatcatggcagaaggcaaatgaggagtaaagtcacatcttacatggtggcaggcccc

SEQ ID NO: 41239 - DNA, 627 bp, Macaca Mulatta
  misc_feature (1)...(627): n = A,T,C or G
tccactgaaatgaaaggtcacaagttctatgttccctatcaaatgtgtaaagcaaatacactacatacgaaaacaacaaagtacagtcgtttgattatatagagtcatgtgctgcataacaacgattccatcaatgatggaccacatataccatgatggtcccatacgattataccatatttttactgtaccttttctatgtctaaaatgtttggatacagaaataccattgtgttacaactgcctacagtgttcagtacagtaacatgctgtacaggtttgcggcccaggagcaataggctagaccatatatcctaggtgggtagaggccgtaccatctaggtttgtgttaaatacactctgtgacgttcacacaatgacaaaataacctaaggatgcatttctctgaatgtttccctcatcattaagtggggcatgannnnnnnnnnnnnnnnnnnaaagaaataagaccctactgtaatacaagtcggcagaatctaacagctactaataattaatgtaatccacaagtcaaaattttttcatgcatcnnnnnnnnnnnnnnnnnnnnnnnnttcgtatgtgtttgcatccatttctgaattncaaggaanggtatgtagagtc

SEQ ID NO: 41240 - DNA, 1983 bp, Macaca Mulatta
  misc_feature (1)...(1983): n = A,T,C or G
ggtactagtaaaacaattggataatatcttggctgctgtacatgatgtgcttaatgaaagnagtagcaaattgcttcaggagttgagacaggagggagcttgctgtcttggccttctttgtgcttctctgagctatgaggccgagaagatcttcaagtggatttttagcaaatttagctcatctgcaaaagatgaagttaaactcctctacttatgtgccacctacaaagcactagagactgtaggagaaaagaaagccttttcatctgtaatgcagnnnnnagatcttcaagtggatttttagcaaatttagctcatctgcaaaagatgaagttaaactcctctacttatgtgccacctacaaagcactagagactgtaggagaaaagaaagccttttcatctgtaatgcagnnnnnnnnnnnnnnnnnnnnnnnnnnnnnnnnnnnnnnnnnnnnnnnnnnnnnnnnnnnnnnnnnnnnnnnnnnnnnnnnnnnnnnnnnnnnnnnnnnnnnnnnnnnnnnnnnnnnnnnnnnnnnnnnnnnnnnnnnnnnnnnnnnnnnnnnnnnnnnnnnnnnnnnnnnnnnnnnnnnnnnnnnnnnnnnnnnnnnnnnnnnnnnnnnnnnnnnnnnnnnnnnnnnnnnnnnnnnnnnnnnnnnnnnnnnnnnnnnnnnnnnnnnnnnnnnnnnnnnnnnnnnnnnnnnnnnnnnnnnnnnnnnnnnnnnnnnnnnnnnnnnnnnnnnnnnnnnnnnnnnnnnnnnnnnnnnnnnnnnnnnnnnnnnnnnnnnnnnnnnnnnnnnnnnnnnnnnnnnnnnnnnnnnnnnnnnnnnnnnnnnnnnnnnnnnnnnnnnnnnnnnnnnnnnnnnnnnnnnnnnnnnnnnnnnnnnnnnnnnnnnnnnnnnnnnnnnnnnnnnnnnnnnnnnnnnnnnnnnnnnnnnnnnnnnnnnnnnnnnnnnnnnnnnnnnnnnnnnnnnnnnnnnnnnnnnnnnnnnnnnnnnnnnnnnnnnnnnnnnnnnnnnnnnnnnnnnnnnnnnnnnnnnnnnnnnnnnnnnnnnnnnnnnnnnnnnnnnnnnnnnnnnnnnnnnnnnnnnnnnnnnnnnnnnnnnnnnnnnnnnnnnnnnnnnnnnnnnnnnnnnnnnnnnnnnnnnnnnnnnnnnnnnnnnnnnnnnnnnnnnnnnnnnnnnnnnnnnnnnnnnnnnnnnnnnnnnnaggttgttgctgtagcccatgctgtttatcaagcagtgctcagcttgaagaatattcctgttttggagactgcctataagttaatattgggagaaatgacttgtgccctaaacaacctcctacatagtctgcaacttcctgaggcctgttctgaaataaaacatgaggcttttaagaatcatgtgttcaatgtagacaatgcaaaatttgtagttatatttgacctcagtgccctgactacaatcggaaatgccaaaaactcngagtctttaattgtaacgactttgttttatccacagttaaaccttttctcattacatatttatgtatttcactatcatgtcaacatgtctgcagaatcactgtnnnnnnnnnnnnnnnnnnnnnnnnnnnnnnnnnnnnnnnnnnnnnnnnnnnnnnnnnnnnnnnnnnnnnnnnnnnnnnnnnnnnnnnnnnnnnnnnnnnnnnnnnnnnnnnnnnnnnnnnnnnnntttttttttctagaaattgtgttaagaatatctcgtatttcctctagcatgcttatagaaattgtcagtgtttcttacagttcaaatttgtatagtggttttaaaatgcagtctcttttttcttcccgtggcgcttttttcataaatgtctagtgaagttagttcttatacatggtcttatattttggctgtctcttttccctaggaacattcatacaggttgaatattccttatatgaaatacttgggactggaagtgttttagatttcggattttggaatac

SEQ ID NO: 41241 - DNA, 644 bp, Macaca Mulatta
atttaaagttatcttaaagaaatgaataaatgagaatagctgatagaatttctaaaaaggaaattaatgaagggtgctgtgctactagatattaaaaatgtatgtatcagaaaaacacaataataaaagtagtttgtttttattgtaagaaactaaagacagatttcttgagaaaaacagccacaaagcacatttgagaatatgtaagaatttaaagtgtgacaaaggatgaatcatgtatcaatgagaaagggatttattctcccattaccaaagtaaatccacatggattagagagattacataaaacaacaaaatatattgtaaaaattaaaagaaaagtaaatatttagttaacctcatgtttgtccaacaaatattcctctagaactgattatgtaccaggtactgtgataagttttgaaatcaactgtggagaagatgggcttcgccactactcttaagatgtacagtgtgtgagtgtgtgcgagtgtgagtgtgtatgtgtgtatatgcgcgtgttgggggtgggggaagattatttagccacacacacagacagtcttaggtgatgttatggaaagaaactctttgctagtttgaacacacagtagggctcataactagcctggggaggaaggagt

SEQ ID NO: 41242 - DNA, 783 bp, Macaca Mulatta
  misc_feature (1)...(783): n = A,T,C or G
naaaaggaaaaatatcccctatgtggactgggggttaatatttgggaaaaaggaaaaaggaaggtttttaatttgggcaaaagggtttttggctgtatgggggaaggcataagtgggttttctaacttttgggggagggtgtgaggaaagctttccatttattgttggaagacaaagcagggggagagacctctcacatggtgggagtaggagcaagagatagacgggggagttgctacaatacttttaaatgaccagaccatgtgagaactcacgattgtgagggcagtaccaaggagatggtactaaaccattcatgagaaactgcccccatgatccagtcacctcccatcaggccccacctccaacattggggattacaatttgacatgagatttgtgtggggacgtagatccaagccttatcaggcagagaattgaggacaaattctattttgttaaactgtatgaaatttctgacatttagccatttttgaaatgaatatttttataatttataatctataatatgagtcacagaatagaaacctgaaaaagagttggggtaaaggtcagtggaacagagactatcaagtgaatgactttttggggtattagactttattcatatgaatgttgaacttaaatatgttttgataaaagaagggactcgactaagattgannnnnnnnnnnnnnnnnnnnntatgacttaaccaactgacatgagtatcaagagggatattttaatacaagatgaaggaacaatatagaaatgacacccc

SEQ ID NO: 41243 - DNA, 759 bp, Macaca Mulatta
gggaaaaaccgaggaggacctgacataagaggcttctcctgtcaaattgggggtagtctgagcatcatgtaaactaatggtggtattgatgtaagtgcagaataccaaagaaaccctcactcaatagtaatagtcacagtaaggaaaggggaagtgggcaagaagcaaaagctcaggtggacagaagaatgccagctgacgaatgcagaaataataagatgagaaagtcagcagtttgcagcccctgatacaataattaattcaaacaaggatcacttgtggatgtcagatcactgaataaaaggatgtttgagaataggaaatgcaatctgacagtatttcccccacatgttacttactaattaattatataggggggaaggtgccctgataaggaagttctggtgaataccccttatctagaggatcagagttagtgtttcctgtaaccagacagctaacatgttccttctggtgcaatgcagtgaaaagtacacaacatcctttgttcagactctgccaaaaatgtttaacctgagtctgataatcagaaaacagagaagttagaacgtagggcattctccacagctgctgaccaggactccaaaaatgaaaaggtcatgtaaggccaaagccaaaaaggaagaagagcgttctagattggagtagactaaagagacatgacaatgcagtgtaccagccttgactgggccccagattttttaaaaataatatagctctcaggacatttgggggata

SEQ ID NO: 41244 - DNA, 925 bp, Macaca Mulatta
  misc_feature (1)...(925): n = A,T,C or G
caggaaaacagaagatcgattttacctacagtgctgtaatttcagcacatgtgggctccgtgtaaccaccacgataaccttccatcannnnnnnnnnnnnnnnnnnnnnnnnnnnnnnnnnnnnnnnnnnnnnnnnnnnnnnnnnnnnnntggtgaccactgatctatcttccaacccatagtgtttttcagggaatgtcacataaacagaagccgaccatgggtcacctttctggcgcctttctctctgcacaaagtctttgtcctcatgaagctgtcaagtgccaaatgcttgtcccttttccctgctgggtaataatcccggtgccacccttgctattggttgacgcacgtctggctgcttttcgctggctgtgagcggagttgctagggacattgccacggggctgtgagcggagttttctctctccggtgaccctgagctgcgcctttctcagacacccgcctccggaggcctcaggcgctctgcggaggttcttgggggaggaggtgggcgttcccgttatttcagcggcgctgcccttggacctgcgggagggaccgtgggacccgagatatccctgcctggcctccgctccctacccgggggtgggtctcgcccacccaacctcgggtaaggacgcttctggaaggannnnnnnnnnnnnnnnnnnnnnnnnnnnnnnnnnnnnnnnnnnnnnnnnnnnnnnnnnnnnnnnnnnnnnnnnnnnnnnnnnnnnnnnnnnnnnnnnnnnnnnnnnnnnnnnnnnnnnnnnnnnnnnnnnnnnnnnnnnnnnnnnnnnnnnnnnnnnnnnnnnnnnnnngccctccctggctgcagctggacccggctgcgcgggacgcggggccgccttcccggggatcgccagggaccacccggcgcgttccctggaatccgcacccc

SEQ ID NO: 41245 - DNA, 765 bp, Macaca Mulatta
  misc_feature (1)...(765): n = A,T,C or G
ggcattcatgtggtgactatcaagaaatggcatctgtagagagggggaggcatcatttagaaaccactgccatctatatcccagggatacgtagaggaattatgcacagttcatccaagagcgtaccctgtggaggcagaaaaggacttgcaaggcctcttgaggcctgtgataaatgctgttaaggagatccaggtaggggactggcaaagggcattctgatttgctatggattgcttgttccaaatacattccttccttgttttggaatgccgcaggcttgtgaagggtgactggcagcgggagagggagctatcagcaagagaagtttgaccacaggaagatgctgttgctgagcagttgactggtctccgtgcgtctggtccacccctgccgcttacttttcacagctgtgagagtggtgttcaaagatacagattgaatcatgttccttctctacctagactctttgtgtgttgctccttcctgccctcagatgcttactgagcctcagaggccaacagcaccacagttctctgcaggctttggagtgagaggttctgagtctcagtccctaccccaccatgttaactgttgagcaacttcacacgagtcactgctttccagtgccccagctgccttggtaagacgacatcangatgcctagcttatcggactattgggcattaaagtacatttgcacagggtctggcatggcataagcattcagcattggccgttgctattttctggccctgcagcctc

SEQ ID NO: 41246 - DNA, 727 bp, Macaca Mulatta
  misc_feature (1)...(727): n = A,T,C or G
gggaaaaaaacgatacgatattggatcttacagatcttctaataaaatcttagcaatcttctacgtaaaaagatgaaagaatgcaaacaatttgaatacactttaaagaggttcacaaccatctaaattaccaactgaggtttatggatctgaaattaaagaccttaatatctaccattgccagttgctgcaatcaccctcatgatactatctcaagaaataaaatctaatactgcaaatagttaaagttagaaaaataaggtctttatttctaagactgctgtaaaactcccagaagaatggaaagggtcacccccaaacgtatacattccccagcttctcagtactaacacctaccacctgtgaactgagacatttccagtcactgatccaaactaaactgtctcaggaaatcctctaatgggacttagttaagtctcctcattttagttataactactggtctcctagttctcttttcaaatctgcttccttgccagtcaggtcaggggcttgtcatcagtggacttcaaattccaactctcacacccctcataagccattcttttattttggttcagttcataaggttaggcttttgctttggtcttgacatcttttatcatacacctaaattgagcttcgattattctccagacctacagtcccagaaataagatccangctgaaccagccctttcatcccagaatatgcccaggtcaaggg

SEQ ID NO: 41247 - DNA, 325 bp, Macaca Mulatta
tagtttgattgtgttttacatttataagcctgtttgggtactctgattacttgttagaagagttgtaaggttaaataatccacattattacagattgtctgacttttaagaccagacaagaagattgaagctctaagtgcctgaaaaccgttttctacagagtagaaaaaagaaatgagaatgaaacatagacctggtagggcaagcttcctgatggaaatgctgggaagaaattagtgtctggggtgcaggctggactgtacctttgttgctttatattagattctttaatgcatccaatatgctttcatttaatggacctagc

SEQ ID NO: 41248 - DNA, 642 bp, Macaca Mulatta
gcagtcttgtgaggcagcagctttggcactaagagcaattacttactgttggaaatcctggtgaatgctgcataggagatgtacaggcagcacaagccatgtaaaaagggctcagttctaggctgaaaagtcaggaaggcttctctaaagaaaaagtagggaaggcaaagagggggatggggaaaactgttccatgcaaaggaaactgcctgtatgggccagaacagagcatgcactccaaggaacatgaaaggctcctgtggctgatggagagagatgcgtggcaggtgacacagcttactgttggcaacggtgacaatgctgatctagcatcagttgtgcccaaacaatgattcttctcctaccctcctaggatcaagagtttggatccctaaaaggtcgggcaaggctgaggtgcagttagtcattctccatctttccttaacttcacagtgtcctaattgctttctccacctctagcattgcccctcttaaattcatccttcagccagctttaagagaggttgtcctgaagggcagctgtaagcacgttaccttcctgcttaaaggccttctgatggcacacccatgttacagcagcactgttcacaataggaaaaggtaactcaatgtcatcaaaga

SEQ ID NO: 41249 - DNA, 742 bp, Macaca Mulatta
agaccacctaacgtgccagtcatcactggtagcaaagacttacagaatgtcagcatcacactgtgcatcctcttccggcctgtcgctagccagcttccttgcatcttcaccagcatcagagaggactatgatgaacgtgtgctgccatccattgttaccaagatcttcaagtcagtggtgtcttgctttgatgctggagaactaatcacccacagagagctgctctccaggcaggtgagtgacaagtttacggagccagcagccacctttgggctcatcctggacgatgtgtccttgacacatccgatcttccagaaggacttcacagaagcagtggaaaccaaagaaggggctcagcaggaagcagagagggccagattcgtggtggaaaaggctgagcagcagaaaatggcaaccatcatctctgctgagggtgactccatggcagccaagctggtccccaactcactggccaccgcaggggaccacctgatcgagctgagcaagctggaagctgcggaggacatcgcgtaccagctctcacgctctgggaacatcatctacctgcctcctccagctgccccagtgagggcccaccctgcctgtacctctgcggggactaggccacagccttgatgattcttaacaccaccttccttctgcccctatcccagaaatcactgtgaaatttcatcattggcttaaagcgaaggaaataaaggtaaaatcactttacatctct

SEQ ID NO: 41250 - DNA, 3689 bp, Macaca Mulatta
  misc_feature (1)...(3689): n = A,T,C or G
tgtatagctgaacttttatatgtttctcgccagcccctctcctccctcccatctctagcctctgtccagtttaatttgattcgtcactgcagtaccttaagaggtgactcttacgaatgcatcccctcttgattcctcagctggttcatctttgaggttatttgcaaaaagaaatggaggttctcgagggcccccgttgcgagcactctggtgcctggctccccgcttaggaagcaatggggtgcgcagagcagcaggcaggnnnnnnnnnnnnnnnnnnnnagttgggttccagctcttggcctgatgagcacagggtgcctacaggcagcccatgannnnnnnnnnnnnnnnnnnnnnnnnnnnnnnnnnnnnnnnnnnnnnnnnnnnnnnnnnnnnnnnnnnnnnnnnnnnnnnnnnnnnnnnnnnnnnnnnnnnnnnnnnnnnnnnnnnnnnnnnnnnnnnnnnnnnnnnnnnnnnnnnnnnnnnnnnnnnnnnnnnnnnnnnnnnnnnnnnnnnnnnnnnnnnnnnnnnnnnnnnnnnnnnnnnnnnnnnnnnnnnnnnnnnnnnnnnnnnnnnnnnnnnnnnnnnnnnnnnnnnnnnnnnnnnnnnnnnnnnnnnnnnnnnnnnnnnnnnnnnnnnnnnnnnnnnnnnnnnnnnnnnnnnnnnnnnnnnnnnnnnnnnnnnnnnnnnnnnnnnnnnnnnnnnnnnnnnnnnnnnnnnnnntgggagtttgtccttttcctcctttgcttcactcccagcagcagacccaggttgtcaggactggagggcctgagctaagcagcaggcatcagtctcatttgtcttcagatgaccggggcggggggcagggtgaggctgggtggagggctgaccaaggtccagagggcctgcgcagtctctgcaggggcagcttctccagccagaggcttgtgtgagccatcgtgtgctgggcttgtcgttgttaaataagaaacaaggaaatcactccagattctgtcattccaaggaaagggaaggggacagttcaagtttcttagctgttcttaggggtcactgagcgtctacctgtccttccagaggaggccagctcagaacaccgtgaggagagggccagggatgcaccgcccagaggctgccctcggcatctcatgggtgcaggacagcgctcgggcttgggctctaagctctgtgtctagtgtagaacatggggaaggagcatcttaggaactgctaaagtaacttcttactgctctcacaattctaaggaagtgggagaacggcctcctacaaacagtgcccaccccagagctgcctgggaaggagcagttttactgaaagctgctttactgttcacctgcatctttcagcagctcccctcctgccctcacctggtcttttccctcttcatccagagtctttacgctggagtcctttccccaggggctgtccacctgacagttccgggcattccctacctgagctgcgtgtctgctttcccttctcccactgcaagcggctgcttgtgnnnnnnnnnnnnnnnnnnnnnnnnnnnnnnnnnnnnnnnnnnnnnnnnnnnnnnnnnnnnnnnnnnnnnnnnnnnnnnnnnnnnnnnnnnnnnnnnnnnnnnnnnnnnnnnnnnnnnnnnnnnnnnnnnnnnnnnnnnnnnnnnnnnnnnnnnnnnnnnnnnnnnnnnnnnnnnnnnnnnnnnnnnnnnnnacccttcaggtgaacctggcatcagacccacagtacttgctgtttgannnnnnnnnnnnnnnnnnggtcacctgttctccagcccttttctcttacccggtatttccttccttccttctccccgaccccaaannnnnnnnnnnnnncactagaatttatttatatgtattgatgttgtaggtctannnnnnnnnnnngaagtaaatgtttcactgctctatttatatataatgtctgaattaattctgtgcaggaaaggccaggaaattgcatgtgaagttcggtgcagtcaccacctctgtgtgacctgagctgcagtctcttcgctgagatgcagattttaaatgagactgggggctgagggcaggcctcaggcctcccagcgccccaacccctccttggtctgattaaatgcagttcttagtgcagagacgttttaaggtgcaatatatctcttcctttcacgtggttttagagccaagctcaaggtagtaggacgtagggtcttattttgttttcaaacccccatcttcagagcgtagatacatgcagaggcttctgccaggataccacggggccttggtgggaacaggtggagaccagcgcttgccttttctgctgctgagtggggggtcagaacccactcacttttgcctgctcaagttgccctcttcccgatgctggcagctctgcctttgccatcgggggtgcggcccattgctcagcaaccagtggccttgcggtggtatttgtccactgtccgctagagtgggatgaagtccagagtgtgggtgtgcatctgaaatgctcatccacccactggggacttcaatgccagctgcattcggtttggttttcttcactgttggcttctcccnnnnnnnnnnnnnnnnnnnnnnnnnnnnnnnnnnnnnnnnnnnnnnnnnnnnnnnnnnnnnnnnnnnnnnnnnnnnnnnnnnnnnnnnnnnnnnnnnnnnnnnnnnnnnnnnnnnnnnnnnnnnnnnnnnnnnnnnnnnnnnnnnnnnnnnnnnnnnnnnnnnnnnnnnnnnnnnnnnnnnnnnnnnnnnnnnnnnnnnnnnnnnnnnnnnnnnnnnnnnnnnnnnnnnnnnnnnnnnnnnnnnnnnnnnnnnnnnnnnnnnnnnnnnnnnnnnnnnnnnnnnnnnnnnnnnnnnnnnnnnnnnnnnnnnnncctgctgcggcagcatggcagctctggtggagcctgctcccttgccatttggttcccctctgccaagtaactgcaggctgcccctcaaatcttcatttgtcccttttcacttcttgcagagcaagcctaggttagagggtctgctggaaatggcctttgaagaccaaggataccagagtgtgtgtgctctgtcatattctgtgatgaatgggaaacaggcttccagaaagccagctctcttctgaaatgtgacggacctaagcaggaagtcatccaggacaggagtggcttggtgttggagatggacgctgttgccctgccatgctccaccagggccaccagtgtatatctggctggtggtcttcgggcacgtgagacctgctcttcactgtctctaccccagttggtggcctccaggatggtagtggcacccccagagcccccatcttcagcatgttccggagcctcggagtggaaattcctgctaaggctctgtgtggacgcctttctcccatgatctaaaggggacactgtactcttaagcttttgacctcatgccttgtgtagtaaaaaaaaggatttgggggtttttgtttggttcctgagagggctgtnnnnnnnnnnnnnnnnnnnnnnnnnnnnnnnngcctttcctctttgtctttccatgtagaccagatatttgaaagggcagacgatggctagaggtgtaagagcagcttgtttagacgttatttcgggaaacttacctggatagggaaatggaatcgtggattca

SEQ ID NO: 41251 - DNA, 567 bp, Macaca Mulatta
aaagtgatgaagatagatatcaaaatggtgccgagagacgatgggaaaaatctagcagatactctgaacaatccagagaatcaaagaaaaatcaggaccagcgaagagaaaagtctccaacaaaacaaaaataattctacaaaatgacataaactggacatgccttatattcagttgaaacaaattattttttactttgattgacaaactttatagagaattcttgtataaagtactggtttgtatttgtaaatttaaaaaatgttttcactttaacatgttttataattgatacatctcaaggccctatacataaaattatttgaaaagattcactagaaagggatgtaagtcttgcttatattttgtgaataaaatgatcaaatgctcattgattcagtgatgttttttcaattgacaaaatatttttttgaattgtttaagaagctgttatagtgaattatcagtgcttttttgtttgtaactgaagaccaaaacaggtgaaccttttcagtttaacatttttgctttgttaatgagatgttatgaatatttttcaggtggtca

SEQ ID NO: 41252 - DNA, 371 bp, Macaca Mulatta
  misc_feature (1)...(371): n = A,T,C or G
ggtcgggggagcagccgtcctggctgtgggcatctggaccctggtggagaagagtggctacctcagcgtcctggcctccagcacctttgccgcctccgcctacatcctcatctttgcgggcgcacttgtcatggtgaccggcttcctgggcttcggtgccatcctccgggagcagaagggctgcctctccacnnnnnnnnnnnnnnnnnnnnnnnnnnnnnnnnnnnnnnnnnnnnnnnnnnnnnnnnnnnnnnnnnnnnnnnnnnnnnnnngatgaactgaagcagcacttgaaccagactctggctgacatttacgggcagcctggagccacgcagatcaccgcctcagtagaccggctccagcaggat

SEQ ID NO: 41253 - DNA, 806 bp, Macaca Mulatta
  misc_feature (1)...(806): n = A,T,C or G
ggctccgtttctttggagaaccctgatcaacagagagggcaaatttatgggttttttcccacnnnnnnnnnnnnnnnnnnnagcnnnnnnnnnnnnnnnnnnnnngagtcccgcctcccctggaggaagcgggcagtccacagggatgggcatcaaaggtgaggactcagatcacagggaaacgtgaaactcctggggaaagtttccaaacttgcagttatgttttgtttcctgcttgtttcacccacagatactagctttggaacttttttcctgatgaaatttcaaatattttgttatgtgcaatcttgaatgaagaggcagagtgttatattaagaggcaaccaatgtcattccatcttttcttactattggagacattacaaaaaagaaagctgaaaattggcaggtaggcagcctccgcaatacccctggattggctaaattctttctctctccaggccccagctggggaatgcctttcttgagggtgctgcagactctggtcaacagtgggatattcaactcagcatttctcctccaaagtcaatggaatatgacaaccaatttactgtcaaaatggagtgactgaagttaaagtgtaagttttaccaaacagcctctgtaacttttagaatttcagtgcatggttttattttgaaactaccctttggtttttcttaatttccggggggccctaacggcccatcccaagccacccnnnnnnnnnnnnnnnnnngattccgcctacctttttaatcccgggaatggccgcgggggaacatttattttttcggcaaagggga

SEQ ID NO: 41254 - DNA, 637 bp, Macaca Mulatta
tgtgctcacgggtgcggccccgaggagaaccagcccctcagccccggcctcctctctacaggtgcggaagatggcgcccgagtactacgaccacctgccgcagcaccactcgtgggtgaaggtgctctgggatttcgtgtttgaggactccctggggccctacgccagggtgaagcgggtgtacaggctggcaaaggatggcctgtgagcccggactgcctcctggtggcggtcatcgtcccccaccggccccttggcctcacgccccagcaccgaggggctgcatttccttcctgtaccctggactgctgcccttgtccccgaggagtgtcctgggcagccacgcctggagacagcagtgtgggcttcagggctccacctgcacgtggagttgccctggaccttcagcgtggccctccctgtctgggcctcaccaggtgagacctggccctgccccactgtgacctgcgtgctctgagcccacggtccccacggagctgacttctctgaggtgcctgtgccctacattaaacccagcgtttgtttcacagcccgtggactgtgctctgagggggtggtctgggcttgagcctggccacagggaatggggcgctaggccaccccaatgggtggagcc

SEQ ID NO: 41255 - DNA, 754 bp, Macaca Mulatta
  misc_feature (1)...(754): n = A,T,C or G
aggtggagctgctagagctgcaggagttgctgttgcggctggtgctgaccgcaacaaagggcacagaaaattcctggccactgcccagagccctgataatgagcccggtccaggagccccacccccccaggagcttggggctgcccacaagcatggngatctttgtgagctgagccccagcgacagcgccgggactgggcaaggagaggccacggaggggtctccccacgacaaccccactgcacagcccatcgcgcaggagcaccaggagcaccaggagcacccaggcttgggcagcaaccgctgcatgccgttcttttgctgggcttggctgcggagaagaaggagatgaacatcaccgtcatcaaagagctgatcaagacattttttaaaaagaaagttgtagggttgatctcctacacaattcatttacttcattcgaatgttagagctattcatgtttatttgggtttctaatttatactttaagtttatttgtaaaaagttaaaagagattgggtctctgtggccttctctgaggttcactctggcatcctttagcatttttcgtttttaatttcataattgtaggtcattagcatggatatcgagttcgcccttatggggggggagttcaaacacccaaagacccactggttggccaaaactgttctcgctggtttggaacaggcgtgcatgctttttttatgttattgcagcaggatgttcattacagaattcatataaaatttgc

SEQ ID NO: 41256 - DNA, 946 bp, Macaca Mulatta
  misc_feature (1)...(946): n = A,T,C or G
tacagcggtggtcccataagattataatacgatatttttacttgtaccttttgtatgttctaacacgttagatacacgaatacttaccattatgttacagttgcctacagtgttcaatacagtaacatgctgtacaagtttgtaaccaaggagaaacagcctataccgtacatagcttaggtttgtgtaagtacactccgtgttgttcacacaaagacataatcacctagtgatgcatttctcaggatgtaactccattgttaagcaacgcatgtactaaaattaactagattttaaaacttctgatttaggaataagatgnnnnnnnnnnnnnnnnnnnnnnnnnagaagcaatcgagtgggtgtaaattagatagataagaaattaacacattcctatctgtccttccagttcgcaacaaagatatgagttggcctgaggagatgtcttttatagcaaatagtagtaaaatagatagacacaagggtaagtctccagtattattttttaaagagattattttaaatgtnnnnnnnnnnnnnnnnnnnnnnaactattaaagtgctaataacttttggttttctagttcaaaagtaattaggcccctgnnnnnnnnnnnnnnnnnnngaagcagcatttgatgttggcaaacccaccatcaaattattttccagatttctaactctgcaattaaataatttacatgttttaaaagacatactagatagaagaagaattgtttgaattcttttgaaaaatcatagcaattaaaaagaataattgctgcttctgggttacaaatgagcatggatcatcactgttaccagacactccatgaaaagccttctctagcatttcaaagacctgctagagaattattagcaccatttagctgattatgagagttataaaaaatcttttcattgaatgtaattaactgtttgt

SEQ ID NO: 41257 - DNA, 833 bp, Macaca Mulatta
  misc_feature (1)...(833): n = A,T,C or G
gggataaactagattcttagaagccatgccagggatggaagatacacagctctggagcaactgtgctcctgcctccctctctctctgtcacccttggtagacatctattgatcaccatcacattctattctgttgaaaccaacgaatccttcttaacacaatgctccaggttagcacaaccaccaagcaacttgggttgatattctcctccccattcctctttactttcctcacctgtgtcttctaaaacctgtatctggggagttgaatccaaaattccaggcagaactcgatggatatactcacgaagcctctccctactcctctcacacctactgcctgaaccctgaaaccctgaacccagggggttatttttggaaacttgagtctcaaaacaagtttggctatctgtgtgctccctgaaagctgatgggaaccttgacaaagctgtaacctgggcttttaatttccccatcttggaaccatttaatggccaggaaccccaattaaaaatttttcccttattggcctttttggttggggcccccattttagggccaaagaaggtggtggggaaaccaaaaatttctccttcccggcgnnnnnnnnnnnnnnnnnnnnnncccccccaatttcctaaaaaacccctaaaaagggttttaaggggtccctctcccggggggtgggccaaaaacccccctccaaaggggcccctcccaattgttttggaacaaaggtttcccaactnnnnnnnnnnnnnnnnnnnnnnnnnnnnnnccaaaattttcttttttggggcccccttttttgtgggtggggggggcgtttttttt

SEQ ID NO: 41258 - DNA, 598 bp, Macaca Mulatta
  misc_feature (1)...(598): n = A,T,C or G
ttaatggcttctaatttgagatgtaaaccattcctgtttacagttaatcacgggaagacttcttgaaanctgacgaaaannnnnnnnnnnntctttcataaattactatgtaattactggttttatatgctaaatcatacatctgtgttttgctgatgaggataagggccttgttttttaaaaaacgaatatgggtgaaattaatggaaacaatggaaaaagccatttgttagaaaacaaggacaccaaatgatatttatctccagatgatttaagcactttccaaaaagacttgagagttcaatattttttaaggattgcattttaaagggaatttggatagtcgttcttttgttaacatttaacaaaagattatccttaaaaatgttagataataaactgcattttatggatctggtttaaaaaggttatttgcggggaaaagaccaacaagctgtgttgtggttttctagattgtttcctcaagccttgtaacctcctagctccttacattcctagtgggaaatagttgctgcaaatgccttgggctgcactgcaagcccaagtgtgcaacaccggtgtgatgccccacactaaa

SEQ ID NO: 41259 - DNA, 610 bp, Macaca Mulatta
  misc_feature (1)...(610): n = A,T,C or G
ggggttaccctctgtgacaatggcatgctcacctattattcaagcttaggtgattatatgaagaatattcacaaaaaagagattgacctgcgaacatctaccatcgaagtcccaggaaagaggccacccctagccacattggcctgtgcgcccatttccagctctaaaggcaattgcgtatccaaggacatgaacagtctatgtacctcagccaattcagacaccggactgggtgactccatatgctccagccccgatatctccagcaccaccagccccaagctcaacccacccccctcttctcatgccaacaaaaagaaacaccaaaggaagaaatgcaccaacaactttaaaagacatggcctgtctggcactgctgaaaaaaagccgaaaactttatcattgtgtccctccccggccaaacctggcactttgagccatgactatgaggaaccggatgcctgggtcaaccctttgaaaccaaattggggccagcctgcattcggcaaaacaacaaaaacaatttcggctgctttaactacccaaaattttttctaaaattttgtctttacccctttcctcgnnnnnnnnnnnnnnnnnnnnnnnnnnn

SEQ ID NO: 41260 - DNA, 147 bp, Macaca Mulatta
cacccggtccccaaagacccgagaggtatccagtccccagccttcacccccggaagagagcttagagccccccaagaagcgaacatccctcagcccagcggagatactggaggagaaggaggcggaagtggccaagctgcaagatga

SEQ ID NO: 41261 - DNA, 716 bp, Macaca Mulatta
  misc_feature (1)...(716): n = A,T,C or G
cacaaggaattttgggaagtcagtttctatcacatgacaataatgttatacctgcaaattgcatttgcacttgctgaccctcccccaaacaaataggagcttcacaaatgggaggaagagaaaagacaatgctgtgtgtggttttaaggtggagaaacaatctgggaagggacctggacttgcacaagttgcacaggtagggctggatgggatggtctagcaacattctttcagaagccatcactgattgtcccctagatgatcatggggacacacccaggcagaggacccacttcaagggtcaggttagcccagtgtagcctgtcctgggtcagtttgaggccaagtacacaggaggggtcagtgctcttgctccagggccagctggggcctgagtcatagcaggaccttgaagccagaagtttaagggcaagtggtgcccacagttgtaagacaatgacaggtggtggctgcctccccaccagtgcctgtccccagggcaggtcctaaggctgtgggggctgaaattagggccttgtgagtgcctgggggagcacagggctgttctggcttcaggggcctttggagctgggaccacaagctacttcgaagcttcccatgggaccccacatcggtatccagggcctgttctangtgctgaggcagattgtgaaaactagagctgtccactccagccccttccgataggtcccact

SEQ ID NO: 41262 - DNA, 793 bp, Macaca Mulatta
  misc_feature (1)...(793): n = A,T,C or G
ggggcctgccaccatgtaagatgtgactttactcctcatttgccttctgccatgattatgaggccttccccagccatgtggaactagggtctccctctctctctctcatgttggagtgtagttgtgtgaccatggctcactgtagcctccacctctcannnnnnnnnnnnnnncgnnnnnnnnnnnnnnnnnnnnttgggactacaggaggcgcgtctggagttgcttgttcctcctggtgggttcgtgttctcgctgacctcaggagccaagccgcagaccttcccagtgagtgttacagctcataaaggtagtgcggacccaaagagcaaggagcagcagcagaatttattgtgaagagccaaagaacaaagctttcacagtgtggaagggtaccccagcatgttgccagtggtggcaaaggtggccagcttttcttaccttatttggccccgcccatatcctgctgattggtccattttacagagtgctgattggtccatttttacagagtgctaattggtgtgtttacaaacctttagctagacacagagcgctgactggtgtgtttacaatcctttagctagacagaaaagttctccaagtccccaccctgacccagaaagcccaggcaggtttcaccccctccctatcattcctggatccacactcataacagcttctacctttcataccccctctggatcccgcttgccaccccgggttattttgaatggaaaaaataatgttctccccactggaaagggggtttttttgccacactcttgccttc

SEQ ID NO: 41263 - DNA, 630 bp, Macaca Mulatta
gtagctaaatataaaatgtctcttctctaaaatatccttaacttcttgtataaagtatccttaaggtcaaaggatacatccttagtttaaaaataatatcttttttagaaagacatctaagtaaatgtggatataaaacttaggtgtttgacattgactgaaagtactggattttttttcccttatgtaatagttgaaatatttgagtaaaagacaggtcaactaatgggtatgttttaactttagtttgactttgagactatgccattggtgggagagattgttttgcagaagttgcaaaagatccctacagactgtgtttttgaattctgacctgaattggacaagagttcactgtcagaatgatatgcataatacttttgaaatatgcaaactctttggaggctgttttttctcttattataagacatccatgttgtttccttttccttagaatttacatctctacgtttggggcaggtttattcattcatttgtgcattaattcatcagatacttagtaagtactttctaagtgtgccatacataatcctagaggtcaggggattcaacgattaataagatttggtatttatttctggaaagctccagtctagtcctgacaacagt

SEQ ID NO: 41264 - DNA, 1465 bp, Macaca Mulatta
  misc_feature (1)...(1465): n = A,T,C or G
gccgccccaaccaccgtccccgccgccatcaccgccaccatcacctccgccgctgcctccttgggggcctcctccttcaccgcccccttagccacctctacacactctgggccttctgtccgggagaagaagctgtaatcgtcttcctgtgggcccggggcgcagnnnnnnnnnnnnnnnnnnnnnnnnnnnnnnnnnnnnnnnnnnnnnnnnnnacccgggcccgcgggggtggcggtcccatcaacccggccttgttgccccctggcgaccctcagctcatcgctctcatcttggagcagctcaagagccggggcctttttgacagcttctgccgggactgccaggccgacgaggacaccaagccagcttcccacagcctgagccagaaagcggataattttgtgtcagcacatctggacaagcaggaatggaatccttcagtgaacgaaaaccaactgcgcgatggtctgaggcagagtgtgttcagccagagaggtcggaagctggagtgnnnnnnnnnnnnnnnnnnnnnnnnnnnnnnnnnnnnnnnnnnnnnnnnnnnnnnnnnnnnnnnnnnnnnnnnnnnnnnnnnnnnnnnnnnnnnnnnnnnnnnnnnnnnnnnnnnnnnnnnnnnnnnnnnnnnnnnnnnnnnnnnnnnnnnnnnnnnnnnnnnnnnnnnnnnnnnnnnnnnnnnnnnnnnnnnnnnnnnnnnnnnnnnnnnnnnnnnnnnnnnnnnnnnnnnnnnnnnnnnnnnnnnnnnnnnnnnnnnnnnnnnnnnnnnnnnnnnnnnnnnnnnnnnnnnnnnnnnnnnnnnnnnnnnnnnnnnnnnnnnnnnnnnnnnnnnnnnnnnnnnnnnnnnnnnnnnnnnnnnnnnnnnnnnnnnnnnnnnnnnnnnnnnnnnnnnnnnnnnnnnnnnnnnnnnnnnnnnnnnnnnnnnnnnnnnnnnnnnnnnnnnnnnnnnnnnnnnnnnnnnnnnnnnnnnnnnnnnnnnnnnnnnnnnnctgcacatagactttagggtttgtgctctgggataaacgaaagctacagcgagaggacataatcaatcctaaagacaatttcaaagaacaatgacagtcaaggttaactgggagtagtatttgacagtatttatttgatattgtctctcagagttgcaaactagattgtacacaacagcgtcaaatagctttaaagttgtgaccttcttgtacatgaatcttctagccagtttcctttcctttgtaagaggtaacaaaacatgaaaccctagaatgagtgagaagttcagacattaggtataaggaaactcatttgcagactctctgtccaaggctgcttcctgtcttgcaggggctagtgagtcttgagtgtgtttatgttattctcacatttgtgtttttttagaaaagtggatggtcaataaattgcttatctttcaacagcaacaacaaaaaagaaa

SEQ ID NO: 41265 - DNA, 603 bp, Macaca Mulatta
tgtgtcaccatgcctttgtccttttgggtgcttctgtgtttgtttgtggccgcgtttctcttttggacaggggtgactttgtgcctgacagcttctgtgtgagcgcgcgcgcgagtgtgcatgtcggtgagctgggagggtgtgtctcagtgtctatagctgtggttccgtataagtctgagcatgtctgccggggtgtatttgtgcctgtatgtgcgtgccttggtgggcactctcgtttctctccgaatgtggggcagtgccggtgtgtgctgccctctgccctgagacctcaggccgcgcaggcgcccagggcaggcaggtagcggccacagaagagccaaaagctgctgggttggctggtaagcacgccagctccagctttagccctctggggccagccagggtagccgggaaggagtggtggcccgcccgccggggagcagctgggcccctcccgggccagcccgagaagagggagggcgagaggaggggaggaaaggggatgggtgcctcgccccttcgggcctgccggcgtgccattggccgaaagttcccttacgtcacggcgagggcagttcccctaaagtcctgtgcacataa

SEQ ID NO: 41266 - DNA, 691 bp, Macaca Mulatta
  misc_feature (1)...(691): n = A,T,C or G
tatagcaggnatcttagctagatgtctcatgaaccccgttaagttctacagaaagtctgcatacaggagcctttacaagattatacagggttgcagactgggtgactgaccggacttgttggggtcctaggatgagttgacccctggctgcaaattagagtacagctaagtgtgcgggtggcagtggaggggacgaaaattgagcctgcctgcctgtgctgtgtcatgtgtggctttatcagcccgaggaagggcaggcgtattctaatttgcacaaaggtgctgggtggactagtgacagctctgatgtactgcacataactggaatcagtgtgaacagaggaacttgctgtataaaggaatttcatggcaacaatgctggtaagggcaattagcctcgcttaaattgccttttttacacaccaactttttacatgaagggttggtttcacatgaatactatactgaaatcttgtgctcgcaagaatctagctgtgaccaagggctgcccagcggggggcttctcctggggaagtcaggaaggtttctgttgctaatataacatggaaacacatcagtgcactgggcctctctgaggtcagctcatctgtactcttgcaatatttaagttgttatcaacttcagtaacagaaaccccagttgggagttaacaaataactgattaccattc

SEQ ID NO: 41267 - DNA, 860 bp, Macaca Mulatta
  misc_feature (1)...(860): n = A,T,C or G
gccattgaaactatagctgactggttgtatactaagtgttcgttgatctaaaccacgatataagtcatcgagttttctgaaacttagttgtgtcaggaatgaaccacctgctcactgaaccatcttagtaaccagacagtgatgaagcatataattctaatgttggcacaggacattgctaacagtgcgtttaactgcaatattttaactacagtaatttttctgtttatttctctattcactcagtagaatttgtggttgaattccaccttcgctgccatagttttttttttaccacattcctaatggttttcaacctctatactgtagtagaaaattcatccaactactgaatttagttttagcataatactggatcaaattgtttgaattttcattcctgtcattnnnnnnnnnnnnnnnnnnnaacaaaactaaacaacaaaaccgtaggaaaaaaggaatggcttctttccaactagccaattaaaacgtcctaaagccttaggtttcttttaacatcttaatggttaattgaaaagggtacagaaactatcaaaatacttatccaatcaatggggggaagagctgtgtcttcagggacaggagagtgatgagaattttttaggatacgctattatgcgtcacacttaaaagcatttgaacctgatttttaaagaatgaagttttccacatatcgaagtatttaaaacatcttccatccacaaaaaattatctttaagttttgtaaatatcaagtaagtatagaagannnnnnnnnnnnnnnnnnncgnnnnnnnnnnnnnnnnctgcttttaatgttttctgacattttggtgaattattttgcccaggtcttt

SEQ ID NO: 41268 - DNA, 469 bp, Macaca Mulatta
actctactgctgtatatcttcgcatttatactggtgggagaactaaatgacctgaaaatctggaaatgaggagaaacagactaaagccacaggcagcagatgaatgaagagagagaagagtgctattagaacgcctccgtcaccacctgttgcgctgtcctgatgcttgtgctccccttcaagaggcagatggaacaaatctgggatggctggctcacttaggtggcctactgtgcactggtgaccaccctagtggccttggcaaacctggctggcatggcactgaccatcaccattcagagggactggatcgtgagctgacgggtgacaacagaggccggctggttgggatgaatgcaacagtccagcagaaggaccagatcatcaatatatttgctcccctgtctgtgggtcaagtgatgacatatacatctcatgtgatcagtagtagatatcaaacttggatgga

SEQ ID NO: 41269 - DNA, 432 bp, Macaca Mulatta
tgctggcaaaggggacgtcccccctaagagccccctgtccttcgagcaggagttaacccattcccccccttgtggggaacaagaaagctcagctggtggggatgcacacgactggatcccatcgagctggttgtcttctcgcctgccctgtgtcataaaatgggggtcccttactccattatcaaggggaaggcaagactgggacgtctagtccacaggaagacctgcaccactgtcaccttcacacaagtgaactcggaagacaaaggcgctttggctaagctggtggaagctatcaggaccaattacaacgacagatacgatgagatccgccgtcactggggaggcaatgtcctgggtcccaagtctgtggatggtatcgccaagctcgaaaaggcaaaggctaaagaacttgccactaaactgggttaa

SEQ ID NO: 41270 - DNA, 746 bp, Macaca Mulatta
  misc_feature (1)...(746): n = A,T,C or G
aaaanacaagtttaaaaatactttgtgagagcaacagtggagggctttgttttctgataattgctccaaaggagtattattataatttttaacaagtggtaagatacaactgttaaacagggttgactggcattttaattctacttcacagatatgttgggagatggtgatgtggtagaacacagtgtgttagtataaataaatcaactggaaaccattgtgaggataatcttagactcacaaagatcttgaggaagattctaggtcaaagatttgtcacagcaaggaatcaattattaaggaattagatgagaagcgatattctggagggaaaaaagaggcagatctgaggtctagcaggtggtttgtgagaagctggaaaggaagaaaagcaggggacctaaagactgaaaaatcttcacactttgaaatcttctgttcttaaaaagtaaagaacaaatatattgtgttcttgcagtgagccggaagctgaccccacagtgcagcccacattccctttctgtcttctctttccatccacaagcttccagcccacagttttctctaacaaaaatctcggatttattgccacacttcattcactgtacctcagatcagatttaaaataaaatctgaggccaggtgtggttnnnnnnnnnnnnnnnnnnnnnnnnnnnnnnnnnnnnnnnnnnnngatcgattaagccnnnnnnnnnnnnnnnnnnnnnnnnnnnnngctttttgcc

SEQ ID NO: 41271 - DNA, 486 bp, Macaca Mulatta
  misc_feature (1)...(486): n = A,T,C or G
gagagagcgagagagaaatccggttaaaatcagagtcggagggaggtttaaccaaagatcggttccgttcggattattccttaaaggggacgcgccattgtcaagagaacggagccaggggcccgagggcggggactggcggcgctggaggagcgaggcagctgtactaggactggggacgnnnnnnnnnnnnnnnnnnnnnnnnnnnnnnnnnnnnnnnnnnnnnnnnnnnnnnnnnnnnnnnnnnnnnnnnnnnnnnnnnnnnnnnnnnnnnnnnnnnnnnnnnnnnnnnnnnnnnnnnnnnnnnnnnnnnnnnnnnnnnnnnnnnnnnnnnnnnnnnnnnnnnnnnnnnnnnnnnnnnnnnnnnnnnnnnntattggtatcttggatgggtaacatttaaaagcttaattcctgaatccactcaagagtcataggattagccgatccaagttaccaccaggaaattactgtctcaagtgatac

SEQ ID NO: 41272 - DNA, 475 bp, Macaca Mulatta
actccagttccccactttaaatttaggcctatcgtcaccatccttcaggtcaaagctgtcattcccggactactggatccgcttcctcaccgcacacccggtgctccctgatgtggcccgcagctttagccccaagctgtggcctagttccaggtggcccagcggttgggagggggaggccgaaatactgggcgagctgtggactggccggacccgtgtgcctccacagggtctggagctggcagacagggagggccaggatcctggcagatggcctcgaaccacacccccggtccttgaagccacttcccaggtgatgtggaagccgctgttgttgccagaagccctgaagctggcccttggtgtgagcatgtggaaccggagcacccagatgttgttcagctcgggtgtgcctgaacaagaggacaaagaaggtagcacctttcctcccgttgagcaacaccccatccagaca

SEQ ID NO: 41273 - DNA, 148 bp, Macaca Mulatta
aggactggcaatacatgcaatcaaaaggttgctttttcttagaagaagatggtgaaatcattagtcatcagtacaggatgcaaatagctcagaggtccatggtttatctaacaattaagccattaaatctgagtcaagttgaaggcaa

SEQ ID NO: 41274 - DNA, 1421 bp, Macaca Mulatta
  misc_feature (1)...(1421): n = A,T,C or G
gatcttgcagacatctcaactttaatgaggactttccaacattccagactgctgtcctgcaatgaagctctgagtcatggtctgtggggctaaggtactggcaacagtgtgaaccccaggacaactaacctcactaaccttcactctaagcagaagcccagagtgagtctggcctgaaatcnnnnnnnnnnnnnnnnnnnnnntgatactatcaaaaccgtcaggtagaagaattatatcggaaagccagcttagcccccctgtgatcccggcccgcaggcctggattccgggtgtgctacatctgtggtcgagaatttgggtcccagtcaattgccattcatgaaccccagtgcttgcagaagtggcatattgaaaacagtaagttgcccaagcacttgaggaggccagaaccctccaaaccacagtctctgagcggcagtgggtcctacagtcttcaggcaagtaatgaggctgcatttcagagtgcccaggctcagctgctgccctgtgaatcctgtggccgcacattcttgccagataatcttcttgttcatcagagaagctgcaagccaaagggtgagggtgccagagcaccacaatcaaacagttctgatcatcttactggcctcaagaaagctcgtagcggaaccccagcccgaccaaggactgttatctgctacatttgtggtagggaatttggcaccctgtcccttcctattcatgagcccaaatgcctggaaaagtggaaaatagaaaatgaccggctccctgtggagctccaccagccactcccacggaagcctcagccccttccgactgcacagtccagccaagcgggaccaagtcaagctcagcttgtgtcctgcccaaattgtagcctaacctttacctcagaccgccttctggtacaccagagaagttgtaaaactcagcctcaggggccaaaagatcagaatttgaccttagggagtaaaggaggcctaaaagagtccactaattccaagcagcaaaggaacagggcagcacccagtgtaactgatagggtaattcatgccacacaagaggctttaggtgaacctggtggcaccctctgcctataggggaacgagagaaaactatccctagaatcagtcacctcaccccctagtattttttctatcaatgccttacatcagcctcaatgcagcctgttcaagttaactccctgtggaactccagggcctatatctctcttggctgaatagatataagaacatccttgcctgatgggttcatattcctcttcagttctgctgtctaaaagaagaagagatggacttctttcttccctgatccctgatacaaataatccccaggagactgtaatttgaaaatgagtcattaatgctgtgtctacatcacagagatataattcccatt

SEQ ID NO: 41275 - DNA, 438 bp, Macaca Mulatta
ggcttatttctttcatatgatgatatcggtgaggaatattggaatcaagatttaaatgttaaaatctgattttgttacacagggtgtcttcgtttgttttgtagcagacaagacctagacaccagacagacaacacgtgctcttctaagcagcagcattttaaaaggcatcttggttctcaaaagaaatcagaatatggatattcatagtgatgatctgttttctctaaaatcttaccgtattgtctgtatatggttgtaaattcaaatagaaagtaaaagattttggccctgattttgtatataggccactgctcctgatttcccaggtcttaggccgcctttgactgtttctccgtttgtttgtgggaggcgattccagacccaacgaaggcattctcgtgtcccccagggggctttattccttcacaaaacactt

SEQ ID NO: 41276 - DNA, 243 bp, Macaca Mulatta
gagacgggtactcactatattgtccaggctagagtgcagtggctattcacagatgcgaacacagcactctccagcctctcaccgcatagggcaggctgactcaaagtttcaaccctctaatcacatggtcagtctttctggtgaccagccccagctctgagtcatcccaccttttagcataagctcaggtgtgatcccatggcctcacaaataacaaagacactcctgttaccctggaaatgt

SEQ ID NO: 41277 - DNA, 235 bp, Macaca Mulatta
  misc_feature (1)...(235): n = A,T,C or G
gggggatgcgctgcggggtcctggtccccgtggcaccacagcagatgggtggtggtcagtcctcacaccgagatctcgtacgtggtcccacccacgccggacaccttcttaatcagcgtgtgctgtgtttggctggcagagggccctggggnnnnnnnnggagtgcctgccagggagggcaggccctggagtgtgactgacctgtgtgagtcactgctgaaccggggccccaggg

SEQ ID NO: 41278 - DNA, 168 bp, Macaca Mulatta
agaaatccgacaaatccttcaaacgcaagaagcccaccaaaaatgtgctggtctttttaatcaacagacaactgggcaggcacagaagtgacatcgacctgtcaaggtggctgtggatgctgtcataaagcaactccagggtagacatggccttggacaaaaagtcat

SEQ ID NO: 41279 - DNA, 853 bp, Macaca Mulatta
gcaaaaattacgatttccatctaaaatagaccgtgaagtgttcaccgtggggttttacccatgaccctttcccgggggggcaccgtgccgtaccctttccaatcccccatgaaacgcaaaggccacagtgaggcaactctggcgtgccacgtcacatctgtgcaaccagttcgctagcccgggatattgcgcgcagaatcgttccatcgtgtaaggggctcttatgccaaatgtcgcgtaatagcaaatgtctgaattccgtaacgaattctcctacaatttcctcttatgtcttctggcggtagtgcggctcaatggaatcctgtttattaacaccaactatgtgttgtttcacacccagtgtgtaacccagaagagcatgctctcgggtctgcccattcttggagataccagcttcaaattcaccaacaccagcagcaacaatcaggacagcacagtcagcctgagatgtccctgtaatcatgtttttgatgaagtctctgtgtcctggggcatcaatgatagtcacataatacttgctggtctcaaatttccacaaggagatatcaatggtgataccacgttcccgctcagctttcagtttatccaagacccaggcatacttgaaggagccctttcccatctcagcagcctccttctcaaatttttcaatggttcttttgtcgatgccaccgcatttgtagatcagatggccagtagtggtggacttgcccgaatctacgtgtccaatgacgacaatgttgatatgagtcttttcctttcccattttggcttttaggggtagttttcacgacacctgtgttctggcggcaaacccgttgcgaaaaagccc

SEQ ID NO: 41280 - DNA, 794 bp, Macaca Mulatta
ggagaggagagcagttcttgtcctttaaagggtgggaaaatgtggaaagatagtagaatctgttcctagattcctctcgggcctgctggtgccttctctgggcccataagcaagtgctgtctccagtaaggaaggattgatgtcctgccattaggaggcagacagaggcttaggcagcgttcccctgcattgtcagtgtctttgacataagagtcctaaatattttggggtgaaatattttgtttccttcaaagccatcagatgtctcaagaggaaattgcctgcagattgttcttactactctctggttccctgttatcctggtccttggtctctcatgtcctggcaactttgatagccctgaactccaatttgtttctcccaagaccagtaagacttcagcaagccagaggctactgctttgtttgggcactatgtttggagaactaaattggccaagaaacagaggtaaatacaggaattcacttttcctatatttttctttatttccagaactcttggcccctcatgtccttggtttcttaattgctatcgtgatcttaaaatagctgtttgttagatttttaaatatttccatttttattatgggtaatggggagggttatccctgaaatatgcttgcctccatcataagggggaagaaggaaaccagcctggttttttgcttttgaaagttctcctgttccttagaattgccatagccatccgccatggtacctggtcttccccttcaaggccccgtcttttaaattctggccctcttttttcaaaag

SEQ ID NO: 41281 - DNA, 166 bp, Macaca Mulatta
tatcgtgctgggagccgtgtactactgcctgcgcaagcggcgcatgtaggaggagaatcagaagtccgtcaatgtcaagaagaccatcctggagatgcgctatggagctgatgtggatgctggctccattgtgcatgccgcccataagctgggcgagcctcccgtg

SEQ ID NO: 41282 - DNA, 794 bp, Macaca Mulatta
  misc_feature (1)...(794): n = A,T,C or G
ggtcccaaaatccataccagtatcaggtgaatatgcaagtaataattgtcttattatgaaatattttctgtcatgtccaaatcttttatagatgcttgtaacaaaaatttatttttcctttgctgcagcctcttaagcctataaagtaatcaatataattttaaatcttaataaatattttttggaacttttaacatgacataaagggcagttttcattttggggccttgagtagttgggtgggaacatcattttgtcaagttgcttcatacaggtaaaagttcaaactgcatttcagtatcacaaattaatggtgattggtagaagttaaaagagaagttttaaaaagactttagaaattgtacagtccaggcatctacagtatacaggtgttgtttatgactaatccctaanaggtaatcattcatcctcatggaatacttatagaaacaaggttccttaattagccctttttattgttgggcagctcaaattttcagaaaatgcctctatttggaagtaaattttgcctcctatagatcttcttaattatcgaaagttctgtcctttaaaaggcaatgcataattaaacctaatcctgtgtctacatgataaattttagcattttgaaagcagttatcagatctcccctcccnaaactgtctttcttctaatctttttggcaaatttgaatcaacaaatatttatttaaataccctaaattgatgcccaatgtgctgtggtactctgttagggcattgnaggaaatacatttagaacattgggttttttan

SEQ ID NO: 41283 - DNA, 5101 bp, Macaca Mulatta
  misc_feature (1)...(5101): n = A,T,C or G
aggagaatctggtgctggaaagactgtgaacagcaaacatattatccagtattttgccaccatagcagccatgagtgaacccaggaaaaagnnnnnnnnnnnnnnnnnnnnnnnnnnnnnnnnnnnnnnnnnnnnnnnnnnnnnnnnnnnnnnnnnnnnnnnnnnnnnnnnnnnnnnnnnnnnnnngcaaattcatcaggatgcactttggtgccagaggcatgctgtcatctgtggacattgatatctnattttcttgaaaagtccagggtgattttccagcagcctggagagaggaactaccacatattctatcaaattctatctggacaaaaagagcttcatgnnnnnnnnnnnnnnnnnnnnnnnnnnnnnnnnnnnnnnnnnnnnnnnnnnnnnnnnnnnnnnnnnnnnnnnnnnnnnnnnnnnnnnnnnnnnnnnnnnnnnnnnnnnnnnnnnnnnnnnnnnnnnnnnnnnnnnnnnnnnnnnnnnnnnnnnnnnnnnnnnnnnnnnnnnnnnnnnnnnnnnnnnnnnnnnnnnnnnnnnnnnnnnnnnnnnnnnnnnnnnnnnnnnnnnnnnnnnnnnnnnnnnnnnnnnnnnnnnnnnnnnnnnnnnnnnnnnnnnnnnnnnnnnnnnnnnnnnnnnnnnnnnnnnnnnnnnnnnnnnnnnnnnnnnnnnnnnnnnnnnnnnnnnnnnnnnnnnnnnnnnnnnnnnnnnnnnnnnnnnnnnnnnnnnnnnnnnnnnnnnnnnnnnnnnnnnnnnnnnnnnnnnnnnnnnnnnnnnnnnnnnnnnnnnnnnnnnnnnnnnnnnnnnnnnnnnnnnnnnnnnnnnnnnnnnnnnnnnnnnnnnnnnnnnnnnnnnnnnnnnnnnnnnnnnnnnnnnnnnnnnnnnnnnnnnnnnnnnnnnnnnnnnnnnnnnnnnnnnnnnnnnnnnnnnnnnnnnnnnnnnnnnnnnnnnnnnnnnnnnnnnnnnnnnnnnnnnnnnnnnnnnnnnnnnnnnnnnnnnnnnnnnnnnnnnnnnnnnnnnnnnnnnnnnnnnnnnnnnnnnnnnnnnnnnnnnnnnnnnnnnnnnnnnnnnnnnnnnnnnnnnnnnnnnnnnnnnnnnnnnnnnnnnnnnnnnnnnnnnnnnnnnnnnnnnnnnnnnnnnnnnnnnnnnnnnnnnnnnnnnnnnnnnnnnnnnnnnnnnnnnnnnnnnnnnnnnnnnnnnnnnnnnnnnnnnnnnnnnnnnnnnnnnnnnnnnnnnnnnnnnnnnnnnnnnnnnnnnnnnnnnnnnnnnnnnnnnnnnnnnnnnnnnnnnnnnnnnnnnnnnnnnnnnnnnnnnnnnnnnnnnnnnnnnnnnnnnnnnnnnnnnnnnnnnnnnnnnnnnnnnnnnnnnnnnnnnnnnnnnnnnnnnnnnnnnnnnnnnnnnnnnnnnnnnnnnnnnnnnnnnnnnnnnnnnnnnnnnnnnnnnnnnnnnnnnnnnnnnnnnnnnnnnnnnnnnnnnnnnnnnnnnnnnnnnnnnnnnnnnnnnnnnnnnnnnnnnnnnnnnnnnnnnnnnnnnnnnnnnnnnnnnnnnnnnnnnnnnnnnnnnnnnnnnnnnnnnnnnnnnnnnnnnnnnnnnnnnnnnnnnnnnggtactgcattctgaatccaaggacctttccaaagagcaagtttgtgagcagcagaaaagcagctgaagaattacttggctccttgaagatagaccatacccagtatcgatttggaatcactaaggtnnnnnnnnnnnnnnnnnnnnnnnnnnnnnnnnnnnnnnnnnnnnnnnnnnnnnnnnnnnnnnnnnnnnnnnnnnnnnnnnnnnnnnnnnnnnnnnnnnnnnnnnnnnnnnnnnnnnnnnnnnnnnnnnnnnnnnnnnnnnnnnnnnnnnnnnnnnnnnnnnnnnnnnnnnnnnnnnnnnnnnnnnnnnnnnnnnnnnnnnnnnnnnnnnnnnnnnnnnnnnnnnnnnnnnnnnnnnnnnnnnnnnnnnnnnnnnnnnnnnnnnnnnnnnnnnnnnnnnnnnnnnnnnnnnnnnnnnnnnnnnnnnnnnnnnnnnnnnnnnnnnnnnnnnnnnnnnnnnnnnnnnnnnnnnnnnnnnnnnnnnnnnnnnnnnnnnnnnnnnnnnnnnnnnnngagcaagagacactggcaaatgttgaagagcagtgcgagtggctgattaaatccaagatccagctggaggccagagtaaaagagctgtcggagagggtggaggaagaagaggagataaattctgagctgactgccagggggcggaaactcgaagatgaatgttcggagttgaagaaagaaatcgatgacttggaaacaatgttggtgaagtcagagaaggagaaacgtattagagagcacaaggnnnnnnnnnnnnnnnnnnnnnnnnnnnnnnnnnnnnnnnnnnnnnnnnnnnnnnnnnnnnnnnnnnnnnnnnnnnnnnnnnnnnnnnnnnnnnnnnnnnnnnnnnnnnnnnnnnnnnnnnnnnnnnnnnnnnnnnnnnnnnnnnnnnnnnnnnnnnnnnnnnnnnnnnnnnnnnnnnnnnnnnnnnnnnnnnnnnnnnnnnnnnnnnnnnnnnnnnnnnnnnnnnnnnnnnnnnnnnnnnnnnnnnnnnnnnnnnnnnnnnnnnnnnnnnnnnnnnnnnnnnnnnnnnnnnnnnnnnnnnnnnnnnnnnnnnnnnnnnnnnnnnnnnnnnnnnnnnnnnnnnnnnnnnnnnnnnnnnnnnnnnnnnnnnnnnnnnnnnnnnnnnnnnnnnnnnnnnnnnnnnnnnnnnnnnnnnnnnnnnnnnnnnnnnnnnnnnnnnnnnnnnnnnnnnnnnnnnnnnnnnnnnnnnnnnnnnnnnnnnnnnnnnnnnnnnnnnnnnnnnnnnnnnnnnnnnnnnnnnnnnnnnnnnnnnnnnnnnnnnnnnnnnnnnnnnnnnnnnnnnnnnnnnnnnnnnnnnnnnnnnnnnnnnnnnnnnnnnnnnnnnnnnnnnnnnnnnnnnnnnnnnnnnnnnnnnnnnnnnnnnnnnnnnnnnnnnnnnnnnnnnnnnnnnnnnnnnnnnnnnnnnnnnnnnnnnnnnnnnnnnnnnnnnnnnnnnnnnnnnnnnnnnnnnnnnnnnnnnnnnnnnnnnnnnnnnnnnnnnnnnnnnnnnnnnnnnnnnnnnnnnnnnnnnnnnnnnnnnnnaggcaaatgctgagaaactctgtactctatacgaagaaaacttgaatgaagcaaatgcaaagctagataaggtgactcagttggcaaatgacctggcagcacaaaagacagagctgtggagtgagagtgnnnnnnnnnnnnnnnnnnnnnnnnnnnnnnnnnnnnnnnnnnnnnnnnnnnnnnnnnnnnnnnnnnnnnnnnnnnnnnnnnnnnnnnnnnnnnnnnnnnnnnnnnnnnnnnnnnnnnnnnnnnnnnnnnnnnnnnnnnnnnnnnnnnnnnnnnnnnnnnnnnnnnnnnnnnnnnnnnnnnnnnnnnnnnnnnnnnnnnnnnnnnnnnnnnnnnnnnnnnnnnnnnnnnnnnnnnnnnnnnnnnnnnnnnnnnnnnnnnnnnnnnnnnnnnnnnnnnnnnnnnnnnnnnnnnnnnnnnnnnnnnnnnnnnnnnnnngaaggaactggcaattaggttgcaggaggcagcggaagccatgggggtggccaatgccagaaatgcctccttgaaagagccagacaccggctgcagctggagctcggggacttcatgtgtgacctcgggaaggnnnnnnnnnnnnnnnnnnnnnnnnnnnnnnnnnnnnnnnnnnnnnnnnnnnnnnnnnnnnnnnnnnnnnnnnnnnnnnnnnnnnnnnnnnnnnnnnnnnnnnnnnnnnnnnnnnnnnnnnnnnnnnnnnnnnnnnnnnnnnnnnnnnnnnnnnnnnnnnnnnnnnnnnnnnnnnnnnnnnnnnnnnnnnnnnnnnnnnnnnnnnnnnnnnnnnnnnnnnnnnnnnnnnnnnnnnnnnnnnnnnnnnnnnnnnnnnnnnnnnnnnnnnnnnnnnnnnnnnnnnnnnnnnnnnnnnnnnnnnnnnnnnnnnnnnnnnnnnnnnnnnnnnnnnnnnnnnnnnnnnnnnnnnnnnnnnnnnnnnnnnnnnnnnnnnnnnnnnnnnnnnnnnnnnnnnnnnnnnnnnnnnnnnnnnnnnnnnnnnnnnnnnnnnnnnnnnnnnnnnnnnnnnnnnnnnnnnnnnnnnnnnnnnnnnnnnnnnnnnnnnnnnnnnnnnnnnnnnnnnnnnnnnnnnnnnnnnnnnnnnnnnnnnnnnnnnnnnnnnnnnnnnnnnnnnnnnnnnnnnnnnnnnnnnnnnnnnnnnnnnnnnnnnnnnnnnnnnnnnnnnnnnnnnnnnnnnnnnnnnnnnnnnnnnnnnnnnnnnnnnnnnnnnnnnnnnnnnnnnnnnnnnnnnnnnnnnnnnnnnnnnnnnnnnnnnnnnnnnnnnnnnnnnnnnnnnnnnnnnnnnnnnnnnnnnnnnnnnnnnnnnnnnnnnnnnnnnnnnnnnnnnnnnnnnnnnnnnnnnnnnnnnnnnnnnnnnnnnnnnnnnnnnnnnnnnnnnnnnnnnnnnnnnnnnnnnnnnnnnnnnnnnnnnnnnnnnnnnnnnnnnnnnnnnnnnnnnnnnnnnnnnnnnnnnnnnnnnnnnnnnnnnnnnnnnnnnnnnnnnnnnnnnnnnnnnnnnnnnnnnnnnnnnnnnnnnnnnnnnnnnnnnnnnnnnnnnnnnnnnnnnnnnnnnnnnnnnnnnnnnnnnnnnnnnnnnnnnnnnnnnnnnnnnnnnnnnnnnnnnnnnnnnnnnnnnnnnnnnnnnnnnnnnnnnnnnnnnnnnnnnnnnnnnnnnnnnnnnnnnnnnnnnnnnnnnnnnnnnnnnnnnnnnnnnnnnnnnnnnnnnnnnnnnnnnnnnnnnnnnnnnnnnnnnnnnnnnnnnnnnnnnnnnnnnnnnnnnnnnnnnnnnnnnnnnnnnnnnnnnnnnnnnnnnnnnnnnnnnnnnnnnnnnnnnnaggcagaggaagacaagaagaatctgagcaggatgcaaactcagatggataaacttcagctaaaagtgcacaattataagcagcaagtcgaggtggcgg

SEQ ID NO: 41284 - DNA, 4014 bp, Macaca Mulatta
  misc_feature (1)...(4014): n = A,T,C or G
aacagccaggcctgtagcagtgcccttcggaaaccagctgtctccatagctgatagcacagagctcaggncagggtgctgctaagtgttatgtacctaatggtggaaaatattcgcctggagcgagagacggacccctgtgggtggaggacagcccgggagaccttccgcactgaattaagnnnnnnnnnnnnnnnnnnnnnnnnnnnnnnnnnnnnnnnnnnnnnnnnnnnnnnnnnnnnnnnnnnnnnnnnnnnnnnnnnnnnnnnnnnnnnnnnnnnnnnnnnnnnnnnnnnnnnnnnnnnnnnnnnnnnnnnnnnnnnnnnnnnnnnnnnnnnnnnnnnnnnnnnnnnnnnnnnnnnnnnnnnnnnnnnnnnnnnnnnnnnnnnnnnnnnnnnnnnnnnnnnnnnnnnnnnnnnnnnnnnnnnnnnnnnnnnnnnnnnnnnnnnnnnnnnnnnnnnnnnnnnnnnnnnnnnnnnnnnnnnnnnnnnnnnnnnnnnnnnnnnnnnnnnncaactcctcactaagcaggacagcctggacatctacaatgaaagggatctcttcaagactgaggagccagccacagannnnnnnnnnnnnnnnnnnnnnnnnnnnnnnnnnnnnnnnnnnnnnnnnnnnnnnnnnnnnnnnnnnnnnnnnnnnnnnnnnnnnnnnnnnnnnnnnnnnnnnnnnnnnnnnnnnnnnnnnnnnnnnnnnnnnnnnnnnnnnnnnnnnnnnnnnnnnnnnnnnnnnnnnnnnnnnnnnnnnnnnnnnnnnnnnnnnnnnnnnnnnnnnnnnnnnnnnnnnnnnnnnnnnnnnnnnnnnnnnnnnnnnnnnnnnnnnnnnnnnnnnnnnnnnnnnnnnnnnnnnnnnnnnnnnnnnnnnnnnnnnnnnnnnnnnnnnnnnnnnnnnnnnnnnnnnnnnnnnnnnnnnnnnnnnnnnnnnnnggggaagaggtggtaccagagacgccatgtgaaatcctctaccagggaatgctgtacagcctccctcagtatatgnnnnnnnnnnnnnnnnnnnnnnnnnnnnnnnnnnnnnnnnnnnnnnnnnnnnnnnnnnnnnnnnnnnnnnnnnnnnnnnnnnnnnnnnnnnnnnnnnnnnnnnnnnnnnnnnnnnnnnnnnnnnnnnnnnnnnnnnnnnnnnnnnnnnnnnnnnnnnnnnnnnnnnnnnnnnnnnnnnnnnnnnnnnnnnnnnnnnnnnnnnnnnnnnnnnnnnnnnnnnnnnnnnnnnnnnnnnnnnnnnnnnnnnnnnnnnnnnnnnnnnnnnnnnnnnnnnnnnnnnnnnnnnnnnnnnnnnnnnnnnnnnnnnnnnnnnnnnnnnnnnnnnnnnnnnnnnnnnnnnnnnnnnnnnnnnnnnnnnnnnnnnnnnnnnnnnnnnnnnnnnnnnnnnnnnnnnnnnnnnnnnnnnnnnnnnnnnnnnnnnnnnnnnnnnnnnnnnnnnnnnnnnnnnnnnnnnnnnnnnnnnnnnnnnnnnnnnnnnnnnnnnnnnnnnnnnnnnnnnnnnnnnnnnnnnnnnnnnnnnnnnnnnnnnnnnnnnnnnnnnnnnnnnnnnnnnnnnnnnnnnnnnnnnnnnnnnnnnnnnnnnnnnnnnnnnnnnnnnnnnnnnnnnnnnnnnnnnnnnnnnnnnnnnnnnnnnnnnnnnnnnnnnnnnnnnnnnnnnnnnnnnnnnnnnnnnnnnnnnnnnnnnnnnnnnnnnnnnnnnnnnnnnnnnnnnnnnnnnnnnnnnnnnnnnnnnnnnnnnnnnnnnnnnnnnnnnnnnnnnnnnnnnnnnnnnnnnnnnnnnnnnnnnnnnnnnnnnnnnnnnnnnnnnnnnnnnnnnnnnnnnnnnnnnnnnnnnnnnnnnnnnnnnnnnnnnnnnnnnnnnnnnnnnnnnnnnnnnnnnnnnnnnnnnnnnnnnnnnnnnnnnnnnnnnnnnnnnnnnnnnnnnnnnnnnnnnnnnnnnnnnnnnnnnnnnnnnnnnnnnnnnnnnnnnnnnnnnnnnnnnnnnnnnnnnnnnnnnnnnnnnnnnnnnnnnnnnnnnnnnnnnnnnnnnnnnnnnnnnnnnnnnnnnnnnnnnnnnnnnnnnnnnnnnnnnnnnnnnnnnnnnnnnnnnnnnnnnnnnnnnnnnnnnnnnnnnnnnnnnnnnnnnnnnnnnnnnnnnnnnnnnnnnnnnnnnnnnnnnnnnnnnnnnnnnnnnnnnnnnnnnnnnnnnnnnnnnnnnnnnnnnnnnnnnnnnnnnnnnnnnnnnnnnnnnnnnnnnnnnnnnnnnnnnnnnnnnnnnnnnnnnnnnnnnnnnnnnnnnnnnnnnnnnnnnnnnnnnnnnnnnnnnnnnnnnnnnnnnnnnnnnnnnnnnnnnnnnnnnnnnnnnnnnnnnnnnnnnnnnnnnnnnnnnnnnnnnnnnnnnnnnnnnnnnnnnnnnnnnnnnnnnnnnnnnnnnnnnnnnnnnnnnnnnnnnnnnnnnnnnnnnnnnnnnnnnnnnnnnnnnnnnnnnnnnnnnnnnnnnnnnnnnnnnnnnnnnnnnnnnnnnnnnnnnnnnnnnnnnnnnnnnnnnnnnnnnnnnnnnnnnnnnnnnnnnnnnnnnnnnnnnnnnnnnnnnnnnnnnnnnnnnnnnnnnnnnnnnnnnnnnnnnnnnnnnnnnnnnnnnnnnnnnnnnnnnnnnnnnnnnnnnnnnnnnnnnnnnnnnnnnnnnnnnnnnnnnnnnnnnnnnnnnnnnnnnnnnnnnnnnnnnnnnnnnnnnnnnnnnnnnnnnnnnnnnnnnnnnnnnnnnnnnnnnnnnnnnnnnnnnnnnnnnnnnnnnnnnnnnnnnnnnnnnnnnnnnnnnnnnnnnnnnnnnnnnnnnnnnnnnnnnnnnnnnnnnnnnnnnnnnnnnnnnnnnnnnnnnnnnnnnnnnnnnnnnnnnnnnnnnnnnnnnnnnnnnnnnnnnnnnnnnnnnnnnnnnnnnnnnnnnnnnnnnnnnnnnnnnnnnnnnnnnnnnnnnnnnnnnnnnnnnnnnnnnnnnnnnnnnnnnnnnnnnnnnnnnnnnnnnnnnnnnnnnnnnnnnnnnnnnnnnnnnnnnnnnnnnnnnnnnnnnnnnnnnnnnnnnnnnnnnnnnnnnnnnnnnnnnnnnnnnnnnnnnnnnnnnnnnnnnnnnnnnnnnnnnnnnnnnnnnnnnnnnnnnnnnnnnnnnnnnnnnnnnnnnnnnnnnnnnnnnnnnnnnnnnnnnnnnnnnnnnnnnnnnnnnnnnnnnnnnnnnnnnnnnnnnnnnnnnnnnnnnnnnnnnnnnnnnnnnnnnnnnnnnnnnnnnnnnnnnnnnnnnnnnnnnnnnnnnnnnnnnnnnnnnnnnnnnnnnnnnnnnnnnnnnnnnnnnnnnnnnnnnnnnnnnnnnnnnnnnnnnnnnnnnnnnnnnnnnnnnnnnnnnnnnnnnnnnnnnnnnnnnnnnnnnnnnnnnnnnnnnnnnnnnnnnnnnnnnnnnnnnnnnnnnnntcttcaagcttttttactataaatgttgcgcctctcccccaacttagtcactactgaatctttttgtgatggcaccaggtcactttatgctgggagatatagtcaaaatttgtttatttactctgccccttgtcaaccacagtataatttggaggacatgaataaaatacttgacagtatccaagggagcgataccaaaatctaataggtaaattttggattttacttctttgtgctttaaagtaccaggatttctgtctttatggataggtcttggagaatgtaagtaatggatgaaacttttttaaataatttgtaaattttacctaagtaggagagtagtccttattgcaaccaaaataatttactgagcatgactcctgtaaattaatctacagtcagactagtatgattttaatatgatttgagtaaaaagataattttcaaggaaagagtaatcatccatcaatttcttttaaagccagatagtattcaaattatgtcaagaacaaagaagttgcccttttaaaagcatagtacatgaatgcttt

SEQ ID NO: 41285 - DNA, 753 bp, Macaca Mulatta
cttgattcctgaccccggttttattagttccaagtgtgacaccttttctgggcaaggaacagcccctttaaggagcaaatcacttctgtcacagttattacgataatatgaggcaatctgattagcttcacagactgagtctccacaacaccaaaatatcgagatgtaaaccccaaacttgtacacaaaagaaagcacagattgtttaccagttgtggattttagatgtaccaaatgtttatacaaatacataaatgtacaccatgtttcaaatactaaataaatagagtttaatgccataatgagaaattttattctcctgggaacaggaccttaaacagttccgcaggctcgcctcttcagaatggcaacagtcttctcagtgtcatcagaagcaccctcgcttggaacggccttcagatcctgtgggctatattttgttaatagagtgagtagcttcaacagtgtgctctttggaactcctttgataattgggcctaagtccttgttatgggacatgttagctgtcgttaacctaacgtctctcaccttacctgtgtggttttttttgccccatcatgatgtggaagcaaaaatgagagtagcagtttacaaatctgaactattccacaactcactcactggcctcttatgtcaaaattcattttctcaaaaaatttactaaatcaccaaaacaaaatggaaatgtaaagctttgtgtacagagagccgcagaatcgcatacttagtata

SEQ ID NO: 41286 - DNA, 255 bp, Macaca Mulatta
aaaaaatcaaagataatattgtcatacattcctgctaagtataatatgaaatgttaaacgactcagagctaacgaaaccatggtcttcattcagttggcttgtgaagtatctacccttgacctgttctttactgctgtccttattcactttaaagctttgttcagctacatagtaaaacctatttattgaattctgagtactgtcttgaaggctttgacttcacaaaagaaggtacaatggtaatttctcttagt

SEQ ID NO: 41287 - DNA, 736 bp, Macaca Mulatta
  misc_feature (1)...(736): n = A,T,C or G
gggcttttaaggcgatagatggatagatagatgctctataattgaatagcctactgggcttctgtgtagtctattctagcacagcactgtgtaagtagcaggtgttcagttaatgtattttaaatcaatgagtaattgatgggatatttttcttcacattacatcacattgaaggtgtttgtgaggaagttttgttcgtgattttcctcctaggcaggcgtcacctaacatgtttctctctagctgtggggtattgaatttgaggctgctctcagcattattgctcatctcaaagaggaacaaatggtcccccaaatggtccatatgcgacagtaggggaaggagtgccaccactcattttgaggtgcctgggccatactctggatgaagctcacagctcttacagaaggaggtaagnnnnnnnnnnnnnnnnnntaagaaagttaattaaaaagtttatgctgatgccatttcttatggcaaagactaaagggtgtatgtctttgtgttctcttggtggggactgctatcctaaaaataagagattttgatccagagattggattgttcctggtgtggcaacagtcctctgacctcagtcattttcaaagtctaatgtctttttggctaacaaaagacatcaagctagagattaaaatttgcagaagaacagttttgtttttttggtttgggtggttttttggaagatggaagtctcacctctggtcggcccaga

SEQ ID NO: 41288 - DNA, 5331 bp, Macaca Mulatta
  misc_feature (1)...(5331): n = A,T,C or G
gaatttgctacaacatggtgctgaagtgaacaaagctgataatgaaggtagaactgctttgatagcagcagcatacatgggacacagggagattgtggaacacctcctggaccatggagcagaagtaaatcatgaggacgttgatggcaggacagcactctctgtagctgcactttgtgtgcctgcaagtaaaggacacgcatcagttgttagccttttaatcgatcgaggtgctgaagtagatcattgtgataaagatggcatgactccactgctggtagctgcctatgaaggacatgttgatgtggttgacttacttctagaaggggnnnnnnnnnnnnnnnnnnnnnnnnnnnnnnnnnnnnnnnnnnnnnnnnnnnnnnnnnnnnnnnnnnnnnnnnnnnnnnnnnnnnnnnnnnnnnnnnnnnnnnnnnnnnnnnnnnnnnnnnnnnnnnnnnnnnnnnnnnnnnnnnnnnnnnnnnnnnnnnnnnnnnnnnnnnnnnnnnnnnnnnnnnnnnnnnnnnnnnnnnnnnnnnnnnnnnnnnnnnnnnnnnnnnnnnnnnnnnnnnnnnnnnnnnnnnnnnnnnnnnnnnnnnnnnnnnnnnnnnnnnnnnnnnnnnnnnnnnnnnnnnnnnnnnnnnnnnnnnnnnnnnnnnnnnnnnnnnnnnnnnnnnnnnnnnnnnnnnnnnnnnnnnnnnnnnnnnnnnnnnnnnnnnnnnnnnnnnnnnnnnnnnnnnnnnnnnnnnnnnnnnnnnnnnnnnnnnnnnnnnnnnnnnnnnnnnnnnnnnnnnnnnnnnnnnnnnnnnnnnnnnnnnnnnnnnnnnnnnnnnnnnnnnnnnnnnnnnnnnnnnnnnnnnnnnnnnnnnnnnnnnnnnnnnnnnnnnnnnnnnnnnnnnnnnnnnnnnnnnnnnnnnnnnnnnnnnnnnnnnnnnnnnnnnnnnnnnnnnnnnnnnnnnnnnnnnnnnnnnnnnnnnnnnnnnnnnnnnnnnnnnnnnnnnnnnnnnnnnnnnnnnnnnnnnnnnnnnnnnnnnnnnnnnnnnnnnnnnnnnnnnnnnnnnnnnnnnnnnnnnnnnnnnnnnnnnnnnnnnnnnnnnnnnnnnnnnnnnnnnnnnnnnnnnnnnnnnnnnnnnnnnnnnnnnnnnnnnnnnnnnnnnnnnnnnnnnnnnnnnnnnnnnnnnnnnnnnnnnnnnnnnnnnnnnnnnnnnnnnnnnnnnnnnnnnnnnnnnnnnnnnnnnnnnnnnnnnnnnnnnnnnnnnnnnnnnnnnnnnnnnnnnnnnnnnnnnnnnnnnnnnnnnnnnnnnnnnnnnnnnnnnnnnnnnnnnnnnnnnnnnnnnnnnnnnnnnnnnnnnnnnnnnnnnnnnnnnnnnnnnnnnnnnnnnnnnnnnnnnnnnnnnnnnnnnnnnnnnnnnnnnnnnnnnnnnnnnnnnnnnnnnnnnnnnnnnnnnnnnnnnnnnnnnnnnnnnnnnnnnnnnnnnnnnnnnnnnnnnnnnnnnnnnnnnnnnnnnnnnnnnnnnnnnnnnnnnnnnnnnnnnnnnnnnnnnnnnnnnnnnnnnnnnnnnnnnnnnnnnnnnnnnnnnnnnnnnnnnnnnnnnnnnnnnnnnnnnnnnnnnnnnnnnnnnnnnnnnnnnnnnnnnnnnnnnnnnnnnnnnnnnnnnnnnnnnnnnnnnnnnnnnnnnnnnnnnnnnnnnnnnnnnnnnnnnnnnnnnnnnnnnnnnnnnnnnnnnnnnnnnnnnnnnnnnnnnnnnnnnnnnnnnnnnnnnnnnnnnnnnnnnnnnnnnnnnnnnnnnnnnnnnnnnnnnnnnnnnnnnnnnnnnnnnnnnnnnnnnnnnnnnnnnnnnnnnnnnnnnnnnnnnnnnnnnnnnnnnnnnnnnnnnnnnnnnnnnnnnnnnnnnnnnnnnnnnnnnnnnnnnnnnnnnnnnnnnnnnnnnnnnnnnnnnnnnnnnnnnnnnnnnnnnnnnnnnnnnnnnnnnnnnnnnnnnnnnnnnnnnnnnnnnnnnnnnnnnnnnnnnnnnnnnnnnnnnnnnnnnnnnnnnnnnnnnnnnnnnnnnnnnnnnnnnnnnnnnnnnnnnnnnnnnnnnnnnnnnnnnnnnnnnnnnnnnnnnnnnnnnnnnnnnnnnnnnnnnnnnnnnnnnnnnnnnnnnnnnnnnnnnnnnnnnnnnnnnnnnnnnnnnnnnnnnnnnnnnnnnnnnnnnnnnnnnnnnnnnnnnnnnnnnnnnnnnnnnnnnnnnnnnnnnnnnnnnnnnnnnnnnnnnnnnnnnnnnnnnnnnnnnnnnnnnnnnnnnnnnnnnnnnnnnnnnnnnnnnnnnnnnnnnnnnnnnnnnnnnnnnnnnnnnnnnnnnnnnnnnnnnnnnnnnnnnnnnnnnnnnnnnnnnnnnnnnnnnnnnnnnnnnnnnnnnnnnnnnnnnnnnnnnnnnnnnnnnnnnnnnnnnnnnnnnnnnnnnnnnnnnnnnnnnnnnnnnnnnnnnnnnnnnnnnnnnnnnnnnnnnnnnnnnnnnnnnnnnnnnnnnnnnnnnnnnnnnnnnnnnnnnnnnnnnnnnnnnnnnnnnnnnnnnnnnnnnnnnnnnnnnnnnnnnnnnnnnnnnnnnnnnnnnnnnnnnnnnnnnnnnnnnnnnnnnnnnnnnnnnnnnnnnnnnnnnnnnnnnnnnnnnnnnnnnnnnnnnnnnnnnnnnnnnnnnnnnnnnnnnnnnnnnnnnnnnnnnnnnnnnnnnnnnnnnnnnnnnnnnnnnnnnnnnnnnnnnnnnnnnnnnnnnnnnnnnnnnnnnnnnnnnnnnnnnnnnnnnnnnnnnnnnnnnnnnnnnnnnnnnnnnnnnnnnnnnnnnnnnnnnnnnnnnnnnnnnnnnnnnnnnnnnnnnnnnnnnnnnnnnnnnnnnnnnnnnnnnnnnnnnnnnnnnnnnnnnnnnnnnnnnnnnnnnnnnnnnnnnnnnnnnnnnnnnnnnnnnnnnnnnnnnnnnnnnnnnnnnnnnnnnnnnnnnnnnnnnnnnnnnnnnnnnnnnnnnnnnnnnnnnnnnnnnnnnnnnnnnnnnnnnnnnnnnnnnnnnnnnnnnnnnnnnnnnnnnnnnnnnnnnnnnnnnnnnnnnnnnnnnnnnnnnnnnnnnnnnnnnnnnnnnnnnnnnnnnnnnnnnnnnnnnnnnnnnnnnnnnnnnnnnnnnnnnnnnnnnnnnnnnnnnnnnnnnnnnnnnnnnnnnnnnnnnnnnnnnnnnnnnnnnnnnnnnnnnnnnnnnnnnnnnnnnnnnnnnnnnnnnnnnnnnnnnnnnnnnnnnnnnnnnnnnnnnnnnnnnnnnnnnnnnnnnnnnnnnnnnnnnnnnnnnnnnnnnnnnnnnnnnnnnnnnnnnnnnnnnnnnnnnnnnnnnnnnnnnnnnnnnnnnnnnnnnnnnnnnnnnnnnnnnnnnnnnnnnnnnnnnnnnnnnnnnnnnnnnnnnnnnnnnnnnnnnnnnnnnnnnnnnnnnnnnnnnnnnnnnnnnnnnnnnnnnnnnnnnnnnnnnnnnnnnnnnnnnnnnnnnnnnnnnnnnnnnnnnnnnnnnnnnnnnnnnnnnnnnnnnnnnnnnnnnnnnnnnnnnnnnnnnnnnnnnnnnnnnnnnnnnnnnnnnnnnnnnnnnnnnnnnnnnnnnnnnnnnnnnnnnnnnnnnnnnnnnnnnnnnnnnnnnnnnnnnnnnnnnnnnnnnnnnnnnnnnnnnnnnnnnnnnnnnnnnnnnnnnnnnnnnnnnnnnnnnnnnnnnnnnnnnnnnnnnnnnnnnnnnnnnnnnnnnnnnnnnnnnnnnnnnnnnnnnnnnnnnnnnnnnnnnnnnnnnnnnnnnnnnnnnnnnnnnnnnnnnnnnnnnnnnnnnnnnnnnnnnnnnnnnnnnnnnnnnnnnnnnnnnnnnnnnnnnnnnnnnnnnnnnnnnnnnnnnnnnnnnnnnnnnnnnnnnnnnnnnnnnnnnnnnnnnnnnnnnnnnnnnnnnnnnnnnnnnnnnnnnnnnnnnnnnnnnnnnnnnnnnnnnnnnnnnnnnnnnnnnnnnnnnnnnnnnnnnnnnnnnnnnnnnnnnnnnnnnnnnnnnnnnnnnnnnnnnnnnnnnnnnnnnnnnnnnnnnnnnnnnnnnnnnnnnnnnnnnnnnnnnnnnnnnnnnnnnnnnnnnnnnnnnnnnnnnnnnnnnnnnnnnnnnnnnnnnnnnnnnnnnnnnnnnnnnnnnnnnnnnnnnnnnnnnnnnnnnnnnnnnnnnnnnnnnnnnnnnnnnnnnnnnnnnnnnnnntactattattagaaccaactttactcataaatacagtacatttacattactgtagaggatgaagctctaatttctattacatgtatttttctttagaaagagaaccctgaaagctgccagtttttctattaactttgaattattgaaattgtatttatttaattttattgtttttacaaaattgcaccttgtgtccaaagggcaaagatatgacattgcataagggatttatgtttttcaaagagctaaatgttttcatatccatactatatacacttgaagcagttggtaggaagagaacctattggaaaaatacgattttcaaaagtaagtattcctcgggatgtttttatataaattatgttttagaatagaacataaatgactttgagttaggataaggatgataggatgggtgctggagatgccctgctttgcttatttgtttctgtgggggatttaatactataaatgaaaatggcttctgctctattaaaaagtaaaaattgtcctccaaatataaaactccttaatagatatttttgaaattagaatctttaaattttataaatcagctgttgccactacacaactatgatggcatgtgcttataacatttttataacattccgtctgtgtctattccctaaatatcatgagtttattataaggaaagtgataaaaatacagtaatgaaataaaaatctgaatgtttctaggaaaggttttggaaggaaaaatgacctgaaatcagtgcgtactgnnnnnnnnnnnnnnnnnnnnnnnnnnnnnnnnnnnnnnnnnnnnnnnnnnnnnnnnnnnnnnnnnnnnnnnnnnnnnnnnnnnnnnnnnnnnnnnnnnnnnnnnnnnnnnnnnnnnnnnnnnnnnnnnnnnnnnnnnnnnnnnnnnnnnnnnnnnnnnnnnnnnnnnnnnnnnnnnnnnnnnnnnnnnnnnnnnnnnnnnnnnnnnnnnnnnnnnnnnnnnnnnnnnnnnnnnnnnnnnnnnnnnnnnncacattgtaaaagttttattttatcccttgtatgatattactcaaaaaaatccctatgtatatgaaagcgtttaataaatatatttgctttac

SEQ ID NO: 41289 - DNA, 1003 bp, Macaca Mulatta
  misc_feature (1)...(1003): n = A,T,C or G
gcccattgtcttacatagtctgactttgcatctgctctgtgattatgactgtccctnnnnnnnnnnnnnnnnnnnnnnnnnnnnnnnnnnnnnnnnnnnnnnnnnnnnnnnnnnnnnnnnnnnnnnnnnnnnnnnnnnnnnnnnnnnnnnnnnnnnnnnnnnnnnnnnnnnnnnnnnnnnnnnnnnnnnnnnnnnnnnnnnnnnnnnnnnnnnnnnnnnnnnnnnnnnnnnnnnnnnnnnnnnnnnnnnnnnnnnnnnnnnnnngaccctgagaacttcctggtgagtactaagtatactcatgctttcttctttacccttagctatttgcaccatgggtacttttgaaagcagaggtgggtttctcttgtgctatgagtcagctatgggatatgatatttcagcagtgggatcgtttttgagagttatgttgctctaaataacataactgatatttggtagagcaaggactatgaataatggaaaggcacttaccatttgatagctctgaaaaacacgtcttatacaaaattctggccaaaattaaactgagtgtttttggatgagggaatggaagttgagatagaggaaataacatcttccctttggtcattgaaattttctgtgaaaattaatagacacttttctgcatagtcctggaagtcagaaaatgatcaactagaaagattaatgggaagcttttaaaaagaggattgtttccttctgaatgatgatggtatacttttgtgcgcatggtacaggattctttgttatgagtgtttgggaaaattgtatgtgtgtgatgactggggacttatcctatcccttacagctccttgaagtactgttatcctatttttaaaaaaggacagagtctctaaaaaagtgaaacaattaatcacactgtgctggggtagtgagttggcatagcaagtaaaagaaggataggacacaatgggaggtgcagcgctgccagtcatattgaagctgatgtctatcccat

SEQ ID NO: 41290 - DNA, 770 bp, Macaca Mulatta
  misc_feature (1)...(770): n = A,T,C or G
ggggtcttgttacttccggtagcgaagcctctacttcttcctttgctcccgcgggcgtccgggctgggaataatggctcggttggcccgggacgagtggaatgattaatgatgttttgcagcagttttctacgtctgaaattttttatgtctctggaacctagaatttgctaagagatggaagaacctcagaaaaactatctgaacacaatggaccttgagaaagatgaacctctcaaaagcaccggccctcagatttctgttagtgaattttcttgccactgctgctacgacatcctggttaaccccaccaccttgaactgtgggcacagcttctgccgtcactgccttgctttgtggtgggcatcttcaaagaaaacagaatgtccagaatgcagagaaaaatgggaaggtttcccaaaagtcaatattctcctcagggatgccattgaaaagttatttcctgatgccattagaatgagatttgaagacattcagcagaataatgacatagtccaaagccttgcagcctttcagaaatatgggaatgatcagattcctttagctcctaacacaggccgggcgaatcagcagaggggagggggattcttttccggtgtgctcacagctttaactggagtggcagtggtcctgctcgtctatcactggagcagcagggaatctgaacacgacctcctgggtcacaagggctgtgggccaaatggacggcggaaaaaagttngtcctctgggctgggagcagctggggccc

SEQ ID NO: 41291 - DNA, 882 bp, Macaca Mulatta
  misc_feature (1)...(882): n = A,T,C or G
ggaacattcaatccaaaattaagtctatgtaaatatcagagaatttacagtagaaatatctaaggtagggccgggcatnnnnnnnnnnnnnnnnnnnnnnnnnnnnnnnnnnnnnnnnnnnnnnnnnnnnntgaggtcancanattgagaccatcctggtcaacatggtannnnnnnnnnnnnnnnnnnnnnntnnnnnnnnnnnnnnngtggtggcatgtgcctgtggtctcagtttnnnnnnnnnnnnnnnnnnnnnnnnnnnnnnnnnnnnnnnnnnnnnnnnnnnnnnnnnnnnnaattgtactgctgcactctagcctggcnnnnnnnnnnnnnnnnnnnnnnnncacaagatcagaaaatacgaaagtactgacccttccgaccttacccgttcatcagagtgctgactgcaaaaaaatgatcccactccgaagaggatatttagttggcgcgtattcttactaataagtctaccctttagatggaaactgggcactgtcattgtgcatgagaagttatacccttggaaactatggtggcgcggtaacctcgggctgacacctacaactgctaatcactcgagacatcttattaacacatcaataagcgttccgagacagcggccggggattattagctaattaagcggggcgatcccgccacgtacatcgtagaagtatctttatacacaacagttctatgtcgctacaacagcgcgcgtattaaggcggccgaaataaacgatggaggcacctggggcccggctagttccgcccaacatcacattacgcaaggccatatgaccatgcgggggagaatggaggggaggtgctatatatccctagactaggagtgtcctctctcgacgacaaccgc

SEQ ID NO: 41292 - DNA, 135 bp, Macaca Mulatta
tgagcatcccaatcagaaaatccaacatccaaaatgctccaatccaaaatctgaaactttttgagcaccaacatgacacacaacaaaaatgctcatttgaacattttggttcagatttaggaggctcaactggta

SEQ ID NO: 41293 - DNA, 2709 bp, Macaca Mulatta
  misc_feature (1)...(2709): n = A,T,C or G
gggaggatggacagctctcatgtgggcatgttacaaaggccgtactgacgtagtagatttgcttctttctcatggtgccaatccaagtgtcactggtctnnnnnnnnnnnnnnnnnnnnnnnnnnnnnnnnnnnnnnnnnnnnnnnnnnnnnnnnnnnnnnnnnnnnnnnnnnnnnnnnnnnnnnnnnnnnnnnnnnnnagtatggaaccacccctttagtttgggctgcacgaaagggtcatttggaatgtgtgaaacatttactggccatgggagctgatgtggatcaagaaggagcnnnnnnnnnnnnnnnnnnnnnnnnnnnnnnnnnnnnnnnnnnnnnnnnnnnnnnnnnnnnnnnnnnnnnnnnnnnnnnnnnnnnnnnnnnnnnnnnnnnnnnnnnnnnnnnnnnnnnnnnnnnnnnnnnnnnnnnnnnnnnnnnnnnnnnnnnnnnnnnnnnnnnnnnnnnnnnnnnnnnnnnnnnnnnnnnnnnnnnnnnnnnnnnnnnnnnnnnnnnnnnnnnnnnnnnnnnnnnnnnnnnnnnnnnnnnnnnnnnnnnnnnnnnnnnnnnnnnnnnnnnnnnnnnnnnnnnnnnnnnnnnnnnnnnnnnnnnnnnnnnnnnnnnnnnnnnnnnnnnnnnnnnnnnnnnnnnnnnnnnnnnnnnnnnnnnnnnnnnnnnnnnnnnnnnnnnnnnnnnnnnnnnnnnnnnnnnnnnnnnnnnnnnnnnnnnnnnnnnnnnnnnnnnnnnnnnnnnnnnnnnnnnnnnnnnnnnnnnnnnnnnnnnnnnnnnnnnnnnnnnnnnnnnnnnnnnnnnnnnnnnnnnnnnnnnnnnnnnnnnnnnnnnnnnnnnnnnnnnnnnnnnnnnnnnnnnnnnnnnnnnnnnnnnnnnnnnnnnnnnnnnnnnnnnnnnnnnnnnnnnnnnnnnnnnnnnnnnnnnnnnnnnnnnnnnnnnnnnnnnnnnnnnnnnnnnnacacttgtctcctactgaaacagatggtgacatgcttgggtatgatttatatagcagtgccctagcagatattctcagtgagccgaccatgcagccacctatttgtgtggggttatatgcacagtggggaagtgggaaatctttcttactcaagaaactagaagnnnnnnnnnnnnnnnnnnnnnnnnnnnnnnnnnnnnnnnnnnnnnnnnnnnnnnnnnnnnnnnnnnnnnnnnnnnnnnnnnnnnnnnnnnnnnnnnnnnnnnnnnnnnnnnnnnnnnnnnnnnnnnnnnnnnnnnnnnnnnnnnnnnnnnnnnnnnnnnnnnnnnnnnnnnnnnnnnnnnnnnnnnnnnnnnnnnnnnnnnnnnnnnnnnnnnnnnnnnnnnnnnnnnnnnnnnnnnnnnnnnnnnnnnnnnnnnnnnnnnnnnnnnnnnnnnnnnnnnnnnnnnnnnnnnnnnnnnnnnnnnnnnnnnnnnnnnnnnnnnnnnnnnnnnnnnnnnnnnnnnnnggtttttgtttacagattacaatagactgtccagtgtaggtggagaaacttctctggctgaaatgattgcaaccctctcggatgcttgtgaaagagagtttggctttttggcaaccaggctttttcgagtattcaagactgaagatactcagggtanggtaaaaagaaatggaaaaaaacatgttgtctcccatcttttgtcatcttcctttttatcattggctgcattatatctggaattactcttctggctatatttagagttgacccaaagcatctgactgtaaatgctgtcctcatatcaannnnnnnnnnnnnnnnnnnnnnnnnnnnnnnnnnnnnnnnnnnnnnnnnnnnnnnnnnnnnnnnnnnnnnnnnnnnnnnnnnnnnnnnnnnnnnnnnnnnnnnnnnnnnnnnnnnnnnnnnnnnnnnnnnnnnnnnnnnnnnnnnnnnnnnnnnnnnnnnnnnnnnnnnnnnnnnnnnnnnnnnnnnnnnnnnnnnnnnnnnnnnnnnnnnnnnnnnnnnnnnnnnnnnnnnnnnnnnnnnnnnnnnnnnnnnnnnnnnnnnnnnnnnnnnnnnnnnnnnnnnnnnnnnnnnnnnnnnnnnnnnnnnnnnnnnnnnnnnnnnnnnnnnnnnnnnnnnnnnnnnnnnnnnnnnnnnnnnnnnnnnnnnnnnnnnnnnnnnnnnnnnnnnnnnnnnnnnnnnnnnnnnnnnnnnnnnnnnnnnnnnnnnnnnnnnnnnnnnnnnnnnnnnnnnnnnnnnnnnnnnnnnnnnnnnnnnnnnnnnnnnnnnnnnnnnnnnnnnnnnnnnnnnnnnnnnnnnnnnnnnnnnnnnnnnnnnnnnnnnnnnnnnnnnnnnnnnnnnnnnnnnnnnnnnnnnnnnnnnnnnnnnnnnnnnnnnnnnnnnnnnnnnnnnnnnnnnnnnnnnnnnnnnnnnnnnnnnnnnnnnnnnnnnnnnnnnnnnnnnnnnnnnnnnnnnnnnnnnnnnnnnnnnnnnnnnnnnnnnnnnnnnnnnnnnnnnnnnnnnnnnnnnnnnnnnnnnnnnnnnnnnnnnnnnnnnnnnnnnnnnngattactgagagccaatcagattagtttcaactgggacaggcttgctagctggatcaacctcaccgagcagtggccataccggacttcatggctcatattatatttggaagagactgaaggtattccagatcaaatgacattaaaaaccatctacgaaag

SEQ ID NO: 41294 - DNA, 403 bp, Macaca Mulatta
  misc_feature (1)...(403): n = A,T,C or G
tgttcatcttagctttcacatgtataagattcattctttgaactgcagcaataaaaccctctgctcctaagaagtcttaagagggtattctatatattctgctttgttttattttctgtaaattttgtaggtaaatatgtgcataaaaaataaatactttatannnnnnnnnnnnnnnnnnnnnnnnnnnnnnnnnnnnnnnnnnnnnnnnnnnnnnnnnnnnnnnnnnnnnnnnnnnnnnnnnnnnnnnnnnnnnnnnnnnnnnnnnnnnnnnnnnnnnnnnnnnnnnnnnnnnnnnnnnnnnnnnnnnnnnnnnnnnnnnnnnnnnnnnnnnnnnnnnnnnnnnnnnnnnnnnnnnnnnnnnnnnnnnnnnnnnnnnnnnnnnnnnnnnnnnnnnnnnnnn

SEQ ID NO: 41295 - DNA, 718 bp, Macaca Mulatta
tacattgtaacatatatatttcgttctctgtaatattctgcctacataagcgcattctcaaaataactaaaaggaaaaaaagatctaacaaatgttcacagtgttcttttcattgtaatgagtggcacgcagttcttatcatggataccagaccatgaattcgcaactattgtttgttgttaattttcccttttttctttacccagttacattcactattttctttgcaaaatcaaagtgtctcctattagtattttgtactgggaagttgagtttctgatggataactgtggtgttaggggaggatagaaaccctttatcaacatctgttaagtctgggcattctggaactatctagatgggctgtaagtaagtgtctttagttctttatggtatcataaatcctgcatatttgggtcatttttttttactctgtatttcagacaaattctttagattatgaaggtgaaacttgagtcagtgatccagataacttgggttttccccttatatgtccttccagctgatgcagagctaggattttggattgaactacctggatcattgactaatcatcttggtgaatgagagactcactggcttctcctctagggcataatgagatgcaatgagagcttgtgctttttttgccgcctgtactgtcctctgatacagaagacgcaggctgtcacatatccaagtttcatcttccatataa

SEQ ID NO: 41296 - DNA, 512 bp, Macaca Mulatta
cctcctgtgggtggggcagagatgcgggaccctcaggggcatctttaggtgccacccactctcccctggcatttatcaaacaaccatgcactcacacatcgcctcctttgaccggaagactgttgagtttccaggcacttgtgcttctgtttttaccaagtcctgtggctcctccagctctttgccccttttcaactggggaaggagaacaactccagcagccccattgtgttcatttcaaagatgtaggttcatgggacccaggtttgcctgaagagagagccctgacctgatgaggtaagcactcattggcatctagagactcttgaactgattgaagctaagagaaatacattggctcaaaaccaagtaaaaatcatgtgatagcctagtgaaagtgtagagattctgggtccacagaagttctcttataccactttggctattttggttacagaaagcctcataaaaagtaactcaaaccagccacagattgtgttttacgatttttt

SEQ ID NO: 41297 - DNA, 473 bp, Macaca Mulatta
taattcatactggagagaaaccctacaaatgtgaagaatgtggcaaagctttcaagccggttctcagtctttagtaaacataagaaaattcatgctggagggaaattttacaaacgtgaagaatgtgacaaggcttttaaacagtcctcaacccttactacatataagaaaattcatactggagagaaacactagaaatgtgaagactgtggcaaaggcttcaaccagtcctcaagccttatggagcataagataattcatactagagagaaaccctacaaatgtgaagaatgtgataaagacttcaactggtcctcacaccttactgctcataaaagaattcatactggaggaaaaaccctacaaatgtgaaaaatgtggcaaacgttttaactagttctcaactcttactgaacataagggaatttatacaggagggaaaccctacaaatgtgaagaatgtggcaagcctt

SEQ ID NO: 41298 - DNA, 516 bp, Macaca Mulatta
  misc_feature (1)...(516): n = A,T,C or G
tttctgatgccacatgtcttttatccagagaaccaacctgccttagacccagagggagcttgaagagagattttcatcttactgtgagaaaacaaagacccagangagtggagagtttaagaccatcctggtcattgccattatttcttttcaaacagacagaggnnctctgtatgtagctgcttctgtgtttgtggtttgaattgactggtgagatgtgagacacaaaagaaattcgagagattgtgtctgaccttaaggaatgtactaagaaaccaggaagataaagctgtcatataagatgcttaaaacaactaaaggcaacttagattgggaggtactccctccaagatagaaatttcttaacctttgctttgaagtctggtttctttttcaagatccagaagcataatccatacttagatttaggttcaagcccttcctaactgattatgttccaaattctctgtagtggtcatcaatgtcacgtccagctcatgtgaaggtttttcctcc

SEQ ID NO: 41299 - DNA, 827 bp, Macaca Mulatta
ttcctcagggttcctgacaccagaggcgggctcccctctggttcccagtcccacctcgcccccgtggcagtggcaggggcctggggtactccagtcctagggtcccagctggggatggcagcccagggcagtccctgaacctccttcggattctgagcctctggctatggaggttcgaggctgcctcccaggcactgtcttaaaatcatttctgtcgaacaaaagaacattgcagagcccggagctgatcaccagaagggtcagagcctccgcggtatcttcctctttgcagccggggtgcccagggcccggctggagtgagaggctccctgcagcgagtgctggctgggcttccctgggcatcaggggcctgcaggggaactggcacagggagaagcagcccaggctctctgctgccctcctcctcccctaccctgcccccgaaggtgggtttccctcgagcctgcatgctgtccctctactctgcatggaagctgtcaccggtctcctgtaggtgaatgatttacaagtccacagtcccaacctgagctctcttcccaagcctttatctgaggcatcctggccatttttccccggagggctcttccagatcccatcctcaactgaacagaaaccccgtctcatgttcactagggaaccactggctcctccactgcccagatttgtaaccgattcccatgcctcctttccagcctgaagcccagggctcaccccgggttcccctctctgctccacgccattcagcaagcttccacggagcgcctgcacgctgtgctcgtcacggagtaacacaagcaggacacttc

SEQ ID NO: 41300 - DNA, 1392 bp, Macaca Mulatta
  misc_feature (1)...(1392): n = A,T,C or G
gttcacagcgcagctgggcccgcgccctgccgtggtgctgtgcggctacgcagcgctgcgggacgcgttagtgctacaggcggatgccttctccggccgcgggtccatggcagtcttcgaacgcttcacacgcggnnnngaatcttgttttctaacgggccgcgctggtggacactgcgcaattttgcagttggagcgctgaaggagttggggttaggtacacggaccatccaggcgcatgtcctggaggaggcggcttgtctgctaggcgaaatgcaagccaccattggtgcggcctggccgggagggcagaagggcctggtgtggngagccccgtttgaccccatgcgactactggataatgctgtatccaatggtatctgttcnnnnnnnnnnnnnnnnnnnnnnnnnnnnnnnnnnnnnnnnnnnnnnnnnnnnnnnnnnnnnnnnnnnnnnnnnnnnnnnnnnnnnnnnnnnnnnnnnnnnnnnnnnnnnnnnnnnnnnnnnnnnnnnnnnnnnnnnnnnnnnnnnnnnnnnnnnnnnnnnnnnnnnnnnnnnnnnnnnnnnnnnnnnnnnnnnnnnnnnnnnnnnnnnnnnnnnnnnnnnnnnnnnnnnnnnnnnnnnnnnnnnnnnnnnnnnnnnnnnnnnnnnnnnnnnnnnnnnnnnnnnnnnnnnnnnnnnnnnnnnnnnnnnnnnnnnnnnnnnnnnnnnnnnnnnnnnnnnnnnnnnnnnnnnnnnnnnnnnnnnnnnnnnnnnnnnnnnnnnnnnnnnnnnnnnnnnnnnnnnnnnnnnnnnnnnnnnnagcccaggtgcaggagctggaccctgtggtagggcggaggcgcgccccaagcctggacgaccccgagcgactgccctacaccaacgcagtgctgctccagatccagcgcttcatcagcgtggtgcccctggggctgccgtgcaccctcccccttgacacccacctgcacggccactgtctagccaaaggtnnnnnnnnnnnnnnnnnnnnnnnnnnnnnnnnnnnnnnnnnnnnnnnnnnnnnnnnnnnnnnnnnnnnnnnnnnnnnnnnnnnnnnnnnnnnnnnnnnnnnnnnnnnnnnnnnggacaagggcagtttccaggccaatgacctttcatgcccttgcttcaggtgcgccaggggggaaaggcgcccagcctggaccgctctgaggtgcatggtgctcactagccacccgtgtacccgggaaaagcagatgtccctgggcgcaggcctggcccacttagagatcttcatatcctttacagccaccctacagaggttcatgctccctgtggtaaaccctggcaccatcaacctcacctgcagttcactggcctgggcagtgtccccccagccttccagctcca

SEQ ID NO: 41301 - DNA, 762 bp, Macaca Mulatta
  misc_feature (1)...(762): n = A,T,C or G
ggnnnnnnnnnnnnnnnnnnnnnnnnnnnnnnnnnnnnnnnnnnnnnnnnnnnnnnnnnnnnnnnnnnnnnnnnnnnnnnnnnnnnnnnnnnnnnnnnnnnnnnnnnnnnnnnnnnnnnnnnnnnnnnnnnnnnnnnnnnnnnnnnnnnnnnnnnnnnnnnnnnnnnnnnnnnnnnnnnnnnnnnnnnnnnnnnnnnnnnnnnnnnnnnnnnnnnnnnnnnnnnnnnnnnnnnnnnnnnnnnnnnnnnnnnnnnnnnnnnnnnnnnnnnnnnnnnnnnnnnnnnnnnnnnnnnnnnnnnnnnnnnnnnnnnnnnnnnnnnnnnnnnnnnnnnnnnnnnnnnnnnnnnnnnnnnnnnnnnnnnnnnnnnnnnnnnnnnnnnnnnnnnnnnnnnnnnnnnnnnnnnnnnnnnnnnnnnnnnnnnnnnnnnnnnnnnnnnnnnnnnnnnnnnnnnnnnnnnnnnnnnnnnnnnnnnnnnnnnnnnnnnnnnnnnnnnnnnnnnnnnnnnnnnnnnnnnnnnnnnnnnnnnnnnnnnnnnnnnnnnnnnnnnnnnnnnnnnnnnnnnnnnnnnnnnnnnnnnnnnacgggttccaaatttcttccctaaacaacaggcctttccattggaacttcccatggttaattaatcgtggaatcccaaaattacccgcactttaatctggcgtttcaagtccgcccaagaataacaataccacccaacttgtttcaacattcggagaaaccaaattccaacatttttgaga

SEQ ID NO: 41302 - DNA, 254 bp, Macaca Mulatta
agtgacctttgctttctttgtctgagtgcaggctctcgtggttgctgggatctctctccaagttgcaaacctgtatggctacatcctttgtaagatgggaggcaacagtgacattagcaaggtcacagccagtttcctgtcccagacagtgttccagacggtgagtaactgaggtctgactcctggaccactcctctccaggtagtcaaagtcaaggtggcctgctggcaactgcggtttataatgtaacatat

SEQ ID NO: 41303 - DNA, 637 bp, Macaca Mulatta
cctgacttgccagatgcatcatgtctattttgggaaaatggactgaggtctctggagcccttgtctgtgactgaacctcctgagaaggggcccctagcagtggtcagaggtcctgtctggatggaggctgtaggctccccttcaacccctctgctcagtgcctgtggggaggagcctctatcctcagcatcctggccacaggttcctccttccactgtcccttttctttatccctggcctctctgagaagaggggtgtggtctctcagctgttctgccctcatacccttaaagggccagcctgggcccagtggacacaggtaaggcaccatgaccacctggtgtgacctctctgtgccttcctgaggcacctttctagagattaaaatgagcttgatggctattccaaagtgttgatggctgggaggaggggccagaggagaggtgaggggtggggtttgtccagccctgggctttctgggctctagagacagcacagtggaggctcaatgacagttctggggacagcagggcggaggttcaggggcagtttcgggactgcagggtggaggctcagggacagttcctgggaggccagcaccctcgttcctccttgtcctcatccctccacttgctcc

SEQ ID NO: 41304 - DNA, 825 bp, Macaca Mulatta
gggagagtgggggccagcattcaacaactttaaagaaaagaattttcaacccagaatttcatatacagtcaaactaagcttcataagtaaaggagaaataaaatcctttacagacaagcaaatgctgagggattttgtcaccaccaggcctgccttacaagagctcctgaaggaagcactaaatgtggaaaggaaaaactagtaccagccattacaaaaacatacaaaaatgtaaagaccatcgacagtatgaagaaactggatcaactaatgggcaaaataaccagaccagccagcatcataatgaaaggatcaaattcacccataacaatataaatgggctaaatgccccaaataaaccttaaatataaatgggctaaatgcccccaaataaaagacacagactggccaattagataaagagtcaagacccctcggtgtgctggtattcaggaaacccatcttccattgcaaaaaaaccacataggcttcaaaattaaagggaatgggaagaaatattttaccaagtcataattggaaaacataaacaaacccaaggggtttgcccaggctttcaaattctttagtcctcctgaaaaaaaaaagtactcttaaacttaattataagaaccaaataatgacaaaataagggaaaattgccataatttgctcaaaaaacgaatactatgtaaaaccaagaaataagtccttaacttattcccctaaatttttctttgtgcatacccctaattaacttgtggaaacccacccccagtaattgccttacaaaacaatagggtttcccttttaaaaggtccccttcca

SEQ ID NO: 41305 - DNA, 759 bp, Macaca Mulatta
gggagggacgatgcgaaattctgaagtcgacttcccgctggctcctggcgtgccctcgctccctcctgagcccagctcgtggtgcgccggagcctgtgcggcccctgattctgcacggtgtagaacttcctcccatagtcacattggcagagggagaactgggggctggcagggaattagaatttctctctctcttttaatagttttattttgtctgtcctgtttgttcatttggatgttttaattttaaaagaaaagaaccttgctgatatttataattttgtatcataagaatgttttcctctacagtatttgtcatgccagtttataacaaaaaaaaaatgcagggattttatttctattggaaacattacagctatgttttacttttggacagaatttttatttgtatagagtgcttactaatgttaaatagttcagagtatataacattgacattaaggactcatggtaggttttagggtaaggagtttaaaggaaataaatattcaaactgggtctcattgccaattttggtggaaatgagtttgtgtcattttcattacaaagataaaagtatgccatataatttatttatatgaagatttatttttgtaatgtacatagtagtcatccaggtcttttgaacaaaatatatttttaaagaaatttaaatgtgatgaaatccataaatgtccgggaacttttgcctgaaaaacaggaattgggggcaccaactttttccattggtaaaatttc

SEQ ID NO: 41306 - DNA, 514 bp, Macaca Mulatta
  misc_feature (1)...(514): n = A,T,C or G
ggtgcattatctgtgtaattccttggtgtttgggaaaatgacatgtcacttcagtcattttgtccaatactcttgtgcctatgtaactgtgattaccatggcttctgtttccctagacaaacatcaggtatgtgtttctcatgggccttcgggtcttgtaaagggacaagttcttctcctagatacagataagatcaaaaataacctagagagttctttgaattgtttaagatatataaatgntgatgctgtatgccctgaaatcttggattactccaatgcaagacaatgttaacatcattatcatctggattgtgagtaactgtgctcctttgccacattcaatttgccagaagtttcaccaggtggagattggngaaacataactgaagaaactgtctgcctacccagtttcccatatacttcanaatcttcatggaaataccttgannnnnnnnnnnnnnnnnnnncatcttgccattaatggtactagtggttgtttatggtcatgtgg

SEQ ID NO: 41307 - DNA, 728 bp, Macaca Mulatta
  misc_feature (1)...(728): n = A,T,C or G
ttttgcatgatgaattccaggctcacacttttccaagtttatcagtgaagtagtgattaacaatggggagtgtcaaaactattgaacttttgnnnnnnnnnnnnnnnnnnnnacaaggtgccaagatgtaaagaaaatttgttactttttttctcaaagaaaagcatacattagggaggtagtcccatgtgtcagacaaatgcactgtcaggaatgaggatccaacctacctgtccctagagtctgtcttgtaagataaggctgccaccttggaccagccgcaaaatggagtatcaaggcttatgtacatacatgaagagttaccgccagccctgccacctttggacagctctaacaccatccccagcatcccgtcagacctagtaaagaaaaccttggattcttaacccaagatatgctgtaaatcactannnnnnnnnnnnnnnnnnnnnntnnnnnnnnnnnnnttgaaaaatatttcctctcttttccacattccagctgagctccgtttccaaaggcacaaagaagagtgtgcttattcagattttgaatcttttgggtaccttttggttaatgacatagccttctgagattttggatgtcttcaaagtcagttttgctttttttatcctgagaatcagatttacaatgctgaaggcatttcttgggcccagtgtagctcatgcaatctctgttaccataaagctgatgagatgatacagtct

SEQ ID NO: 41308 - DNA, 812 bp, Macaca Mulatta
  misc_feature (1)...(812): n = A,T,C or G
caagatttaaaacacttgggtttccaagcttgggggggccaccaccctcaaaaggcaaaaattcctttnnnnnnnnnnnnnnnnnnnnnnnnnnnnnnnnnctttactgggagccagggaaaaaagtaagtggatgaaaatacgcaccttttgactccctccaaacctttttcactatttccgggtcccaaaatggaaaacttctggggaagtgaggtttttcccccctgtctatccttaggagatggattaagtcctttgtagggaaaagttttttttctgattactggttagctatgcggagcccttcttcctatcacagaaagaccatgatggatcttgaagcatcgtcacactgggatgtaatcagggcttatacatttcataaacactgtgtttcttctcacatccctctgaatgaaagcaggaccagatctctttgatggctcctttccctgaccccctaagtttatggcatcaaaataaagacaaataaagacaagtatcttctattgtatttttgctcctgagttgtattgggttgctgcaaaagtaattacttttacacaagcctaaattgaatgagaatcttcactattttattattggttcaactacctacttgatgtgacttcagaggcagtnnnnnnnnnnnnnnnnnnnnnnnnnnnngacagagtctctctctgtcgcccatnnnnnnnnnnnnnnnnncnnnnnnnnnnnnnnnnnnnnnncacctcccaggttcttgcnnnnnnnnnnnnnnnnnnntnnnnnnnnnnnnnnnnnnnnnnacctgctaccacgcc

SEQ ID NO: 41309 - DNA, 1073 bp, Macaca Mulatta
attcccattattacaaataaagacaaaactttgataaactgtgaaaatcttatcgtgctatgtagaaacattgaactaatattcaaatagttgaatgctttggtttcagggattggtttaaaatttgcgtactttttcatgggttagtcttataaaaatttaagcctttatatttttgactttaaatcaaaacaaatgttattttaaatgtacagaatagattgatagtgcagaagagcgtaagttcttcataggagctttagaaaagagaagtatatgccaattcagttttttttttaatcttctgcactgtacatatacacttggtaattatgagctcaattttgtttttggaaatagtgttgataatttaggtaatttgctacttaaagcactaagtctctgatacctgaaaagtaaatgtaaatggtgatggtgaaataatactgcaattaacttaatagatgtatactgctgatttttgtatgctggatttaaaactccagatattaaaatataacctggataaaaaagttattggactgattgaggatcacttacattactttacataaatggaaacatccttgttggtatatgatattattttactcaaggataagtgtttattcataagaaattttgattgatgtattacatgttcaaaaatacagtgtgctttgtatcttgtgtttcttccttttgacctcatattgtcaggttttccagtttacaaaaattaagctattcactaaaatcttagtacagacagtccctgacttaaaatggtttgacttaagactttatattaaacgcatcttcgactcatgatatttttgacttacagtgggtatattgaggcctgaccacatcatcctcaacagtctgaataaaagaataaatgggtatttagaaataatagattgctgacgggaaataagtcagtctggttgtttaatttttgtatgggaaattgggcgttttaagttttgtggatcctagaacaaattgagttttattattttgaactcaggataatattgcataaataaagcatactctgtagtttctac

SEQ ID NO: 41310 - DNA, 621 bp, Macaca Mulatta
agcattctattacagtatgaagaattgtctcataagttaaaactgtactcttctctaaccttcctctcactcctacaaggtccttttctcaagtcatatttttgagagaaatgtgtggttctttctcacaggcctgctgatttgtaactgtgccattgaatagagcaattagatccatcagacctttttcccctcatgaggttcagtggaaccattctagttaaagcagcatgaactgaactcagtttacattcatattctatgggcaataccatttggtttttggaagtgcttatctgctgttccctatcaagtattaatgtaggaatgtcacgtgggctgcgttgcactgggctgagttcagctgcggtgctcccactgatgcgtgcttatgtgtgcttctcacctccggagtgcaggcaggtgtctgcagggtcccagctctgaatggatgcccgtgacacaactgggacagcccttgcttttttgcttgctctcccacagaagcctttgtccttgcaactttatcctttgcccctgactgggtcccaaatacacaaaatgtacaaatgtaaacttgctcattttattaaaattcttttagttctttgttctttctgt

SEQ ID NO: 41311 - DNA, 300 bp, Macaca Mulatta
agtgattttaatcggtcatcctcaggcctaattcccctctaggctgttcttttggggtacgttctgcacctttgtatctcctgcacctcaccccgtgccgggcacgcagggcgtccgctaggagctggatgcatttactacacctttgggagggttcctgaggggcacctggaaccggttagttcttgtgaacaagtctcccatgtagtggccgagacaggcatgcaaaataaagtatgtagagcaagagtctagtaggcttatttcagaatcatatttttcatgcataaaaatacatat

SEQ ID NO: 41312 - DNA, 1320 bp, Macaca Mulatta
  misc_feature (1)...(1320): n = A,T,C or G
aactgctattggatgaccagaattccctgtagttgataatgttgggaataagctctgcaactttctttggccttcagttgttaaaaacaaataggatgcaaattcctcaactccagattatgaaaacagtacttggaaaactgaaaactacctaaatgatcgtctttggttgggccgtgttcttagcgagcagaagccttggccagggtctgctgttgactctcgaagagcacatagcccacttcctaggaactagaggtgccactactaccatgggtaattcctgtatctgccgagatgacagtgggacagatgacagtgtcgacacccagcagcaacaggccgagaacagtgcagtacccactgctgacacaaggagccaaccacgggaccctgttcggcctccgaggaggggccgaggaccacatgagccaaggagaaagaaacaaaatgtcgatgggctagtgttggacacactggcggtaatacggactcttgtagataatgatcaggaacctccctattcaatgataacattacatgaaatggcagaaacanagatgaaggatggttggatgttgtccagtctttaattagagttattccactggaagatccactgggaccagctgttataacattgttattagatgaatgtccattgcccactaaannnnnnnnnnnnnnnnnnnnnnnnnnnnnnnnnnnnnnnnnnnnnnnnnnnnnnnnnnnnnnnnnnnnnnnnnnnnnnnnnnnnnnnnnnnnnnnnnnnnnnnnnnnnnnnnnnnnnnnnnnnnnnnnnnnnnnnnnnnnnnnnnnnnnnnnnnnnnnnnnnnnnnnnnnnnnnnnnnnnnnnngaagttacagtcccaccccacagtcatgctttttgcacttatcgcactggaaaagtttgcacagacaagnnnnnnnnnnnnnnnnnnnnnnnnnnnnnnnnnnnnnnnnnnnnnnnnnnnnnnnnnnnnnnnnnnnnnnnnnnnnnnnnnnnnnnnnnnnnnnnnnnnnnnnnnnnnnnnnnnnnnnnnnnnnnnnnnntttaaaagaaggtagacagctgacctatgagaaagtgaacttgagtagcattagggccatgctgaatagcaatgatgtcagcgaatacctgaagatctcgcctcatggcttagaggnnaggctcgctgtgatgcctcctcttttgaaagtgtgcgttgcaccttttgtgtggatgctggggtatggtactatgaagtaacagtggtcacttctggtgtcatgcaaattggctgggccactcgagacagcaaattcatcaatcat

SEQ ID NO: 41313 - DNA, 866 bp, Macaca Mulatta
atataaaaggggggtggtatgttgggcttaaagagaattaagaatataaataattttatacaacaaattagggtaaggtcccccagttttggcccattgttttaaataacgctgtttggaaatataaacaccattgcccctatatgcctgtgttccaggtggaaggttccagtttcaagcttggttttgaaaaaacccagtttcccaaggagcttttaggattgacaccatcattgaaattattccattgtaagaagaattcattggcctttgggctccaatcaagcttatggttattcttctttggtctgaaatgccttatcagtccttacccagctgaagcaagccaatgcttggtaaaaactttgccacgaagtctggctcactgaactccagctgtctgacaaattcattgcgctcatgctcagcccagcctcgaaaccactgatcccaaagatgtagctgacactcaaagatagaaggtggtcggtctgccccagacacactaagctgctccagactatccagcaatggctgtaatttttctggcactgccttagctaccaggtcctctaggaaacgttcacgctggggacctgaccaactggcaaaccagtgaagaatacacttcatctcctgggaggtgatgtaagacatcggaggaggggaagggttagtattgtgtggtactgagggtaagagagatgggaaggatagcggcattgaagaggatgactccagtggcatcctccccttttctctcggagggcacccgaagattgtcaggagtccttagactccaactaccgctgcagcttccaaatttcctcaaaaccctaagctgggccagcccggcagcccacccc

SEQ ID NO: 41314 - DNA, 178 bp, Macaca Mulatta
  misc_feature (1)...(178): n = A,T,C or G
ctacctggccaatgacatggaggaggacagcgagacccccaaacaaaacatcatctacttcctgtacaggaagaaccgctctcagataccctnnnnnnnnntgttccataagcttcggttccagttcttccgttccatgcgcttcagggcctgggtttccctggaggagttggaggag

SEQ ID NO: 41315 - DNA, 491 bp, Macaca Mulatta
agtctgctcactgaagtggcctccatttcaatatacccttacagggaaatgtgggtttcaagactaggttaaaaattttcagacaaaaggtgtcatatggcacagttggaaggatgcagaattaaaatgcagagacccaggaccagacacttaacctctctgagtgtttgtattcacagcgttagaataggctgacttgtatcctttttgctaggctcaaagacggtgaggagtgtcgaagttgctggtaaattgtgaagccctcctgctccgtaggtccgaacctccctccatatactcaggtgtcctggaacatcatggggaatcccctgttccctgggaggctccagactccaggggattttcatggtgcccaaaaattgaggggaaggtcgccactctccagacatcctggtttctaccatgtatgcattgcccaacctctctgtggccatttaaactcctgtggctgtttttataaccacttgtgg

SEQ ID NO: 41316 - DNA, 785 bp, Macaca Mulatta
ccccactgaaattgaagtcaagaaatgcaaaaaggaattgacacatctcagcaaagaaaactgaagggatttggttataagtggagaagatctcagcacatttctggaagagagaaagtggatgaaacatgataatgaaagagtgaagaacctttcagataaaatataagctgatctgaacaacataaccccaaagagacttgagcacctgaaaagtttgtctactgaagaattactccggttgtaaaattgagccctctcctactcttccccaactcttatgcacagaacacaggcagtctccactattgatacccgttaaaaatgtcttgttattgttgctgttgtttgtataaaggaattgaacagactgcctgcagagacataagagttggtgctccagaaaaaaatttctcttctagtggaaataagtgcccccagccagtagctgattctctactgacagctgagacctcctactcaagtgcctgttgccttcaggtatagaagagatttgctgaagaaacagacctaaccgtacaacagcagaggaaacccatgctgactgttacagaagttaacagttatgttgattcttaaatgggaatagtgagttagaaattcccagacatgggtgatggggagggaagaggaataagaaaagtcaccagatagaattaggggccttgaagatatgacaaactctgagggaaacaaagacaatgtagaaagaataacttaattttaattccatcttcagagagagttgaggtgtatttaagatg

SEQ ID NO: 41317 - DNA, 824 bp, Macaca Mulatta
  misc_feature (1)...(824): n = A,T,C or G
ggagcgctggccgaggtctgtgnnnnnnnnnnnnnnnnnnnnnaaagcaggtggatcacaaggtcaagagattnnnnnnnnnnnnnnnnnnnnnnnnnnnntccgtctctatnnnnnnnnnnnnnnnnnnnnnnncatggtggcannnnnnnnnnnnnnnnnnnnnnnnnaaggttgaggcaggagaatcatttgaacccnnnnnnnnnnnnnnnnnnnnnnnnnnnnngcaccactgtactccagcctggcgacaaagcnnnnnnnnnnnnnnnnnnnnnnnnnnnnnnnncttgagactgggtaatttatttaaaaagatatatattttttaaactggctcacagttctgcaagctgtacaggaagcatagtggcatgtgcttctggggaggcctcaagaagctttcaatcgtggtggaaggcaaagggggaacaggcacatcacatggtgagaatgagaacgaaagggagaaagtggggtaagggagggggtgccccatattttttaaaccaccaaaatctcctgtgaaactccgaagggagagcttccccattcccgggggatgggccccaggttcattccttaagggaattctggtccccaccgattccaaaacaccttcccccccaggccccccaccctcttcaccgactggggccattttccatttttacacctggaacattttgggccggggggggaaaaccctccccttttccttttcccctctttttttctgggagaccaaaggtcccctgcgccccttggtggcgccccccagcgctggggaattggggaccaccaacttttttgcggggcag

SEQ ID NO: 41318 - DNA, 772 bp, Macaca Mulatta
ggatcactgaatgtttgtaagctggttaaggcatagccttgatggctctctagcaaactgtagaaacaatgtagctttgggtagtttcatgctttgcagaatttcttagactataaagtgacacagcctggaatataggttgataattcactataggtcctcaaaatactttgaaaaccacttctctgtttggtggggtactctttgggggtcatttcctcatgctctttcttaaatggagttttcattttgatgttagtttatgtataataggtaggatgcaaaaagatatgtaattgaaacaaaaaacattggactaaaatatcagtaattgaacatgtttatgtttgattattatttacactatggaaagatgcaattctagtactttgttaggaaactgcattaaagcagttctgccttgtataatctgtaagtacctattaagacaaaatacttctaaagatacttatgaaatgtatacatattttttcttgcacgttacaaagaaaatactcaattgcataacacagttggtttgacaaactttttttttaatgcatttctttctttcatgagacattgaaaccactgatagctcatttcactctatcttaaacccttctcttgtctataaaactaatacgggtcacaccggacctttcggattaattggatccacatttcccatgatgtttgcaccccatttcaagaataccatgcccatttgtcatttaactcgtggaacctctcctttaaaactaaaatgggg

SEQ ID NO: 41319 - DNA, 809 bp, Macaca Mulatta
tgagcactttttgaatttattagcatgtttcccactttggttctagtgaagattccccatggtgaatattttctgcttagttcccaatcgctttctgcccagctgatttcccccgccccttatagcagcactctcatttcactgtcttatctgctttagagcctcacttgggagcccttgcttcaagaagtggctttcaagcttcaagctaccccaaggtcccccttgccctgtttatcctttctttttctggccccagtggaccctggggcagggtgactttattaaagactctataaaacaaagttgtctgtcatctcttcagagacaccaccccctgccccgcttctactggtaattgaaaaaagaactctccttgcttatccgcttccctccgccatccctgggaaaaggacgtgttgggagtagtaacacgtggtcattgccggggtgagcagccagttactgtagtgattggatagtgacaattcccatcccacctccctacctgcagcatctgactggttggtctggtttcagtgttccatgcctagattactggatagagggtggtaggcacataaaacattgctcatgccctaccctgtatccagctttcattaccatccttctttaatcacttttcaacttgggttttatcgttcttttatttaatcttttttcactcccacctctactgtttgcctgccttctattctctggaatcttccaatcaagcagctgtaactttacatgtcctacacccagccccctcccctgcctcctgggaagaccaggagggagcaccc

SEQ ID NO: 41320 - DNA, 922 bp, Macaca Mulatta
  misc_feature (1)...(922): n = A,T,C or G
ggatctatttaaatcacacctatattttatgtgctctcagcatttaggcataggctaaagcagaagtcatatatattctctatgatcacatcactatatgatatattcagcttctttcagtagttaaaatacatggatttaacctttgatttttctagttattaataagactgctttcagctacctaacttttttgtcttatcctatgtaaggcctgcctgtactctgatcctcgccaatttaccactgaacctccacattctgtttgtcatgtaaattggaaatgaagtaaaaattattacatatttcatatttaatttgctcttcatttttttaaattcttgaaagtcttgaattcttctttatttattgatataagcttattttttaatgaaatgtttttgggttgaatttcttcaacctcttcaacttaaaaggttgaagaaattcaaaagtgaacatcttgaacgtttagcagttagagacacttgctttgaatctgctctccttaaccagagaaaagacaatagtgactgatgagacgattattaagagatgaacctcgagactattctnnnnnnnnnnnnnnnnnnnnnnnnnnnnnnnnnnnnnnnnnnnnnnnnnnnnnnnnnnnnnnnnnnnnnnnnnnnnnnnnnnnnnnnnnnnnnnnnnnnnnnnnnnnnnnnnnnnnnnnnnnnnnnnnnnnnnnnnnnnnnnnnnnnnnnnnnnnnnnnnnnnnnnnnnnnnnnnnnnnnnnnnnnnnnnnnnnnnnnnnnnnnnnnnnnnnnnnnnnnnnnnnnnnnnnnnnnnnnnnnnnnnnnnnnnnnnnnnnnnnnnnnnnnnnnnnnnnnnnnnnnnnnnnnnnnnnnnnnnnnnnnnnnnnnnnnnnnnnnnnnnnnnnnnnnnnnnnnnnnnnnnnnnn

SEQ ID NO: 41321 - DNA, 1076 bp, Macaca Mulatta
  misc_feature (1)...(1076): n = A,T,C or G
gggctgaaggagaaaaagacagcgataagctttcaatagtggcataccaaatggcacttttgatgaaataaaatatcaatattttctgcaatccaatgcactgatgtgtgaagtgagaactccatcagaaaaccaaagggtgctaggaggtgtgggtgccttccatactgtttgcccattttcattcttgtattataattaattttctacccccagagataaatgtttgtttatatcactgtctagctgtttcaaaatttaggtcccttggtctgtacaaataatagcaatgtaaaaatggttttttgaacctccaaatggaattacagactcagtagccatatcttccaacccccaaatataaacttctgtctttctgctatgtgtggtactatgcagctgcttttgcagaaatcacaattttcctgtggaataaagatggtccaaaaatagtcaaaaattnnnnnnnnnnnnnnnnnnnagtaatttatatagatgtcagcaattaggcagatcaaggtttagttggacttccactgttaaaataaagcttacatagttttttttcctttgaaagactgtgctgtcctttaacgtaggtttataaagactaggatattgaatgtgaaacatccgttttcattgttcacttctaaaccaaaaattatgtattgccaaaaccaagcccaggttcatgaatatggtgtctattatagtgaaacatgtactttgagcttattgtttttattctgtattaaatattttcagggttttaaacactaatcacaaactgaatgacttgacttcaaaagcagcaaccttaaaggccgtcatttcattagtattcctcattctgcatccctgcttgacaaacagctctgttgaatcacagtatcagtattttcacacgtaagcacattggggccattttccgtggtttgtcacgaagctgtgtttcacagaacctcagcagggcatcgccatggaaccgcaggagggcagatttcggaccactaggccctgaaaaatgacaggttcactaaaaagtcttcaaaacatttttttaggactactac

SEQ ID NO: 41322 - DNA, 551 bp, Macaca Mulatta
  misc_feature (1)...(551): n = A,T,C or G
ccagggaaatccttcgaggatgatcccaaacgcaactgtattttcagatatttctgtactctttttcaagtcacaaaactaacagctccatgtgcaatcatagctttggtannnnnnnnnnnnnnnnnnnnnnnnnnnnnnnnnnnnnnnnnnnnnnnnnnnnnnnnnnnnnnnnnnnnnnnnnnnnnnnnnnnnnnnnnnnnnnnnnnnnnnnnnnnnnnnnnnnnnnnnnnnnnnnnnnnnnnnnnnnnnnnnnnnnnnnnnnnnnnnnnnnnnnnnnnnnnnnnnnnnnnnnnnnnnnnnnnnnnnnnnnnnnnnnnnnnnnnnnnnnnnnnnnnnnnnnnnnnnnnnnnnnnnnnnnnnnnnnnnnnnnnnnnnnnnnnnnnnnnnnnnnnnnnnnnnnnnnnnnnnnnnnnnnnnnnnnnnnnnnnnnnnnggctatgtcacggccatgtgaatacaaagacttacatcaagatgccgctgctatgaaaagggctgtcagcatgaatttcattggtattcggtgccctaatgccatcttatcttaa

SEQ ID NO: 41323 - DNA, 791 bp, Macaca Mulatta
ggagatttaaatagccaaaggaagacctcattgccttccaggtgaaggtgcaaagtcatacatattaatgacctgacagttaacattctgttgcttattattgcctttctccaccttagagagccgtaaataactctctggtgaagtgatttgctgtaatgggggtgaggagttggggggggcttctctggtcattacactgctttttatttctagaactcactatcagtgagcagtgccagagtgttttctctttgacctagaggtttcacatcatagcgaggagggaaaagtctccccatctcattacaacagtgtgctacgtaagtaacttggccaagggtagttttcagctaaatttatagaatagtccaaagagactttgagaaacatggtgataggcaggggcctttcctaccatgtttcgatacctacacacctattgaaagagaacagtaggtaaaacatttcctaaagttgaagcaatagcttcgtagattcttggttactttatttttttaatgctttacatttgatacaactattgaagatcaattttaaaaataactttccagtaatatattttaagtaatatatattttaatatctgtaaaaagtggcagtggaaagactttgaatttctcatataaggtaatgttttgatgtaaggacctctcttgttaagcacaaattattttcaagggaatttactctaaaagacactcaaaattatttcaaaaaaaatggcataaagggggaaatagtttttggggggtttaatttttttaatt

SEQ ID NO: 41324 - DNA, 668 bp, Macaca Mulatta
  misc_feature (1)...(668): n = A,T,C or G
caccaccacgcccggctannnnnnnnnnnnnnnnnnnnnnnnnnnnnctccatgttggtnnnnnnnnnnnnnnnnnnncnnnnnnnnnnnnnnnnnnnnnnnnnnnnnnnnnnnnnnnnnnnnngnnnnnnnnnnnnnnnngcgcccgctatccacatccttttagagtcagattgctagggtccattgacttcagcttttgattttaaaggatggccctgtatcctcctctgccccattccctggttcattaaccagtgtgaagtgtatgcagattgttgctccttctttccaaggtcacatgtgtgagatgcttgggtgctgctttagaaatcaagatgatctcctttaatttgcatgaaactacaccatgccgcattccccaggcagacggttctgctttgacacaccaaagaatcccgtaggctagcagagccgccggcacaaaccaagggcgctgggtgtcgagactcagaggggtcagctgtgtccctcggcatcagtgtctaccaaggtgctgctaggtacagagccagccagtgttgggcagcaggctcacagcctcaataggcagaaaggacaaaggcctcaaaaggacaggcagcctggccgaggaagggagtctgacacctcagcttgatgtgtctttggaattcctagctcatctc

SEQ ID NO: 41325 - DNA, 393 bp, Macaca Mulatta
  misc_feature (1)...(393): n = A,T,C or G
tgtcaataaggaaggttataaccactattcaatatcaaaagatgcatctacttctcgatgaggaggagcaactgcatctgcaggcactggaaagagaagcaaaagagcttttccaacaactacaagacagtcaagtgagaatgacccaacatttagaaaggatgaaagacatgtacagagagctgtgggagacgtgccatatgcctgtcgtggagctgctccaggtgaggagggagggtccatcctcagagacaggaagtccttgctggacattgctgccaggacatgcaaatgtcacctgcatatgtcactgctctaagctaagtgtcacatgctgtctgactcccaccattatagtacatctgtccagtcacttattactggatactttgn

SEQ ID NO: 41326 - DNA, 660 bp, Macaca Mulatta
ggggagcagcaccaaatccaagatggcggccagcaggaggctgatgaaggagcttgaagaaatccgcaaatgtggaatggaaatcttccgtaacatccaggttgatgaagctaatttattgacttggcaagggcttattgttcctgacaaccctccgtataataagggggccttcagaatcgaaatcaactttccagcagagtacccattcaaaccaccgaggattacatttaaaacaaagatctatcacccgaacatctttttttaggggcaggtctgtctgccagtaatttgtgctgaaaactggaagccagcaaccaaaaccgaccaagtaatccagtccctcatagcactggtgaatgacccacagcccgagcacccgcttcgggctgacctagctgaaaattactctaaagaccttaaaaattctgtaagaatgctgataagttaccaaaaaatattggggaaaacaactgtggactaaatttgcacgattgattccaccagtgtgaacaaaaacgaacccctgtaataattcaaaccctccaagaaaggctctgggaatataatcgccccccggggttccttggaaattatgattttcatttttctattaaaaggggctggaactctaaaaaggttaaaattaaatttaaaaaa

SEQ ID NO: 41327 - DNA, 245 bp, Macaca Mulatta
ggtactgctactataagctccaggctgacttctcctcagaccacctgggctgtttcaccaagtgccggaagccatgcaggttagtgtcccttgcccgggtgcaggttgggtagaatacaggttacccagccaagccttcgagtgggagagctctgccccaacactgaacacctttctccatccccagtgtgaccagctaccagctctcggctggttactcacgatggccctcggtgacatcccag

SEQ ID NO: 41328 - DNA, 939 bp, Macaca Mulatta
  misc_feature (1)...(939): n = A,T,C or G
ggtgacattcttaacgccttggctaatgtttctggacgtaaacacccgtcaacagttcaagtgaaacagctgaagatgtgtctccccctgatgcctatagtgcttcaccttgtaacttcacaggtnnnnnnnnnnnnnnnnnnnnnnnnnnnnnnnnnnnnnnnnnnnnnnnnnnnnnnnnnnnnnnnnnnnnnnnnnnnnnnnnnnnnnnnnnnnnnnnnnnnnnnnnnnnnnnnnnnnnnnnnnnnnnnnnnnnnnnnnnnnnnnnnnnnnnnnnnnnnnnnnnnnnnnnnnnnnnnnnnnnnnnnnnnnnnnnnnnnnnnnnnnnnnnnnnnnnnnnnnnnnnnnnnnnnnnnnnnnnnnnnnnnnnnnnnnnnnnnnnnnnnnnnnnnnnnnnnnnnnnnnnnnnnnnnnnnnnnnnnnnnnnnnnnnnnnnnnnnnnnnnnnnnnnnnnnnnnnnnnnnnnnnnnnnnnnnnnnnnnnnnnnnnnnnnnnnnnnnnnnnnnnnnnnnnnnnnnnnnnnnnnnnnnnnnnnnnnnnnnnnnnnnnnnnnnnnnnnnnnnnnnnnnnnnnnnnnnnnnnnnnnnnnnnnnnnnnnnnnnnnnnnnnnnnnnnnnnnnnnnnnnnnnnnnnnnnnnnnnnnnnnnnnnnnnnnnnnnnnnnnnnnnnnnnnnnnnnnnnnnnnnnnnnnnnnnnnnnnnnnnnnnnnnnnnnnnnnnnnnnnnnnnnnnnnnnnnnnnnnnnnnnnnnnnnnnnnnnnnnnnnnnnnggacttgtcagtcacatctgtaacctgctcactgaaactgccacactgtgcttggatgtggatagtaaaaacaacaatgaaatggcagctgcactgctcttttccctgcttgatattttgcacagtatgctgacctatacctccggtattgtacggctggctttgcaggn

SEQ ID NO: 41329 - DNA, 331 bp, Macaca Mulatta
gtgactgcggtttgggactccctagctgacgctgggacacccgggaagccgaggaacggactccgtggcttttgaggatgtggctgtgaactttacccagcaggaatgggctttgctagattcttctcagacagaatctctccagagaagtgatgcaggaaacctgcaggaacctggcttctgtagaaatcatatggtacagagactgtgtgaaagcaaagaaggtagtcagtatggacaagttgtcagccacattccaaatcttgatctgaatgagaacatttctactggattaaaacaatgtgaatgcagtatttgtggaaaagtcttt

SEQ ID NO: 41330 - DNA, 940 bp, Macaca Mulatta
  misc_feature (1)...(940): n = A,T,C or G
ggggtcaatgaattatatacagagagtgtagtactgctactgtctgacttgtcatgggttctacactttgctgttattcagaccagcccgtggagtaagcacaggctattctgaggattttcaactgataacaatgtaagcatgcttaggagcagatgcgattcagtaatgagaaaaccccgtcaatttgggtgttaggaataactcattgtgcttgctttttgttaaactttagacggtattataatggacaaattaaattaaattcagaagactcttgtggggacagtcctttaagtactggaaatgctgttatttggaagaaattattactttagaattttctcaaaattattgtaatcaaattagcataactcaagaaagacatggtcttcaaacaatctttcccacaaaactttaattatttaccttatttctcaaatggaatgggtgttcttaaaggtcccacagaaatcctcccaaaagttggttccaacaagacatcaattcataaaaagataattcccccccttggaaaaaggggtaattttaacacaaaaattacaaaggggttaccttgagaatatagaaataactgggcccccttttccataataccctaacccccctgtttcccttctggacgggctggcaaataaaacctttgctcacccattctatcttagcccgaagctttgtacaagtaaactaggtcatccgacccttggagaaattctaaaggggttctcaactaagattctattaaaataagcgcaaaatgttctaagcagacacaaagagaggtccgtgaacaacccaaacaattataccccacatggattctgtaggtgcgccgagaccaggttttgtattaagtacacaaaagacctcaaggaaacacttcttaagggctgggaccaaggggattacaatgtaaacn

SEQ ID NO: 41331 - DNA, 483 bp, Macaca Mulatta
ggaagaggtggagacattacagaaaccaactggagtccccagaactggcagacacctgcctgatgcctgccatgggcccccagctccttggctatgtggtcctttgccttcataggaccacagccccttggaagcccaagtgacccagaacccaagatacctcatcacagtgactggaaagaagttgacagtcacttgttctcagaatatgaaccatgagtatatgtcctggtatcgacaagacccaggactgggcctgaggcagatctactattcagttaatgttgagatggttgataagggagatattcctgaagggtacaacgtctctcgaaaagagaagaggaatttccccctgatcctggagtcgcccagccccagccagacctctctgtacctctgtgccagcagttcaagggacagggggcaacaacaatcagtacttcggcgccgggcaccaggctcacagtcatagaggacctg

SEQ ID NO: 41332 - DNA, 1992 bp, Macaca Mulatta
  misc_feature (1)...(1992): n = A,T,C or G
gtgttgctatctctaacccagacctggtcacctttctggagcaaagaaaggagccctacaatgtgaagatacatgagacagtagccaaacacccagnnnnnnnnnnnnnnnnnnnnnnnnnnnnnnnnnnnnnnnnnnnnnnnnnnnnnnnnnnnnnnnnnnnnnnnnnnnnnnnnnnnnnnnnnnnnnnnnnnnnnnnnnnnnnnnnnnnnnnnnnnnnnnnnnnnnnnnnnnnnnnnnnnnnnnnnnnnnnnnnnnnnnnnnnnnnnnnnnnnnnnnnnnnnnnnnnnnnnnnnnnnnnnnnnnnnnnnnnnnnnnnnnnnnnnnnnnnnnnnnnnnnnnnnnnnnnnnnnnnnnnnnnnnnnnnnnnnnnnnnnnnnnnnnnnnnnnnnnnnnnnnnnnnnnnnnnnnnnnnnnnnnnnnnnnnnngaattcatactggagagaagccccacaaatgtgaagagtgtggcaaagcctttatatggtccacagacctgaataaacataagataattcatactggagagaaaccttacaaatgtgaagagtgtggcaaagcctttnnnnnnnnnnnnnnnnnnnnnnnnnnnntaaagttcactactgaagagaaatctttcaaatatgaagaatgtggcaaagcctttaataggtcctcaacccttactaagcataagagaattcatgctgaagagaaacccttcacatgtgaagaatgtggcaaaatcattacctcatcctcaaacgttgccaaacataagaaaattcataccagagagaaactctacaaatgtcaggaatgtggcaaagcctttaataggtccacaacccttactaaacataagagaattcatactggagagaaaccctacacatgtgaagaatgtggcaaagcctttagtaggtcctcagttctgaatgaacataagagaattcatactggagagaagccctacaaatgtgaacagtgtggcaaagcctttagacaatctgcaacccttaataagcataacagaattcatactggagagaaaccctacccatgtgaagaatgtggaaaagcctttagtcggttcactaccctgaatgaacataagagaattcatactggagagaagccccacaaatgtgaagagtgtggcaaagcctttatatggtccacagacctgaataaacataagataattcatactggagagaaaccttacaaatgtgaagagtgtggcaaagcctttggatggtccgcatacctgagtaaacataagaaaattcatactggagagaaaccttataaatgtgaagagtgtggcaaagcctttatatgttccagagccctgaataaacataagacaattcatactggagataaaccttacaaatgtgaagagtgtggcaaagcctttggatggtccacatacctgagtaaacataagaaaattcatactggacagaaactttataaatgcgaagagtgtggcaaagcctttagacgttctagagtcctgaataaacgtcagataattcatactggagataaaacccccaaatgtaaaggatgtggtaaagcctttaagcggcccttatatcttaatcaacataataaaatttttactggagagaaactctagaaatatgaagaatgtggcaaagcctttgaatgatccacaaacctgaatgaacataagaacatttatactggaaataaactctacaaatgtgaagaatgtggcaaagcttttggatggtccacaatcctgaatgaaaataagagaattcatactggagtaaaaccctacaaatgtaaagaatgtgggaaaaccttcaaacagtcctcatacctgaatcaacagaagaaaattcatgctggagagcaaccctacaaatgcgaagaatgtggcaaagcttttggatggtccacaaccctgaatgaacataagaaaattaatatgggagacaaaccctacaaatgcaaagaatgtgggaaagcct

SEQ ID NO: 41333 - DNA, 703 bp, Macaca Mulatta
cggcatctgccccatgattaggaatggacaccctgaccacgtcacagatagcccatttcacactggcatgtggatagtgactataaaacaccccttcagaacaaacgaagacccgaagggggaagcgggaagggacacccacacactgagtctctgctcttatcccagcttctctggccagctgcccctttgtcatttcccttctttgttgcaatggctccttgggagactgggggaggagactggggaaggggcctgggggctgaggacttccactatggcctgattttacagagcctctggcttcagtcagatcccaaatatcactgggaacagcagtgtgaggggctggaggccccaggagggaaggggctaggggctgcatggcagcttctcaaactcagccagaggagaaagctcctccttccaccgggggagcttggggatgcggcaagggtgtttcccctgcaatctccccagcctctattaacctttgaatcaccaaggaggagaaagcaatccagctggggttgggatggggaatgcagggcctcagtcactgtcagagcccactgcagaggacccttttcgtttccgcttggtaggcttcggtttcgtgtcttcctcctcctggaagagatgggcggggaaatgggaagttaccagcctgggcagctgctggtgcggaatccacctgcaccca

SEQ ID NO: 41334 - DNA, 949 bp, Macaca Mulatta
  misc_feature (1)...(949): n = A,T,C or G
ggattctagaggccgaggcgggccgacnnnnnnnnnnnnnnnnnnnnnnnnnnnnnnnnnnnnnnngagtctcactctgttgctcatgctggagtgcagtggcgcannnnnnnnnnnnnnnnnnnnnnnnnnnttgggttcagtcagttgtcctgcctcaccctcctgagtatctgggattacaggcacccaccactactctgnnnnnnnnnnnnnnnnnnnnnnnaagacaaggtttcactgtgttgtccagactgtnnnnnnnnnnnnnnnnnnnnnnnnnntgcctgccttggcttcccaaaatgctgggattataggcatgaatacccgtgcctggcgagacaagtcttgacctgttacccaagctgatcttaaactcctgaccgcaaaaaatcctgtnnnnnnnnnnnnnnnnnnatgctggggattataggtgaggcacaagtagcaccagagacctagaaactggcctttttttaaaaaacagaaccattaacaaaccttttcccagaatgggggaaagctgaccccaactaagccgagcttaatcttgacctcggaagacgaagggggtcccacacnataccgggatttacaccgaaaagctgagggacgctcccaagataggcaccagagatttcgactaggccctacaaatgcggcagaccccttacaagacatcaccgccggaccatggcataacaagaacgccattgctctacgatattaagaccctcccacccaaatagagagcagaaacaacaggacacaaattagtcaccggnanaacccgcanctccaggaacagaatacccagaaacacccctctacgacgagacaaaacagcaaacatttggcgcagagatnagaacacaagacaagaattaggacgtaaaatacgtgaaggagataacaaaaagagatcgagaacaaacgcccgngcgct

SEQ ID NO: 41335 - DNA, 493 bp, Macaca Mulatta
  misc_feature (1)...(493): n = A,T,C or G
agtcctgcaggtacaactgatgcaccctgtagccccgctgtgcctccaggatatcccggtgggatgggagtcatcgccacccccacctctgttccacccgcctgcagcccgagccccagctccggagcctgtaccgatcatatcctcctcgcggtcctcaaagctgatcctggtgttgtacttctccttcagagtcgaggactccagggcattcctcacctttgtgtcaccctgcagggcaaagcccccttcagccgtgcagacactgtgaacggggggctgtcagctttgaggggatgtgggctgtgcaggttcctcccagcccggggctacctcctcggtcctggacatcgtctgcactctgtcagccagnnnnnnnnnnnnnnnnnnnnnnnnnnnnnnnnnnnnnnncagctccaggttctcctccgtgttcctctgggccaggaagcggccagcgatgtcctggccattccaggggagagacaagcag

SEQ ID NO: 41336 - DNA, 176 bp, Macaca Mulatta
gctggcaagctatgagagccagattgccaagctacggtccgaggttgaaaagggagaagcattgcgacaaagtctggaatatgacctagctgttgctagaaaggaagctggtcttggaagacgggctgctgaagaaagattagccgaggcacataggatccaagaaaagctctgtg

SEQ ID NO: 41337 - DNA, 748 bp, Macaca Mulatta
  misc_feature (1)...(748): n = A,T,C or G
gggattgaagagacggaaaatttttgcaaaaaacaaggtgttgtggtcttccattcagtttcttaagtgctgatgatagaagtgaattagacccaccttggtctggcttatagacagcaaaggagtaaataaatacagacagtaaataaatgcctcaggtttacagacagtaaatttacagacagtaaataaatgcctcaggtttgctttttgattcatttgataaacaaagcatcctttatgtggaatgtaccattctgggtcctgaggatgacagaggtgagggcattagaccattgacagctgaagatagaagaacatctttagtttgattgtgtaaataatatttcagtgcctattctctgcaaggtactatgcttggtaaattagtaaattaaataggtctggtccagaagacacactcaattgcctttgagannnnnnnnnnnnnnnnnnnnnnnnnngcaagtttctttcaaaatagagacatttttcctagtttcaggaatcccccaaatcacttgctcattggcttagtttgaagccaggagactgataaaagggctcagggtttgttctttaatttattaagcaaacatttctgccttttattacagttacatgggttccagatgaaaacactaagtttaaaagggattttgcttcattgggtcctgggctcaaaaaacagggaaagaaattttggagccaataaccaaaaaaaatgtcttttcccccatttttaccc

SEQ ID NO: 41338 - DNA, 431 bp, Macaca Mulatta
ggaaccaatcaggacattttgcccaagatctaggacaggaagactcatgcagtaactcctgccttacagatctgggggcccttcacctgcctctgctactgcaaatgattggatattcatctgccttggcttttccctcatgtgtggaaataattttgttcactctgtttcatgctggacctggcctgaaaatgggcccttatgttgtctttgcactttccaacttgccaaggtaggtgtgaaacctgagggaagtttttaggaataggctttaggccaggtacttaagtgcatttgttcctaaccttggactccaaagataagggcatttgtagctggagtggaaaacaagggaacatgagaactaagatttcgtcctctgtgatgatactcatcattcactatccttcttctccagcatcaccagtgca

SEQ ID NO: 41339 - DNA, 570 bp, Macaca Mulatta
ttaaagcagtaagatggttatgccaacaaaaacccaaaatgatattttcgacaggaatgactttgaagggaaggaaggttttgcttgggttcattttgtctaacagctaccaacccattatctataccatttctcaacttggtattacgatccattctatttcatttctgttatcattgacttccttattcttctaattctctttattccttgcttgcaaatcattaaattgtttttcttcagaagctgtcaagcagccagtatacacatttgtctttgactaaaagaatattttttgtctcttctctgtggtcaggagcacctgggcctccaggcctccctgggagtgttgacctcctgagaggggagccaggtgactgtggtctaccagggccaccaggtctccccggcccaccaggccctccaggatacaaaggctttccaggatgtgatggaaaagatggccagaaaggtatgaatgttgttccgttaagtagtatgtgaacaccttggttatcttactcttaagggtctggggtactgtgccaccatttctatttcctgtgcaac

SEQ ID NO: 41340 - DNA, 806 bp, Macaca Mulatta
ggcacccccataattcattcatctttcaccaggtctctctcacaacacatggaaattatggaaactataagatgaaatttggtggggacacagagccaaatcacataattctgccccgacccctcccaaatctcatatcttcacatttcaaaaccaatcatgcctcccaaacagtgttccaaagtcattaactccaaaatccgcagtccaaaatctcaacagagacaaggcaagtcccttctgcctataagcctgtaaaatcaaaagcaaatgtgttacttcctagatacaatgaaggtacaagcatcaggtaaatacagctattccaaatgggagaaattgtccaaaacaaaggggctacaggccccctgcaagtccaaaatccagcagggaagtcacatcttaaagctccagaatgatctccttttactccatgtctcacatccaggtcacagtgatgcaagaggtaggttcccatggtcttgggcagctccacccctgtggctttgcagagaacagcctccctcccagctcccttcacaggctggtgttgagtgtctgcagtttttccagaagcctggtgcaagctgtcattggatctaccattctgggggtcggaaagaaggtgggccctattcccaaagctccaaaggggaaattaggggagcctacaaaatgaagatttggggggggggaacacaaagaccaaattgtgtattcccctccaaaagggctaaagttttaaattgaaaggttttaagggtttacctgattcaaaagaattaaagttaaaataaaattggccc

SEQ ID NO: 41341 - DNA, 742 bp, Macaca Mulatta
  misc_feature (1)...(742): n = A,T,C or G
gtagcagattctgcccatctctacccatactcaagggtagggctttcttcagttctcctccttttaagctgtagaaggatttggggcaaattctcaggagtaatcttgtcctctggataacgactcagttcatctaagtctctagcagacagaccaaagctggccaaaatgttactggcctggtctgcatctccacggtgttgagaagataaagggagtggacccctacttccaatgttaaatatagactgcaaattatgggaagaagtactagcagaagacagtgcactatgagctccttgttgattcaatgaagaactcattccaagattcattaaactagcaaggcgtgcagtaccctggttcatccttccaagagatgctggcatacttaaagactgggtagcagcagcaagaaggcctattcctgccgcagacaggtcacgcccatgaccctgtgagtccctactgagagatgactgctggaatgacttggacattgtagaactagctcttgtctattttatannnnnnnnnnnnnnnnnnnnnnnnnnnncggccaaaaagaaagctcaaactagaaagctaggttaactttgcttcaaaaaatggtaacgccaagaaaaaggatcaataaggactgcagaatcttcttcaagctgagaaccagcagacaactcttagggaaagggagagggaaaaggagaggtacctctctcccagcgagcgggacgcggagccc

SEQ ID NO: 41342 - DNA, 807 bp, Macaca Mulatta
ggctacttcctgcaccacatcatctttgcccgcttaagctcatctgcatcatctgcatcctcctgctgccccatgcagggaccagaaccggcccgagaacatttccaacggggagcactacacgcgccagccgctgctgccaactttaagggggagcagccactgctgctcaccaacgccgagctcaaggactactcgggcctccacgatgccgcagcctcgggtgacacactgcccgagggtgccacggccaatggcatgaaggccatgtagcctggcccgcagaacccggggctcaagggtttggggccgctcgggcacaggtttacagaccagggaccgaatgcatggcccggagggggaaagctgccccacccaagccgagcctctcaagggtgtggggaaatcctgtctttccaaaagtcccaggagcacaggtcggaggagacgaactcttcggaaataacccttccaagactttcttttctgccattaaatgtttgtatttattttggtcatttttacgagaagcactttattccctccccctcactgatcacaaatggaatcacctctttcggcagcgagatgcagtcactctgggaagatgctgcagtgaccgtggtcgcggccggttcctctcgggagacgggacacggctcctcgcaacacccaggagccccccaggctggctgcctgtgtgcagaggcaggacacaaccgtggagcgtttccaggactgcattttagacagagtgaaatgtacatgaatttggcttttgctcgagagtctgtgtatggtttttta

SEQ ID NO: 41343 - DNA, 483 bp, Macaca Mulatta
  misc_feature (1)...(483): n = A,T,C or G
ggaaggaccgaatgtttgcaaggaaaccaaagtttattaataatttttatataaggaaaataaaatagacgtagagggatctgtgatcatataaaaagggagggttactgaaagaattttagcaatatattgattcaggaaaaggagctgttttataaatgatcattcactgttcctgtggttctatgtatctttcaaaactgatacctttactatttaaagagagtaatagtgaaagtaagatggtcatacttaccgactttatctatttaagtttgatggagataaactatatcttggctagtggctactgtgtctgtgaatgtaaccagtacttctttaagctctattcagtagggttctagccactgcttttttgttgtttctagccactgnnnnnnnnnnnnnnnnnnnngtttccttataaaagaggtaataaccaatctnnnnnnnnnnnnnnnnnnnnnnnnnnnnnnnnnnnnn

SEQ ID NO: 41344 - DNA, 835 bp, Macaca Mulatta
  misc_feature (1)...(835): n = A,T,C or G
gggagatgacccgatctcctccctttccaaaaagttgttttcttgctatttctccagggtaggtcaggttttaaaaattaataatctggggcagtagatgaaatttctgaaaattatgtacagnnnnnnnnnnnnnnnnnnngatgggccttagatattagaggtgctctttttaagtatctacacagcctgggaaataaacacattcgattggaaggcaatactttccatttcttattctatatcagatattttagttttgcattaactttcattcttggagggaaaaagaaatatttccagtttgaaattcttaagatggcactgataataagtaaacgtctatagatttatgtgaaatacagttacagtaagtcgcccatttacaaatggattatatttgagaaatttcatttgaagtaggtttgttttttggggttggggtgctttttcctgtggaaaaattacttgattnnnnnnnnnnnnnnnnnnnnnnnntcggtttcacccgtgccacccccaactgggagtgcaatggggcacaatcttcgggcttaactgtaaaccttctgccttccgggggttcaaacaaggtcttccctgccggcagccctccttgagtaacctggggatttacgggggaactgtgccagccccccctatggcctgggccaagaattttagtgggtttttaatggggaaaaacaggggttttcccaccccacttgggtctaagaaagggctctagggaatgtccttggaccttaaaggaaaaatcacaagcgtgccaccaaaccgccccccaaaaatttcctggggaaatatccaggggggg

SEQ ID NO: 41345 - DNA, 442 bp, Macaca Mulatta
ccaccagcctccgagttccttgtttcccttgctctggcctccaagtgtatgacggggttctcaggcccaggcttcgaccagaggaccctccgccaccaccgtttcttcccgttcttgagctaccttggtgaactcatgaccccagtccccggctgcaccaggatgcccccaggtcctgccagctgggaagtgccagcatgaattcctcaaacttcgtggaagccagggtcccccgcagctgagggaccccaagcaaaacaccctccccaggccggctcctgtctgcgtgggcgacatgactctgagagcgcccaagcccctaaggctgtcccgaccatcatgctgcaacaaggatagggaatgatcactatggtcctggcgtctcccctcccccagcaccacttgagctgctgcccggctcaagccagaagctgactctggc

SEQ ID NO: 41346 - DNA, 701 bp, Macaca Mulatta
  misc_feature (1)...(701): n = A,T,C or G
ggggttctnnnnnnnnnnnnnnnnnnnnnnnnnnnnnnnnnnnnnnnnnnnnnnnnnnnnnnnnnnnnnnnnnnnnnnnnnnnnnnnnnnnnnnnnnnnnnnnnnnnnnnnnnnnnnnnnnnnnnnnnnnnaaacctttaccacaaaaaaattttggaacacggccctatggggaaaggaaacaggggtaaacttatttcaaaaaaaatcttggccaaaaaaattctgggaataccccctaaaaaaatacccccggagaaaaacaaccggtggaaacaaaaccgaatggatctcttcgtaaaaacatgcatcaaaaaaaagggatctaaccaaacttnnnnnnnnnnnnnnnnnnnnaccaataactctctcaaattaatcttttaattcattaaggttattaactcaaaatgaaaaatctacccaaaaaaggatatgataaaaaattgaacctatataacctcaatacaccattggtgaattcgcattaaaaattatccctagaaaaatacggagaaagaaatcttgtgcccaataactaatataaattacaccgtggaatacaacacggaaatttcgatcaaataaatacatataataaactcttttcaaataccctgtttattcaccaccataacatactttatattacatagaaatatttttttcatctttatatatctaactaaatatattgatac

SEQ ID NO: 41347 - DNA, 174 bp, Macaca Mulatta
gtgatcatgaaggaccctggagaagaggtccttgttcccctctggcactccactgcagacacagctagggcttccccgacagaaacgcaacatggaggcacctgtagacagtgtttctggaacaatccagagtgagtgcagccccacaggaggaccacaccccagattcaggcc

SEQ ID NO: 41348 - DNA, 309 bp, Macaca Mulatta
ttaaaatggattttgtaataatggaaacaaatttggaggtggtgaaagctacaatgatcttggcaattgcaacagtcttcaaattctggacccatgaaggaaggaaactttggcagcagcagatctggcccctatggtggtggaggcaaattatttgccaaactatgaaaccaaggtggctgtggcagttccaacagctgcagaagctatggcagtggcagaagattttaattactgctaagaaataaagcttagcgggagagaagagccagagaagcgagagggaagctacaggttacaacagatttg

SEQ ID NO: 41349 - DNA, 806 bp, Macaca Mulatta
  misc_feature (1)...(806): n = A,T,C or G
gggaggcattgaggcagccagcgcaggggtttctgctgaagtggcaggcgcagcttgaggaacccgcagataagttttctctctttgaaagacagagattaatacaactacttaatgaaatgtagtcagtagcttactaagattttgcttagcattaggttcttaacgtaatttggataagattttaagagaaaatatgaagagttaaaagtgtagcgtgagnnnnnnnnnnnnnnnnnngtttctaaaacatgacggaggttgagacgaagcttcttcaagaagtaaaaaaatgtatttaaaagaaaattgagagaagggacgccagagccctgaattaataccagtagaagggcagtgcttttagattaaaatgaaggtgatttaaacagagcttaaacgttgtttgaaaagttgtaggtgattaaaataatttgaaggcgatcatttgaaatgagattaaatcgaaggtcattaaaagaccttgaactccatgacgcagggagagctgcgtcatttaaagcctagttagtcttaacgcgtttgctaaccgcacaccacaaatagggaaagattaattggggagtggtaggatggcacacctctggagccccactataaatccccaaactggaaaccccaacacggaaggtaccggggaagggggaactaccggcatgtgaggacccagcgcggcaatcttgccagcaccaatgaccggcccccttccgccaaggaagtaaaggaattcgactcccacgcccctggaaacggtgcaggagaactctccgcccggatatagatcc

SEQ ID NO: 41350 - DNA, 619 bp, Macaca Mulatta
aatgactttatcataaagcagatgaggcagggagcattccttgtgaacgcagcccgtggtggcctggtggacgagaaagccttagcacaagccctcaaggagggcaggatacgaggggcagccctcgacgtgcatgagtcggagccctttagctttgctcagggtccgttgaaagatgcaccgaatctcatctgcactcctcacactgcctggtatagcgagcaggcatcactggagatgagggaggcagctgccacggagatccgccgagccatcacaggtcgcatcccagaaagcttaagaaactgtgtgaacaaggaattttttgtcacatcagcgccttggtcagtaatagaccagcaagcaattcatcctgagctcaatggtgccacatacagatatccgccaggcatcgtgggggtggctccaggaggacttcctgcagccatggaagggatcatccctggaggcatcccagtgactcacaacctcccgacagtggcacatccttcccaagcgccctctcccaaccagcccacaaaacatggggacaatcgagagcaccccaacgagcaatagcagagaatgccagaaggtaatcattcagatacacttggga

SEQ ID NO: 41351 - DNA, 734 bp, Macaca Mulatta
  misc_feature (1)...(734): n = A,T,C or G
ggagcgagccccgccagctggaaagagtggttcttaagttgaacccgcttacagtaagttacaggcccagatcacagcgaagtgtgggggcccgtctctaaagccgagaagggaaccgctttagaannnnnnnnnnnnnnnnnnnnnnnnnnnnnnnnnnnnnnnnnnnnnnnnnnnnnnnnnnnggaatattaaagatcggagaggaagttgaagagagaagagttttctctttcctttctgttcctggtgacttgggccctcagaatctcgatgaggataacacgaggagtgcacaggcaagtgcccagtggccagcaattgcttcaaaagcccatgttcttctcttcgccccactcttaggcacagccaaaattggtcagaaaggggagtaaagtgggacacgggcttcaaagtagggaaaccaaagaagggagcatccacgtcctccctctccagcttctcccccgcgttcttcgggcgaatccgaggggcgggcgctgcgctggggaaagtttgtcccacccgcgttttgcagctggttgcannnnnnnnnnnnnnnnnnnnnnnnnnnagctcggagcctgtgggcgcagggatgatcgagccggcgtcgcgcttacctcgcagtcctcgtacttgatattatctgtcaatttccaaagcattttcatggatcggcgtgaacggatatgcccctctccgtctcgcacgcaagtggagctactctctgg

SEQ ID NO: 41352 - DNA, 2659 bp, Macaca Mulatta
  misc_feature (1)...(2659): n = A,T,C or G
atgctccatctgcttctccccctttctcttgctgtagtccaatgtgctatgagcatcagcttactttatcacttagagcaagcaaaatccagtgcaagattctcattcagctctaaataggtttgctttctttttgttacagtgcccattttgaaattgcctatacagtctcagtgaccatttaaaccggacgaaccgggtgtttaatattcactcttcatggtcaattcgcagttcaaattaaagaagatggttgttggagaactttttgaatggttttgtattaaattgctttgaaatagatttcatttcttatgcacacagccaagatttcctcaatgggtgtgatagctagttgagggttaaccttgtaggttacagagtgtgtttgtttgtttgtttttctctgtgatgaggtcagtgctctgattctgaaggaggatattcactgaagctcatagttataaacaaggaaatcactgttaagaatgggaatttgtcttgtgttctgggaataacataaagagagcagctgatttcagccaggttttgccacnnnnnnnnnnnnnnnnnnnnnnnnnnnnnnnnnnnnnnnnnnnnnnnnnnnnnnnnnnnnnnnnnnnnnnnnnnnnnnnnnnnnnnnnnnnnnnnnnnnnnnnnnnnnnnnnnnnnnnnnnnnnnnnnnnnnnnnnnnnnnnnnnnnnnnnnnnnnnnnnnnnnnnnnnnnnnnnnnnnnnnnnnnnnnnnnnnnnnnnnnnnnnnnnnnnnnnnnnnnnnnnnnnnnnnnnnnnnnnnnnnnnnnnnnnnnnnnnnnnnnnnnnnnnnnnnnnnnnnnnnnnnnnnnnnnnnnnnnnnnnnnnnnnnnnnnnnnnnnnnnnnnnnnnnnnnnnnnnnnnnnnnnnnnnnnnnnnnnnnnnnnnnnnnnnnnnnnnnnnnnnnnnnnnnnnnnnnnnnnnnnnnnnnnnnnnnnnnnnnnnnnnnnnnnnnnnnnnnnnnnnnnnnnnnnnnnnnnnnnnnnnnnnnnnnnnnnnnnnnnnnnnnnnnnnnnnnnnnnnnnnnnnnnnnnnnnnnnnnnnnnnnnnnnnnnnnnnnnnnnnnnnnnnnnnnnnnnnnnnnnnnnnnnnnnnnnnnnnnnnnnnnnnnnnnnnnnnnnnnnnnnnnnnnnnnnnnnnnnnnnnnnnnnnnnnnnnnnnnnnnnnnnnnnnnnnnnnnnnnnnnnnnnnnnnnnnnnnnnnnnnnnnnnnnnnnnnnnnnnnnnnnnnnnnnnnnnnnnnnnnnnnnnnnnnnnnnnnnnnnnnnnnnnnnnnnnnnnnnnnnnnnnnnnnnnnnnnnnnnnnnnnnnnnnnnnnnnnnnnnnnnnnnnnnnnnnnnnnnnnnnnnnnnnnnnnnnnnnnnnnnnnnnnnnnnnnnnnnnnnnnnnnnnnnnnnnnnnnnnnnnnnnnnnnnnnnnnnnnnnnnnnnnnnnnnnnnnnnnnnnnnnnnnnnnnnnnnnnnnnnnnnnnnnnnnnnnnnnnnnnnnnnnnnnnnnnnnnnnnnnnnnnnnnnnnnnnnnnnnnnnnnnnnnnnnnnnnnnnnnnnnnnnnnnnnnnnnnnnnnnnnnnnnnnnnnnnnnnnnnnnnnnnnnnnnnnnnnnnnnnnnnnnnnnnnnnnnnnnnnnnnnnnnnnnnnnnnnnnnnnnnnnnnnnnnnnnnnnnnnnnnnnnnnnnnnnnnnnnnnnnnnnnnnnnnnnnnnnnnnnnnnnnnnnnnnnnnnnnnnnnnnnnnnnnnnnnnnnnnnnnnnnnnnnnnnnnnnnnnnnnnnnnnnnnnnnnnnnnnnnnnnnnnnnnnnnnnnnnnnnnnnnnnnnnnnnnnnnnnnnnnnnnnnnnnnnnnnnnnnnnnnnnnnnnnnnnnnnnnnnnnnnnnnnnnnnnnnnnnnnnnnnnnnnnnnnnnnnnnnnnnnnnnnnnnnnnnnnnnnnnnnnnnnnnnnnnnnnnnnnnnnnnnnnnnnnnnnnnnnnnnnnnnnnnnnnnnnnnnnnnnnnnnnnnnnnnnnnnnnnnnnnnnnnnnnnnnnnnnnnnnnnnnnnnnnnnnnnnnnnnnnnnnnnnnnnnnnnnnnnnnnnnnnnnnnnnnnnnnnnnnnnnnnnnnnnnnnnnnnnnnnnnnnnnnnnnnnnnnnnnnnnnnnnnnnnnnnnnnnnnnnnnnnnnnnnnnnnnnnnnnnnnnnnnnnnnnnnnnnnnnnnnnnnnnnnnnnnnnnnnnnnnnnnnnnnnnnnnnnnnnnnnnnnnnnnnnnnnnnnnnnnnnnnnnnnnnnnnnnnnnnnnnnnnnnnnnnnnnnnnnnnnnnnnnnnnnnnnnnnnnnnnnnnnnnnnnnnnnnnnnnnnnnnnnnnnnnnnnnnnnnnnnnnnnnnnnnnnnnnnnnnnnnnnnnnnnnnnnnnnnnnnnnnnnnnnnnnnnnnnnnnnnnnnnnnccaaaatatcactgactcatccttacccatattcttttcataatacccactcaccaggtacaacagaaacttccctccttgtttgtcagcctcctggtcatgttctccacacacctgaaggtggtagaatcttttcagcctcttaaatagagagctaaatatggctaagtgcaggtcatagagaacctaagaccatcgtataagccaact

SEQ ID NO: 41353 - DNA, 445 bp, Macaca Mulatta
taaacttataccatgtgttgcatgtttatggcatgatttttaaggttcattgcatgctgtgaaatgttcttctacgaagcagatttttaggtgtaaaccattacctatcatcaaaataattatgcgccccaaatgctgaaggcttgtattctgtaagataggattggttccagattctcacactcacatatcatacacatacatatatactcatttttgagcctctgaagttaaacatcacacaaggctgcctattttctgagaactgtattttcagcagcatgggtaacattagatgcctgttttgtgttcctttgttttttttaatgtcaggaaatcttgaaaatcagtctccttttaaagtactttttattgctattgataagctaatatgtgtcaaaacatatgtaagttattaaactagtagaatggggaaatgtcacat

SEQ ID NO: 41354 - DNA, 277 bp, Macaca Mulatta
cacggtcagggcctgcgctctgtgggtgccattaggaggagggtttacagatctgcggctgggggacccctggggcctggagggacccatgcgtcccttcccatctgtgccctgccaggctgtcctcatggcagcgtcgtcacaggggaggaaaccggggcagtggcagccactcctggtaccaagcacaccttaaaaatgagcccacggaggttgcagttagccgagatcacgccactgcactccagcctgggtgacagagcaagacttcatctca

SEQ ID NO: 41355 - DNA, 639 bp, Macaca Mulatta
  misc_feature (1)...(639): n = A,T,C or G
agctgcttgtggagggattctgacgggcccagcaggtgttattttatcncccaactacccacaaccatatcctcccgggaaggaatgtgactggagagtaaaagtgaacccggactttgtcattgctttgatattcaaaannnnnnnnnnnnnnnnnnnnnnnnnnnnnnnnnnnnnnnnnnnnnnnnnnnnnnnnnnnnnnnnnnnnnnnnnnnnnnnnnnnnnnnnnnnnnnnnnnnnnnnnnnnnnnnnnnnnnnnnnnnnnnnnnnnnnnnnnnnnnnnnnnnnnnnnnnnnnnnnnnnnnnnnnnnnnnnnnnnnnnnnnnnnnnnnnnnnnnnnnnnnnnnnnnnnnnnnnnnnnnnnnnnnnnnnnnnnnnnnnnnnnnnnnnnnnnnnnnnnnnnnnnnnnnnnnnnnnnnnnnnnnnnnnnnnnnnnnnnnnnnnnnnnnnnnnnnnnnnnnnnnnnnnnnnnnnnnnnnnnnnnnnnnnnnnnnnnnnnnnnnnnnnnnnnnnnnnnnnnnngctccctgcggaggccagtacatgggatcagaaggagtagttttatcaccaaactacccccataattacacagctggtcaaatatgcctctattccataacggtaccaaaggaattc

SEQ ID NO: 41356 - DNA, 2488 bp, Macaca Mulatta
  misc_feature (1)...(2488): n = A,T,C or G
ctgcttgacacatttgagcatagaatttaaagttgtacctgtataatctcaagaaatgagaataccatgaccatgaaacataatttgaaaaccactgttctgtaggtagttttttctgaacctaatgctgagtggatggatgatggggaggagagtcttggcagaaaataagtttgatgttcatttttaaaacagccttctgccaagtacatgtggcctgtgctcaatttctacatttgttgtaaatgagttaaagggaataatagagctatatttattcaactagttggtaatttctgaaataaaattctgagttgaatgtcaaagccgatgcgtttccgcggcatgccttgccgggctggggcggacacagctaaggggccacctgggtggggagggaggcacagtcttgcttatggtccctcgccaggcgccggcctttggcggcgcctgggttctgccagtcaagagttggaacacggcatcttcccttccttgaatccttccttctgcagaagggagctcagtagaactttgttgttttgccttttactctgggctgaaagaagcagatgataaagagaaaatagtgaatgtcaaaggaaatgtaattcctcccatgctggttgtctcaactgtgattgttgtggtttggaaatcaacacccaagaaggctctctcttgtggatgtatcacttaaaacacccagaagttgttgacagcggcggtcggaagggccggtggtttccaagctgctccaacaatgggacccacaatcctcaagcaggggaagaagaagacatagacgannnnnnnnnnnnnnnnnnnnnnnnnnnnnntgacaaaaaaagagcttcagctatgggactggtttaatccatacaatcgcccagaggtgctgaccgtgaccagttggaatgtgccggttatgtgggaaggcacttagaacagaaccatcccagaaaattcttatgccaaacagaaaattactgtgggtttgacggtttttgctgtcggaagatatgtagagtattacttgaaggagttcataacatctgctgatgggtactttatggtcagccacaaagtcatattttacatcatggccgataatatctccaggatgccgttgatagagctgggtcttctgtgtttcttcagagtgtttgagatcaagcctgagaagaggtagcaagtcatcaacatgatgggcatgaagaccatcagggagtacatgttggcccacatccaacaggaagttgacttccttttctgcatggatgtggaccaggtgttcgaagacaattttggggtggagaccctgggccagtcggtggctcagctacaggcctggtggcaggggaaacatcctgaggagaatacttatgagagatggaaggagtcggtggcatacattccattcggccagggggatttttattatcacgcagccatttttggtggaacacccattcaagttctcaacatcacccaggagtgctttaagggaatcctccaggacaaatgacattgaagcagagtggcatgatgaaagccacctaaacaagtattttttcctcaacgtaccctctaaggtcttatccccagaatgctgctgggattatcatataggccatcatgcagatattaaaattgtcaagctatcttggcagcaaaaagaatatacgttggttagaaatgatgactgacttcaaattgtgccaacagttttttgaatttgagagaattattattctggctacttcctcagaaaacaactttaagaaaatattaatgaaacaccaacatcgcaatcacatactatttctccttgtaactttgagccttgtaatatgagaggatgaatatatggtaatcagatgtaaattcccagtgatttcttatgtattctgaatttgggggaaatactatcagctaaaccagaaagaacttgtcataggcaaagacaaagccagaaacaggccaggcgtggtgggtcatgcctgtaatcctagtactttgggaggccaaggcgggtgaatcacgnnnnnnnnnnnnnnnnnnntcagctnnnnnnnnnnnnnnnnnnnnnnnnnnnnnntaaaaatataaaaaattagccgggcatggtggcgccnnnnnnnnnnnnnnnnnnnnnnnnnnnnnnnnnnnnnnnnnnnnnnnaaacctgggaggcagaggttgtagtgagccagattgcannnnnnnnnnnnnnnnnnnnnnnnnnaagcgaaattccatctaaaagcaaaaaacccacaagcactctacatgtgtcagataacatcctggagaaaatagggtggtaagggaagtgttggcagcgagatatgttgtagggggttattcccttgatttcaatgttttcctgtttctgatggatctaaagaatatggagttgatttgcagccggagaactttcagtaaggacaccgtttaccttggcaatcctcaaaagacttcaaga

SEQ ID NO: 41357 - DNA, 796 bp, Macaca Mulatta
  misc_feature (1)...(796): n = A,T,C or G
ggaggcaaatccagaacaaccaaaaaagaataatcacaaatcaaaaaagattagctggaaacacctgacagtcagtaacaaataaggggtggacattggctgggcctctggcttcttctctcaccaatacttctgtcctttcttgctctgtctctccaataaatacaatgtgcccgtgaaaaataaagacatacaataaaaggcaaaatgtattttataaatcaacattctatccttaaatacttgggaattactcttttaacaagttcagttactagcataagtgatttaacaaggaatcaactataattggattctaagtaccttcaggtacaatttgacccaaattgttttattcagtaacagaaaaaaacactgtaccttatttgcaacttgactgcattttctaggaagcagataaggtcagatacttcagaagaactatttatctgcaagaagatatccttgtaccacacagagatttagaggaattataaaaacattttgtttaatttttttgtatatataatgcaattcagtgctttttccacaaatgattcaatgggagaccatagaaaaaagttagtattagtgtggtctttgaagtcaaaccgacctctttacataactaggcttcagctgtgtaatcttaagcatgttaaatcctccnagactcaggtagctcatctataaaatggagttaagcgtggtaactttttaatagagccagaataaattgaatttatgaatgaaaacatgctttgcacagcacagtggcacatagggaagcatacat

SEQ ID NO: 41358 - DNA, 652 bp, Macaca Mulatta
agatgtggtggttgtatgatctgtgtcataattgttcagttagagtgagaagttgacctatgattcatttttaaattttatatttggaacaaagctgcaagttatggtaaagtactgtactgtgagaaagtattatgatatttaatgcatctgtggcttaacacttgtgagagttaccagcttgaaaatgatggtgttgactacctcttgaatcacttccatctatcaaccactggcacctaccaccaagctggcttcaattagtatgtgtttctttttggtattaacaactctaaccatactagagaccaaagtgaaccctgatttttatatgtctttaataatggtgttttatctagtgtttttaaattatcctgtgtagtatttagattacctcattgtccattttgattcatgctgtttacaagtgaaaataaaaacacttgaactgtatgtttttaaaagataaggggtagatgtttggaatgcatttcacttgcgtgcagtcatctggagggactgaagcactgtttgcctttctgtacactctgggttttatattctcatttcatgcctaatgtcgtattctgtcaattatggatatgctggcgtttaaaaaaattacttgattaataataaaacatataacatt

SEQ ID NO: 41359 - DNA, 766 bp, Macaca Mulatta
  misc_feature (1)...(766): n = A,T,C or G
ggggtgcactgttcctgggattcttcctcatagtctgataaattattgcttttgtctccttttttctgccatactgtctgtaatggaacaatgttgttagggatttagattcattttcccaaggagtttttactgagtctaagctattattcccaagaaaaattcctcagcaggtcccttataatttctatttccctgttagtgggccttaataattccaatttgcctacagggttttctaaagaaatagttatctatgaagtgtttcatgttcaagcagtgcttccattcagaggacttaatgatgtagttgacatcttagtaaaacaatttaaaaggatcatgttaagcttggccatcagaaagaacattcatgcttaaggtttcagaatgaaggagccatctcttgacatctgattttcctagcagaccaaagatagaaagtatcaaaagagacaaaaattcaagagatggcttctgtggaattgtgatggttgnnnnnnnnnnnnnnnnnnnnnnnnncacacttatttgtatacttgcttgtgaaaggagaaatcaactttgtttctaagtatacccgaagctttcccttaaaatgggatgtcntaatccaaggaaggtacttgtcaaaggggaaatggtggttttggacttcctggttttaattgggccttggttaactttttaattccaaagttgggcggaccctgttgaagaaaaggggttttaaactccttaaacttccgaatccacttgggccgga

SEQ ID NO: 41360 - DNA, 661 bp, Macaca Mulatta
  misc_feature (1)...(661): n = A,T,C or G
gtttaaaggcaaatgttaggacntgcaagtagtaaagcacctgaccacaaaacctcttgtaaaaatggcctgagtaggtatttccggggctccacaaagatgcttatgggaatcctgagctgcttttcaccatttcaagaagcctaagaagttatatagttaatcaggtagacaaaacagttcaaagcataaggtccatggtggtgggaaatgaatgaagtgattctaagtttgtggatttgtggaaagcagaggggtcgggaccacttggaggaaccctgggtaccgagctcccaggccctttctctatcatggatgctgagtgactttggcaagtcaccacctcttcccaagcctgtttcccatatcacagatgtggggccgtggccttgatgatggtctccacgggtccttctgactctatgagtccaagtcaggtcaatcaccaaggacccatctctgccctggatcagctcctcagaaccaacccccagcatctctaaagcaaaagcctcaccccaagggctgctcagaagaaagcaccttcagcatgagttgttgctggaagatctaataagctgtgtttcctgggaagtggtgcttagccctgtggacaacttgtgtatgcatctgtgtgagcagatgatcattctattacctt

SEQ ID NO: 41361 - DNA, 461 bp, Macaca Mulatta
  misc_feature (1)...(461): n = A,T,C or G
ggaactaccgtccagaatgctgatccaggctgctctctcagcaaaaaccactgggcagctggcctggaggttccctcccatggctatcccaagagaggtaggaaacacacacctgacctctaatcaacttaacatttaaagcttatataccctttagagttaattctttttcagtcctgttccaaatcattagggattttccttcctgaaaaatgatactaagtttactaacaagccttccataaacttttcagtcactgaaattgtctctgtcagagtctggtatctgaaatatccatttacataaacagaacagtcaggagatcccccagctagtctcctgggatttaatttagggtttaacaatctagccagtaaattcagcactcctgacatttcacatcctacaagtctaatttatatacnngnnnnnnnnnnnnnnnnnnnnnnnnnnnnnnnnn

SEQ ID NO: 41362 - DNA, 266 bp, Macaca Mulatta
cctgaccatggggtcaagccctgtgccagacagcagatgcctaacggagatcacatcccaatgtccccaccacaggcaccagcagtgggtgtgatctgccaagcaggagagaagcacccagcttctatcacacacgtttgtgacgcacagccaactgccctgggaggcgccggtatctcgctgcagagtcagccctgtggcccctccacggcccctgggctcaaggctgtacgggcactgatggctgtgcccacaaaccattccag

SEQ ID NO: 41363 - DNA, 152 bp, Macaca Mulatta
ataggaaaagactctgatgacaactcttggaatacaagtttctgataacttcaagatcataccactgggactcgtctgagaactttcaacaattttaactgaacacggctgagtacctctcatggaaattcaagcacaaagcaagaaaaaaa

SEQ ID NO: 41364 - DNA, 118 bp, Macaca Mulatta
ttttaagtttatcaggttatttccctgctgcttcaagtcagatttctttatttttatctcattattatttcatgtgttcctacatcgatagtagacaataattcgctacttttctttt

SEQ ID NO: 41365 - DNA, 780 bp, Macaca Mulatta
  misc_feature (1)...(780): n = A,T,C or G
ggtcccttcctttctttcctgcttcattgccttacaattgaagcagcctgtggtaccatcacaatatgcagagacttcctcacctttcttatctagggaccacccccactgcattggtgagggtgggcacttataaatgcctgctattgttaagccattccaacctcttcctctgaatagaccagatgccctttcacttagttcagtgccagtccttttgccttcccaaccctgctgttaggcctgctgttccctttgctcttgattaggagagatggaaggagatgagctcccattactgaattggcctttggttcatgttttctccccatatgtatatatgccatatgtgaatatgccatatatatgtgccaacaaatctatctatgttgttcttttcaaattagcacgcagataggaattttgagtttcttcttcttttagtaactagtataacaagcactggtatttttgttctcaaaagaaaaacaaaaccagattgactatttgtggttccgccaggaactaaacaaaaccaaatgggggaaaatcaaagcaaatgtaatacccccaatggggggttggccataaaattgccaaattcagcctttaacaacgcccaccccaatcaaaaatttttgcaatttttggataaggaatattaacccccctatgtaacaaaaagatttttggcaaaggaaattttaaaacagggccccccttaannnnnnnnnnnnnnnnnnnntataaaaaacctgtgataaaaaaccaattaacaaa

SEQ ID NO: 41366 - DNA, 730 bp, Macaca Mulatta
tacctgattttgtagcaagacttcaagatgctgctcaaaagtcaattaccgatgagaatgcccgtaaggtcatagtggagttgatggcatatgaaaacgccaatcctgattgtcaatcagccattaagccattaaaaggaagggttcccgcaggatcagatgtaatctcagagtacgttaaagcctgcgatggaattggaggagctatgcataaagctatgcttatggctcaagcaatcacaggagttgctttaggaggacaggttagaacatttgggggaagatgttataattgtggtcaaattggtcatctaaaaaagaattgcctagtctcaaataaacaaaatgtaactactcaagctactacaacaacaggtaaagagccacctggcctatgtccaagatgtaaaaagggaaaacattggggtaatcaatgtcgttctaaatttgataaaaatgggcaaccactgtcgggaaacgagaggaggggccagcctcaggccccgcaacaaactggggcattccaaattcagccctttgttcctcagggttttcaggaacaacaacccccactgccacaagtgtctcagggaataagccagttatcacaatacagcaattatcccccggcacaagcagcagtgcagcagtagatttatgcaccatacaagcagtctctctgcttccaggggaggccccacaaaaaatccccacaggcgtatatggccca

SEQ ID NO: 41367 - DNA, 1236 bp, Macaca Mulatta
  misc_feature (1)...(1236): n = A,T,C or G
nacaagccccaactcaaatgggagaagaggcagtgaggtgggcaaaactggtcatacctttagtggttcattcagcacaaaaggtacatttgcggggagcaactgctttggagatgggaatgccattattgcttcagaaacagcaagaaatagcatctattacagagcagcttatgactacnnnnnnnnnnnnnnnnnnnnnnnnnnnnnnnnnnnnnnnnnnnnnnnnnnnnnnnnnnnnnnnnnnnnnnnnnnnnnnnnnnnnnnnnnnnngaccttgcatcgaagtgggagtttcatcaattctctgttgcaactagaagaacttggatttcgtagtggagcacccatgattaaaaaaatagcttttattgcttggaagagtttaatagataattttgctttgaatccannnnnnnnnnnnnnnnnnnnnnnnnnnnnnnnnnnnnnnnnnnnnnnnnnnnnnnnnnnnnnnnnnnnnnnnnnnnnnnnnnnnnnnnnnnnnnnnnnnnnnnnnnnnnnnnnnnnnnnnnnnnnnnnnnnnnnnnnnnnnnnnnnnnnnnnnnnnnnnnnnnnnnnnnnnnnnnnnnnnnnnnnnnnnnnnnnnnnnnnnnnnnnnnnnnnnnnnnnnnnnnnnnnnnnnnnnnnnnnnnnnnnnnnnnnnnnnnnnnnnnnnnnnnnnnnnnnnnnnnnnnnnnnnnnnnnnnnnnnnnnnnnnnnnnnnnnnnnnnnnnnnnnnnnnnnnnnnnnnnnnnnnnnnnnnnnnnnnnnnnnnnnnnnnnnnnnnnnnnnnnnnnnnnnnnnnnnnnnnnnnnnnnnnnnnnnnnnnnnnnnnnnnnnnnnnnnnnnnnnnnnnnnnnnnnnnnnnnnnnnnnnnnnnnnnnnnnnnnnnnnnnnnnnnnnnnnnnnnnnnnnnnnnnnnnnnnnnnnnnnnnnnnnnnnnnnnnnnnnnnnnnnnnnnnnnnnnnnnnnnnnnnnnnnnnnnnnnnnnnnnnnnnnnnnnnnnnnnnnnnnnnnnnnnnnnnnnnnnnnnnnnnnnnnnnnnnnnnnnnnnnnnnnnnnnnnnnnnnnnnnnnnnnnnnnnnnnnnnnnnnnnnnnnnnnnnnnnnnnnnnnnnnnnnnnnnnnnnnnnnggtcctcatggaaattacaattaaaggacttcctcagaaagtattaggttcaccagcatatcaggttgctaatatggatattcttaatgcaagtatcttaaat

SEQ ID NO: 41368 - DNA, 635 bp, Macaca Mulatta
ggaaagatcctacaggaatggatcctgacgatatttggcaactgtcctccatcttaaaaggtttgatgacaaatacaccttgaagctgaccttcatcagtggaagaacaaagcagcagcaggaagccaagttcaccaagtccatcgctaagttttttgaccacaatgggatccactggtcgtggatgcatataagcctgaaatatccaggctccatgacagtcatgacagtctcgccatagaaagaaaaacaaaatagcaaattctaaaagtagccctctttctgctggatcttgctgaattactgacttcgggggtgggggagataaaaagaacttaaaatgggtaaagtaagaaatgttaaaaagtctctgttttaccctgaaattttagtctattctggataaataggattttctgacacagatgtgagaagttgtagctctgatgtcaggccgtagtctccttggtctgctgattgcattattttaatttgcttttctgggaaagcagttttgctaaaagcagtacagattttttcctttgtacctagcaatacattatatagtatagctttgggccaattagcattttaagactccatttttttaaattattaatctgttgttgactctg

SEQ ID NO: 41369 - DNA, 816 bp, Macaca Mulatta
  misc_feature (1)...(816): n = A,T,C or G
gggagaagataataacttgagaagacctttgaatatttcttgggaggcattttgtattttgagagtatttttaaacttgttctttaagtctttgtatgattgttcttaataaagtaataatttctgggacaatgcaatatctgaagccaaagaggatagattttctaaagtaacatattaatatggcttctgagatccgaagcagaaaaaccacaggtgtgatatccagaggaccaagtccaagttttattgtcttaaataaaatttgtatgaatttggttaaaatcttagactgtcatttttttcttctctaagataggttatattatacctgtcctacctccaagattagattattcagtggttgtgtatatacttgcaaagattaaaaaaaaatgaatatcatctgtattctttccatatggaataaattgaattccaaaaatttcatcctgtgctctcctttcctgaaatatcaagcctcccttaaacctacaaatacttttattggaacccatcaaaatttatccctttcgatattatatcagaaaaggggaaattattggaattaaccattgaataaaaatcaaatttnnnnnnnnnnnnnnnnnnnnntccatggttaaaagccccttttatttgcctttgggccannnnnnnnnnnnnnnnnnnnncaaggggtcctccactccctggttctaccccaaggcctggggaaatataccatatagggcccaaagctccatgggaaccttcctcttggacagagcctttattaaccctttccccaggccctcccaagggtgtgatttcttt

SEQ ID NO: 41370 - DNA, 584 bp, Macaca Mulatta
  misc_feature (1)...(584): n = A,T,C or G
nnnnnnnnnnnnnnnnnnnnnnnnnnnnnnnnnattgatttaccacctgatcaaagcatgggatattttaatagtattatacataatatttttacatagaaaaactttacatagcatttcatattatataattctgcttattctttcaaaaatttatacatccattgggcaaggaatggttttcattaaattaccaatattaaatgcacttaatcattgtgtatagattaaaccaaagtaactattaactaacttttaggcattttaaggaggtaaaacatacattttgcacataaatatttgatgcaaatatgcagatnnnnnnnnnnnnnnnnnngaacactgagtaaaacaacacctttgatagattacattgttttgttttgagagcaaggatttccaggctatgttcattccttaaaatactcagctttggtttctttgtttcccgaactacaaagctgctgataacaaaattccaagatttcatgtgagttcagctatgtctactttaacaaaaatattaaaacaaaattaggaaaatgcagtattaaggatccagcttctattgaaaccaatatcca

SEQ ID NO: 41371 - DNA, 356 bp, Macaca Mulatta
  misc_feature (1)...(356): n = A,T,C or G
attactggaatattgattttttttctagaaaaattttaggaaacagttaaatatttaaaagattactttttaaaagaggaagtaaatattacagaacagaatgcaaaatttattttacatgggagactaaaaattttcacacacatggccaccctttgggcctcctggctcaacatttcagggactgagggagtctctgctctaggagtaaaaggtccttggagagaaaattttgacaagtcctaacnnnnnnnnnnnnnnnnnnnttggttcctggtcaatatttgtactcactgtaaatgtgatggttcgtaatgatactcttttgtataacagtccaaatcctattttatgtc

SEQ ID NO: 41372 - DNA, 793 bp, Macaca Mulatta
  misc_feature (1)...(793): n = A,T,C or G
ggcttgactcatacctggctctttaggtggagcacagagagtagaataacctggtagtaagataatagtctcagtgaagaaaataaacaggctaaaatggacattctctttaggattaacacttacatctgtgaaatagaaaatatgaggttgttttacaatagagaaagaaaacgattgtagtatttttctcttatgcctgaagagaaagactcaacatcacatttatccccaaattgattacattatatttaaataatctgcaagcccatgttgaaagtaactgctacaataaagtggaattatgaagtggtcaaattattttcattaatttaatttctgatcttcgaggatgcccctaaaatcttgtcaaaactttaagttggaatgtgatactactttgctgtctcagagttcagtattataagacttaatatttgcaaggtgctttgcagtgaatcaaacagctatattaacattatagtaacattaacaggattaacatgtctggtaatcctgctttctaattttcctagtgggcaagcaaaatggtagcatgtttgttctgaagttcagcagctctctgctaagaatactagtcaattaagccacattggggaaaccttagtttttatcatcnaattaggtaaatagggttagttttgcctttcctttggaggctgaaatgagtgtgccctccccggattttcatccattatgtgaaacctttattgtccattaaatttatgaaagttgtggaaggaattttccggttttgggtggacaaaaagac

SEQ ID NO: 41373 - DNA, 783 bp, Macaca Mulatta
  misc_feature (1)...(783): n = A,T,C or G
gggccaatannnnnnnnnnnnnnnnnnnnnnnnnnnnnnnnnnnnnnnnnnnnnnnnnnnnnnnnnnnnnnnnnnnnnnnnnnnnnnnnnnnnnnnnnnnnnnnnnnnnnnnnnnnnnnnnnnnnnnnnnnnnnnnnnnnnnnnnnnnnnnnnnnnnnnnnnnnnnnnnnnnnnnnnnnnnnnnnnnnnnnnnnnnnnnnnnnnnnnnnnnnnnnnnnnnnnnnnnnnnnnnnnnnnnnnnnnnnnnnnnnnnnnnnnnnnnnnnnnnnnnnnnnnnnnnnnnnnnnnnnnnnnnnnnnnnnnnnnnnnnnnnnnnnnnnnnnnnnnnnnnnnnnnnnnnnnnnnnnnnnnnnnnnnnnnnnnnnnnnnnnnnnnnnnnnnnnnnnnnnnnnnnnnnnnnnnnnnnnnnnnnnnnnnnnnnnnnnnnnnnnnnnnnnnnnnnnnnnnnnnnnnnnnnnnnnnnnnnnnnnnnnnnnnnnnnnnnnnnnnnnnnnnnnnnnnnnnnnnnnnnnnnnnnnnnnnnnnnnnnnnnnnnnnnnnnnnnnnnnnnnnnnccnnnggaangagnaanaaaagaaaaaaccttggtcggnnnnnnnnnnnnnnnngnnnnnnnnnnnnngnnnnnnnnnnnnnggggcgcgcgggcccccagtaaggtaaagtgaaaaatggggtcataagcttgttttccccgaaggaaaaatccttgggtccatggaaccaaaggtgcctttgggaattcctcccacccaaannnnnnnnnnnnnnnnnncgcgggca

SEQ ID NO: 41374 - DNA, 2496 bp, Macaca Mulatta
  misc_feature (1)...(2496): n = A,T,C or G
gaagtttggaagttatgtaacaaagagcaggttgagatcctacgttttaggagcagcctgccccttttgaaggggtaaagggagtgggtgtagtgccctctccccttctgttgtagtggcttatccctctaaggcatgacccttggataggagttacctgcctcagaaagtccccacttccttgtgggagtttaaaatagattggcgtatgtgagagatggagacaaggtgggaaattggatcctgtcttaggatttctcatcaggagatgctggtacttggtgtttcagcttgataaattgagaaggtgccatgaaaccaggtcctggaacagaatccctggttgctctgtcgtttagctgctctgaccctctgccctgtagagcacgcattttgcatgtgcctggcaggaggccctcctgcttgaacccagctgtatttgtctgtgttgacaaggtgactgctcagccactaagcttggtcactccacagacacactaggaaagcagaggcagttcttggtttctctggaacagagctgcaagaactctctgggcatctgcatggccaggagcttatgcttaactgttgagtgacctgcagccataagggcattaattttgccttccagaggtgggaatgacttggccttaaacagtgatttgtgttagaattcttcaaatcccataaggtagaaggcatggtggaatagagaagaaatcttggctcatatctgcctcttccattgatcagctatgtgaccttgggcctgttacttttaagggatctgaccctccatttcctcatttatcagaagnnnnnnnnnnnnnnnnnnnnnnnnnnnnnnnnnnnnnnnnnnnnnnnnnnnnnnnnnnnnnnnnnnnnnnnnnnnnnnnnnnnnnnnnnnnnnnnnnnnnnnnnnnnnnnnnnnnnnnnnnnnnnnnnnnnnnnnnnnnnnnnnnnnnnnnnnnnnnnnnnnnnnnnnnnnnnnnnnnnnnnnnnnnnnnnnnnnnnnnnnnnnnnnnnnnnnnnnnnnnnnnnnnnnnnnnnnnnnnnnnnnnnnnnnnnnnnnnnnnnnnnnnnnnnnnnnnnnnnnnnnnnnnnnnnnnnnnnnnnnnnnnnnnnnnnnnnnnnnnnnnnnnnnnnnnnnnnnnnnnnnnnnnnnnnnnnnnnnnnnnnnnnnnnnnnnnnnnnnnnnnnnnnnnnnnnnnnnnnnnnnnnnnnnnnnnnnnnnnnnnnnnnnnnnnnnnnnnnnnnnnnnnnnnnnnnnnnnnnnnnnnnnnnnnnnnnnnnnnnnnnnnnnnnnnnnnnnnnnnnnnnnnnnnnnnnnnnnnnnnnnnnnnnnnnnnnnnnnnnnnnnnnnnnnnnnnnnnnnnnnnnnnnnnnnnnnnnnnnnnnnnnnnnnnnnnnnnnnnnnnnnnnnnnnnnnnnnnnnnnnnnnnnnnnnnnnnnnnnnnnnnnnnnnnnnnnnnnnnnnnnnnnnnnnnnnnnnnnnnnnnnnnnnnnnnnnnnnnnnnnnnnnnnnnnnnnnnnnnnnnnnnnnnnnnnnnnnnnnnnnnnnnnnnnnnnnnnnnnnnnnnnnnnnnnnnnnnnnnnnnnnnnnnnnnnnnnnnnnnnnnnnnnnnnnnnnnnnnnnnnnnnnnnnnnnnnnnnnnnnnnnnnnnnnnnnnnnnnnnnnnnnnnnnnnnnnnnnnnnnnnnnnnnnnnnnnnnnnttccatggtaaccaaaaggcagttctcatggaataaaagctacctgaagcctgagttaggacctttggttggggaaggtggttgaggacggactgtgattagatgcttggcatgaggtttgctaatggaactgctagtgtagaatgtttcagccccctagagttgtccctgtgatgtggctacctcctttctctgggatttctcttcaagtctggggaaaaaatgcttctcacttcctggaatttattttcccactctccctttctggctgaaaatttctagtatcttacagaacagtggtgggctacactggagcacatcgtattaccactaaatatgtctaataaattatatcctctgatttgacatttcctaaatgtgaagctcctgattctatacggttttgaaattagtaagcttgttagttttgtttgaaattttaggcactggatacacttaccataagggctacatgtgcattaacatgctcttgtttccttcagtctgtatcttnnnnnnnnnnnnnnnnnnnnnnnnnnnnnnnnnnnnnnnnnnnnnnnnnnnnnnnnnnnnnnnnnnnnnnnnnnnnnnnnnnnnnnnnnnnnnnnntcccacctcagcctcgcgagtagctaggaacacaggtgcatgccaccaggcttggctaannnnnnnnnnnnnnnnnnnnnnnnnnnnnnnnnnnnnntgcccaggctggtcttgaactcctgggctcaggtgatcctcctaccttggcctcccnaagtgttgggattacaggc

SEQ ID NO: 41375 - DNA, 593 bp, Macaca Mulatta
  misc_feature (1)...(593): n = A,T,C or G
ggggaaaggtgtgggttttcaaggaactcagaggatgtgtgtgaccccctagtcatcttcccacacctggtgaaagagctcaacgcaggccttcatgtgatgattctgctgctcctcttcctggccttggccctggctctggtcagcatgggctttgccattctcaacatgatccaggtcccataccaggcagtcaacggtcctgggggtatctgcctatggaatgttctggcaggtggagtcgtggcgttagccatagccagcttcatggctgcggtgaaatttcatgacctgacagaacgaatcgccaactttcaggagaagctcttccagtttgtggtgctggaagaacagtacgaagagtcgttttggatctgtgtggccagcgcgtcggcccacgccgcaaacttggtcgtggtggcgatcagtcatattcccctccctgagattaagaccaagatcgaagaggccactgtcacggctgaggatatcttgtattaatagccttcccctgttcacaccctggcctaagtcagttgtgtgtgtgaatggagtcctcgtgtttttgcagccttcccactccatcacggccn

SEQ ID NO: 41376 - DNA, 3571 bp, Macaca Mulatta
  misc_feature (1)...(3571): n = A,T,C or G
atggctgcgcggccgatcaccctcggcattgacctgggcaccacgtctgtgaaggcagctctgctgagggctgcgcccaacgaaccatccgggttcgtggtgctggcgagttgtgcccnnnnnnnnnnnnnnnnnnnnnnnnnnnnnnnnnnnnnnnnnnnnnnnnnnnnnnnnnnnnnnnnnnnnnnnnnnnnnnnnnnnnnnnnnnnnnnnnnnnnnnnnnnnnnnnnnnnnnnnnnnnnnnnnnnnnnnnnnnnnnnnnnnnnnnnnnnnnnnnnnnnnnnnnnnnnnnnnnnnnnnnnnnnnnnnnnnnnnnnnnnnnnnnnnnnnnnnnnnnnnnnnnnnnnnnnnnnnnnnnnnnnnnnnnnnnnnnnnnnnnnnnnnnnnnnnnnnnnnnnnnnnnnnnnnnnnnnnnnnnnnnnnnnnnnnnnnnnnnnnnnnnnnnnnnnnnnnnnnnnnnnnnnnnnnnnnnnnnnnnnnnnnnnnnnnnnnnnnnnnnnnnnnnnnnnnnnnnnnnnnnnnnnnnnnnnnnnnnnnnnnnnnnnnnnnnnnnnnnnnnnnnnnnnnnnnnnnnnnnnnnnnnnnnnnnnnnnnnnnnnnnnnnnnnnnnnnnnnnnnnnnnnnnnnnnnnnnnnnnnnnnnnnnnnnngaggagctcaggctttcccgtccacctgctcccggacatcgccgagcctggcagtgtggcgggcagacttcccacgtgtggttgaaatcccagagggacgggaggtgngagtggccttggtgattttacaggcctctgtctattcctgcatggcccagaggacagatgcannnnnnnnnnnnnnnnnnnnnnnnnnnnnnnnnnnnnnnnnnnnnnnnnnnnnnnnnnnnnnnnnnnnnnnnnnnnnnnnnnnnnnnnnnnnnnnnnnnnnnnnnnnnnnnnnnnnnnnnnnnnnnnnnnnnnnnnnnnnnnnnnnnnnnnnnnnnnnnnnnnnnnnnnnnnnnnnnnnnnnnnnnnnnnnnnnnnnnnnnnnnnnnnnnnnnnnnnnnnnnnnnnnnnnnnnnnnnnnnnnnnnnnnnnnnnnnnnnnnnnnnnnnnnnnnnnnnnnnnnnnnnnnnnnnnnnnnnnnnnnnnnnnnnnnnnnnnnnnnnnnnnnnnnnnnnnnnnnnnnnnnnnnnnnnnnnnnnnnnnnnnnnnnnnnnnnnnnnnnnnnnnnnnnnnnnnnnnnnnnnnnnnnnnnnnnnnnnnnnnnnnnnnnnnnnnnnnnnnnnnnnnnnnnnnnnnnnnnnnnnnnnnnnnnnnnnnnnnnnnnnnnnnnnnnnnnnnnnnnnnnnnnnnnnnnnnnnnnnnnnnnnnnnnnnnnnnnnnnnnnnnnnnnnnnnnnnnnnnnnnnnnnnnnnnnnnnnnnnnnnnnnnnnnnnnnnnnnnnnnnnnnnnnnnnnnnnnnnnnnnnnnnnnnnnnnnnnnnnnnnnnnnnnnnnnnnnnnnnnnnnnnnnnnnnnnnnnnnnnnnnnnnnnnnnnnnnnnnnnnnnnnnnnnnnnnnnnnnnnnnnnnnnnnnnnnnnnnnnnnnnnnnnnnnnnnnnnnnnnnnnnnnnnnnnnnnnnnnnnnnnnnnnnnnnnnnnnnnnnnnnnnnnnnnnnnnnnnnnnnnnnnnnnnnnnnnnnnnnnnnnnnnnnnnnnnnnnnnnnnnnnnnnnnnnnnnnnnnnnnnnnnnnnnnnnnnnnnnnnnnnnnnnnnnnnnnnnnnnnnnnnnnnnnnnnnnnnnnnnnnnnnnnnnnnnnnnnnnnnnnnnnnnnnnnnnnnnnnnnnnnnnnnnnnnnnnnnnnnnnnnnnnnnnnnnnnnnnnnnnnnnnnnnnnnnnnnnnnnnnnnnnnnnnnnnnnnnnnnnnnnnnnnnnnnnnnnnnnnnnnnnnnnnnnnnnnnnnnnnnnnnnnnnnnnnnnnnnnnnnnnnnnnnnnnnnnnnnnnnnnnnnnnnnnnnnnnnnnnnnnnnnnnnnnnnnnnnnnnnnnnnnnnnnnnnnnnnnnnnnnnnnnnnnnnnnnnnnnnnnnnnnnnnnnnnnnnnnnnnnnnnnnnnnnnnnnnnnnnnnnnnnnnnnnnnnnnnnnnnnnnnnnngcccaggtcttcacggcacaactgcctggaaggcaggttgcggagaaggagaggcggatggcccgagcagcaaggaggaccgatgctgtgcggctcacaccactccagaacctgacaaggcaccagcaggacccttgccaggagcatgtctgtgcagcagtgcttttgcccctgcacgttccagaagccttcatgggaggggatgcagccaggccgactcctgccagatggggcaggtagttcattcaaagagaactctgtgtcccatagacctaggctctcctttcgcgtggcgtgggcttcgctggcccgctgtctgttcctggctcagcagaaacatctatttgagtcagcatccctgcagggaccccagagcatcgtaagccttcctgtgattggtagggatggctgtggggtggtttccaggagggggccaccatcgctgcatctactcccagacccccacaggagcccaggctcaggcaggcctggcccagaggcacccaggcaaccacgagtttgagaggcagtcgtnnnnnnnnnnnnnnnnnnnnnnnnnnnnnagtatccacgacaggtatgaaacatatcgtctctttataaatgtcattttacaaattatgcgattatctggaagctctgagatgagagcaaatgcctgatcatgctgggcaaatgtcagatactaaagcccannnnnnnnnnnnnnnnnnnnnnnnnnnnnnnnnnnnnnnnnnnnnnnnnnnnnnnnnnnnnnnnnnnnnnnnnnnnnnnnnnnnnnnnnnnnnnnnnnnnnnnnnnnnnnnnnnnnnnnnnnnnnnnnnnnnnnnnnnnnnnnnnnnnnnnnnnnnnnnnnnnnnnnnnnnnnnnnnnnnnnnnnnnnnnnnnnnnnnnnnnnnnnnnnnnnnnnnnnnnnnnnnnnnnnnnnnnnnnnnnnnnnnnnnnnnnnnnnnnnnnnnnnnnnnnnnnnnnnnnnnnnnnnnnnnnnnnnnnnnnnnnnnnnnnnnnnnnnnnnnnnnnnnnnnnnnnnnnnnnnnnnnnnnnnnnnnnnnnnnnnnnnnnnnnnnnnnnnnnnnnnnnnnnnnnnnnnnnnnnnnnnnnnnnnnnnnnnnnnnnnnnnnnnnnnnnnnnnnnnnnnnnnnnnnnnnnnnnnnnnnnnnnnnnnnnnnnnnnnnnnnnnnnnnnnnnnnnnnnnnnnnnnnnnnnnnnnnnnnnnnnnnnnnnnnnnnnnnnnnnnnnnnnnnnnnnnnnnnnnnnatattaaatggaaaattcctgagacagttccccaagttttccactgtgcgtggtgctgagcagtgtgatggtctctgccgtgccgtccgggatgtgaactgtccctgcttccccaatgtccacaccgtagacgctccccactccggtcagtcacttggtcatcagatggcccgtcctggtatcacagtgcttgtgttccggtcactct

SEQ ID NO: 41377 - DNA, 653 bp, Macaca Mulatta
  misc_feature (1)...(653): n = A,T,C or G
cagtcttgccactcatctttanttcaacaaactttccttnaagtttattttatgtcaagtattatgttgagcaccagagcacacatgtaggtcagagttcctgtgctagaggtgagtacctcactatccagaggagaaggaagacaacctgagtttttggtgtgtataccatcataaaacatgaaaactacaatattttaatggatagcacattttctaagtaatttaaaccttaattaaccaaaactcaactaattttaaacttaagtgaccatgtttttatatactcaattttcatgaaaaatcacacaaaaaggaaactagctattttaagtaaaatatcaattataactgtatatcacttgctttcatggaagtattccaaatcattaggaatgattaggtagtcttttagtatatctgtttctagaaatctgtttgtattatatagtttttctacnnnnnnnnnnnnnnnnnnctcttctgggggcttttgtatattcttagtagttggaactaatgtagtctaactaaaatacacatgcatgtctgctttgtgatgtttaaacttatcttttaccgtttgtctttcatttcaggaagcagaagtgcaagcaaaggcagcagcatgaaccttaagcactgtgctttaa

SEQ ID NO: 41378 - DNA, 337 bp, Macaca Mulatta
ctaacacctttgcagtttccagtcatgcagaagccaaaccaatcacagaaatgcttcctggaatattaagtcagcttggtgctgacagcttaacaagctcaggaagttagccaaacagttcccatggcaagtcttgaatagaaaagcaccaaacccggaagacaatgaggaggaggaggatgtttcagatcttgtagaatattttgatgaggcatcgaagaatgaagcgaactaaaattttttctggtgtttggaggctgtcatggactggatttaacaaataaaccagtggttccaaagtgttacagatacagggagtatcacctattgctattca

SEQ ID NO: 41379 - DNA, 515 bp, Macaca Mulatta
  misc_feature (1)...(515): n = A,T,C or G
ggggcgcggcggcggaaccccaggcccggatcccgagcctcccttcctgccgctgcagaagcgttccttctgaccgagacgtgcggccggaacaagttccgctgggcctccatccagaaaacaggtttgctttatgagannnnnnnnnnnnnnnnnnnnnnnncccaaacttggaagaaggcaaaaacccaaaccaaaacaacaacaacgacaacaacaaacccacacgcacnnnnnnnnnnnnnnnnnnnccttggaaaaatgcaaaaaatagaaatgaaggagtacatcgaggaggccatttcaacccttgacagagatatgctacagatagtctgtgcttaaccatcaggtgacatgggaggcgtaaaggggacaattttccctctcatcttgatcatctactgcttctgcatgctacagattccctcctcaggatttccccaacctttagctgatcctccagatggcttggatattgtgcagcttgagcaactggcatattgtctgagtca

SEQ ID NO: 41380 - DNA, 227 bp, Macaca Mulatta
gtaaacttcaacctggcctatgtcagaattcatttaaatctctgaatttatttaggtctaaactggtattttactgatttccaaaaacattaatagggaaatttgttatttttgtgtctttgtatttgtcttcttccttgtagggggatgacttagcaaagtattttttattaaaggttgacaatatatcccacatgatttctctttctcctgtgtttttctttaat

SEQ ID NO: 41381 - DNA, 107 bp, Macaca Mulatta
gctccctccaagcctgaacctcaggggaaggctcagcagtcacagccaccagtgtttcagctgccagcgctgctcagaggggaagtgctgctgctgcctggaggggc

SEQ ID NO: 41382 - DNA, 812 bp, Macaca Mulatta
  misc_feature (1)...(812): n = A,T,C or G
ggggaaatatgaattttacccccatggttaatttcttttataaacattccatatttctctaataaaggacataagtgatactgtactatgcataaattgtatcttaatgctgtttcagatcagcattttaaattttgatttgcatttttaatattggcaaaacgtaaccactgttaattaaaataaaaccttgtatatgtaacaacataatttgccctctatcccttcccaccctttgttctctatttctccctatcagtgccaacttcatacattttgtagcatggcaataaaatataacttttacactgaggccgagtgtggctttttggaggaagtggggatgggacgattgccctctagttgtcttttgcatatgactgtttttgcatataagccatgtcatcaggcatgaaaagttctctcatatatgacgtanacatgcttttaaggacaagtgtgtgaatgtgctttttaagcttaatttttgtcaagacaaataactaatttttttatctttggagaagtcagagttctttaagtacaatcaaacgtttattaactggagtacttagaataagctagtaaattgaattcagttcaacaaggggctaagcaacacatttttttaaatcgtttatttattgtagagtattatactgtccctacaaattatgtaaaatatggttttaatantagatgaactttggaattttgcaatggccttacggtttgtcattnccagcataaatattcaatgaatgaaggtacctccaggtttaatactgggaaaaactggaacctgattcatt

SEQ ID NO: 41383 - DNA, 1002 bp, Macaca Mulatta
  misc_feature (1)...(1002): n = A,T,C or G
ggaatcctatggatgacaatttaatttgtgcagtaaaattattgaagttgacaggatcagttttggaagatgcttggaaggaaaaaggaaagatggatatggaagaaattattcagagaattgaaaatgttgtcctagatgcaaactgcagnntagaaagaaatgtgnaanacagaatggctctnntgaagcttggtagaaaactcccgggnntcaagttaaactgggggggtaggaagtcccattggccaaacttttcaaacactataagaggaaccaacaaccccaagnncaaaaaaaatgaggtnggggncggngngngccggntatccccggngnaggtggagttgccctcttatctaaacatnngctattctttttgcnctttttattgccggggaggagaagacaacacngggcngccatgtgccgcccccaccgcgcacggcgtcgccggcctccacctgtagctcctttatgcggacgcctgctggtggcggcctggccctgggagcgtgggcccggggggtcgctatcacgcgcccagcgggcgcccggcgaagacggggggtgcgcctttttgctgtatttgtttgtcacacgtccccccataaccctccattgtntccccgcagacgcgcggcgggcgcggccgcgtttcctctttgctgcccccgccagtcactgtctatcctcccgaccccgccttttcgcctatcttttttttatttccgcccccttccgtttcgggtccgcgcgccgccgctgttgccgatctccgttcagcgcccgntttccgtgtccactgtccaggtccacagtaggtgttggcccccccccgttcttgtgtgtcctncgccgggcggagcagaatgcagcgtcaccagccctcgatctttttttttatgtctccaccgggaggggggnnactgttgcccgtctnacctctatgtggtagtgttacgcgatgggtgctggtgtcatgcgcgccgcatcgccgcg

SEQ ID NO: 41384 - DNA, 633 bp, Macaca Mulatta
atgctgtggactataaaattctctgcgtttagcatagaacattgaattttattacataagtgtttaatgggtccttctgcattaaaaagttgataaagatatagatgttaagctaaaaagcttgaatttattctgagatgttgtttgaggttttatcaatgtgagttcttaattttccattttgtagctcactcataacttcattgaatgtaactgtatgtgtctaataaactctttaaatgctagaagtatttcatttgatatttagtttctgaaagccctttgttataaagggaagtgattttctaaatttggtagcagcttgaaaacaagcaccaaaaatgtaaaattgcatggttctttttttactaatttaatttttttgcaaagttatgtgctagcaaaatgtttgaaattgctattctttttctgttagcttggtatatatgactcagactaagtatatgtatgtgatataatctatgtgtacatgtggctaaactgctaatgggcaaagattgttggttcttctgatcctgagtatacatcaagttcatcccatgattattttttattacgagctattgctgatgtgatgctatctcttagatgcaccaccagtataaagcttaa

SEQ ID NO: 41385 - DNA, 474 bp, Macaca Mulatta
tcacgccatcactgccacccagaagactgtaaatggcccctctgggaaactgtcgcgtgacgtttgcagggctctccaggacctcatccctgtctctactggcactgccaaggttgtgggtaaggtcatccctgaggtgaacgggaagctcactggcatggccttccatgtccccattgccaatgtgtcagtggtggacctgacctgttgtctggaaaaacctgccaatatgatgacatcaagaaggtggtgaagtaggcatcagagggccccctcaagggcatcctgggctacactgagcaccaggtggtctcctccaacttcaacagtgacacccactcttctacctttgatgctggggctgccattgccctcaacgaccgctctgtcaagctaatttcctggtatgacaatgaatttggctatagcaacagggtggtgcacctcatggcccacattgcctccaaggagtaa

SEQ ID NO: 41386 - DNA, 782 bp, Macaca Mulatta
  misc_feature (1)...(782): n = A,T,C or G
ggggttacaagccagcctccaccctgggcagctggagctgaagcctactctggaaaacgatgttccactcaccccgcagagtcaccaggaccaactcctgtaagtcaatagttgaacattgatgggctgttaatactttcacactttcagcctgcctgcatgggtggacaaagtgtgcttaggtggccgaagaaagtggaagataggcaccatgagctgacgtggtaatggtgaggagatatgagcagggcacctacagtgcagctggaattggtgacatgagaatggcccctattctcagtccattgatttggagacttgcatttcaagaatgaattaagagacagctatgactttcctttagagtagtatctagaaatgctggtttccaatgttattggaagaaaaatataatcgctactaagtaggaccacattctatctatctgtgcagcattttctggtttatatcctgaatgcattatcccatgaattgccttactcaaccttattttacttttataataatttgactgctgacaatttgaatttctttcttctctcttgaatggtcagataggagttcgtaagaggtgattgatttcctagcgtcagtttactccactccctcaacccagacatttcttgaaattatagagtagtgattttgaaaactataagtcaaacattgcttatttctaaaaacttttctggtggtctttataaagttccttagctgtgggaagcagggttgtacaaatattcangggatttctgtctcat

SEQ ID NO: 41387 - DNA, 896 bp, Macaca Mulatta
  misc_feature (1)...(896): n = A,T,C or G
gcccagtatggcgagcgctcgtccaacaggaggtcaaagccggcgctcaccaaggctgcgcagcgctgcccatgggtcaggatgctgtctgtgccggggcaagagagtgcagtagaagggagcccacgcctctcccctcaacactagagcctgcgtccgcaagagctcacctacctacgctcagggggggcggtggaggccggctggaggtctggggggactctggaagagacaaggaggatgggctggtgtgggtgccaaggcacaccctccacccctcaggaagccgaggaacaggggagaggcagttttcatcttccagacacaggacattccatgagctgctcttctagcagtccctacccccagtgtccccagaggacatgaaagcagggaccggcacctgtcccccgccccagctccctgcaggtgatgtcctgatgcccagatggttcgtgcagcaacccacctcctgcccacacgcacagccacttcagcctccccacaggactgccggcctcgggcctcttgtccccagctgcggctcagctgcctggccctcccttcattacctgggctctccagctgactccggatgtagcagagggcagagagcgctgcctgctgtttagcctctgtcttgctgtttgcagtgcccgcagggcagaccaccccatccagttccgcgctcacagagaaggggaagcagggacctggggaaggagcaaggtgaggaagaagccacccggcctttggccctgtgacagnnnnnnnnnnnnccaccccatgccccgcacacccttgagtgcctctgcaggctgtgacccatcgttgactcaaccaagtcctcgcccaactcctctacaacagggatgcgtgactccatttcacagatg

SEQ ID NO: 41388 - DNA, 269 bp, Macaca Mulatta
atgctatgaagcgggatctctcgcatatggcagatgagctgagacgacaagtggacctgaagactggcgggtatgtggtcctgggctccagggagaaccaggagacccagggcagcacactttgtggttctgaagaggcctgtcagcaaaagaacccggataccgaagaaagtggcagtgacagcaaagaacctaaggagtctgtggagagcaccaacgtccaagacagctcagaaggctcggattccacctcctagagcatgcttaag

SEQ ID NO: 41389 - DNA, 134 bp, Macaca Mulatta
tctccctctcgccctctcttcggaccccccctttcaagttcactctgtctctcccactatctgtggccccctctatccttgatacaacagctgacctcatttcccgatacctttaccccccctaacagtacaac

SEQ ID NO: 41390 - DNA, 682 bp, Macaca Mulatta
gggaacaagaagatggtggcagtgagagagacagacacacaggccttggctgcagactctgcgttgcttccagcctctcccgtggaggcccgtgcctcctgctgcagtcccagcatttgtgaaggagaaggagatggacctaggagaatcaagaggacatataggccccgttccattcagaggtcatggtttgggcagttcccatggttagtcattgaccccaaagagaccaaactcttctgctcagcctgcaaagaaagacctaatctccacgacaaatcatctcggttagtcagaggttatacggggccttttaaagtggagactttaaaataccatgaagtcagcaaagcccacaggctgtgtgtgaacacggttgaaatcaaggaagacactcctcacactgccctcattccagagatctccagcgacctcatggccaacatggagcactttttcaatgccgcctactccatcgcataccactcaaggcccctgaatgactttgagaagatcctgcagctcctccaaagcaccgggaccatgatattaggcaagtaccgcaatcgcacagcatgcactcagttcatcaagtacatctcggagaccctgaagagggagatcctggaggacgtgcggaactcgccctgcgtgagcgtgctgctggacagctccaccgacg

SEQ ID NO: 41391 - DNA, 1353 bp, Macaca Mulatta
gcggctctcttactctgtttacatccgagagctagagtgctcggctgccgggctgagtctcctccccaccctccccactctcctcagaagcgcccctcccgggttcccaaagcagagggcgtgggggaaaagaaaaaagatcctctctcgcaaatctccgcccacaagccctttataatgcgagggtctgcgcggcggaggacccccgagctgtgctgctcgcggccgccactgccgggtcccggcagtccctggctcccctcctgcctcgagaagggcagggcttctcagaggcttggcgggaaaaagaacggagggagggatcgtgctgaggtataaaagccggttttcggggctttatctaactcgctgtagtaattccagcgagaggcagagggagcgagcgggcgggccggcgagggtggaagatccgggcgagcagagctgcacctcgggcgtcgtgggaagggagatacggagcgaaaagggggcttcgcctccggcccagccctcccgctgaccccccagacagcggtccgcaacccttgccgcatccacgaaactttgcccatagcagggggcgggcactttgcactggaacttacaacaccctagcaaggacgctactctcccgacgcggggaggctattctgcctatttggggacacttccccgccgctgccaggacccgctcctctgaaaggctctccttgcctcggtttggacgctggatttttttccggtagtggaaaaccaggtaagcaccgaggtccatttgtcttttaatttatttttgtatcgctttaatgctaagatgagtcgaatgccgaaatagggtgtcttttctcccattcctgcgctattgacacttttctcagagtagttgtggtagcttgggctggggtggggggttaatccagaactggatcgggataaagtgacttgtcaagatgggagaggagacggcagagggaaaacgggaatggtttttaagactaggctttcgagatttctgcctcatgaatatattcacgctgactcccggccggtcggacattcctgctttattgggttaattgctggctgagttttggggggctgggggttgctttgcggtgggcagaaagccccttgcatcctgacctccttggagtagggaccgcatattgcctgtgtgagccagagagctccgcagccgctgacttttccccgtctccgggagggcatttaaatttcggctcactgcatttctgacagccagagacggacactgcggcgcgtcccacccgcctgtccccgcggcgattccaactcgccctgatccttttaagaagttggcattaagggcgaatt

SEQ ID NO: 41392 - DNA, 609 bp, Macaca Mulatta
  misc_feature (1)...(609): n = A,T,C or G
nnnnnnnnnnnnnnnnnnncaaatttattatgaaatactcttgtaattaaaggacctttggacagtctactgtgttacttggccatcctcttcctctccttcctgcttattttttggctcgtttactcgatctactcatatactggggtttcaccttcttccccagtgattccctaaagatggttcaatctctaaggagattctgatgccagatgttcagataataccttcctgcacatgctacctatgtagcattgagaggagtcttagggcagagctggtttctgatctatgtttatgtctcagctgtgaaacagtggtcagtcaagctgtacatgcttcagtctctttcatctccaggccattttgttttatgctttcaacaaactgattaccttgtacagaccatgtaacttcatcactggagtgaggtacttcaggaatctcactaaattcttagtcaatgatcgattactcatctctgatgtgtgaactggtggccttctggactttaggcttctatctttattcccaagactggggctcagtagtcactttccctttgcttacttgtttgcgtcacttagagagagccacaattgaccctta

SEQ ID NO: 41393 - DNA, 661 bp, Macaca Mulatta
aagtgctctaacttttcttaaggttttgttgctagcccttcaagtgcactgagctatgtgactcggatggtctttcacacggcacatttagacatttccagaactaccatgagatggtttagatgggaattcatgcaaatgaggggtcagaaatggtatagtgacccggtccacgtcctccaagctcacgaccttggagccccgtggagctggactgaggaggaggctgcacagcgggagagcagctggtccagaccagccttgcagcccccctgagctggcagccagatggccctgcaaggcctccagggatggccccgagctgtgggccctggctgaggtctctgggtcgggcagtgacaggtataggtaggaagcactgaaaatagcgttcccagagcacattgcaactcactgggtaagagggacgacacctctggtttttcaataccaattacatggaacttttctgtaatgggtacaacgaagaagtttctaaaaacacacacaaagcacattaggccaactatttagtaagcccggatggacttattgccagaaacaaaaagtagctttctaaagaaatttaagttatatgagaaattccttagtcatggtgttgtctaaatcatattttagctgcacagcgttaccccacaca

SEQ ID NO: 41394 - DNA, 546 bp, Macaca Mulatta
  misc_feature (1)...(546): n = A,T,C or G
gggcacaccatacagtcttatactgtacactttgaaaacacttatataatatacctcctctaattaactatattttttgcttgacatagacagtggaatttacttttctattgattcattttgtaggcaatactttcttgttacttttctaatcattaaatgccagagcttgcctctgggattttccgtaatgaaacttattaaatttgctaatcagaatagtcttttctaaaattgattcttagactgtgcctccatgctgttgtacatccaaatgaaacaactatattttcagattcatacgttgtaacacttaacgtttataccatttagataaacactgtttaaattattttcttatggttgatgtacaattcacaggccatatatctactgtgtatatatataaactttaagtgtttgtaaggtttaatatatacacaaccaataaatgtaaatgttaatttttgtaggcatacacaactgtattttctttgtaaaaacattctttttatatntnnnnnnnnnnnnnnnnnnnnnnnnnnn

SEQ ID NO: 41395 - DNA, 805 bp, Macaca Mulatta
ggggcaggggagggagacctcggtgggcagaaaggaaccgggttgtcttgggccgggcagggcgggtaagttgccgtaggggcccggtccgtgagggactgctaaggaagaggctgcatggcgcggtagtcccccgagtggaggtcggcggcccctgggaagccagagagtcggagggagttcatctggagcggccaagtggtgactttcaaaaggaaataggatcatggcagcagatgatgacaatggtgatggaacaagtttatttgatgtcttttccgcttctcctcttaagaacaatgatgaaggctcattggacatatacgctgggttggacagtgctgtttctgacagtgcttccaaatcctgtgtaccatcaagaaattgtttggacttatacgaagagatcctgactgaagaaggaactgcaaaggaggcaacatataattgatttgccaagtagaatatgggaaaatgtccaactgcaaaatgaaaaaaccctgatgaaaaaaagttttaaagaaattccagaccccgggaattttcttcctttaattaaaacgaaaaacccagttcttctttaaaaagagaaatattttcccaccccttttattccaaacattggcccaaggggtggggaaaaattaaaacccgcctaaggggatggaaaagaaaaattaaagttttattcccttctctcacccacaaaaaaatatggtgccccggagaagttttttccccacactatttttctctccaaaaaataatatttcccttttaataaaacccccccccccaaggggga

SEQ ID NO: 41396 - DNA, 644 bp, Macaca Mulatta
gggggattctggttagtacaaggggaagcctagtgggtctggcgctccgttttcaagacactcggagtccatctttgtctaaggggaaaggtcatggccctgaaaccttctgctcccaatgagccccctaccacaggtgatccagatggctcccctaccacaggtggtccaggtgccccaggtgaggtgcccaaagagccgcaagagcctacacagacaccagaagaactggcgttttacgccccaaactacctatgtttgaccatctttgctgtacttctattccctccatttggattgccagctttgtacttctcttaccagggttcctagacacagaaacccacatctgtgcttcaacccctacagactatgaaggccaacaagaaaagcgaatgggaagaggcttacaccaactcaggccgaactggttggctcagtgcatttgcggtaatgatcggcttaggcatcatttatggcttagtcctattttaatgaaggctaggcatagcaacccaagggtccgctccccaaccgagccactcaccaaaacactagccagccaagtcagccatcgagcaagaactcaactgctgagacatctagccaagaaaatcctccaccaagaactcacattcaagaac

SEQ ID NO: 41397 - DNA, 366 bp, Macaca Mulatta
ccaatggcaaaattgctggaaacacctatttctagtaagtccgagagcaaaactacccagtcaggtatgtcgaagtgagtcaccaaatggtttttctatctcttcttttttagctatttactattttcagtatgaaaaaggcagggaaggtaaggagtgagagtttatttatgaagttgtgtatgttttagttaaactggaagtttacacaaaaagagtggacagtttccaattcaagtaggcaaactgagcaggcccatcagcttcctattcctgtttccatccctcaaaatggtagaagaaaaaatcaacagcaaataaagaatgagaaaaataagaaattataagtaggttttaaaaagttgc

SEQ ID NO: 41398 - DNA, 758 bp, Macaca Mulatta
  misc_feature (1)...(758): n = A,T,C or G
acagtggctcccaggaagcccaggattcaatcgctgagagagtgcttaggcccgaaggcctgcccaaatcgttctactcaccgtgtcggaggccgaggccgagagcgacgagagtgcacggaagtggggaagagggggtggccgccaggctcctccgcttccctgggtccacggcggatccctcccgcttgtcaggaggcggnnnnnnnnnnnnnnnnnnntgctttggagccggtcgcaggcggtgtgtgccggtcgcctagccaggagaactggtcctcgactcacggtgagggaatggaccgacacgggggttgtaccgctgaggaaaaggagcgggactccggacctccaggaggtagggagtgaggccagtaggaccggcgcacctccggggggattccttccggacgctgagttgccaacttgagacccgaggaagatcggcatgatggtctgctttttgttgttgttaacctgcctcggatttctcgaagttcacaccactgtccatatgcgatgatgtttgtttgcccttgacgcacttaactcatggatggtacttcttcagcctcgttaggcaggctgatgatagaggatgaagaaaccatgtgtttctcattcagttctggactcagtctccgttttcttccttcagcaagttatttttcttagttccttatcaaaaagtgtacataaaaaagaggcaactccaaacatgcctccagggttgatgtgtgaaagagtaatataatata

SEQ ID NO: 41399 - DNA, 990 bp, Macaca Mulatta
cactgataggtcaaacgacactgcatatgtgtacattgtttttgttccccattttcctaagtgtgttatttagaatactggtgattacatggaaaaataaagtggggaggctggttaggccttgtgagtttgggaaacttaggttataaaagctaaacagtttttctactgtgagactagatgtgcaggagtgaaaggtgtagagggtcttgttttccacatttgatctcagaatccttttgccagaagtgtctcgtgggacttatctctagtggaacacatttgaagccctgctgctctattaagtaaggcagccgggcaacatggtctaatacttcgtatgctttgtgacctagttaaaatctaaacttaagttgccacggccagtggtctttagattaagctacccttacccctgggagtataccagagctttccaaggaatacacagactccaggactctcaggggagcagtgttcagagcctcatcttcctgttgtattcttctctaagactcacttgcctgagaaaatgcccttttctcaccttacaaaagaaaatatggctttctccacctctagtcttattgtagagcatgacccaaggtataaaattcaaaatgtggatatttggaaagtgaaagacttaacagggcacaaatccttttgcaaatggattttccaaatttttctggtggttccaaattctctgctttcaacaaactggaaggaacagcctgcagatttctgtgtctcttagcatgtaactaaaaaagggtttggaagaattcagtgattctgctatcactgatgtatcttgtgaacacgaatcagacctcctacaggaactggaaggcaactgaccgcgactacttgggccggcctagagtatcatccctgacgactatggggaaagccccaaccccaaggaacatccgcgagccgtatacacggcaaacccacagtcttagcaacccaaactacggcacg

SEQ ID NO: 41400 - DNA, 568 bp, Macaca Mulatta
  misc_feature (1)...(568): n = A,T,C or G
gggatttagaatacattaaaaatacaaacactagattcttttatctctcggagagtgattctgagcttcacaaaacatccagcagaatatttccagagcacattttaagtaatatgatatttatgatgaagaagcttgcgtgattttatacacaatttcccaggggatttttggttatataattaggacaggtttacattagattttaactaaattagctgattttcaataacattatgggaatacaaatataaatatatnnnnnnnnnnnnnnnnnnnngtatatttaggcaagttcggtacactactgtacattaattttttgtccattcttttctaattatgtattgtaacatttctttaaaacttggtaaactggtgaagggagaaaaagttacatttgtctcaggtctcagaggcctaaaatgaagtacttgctgatgaagcaagaattacaaatgcattttacaactggaaaagttcttttgaacacttttctcttatttggttgtctttgtcagagattggcgaatatagattatcatgttttatctataaaagtgaaggt

SEQ ID NO: 41401 - DNA, 621 bp, Macaca Mulatta
  misc_feature (1)...(621): n = A,T,C or G
ggccgacatgtttttnntnnntnnttnttttnttttttnngagacgnnnnnnnnnnnnnnnnnnnnnnnnnnnctgcagtggctgnnnnnnnnnnnnnnnnnnnnnncgcctgccggtttacacnnnnnnnnnnnnnnnnnnnnnnnnnnnnnnnnnnnnnnnnnngcccgccaccacgcctggctagttttttgtattttttagtagatccggggtttcaccgtgttannnnnnnnnnnnnnnnnnnnnnnnnnnnnnnnnncgcccgtnnnnnnnnnnnnnnnnnnnnnnnnnnnnnnnnnnnnnnnctgcgcctggccaattttgtgtattttttagtagagacgggatttcaccgtgcccatccggcctgcgtaatttttactattttcttctaagagttgtttagtttgtactgttaacctttaggtctttgatccattttgatgtcatttttgtatgtgagttgagggtccaactgnnnnnnnnnnnnnnnnnnnnnnnnnnnnnnnnnnnnnctgcnnnnnnnnnnnnnnnnnnnnnnnnnnnnnnnnnnnnnnnnnnnnngnnnnnnnnnnnnnnnnnnnnntnnnnnnnnnnnnnnacaagcccaccatgcc

SEQ ID NO: 41402 - DNA, 575 bp, Macaca Mulatta
  misc_feature (1)...(575): n = A,T,C or G
cagcctcccaatnnnnnnnnnnnnntgnnnnnnnnnnnnnnnnnnnacagcctagaatggatggttganagtgctgttcttagcagaatttaaattttcctcatcacctgcttggagttaacaagtggaaatttggaggtagggtgggaaattatgagtttgtcacgttggaagggaatgccttagtgcaaagtttaactattgatgaagattaccgttactatgattaaaaaccctcgtagtgaaagctgtgtactgtggtctgtatttaagtgtatcctggcactctagagcttaatgatgattggaataatttgattgcttgaagcaatgtgaaaaacacatttcaccggctctgaaagctcttgagttgccatttaaaggaaatcttagaatatcttagttacttaaagtcagatctttaaaggaaagggaaatgctggtatatttgtctctttaacagggaatgggtaccgttcaaaaaggaatgccccacaagtgttaccatggcaaaactgggagagtctacaacgttacccagcatgctgttggcattgtcgtaaacaaacaagtta

SEQ ID NO: 41403 - DNA, 3302 bp, Macaca Mulatta
  misc_feature (1)...(3302): n = A,T,C or G
nggtaatgagccaaaaagatcatgtctgaaatacaaggaacggttgagttttctgtagagctacataaattttataatgtggatctctttcagagagggtnnnnnnnnnnnnnnnnnnnnnnnnnnnnnnnnnnnnnnnnnnnnnnnnnnnnnnnnnnnnnnnnnnnnnnnnnnnnnnnnnnnnnnnnnnnnnnnnnnnnnnnnnnnnnnnnnnnnnnnnnnnnnnnnnnnnnnnnnnnnnnnnnnnnnnnnnnnnnnnnnnnnnnnnnnnnnnnnnnnnnnnnnnnnnnnnnnnnnnnnnnnnnnnnnnnnnnnnnnnnnnnnnnnnnnnnnnnnnnnnnnnnnnnnnnnnnnnnnnnnnnnnnnnnnnnnnnnnnnnnnnnnnnnnnnnnnnnnnnnnnnnnnnnnnnnnnnnnnnnnnnnnnnnnnnnnnnnnnnnnnnnnnnnnnnnnnnnnnnnnnnnnnnnnnnnnnnnnnnnnnnnnnnnnnnnnnnnnnnnnnnnnnnnnnnnnnnnnnnnnnnnnnnnnnnnnnnnnnnnnnnnnnnnnnnnnnnnnnnnnnnnnnnnnnnnnnnnnnnnnnnnnnnnnnnnnnnnnnnnnnnnnnnnnnnnnnnnnnnnnnnnnnnnnnnnnnnnnnnnnnnnnnnnnnnnnnnnnnnnnnnnnnnnnnnnnnnnnnnnnnnnnnnnagggaagcttctacatcacctccgagaactgcatgcagcacgcacacaagtggcaccgagacctgtgcctgttgctcctccacgcttaccggggactccgtctccacttcctggtgatcatgcgggacatcccagagctgccacacacggagctgnnnnnnnnnnnnnnnnnnnnnnnnnnnnnnnnnnnnnnnnnnnnnnnnnnnnnnnnnnnnnnnnnnnnnnnnnnnnnnnnnnnnnnnnnnnnnnnnnnnnnnnnnnnnnnnnnnnnnnnnnnnnnnnnnnnnnnnnnnnnnnnnnnnnnnnnnnnnnnnnnnnnnnnnnnnnnnnnnnnnnnnnnnnnnnnnnnnnnnnnnnnnnnnnnnnnnnnnnnnnnnnnnnnnnnnnnnnnnnnnnnnnnnnnnnnnnnnnnnnnnnnnnnnnnnnnnnnnnnnnnnnnnnnnnnnnnnnnnnnnnnnnnnnnnnnnnnnnnnnnnnnnnnnnnnnnnnnnnnnnnnnnnnnnnnnnnnnnnnnnnnnnnnnnnnnnnnnnnnnnnnnnnnnnnnnnnnnnnnnnnnnnnnnnnnnnnnnnnnnnnnnnnnnnnnnnnnnnnnnnnnnnnnnnnnnnnnnnnnnnnnnnnnnnnnnnnnnnnnnnnnnnnnnnnnnnnnnnnnnnnnnnnnnnnnnnnnnnnnnnnnnnnnnnnnnnnnnnnnnnnnnnnnnnnnnnnnnnnnnnnnnnnnnnnnnnnnnnnnnnnnnnnnnnnnnnnnnnnnnnnnnnnnnnnnnnnnnnnnnnnnnnnnnnnnnnnnnnnnnnnnnnnnnnnnnnnnnnnnnnnnnnnnnnnnnnnnnnnnnnnnnnnnnnnnnnnnnnnnnnnnnnnnnnnnnnnnnnnnnnnnnnnnnnnnnnnnnnnnnnnnnnnnnnnnnnnnnnnnnnnnnnnnnnggcagatgtggatacttctagaaggagtccaggcccagaggatggacaggcctcagtgctgacctacattgatgtaaaatctagcaataagaacccctccagagctgaacccctggtggccttcaatgctcagcatgagaataggagctctagagataagtatggattagacgggactgggccaagcaaagtggtagtaggtggaagtcaccaaaatgccatctcttcagacaaaacaactctccatgaattaagtactctaggaaagggaatagatcaagaggggaagatggtgctgctaagcttgaaactcaccccctctgagccctgtgatccactaaattctactgtgagggagcccttagatattaggtcttccctaaaggactctcacacagaagagcaggaggaactctcagtgctatccggggtcatcaagagatctgcatccatcatatcggattcaggcattgagagtgagccaagctccgttgcctggtcggaggcccgaagcagggctctggagttgcccagtgatcgggaagtcttgcacccatttgttcgaagacatgccctccaccggaactccctagagggtgggcacacagaaagtaacacgagtttggcaagcggcatccaggcttctctcacctccattagctctttaccttttgaggannnnnnnnnnnnnnnnnnnnnnnnnnnnnnnnnnnnnnnnnnnnnnnnnnnnnnnnnnnnnnnnnnnnnnnnnnnnnnnnnnnnnnnnnnnnnnnnnnnnnnnnnnnnnnnnnnnnnnnnnnnnnnnnnnnnnnnnnnnnnnnnnnnnnnnnnnnnnnnnnnnnnnnnnnnnnnnnnnnnnnnnnnnnnnnnnnnnnnnnnnnnnnnnnnnnnnnnnnnnnnnnnnnnnnnnnnnnnnnnnnnnnnnnnnnnnnnnnnnnnnnnnnnnnnnnnnnnnnnnnnnnnnnnnnnnnnnnnnnnnnnnnnnnnnnnnnnnnnnnnnnnnnnnnnnnnnnnnnnnnnnnnnnnnnnnnnnnnnnnnnnnnnnnnnnnnnnnnnnnnnnnnnnnnnnnnnnnnnnnnnnnnnnnnnnnnnnnnnnnnnnnnnnnnnnnnnnnnnnnnnnnnnnnnnnnnnnnnnnnnnnnnnnnnnnnnnnnnnnnnnnnnnnnnnnnnnnnnnnnnnnnnnnnnnnnnnnnnnnnnnnnnnnnnnnnnnnnnnnnnnnnnnnnnnnnnnnnnnnnnnnnnnnnnnnnnnnnnnnnnnnnnnnnnnnnnnnnnnnnnnnnnnnnnnnnnnnnnnnnnnnnnnnnnnnnnnnnnnnnnnnnnnnnnnnnnnnnnnnnnnnnnnnnnnnnnnnnnnnnnnnnnnnnnnnnnnnnnnnnnnnnnnnnnnnnnnnnnnnnnnnnnnnnnnnnnnnnnnnnnnnnnnnnnnnnnnnnnnnnnnnnnnnnnntgacctctgcagagaccttcactctggacagtctgaaggctgtggaggttgtgaacttatctgtatcttgcactgccacctgtctccctttctcatctgtgcccaaggagacccctgccagggctggattctcttccaaacagaccctgtttcccatcacccatcagcctttgggatcctttggagttgtttctacccattccagcacgttggatgaggaagtcagtgaaaggatgtttaggta

SEQ ID NO: 41404 - DNA, 1045 bp, Macaca Mulatta
  misc_feature (1)...(1045): n = A,T,C or G
gggcaagaagaatcagagattatgttcttccttgactttcactggtatcctttttatacctttatttctatgacccagtcacctatagctcacatgagctatcccaaatggattttgtggcatctgaatctagtaacaaaacctttggttccaaaggcattcattctactcagcacttatgtaaagatttattatctcttactataattaacattccctattggttagactcatacatcatgtgcctggtaatacccactgattttccgccattggctttgggagctcctttcagttcctttcagctaaaaccctttgatgcttttctgattgaagaatttgggaattctgcctttgggtgcagaaagcctttgagaatgaaatattatcttgatttgttgaatatttggaatttctcatatttgggttaggcaagcacgaagggtggttctcctaggtaatatttggccaacaccccttcgccccttaaattccctcctcaggatgaatggcctaccaccaacttatttcacgccacaatttaaaaaaacccccatttatctnnnnnnnnnnnnnnnnnnccccgtttccccccaaagctatttaacaatcgttacccacaatttcacattgagagttcatataaagggggtaccagagtcttttatttttatctaaactcacacttcaatggtttcctccatacctgaaaatagaaagggaaaaaatttgtaaataaagcacgttgggaataatggcgccaggcataaataaccacttctctacaaccctccccaaatttttgaaacacacagcggtataaagatatcaacttgttggagaatatcacatctggggcagaccctactttaattgctgccctcgagatatccgttggtcctacaggatgacttatcagcgcgccagagattccatacatgcgtatgggacgttggctgtgaactatttcatatttgtatatgcatatgagcaagacaagatggttgtccctcggtaacccacacatgcagactattttgtcggt

SEQ ID NO: 41405 - DNA, 804 bp, Macaca Mulatta
  misc_feature (1)...(804): n = A,T,C or G
nnnnnnnnnnnnnnnnnnnnnnnnacacttttaccaaggtggtttttatgggtcccagggtttttttctccaaaaaaacatttctcaaggnnnnnnnnnnnnnnnnnnnnnagtttcaattttccaaatgaccaagccccatttttggttttgtaaaaggatttcaatatgcaacttaactttttctggtaaatatttttcnnnnnnnnnnnnnnnnnnnngaccccttaataattgttacatatttatggagtagggtatgatattttgctacatgtatacaatgtataatgatcaaatcagggtaatttgcatacctatcacatcaagtatctgttcattttaaagtttatgaatttaaagggactctcctttttcccgttttatagcttttgctcagaatttcacttggtttaatactaatttggggactccagcttctaggggtgccagttgtctgattcaacgttttcatcaatttaatctttctgatgccctttgttgagtatgatacaaaagtatccactggattttgccacaagaagtccattggcagtggtgaatcggggggtttcagtggaaatgagcctgccaaacttcggagtgctgagctctcctggctgtgtggagctactgcaagcgactcttcccatgagtgtgtgtttgtgaagagggtgtgaggtgagaatgagataggatgagagacataaaaagaaaaataatttggggcagagggtgcagggagagaattaagcacctttaaatgctaatgggaaaaccccagtatagaacagtgttgaaacc

SEQ ID NO: 41406 - DNA, 772 bp, Macaca Mulatta
  misc_feature (1)...(772): n = A,T,C or G
ggtacatgggaagttgcattgtgttatttgaagaatgttggttacttaaatctctggagcaactactaaatttttaaagtataattgtgtaattgatatgctaagtaacgaggtaaaataaaattatataaagttttcaaataaaaagcagagaaagcaaggaaagagtaaagaaacaaactaataaaaaacccaaatgcaatgtacagaataaagttataaatatgacatatataaatccatttctatcagtaatcatttagagtagatttaaaaacattaactatatgttgtctacaaaaacccatattaaatataatgattcagatagtttaaaataaagggatggtaaatacataccatgctaaaactaatcaaaatagctggagtagctattttaatttcagacaaaatggacttcagaatgagggaatttaggcataaatagcagcattacattcttataatgtagtctcttttccaagaagacaaaacaccatttaatggggacgtacctaaaaactggatgtactctcttgcaaggtacatcanatatgcaagcccaaacttacagaactgcaagataaagtaggtaaatttaccattacagttggagacttcaatcccccancttttagtaaaagataacaggcaggcaaaaaaaaataagtatgaaaaatgatttgacctaaaagggcaatgtcaaatcaactttgatctaaaaaaccttttaccgaaaaaatcccatcccnaccagtatccagaaataaca

SEQ ID NO: 41407 - DNA, 722 bp, Macaca Mulatta
gggccatagacaatagataagtgaataggtatggctgagttccaataaaactttattaacaaaactaggtggctatcctgtaggctgtagtttgcagacgtctgttctagaacagtgctgtctagtagaaatataatgcatgccacatatgtagtaaaaagaaatagagaaaatgaattttagtaatatcttttacttaacagtatatccaaagtgtcatcaataggtaatcaatataaaattgttaatgagatactttgcattcttattctcatactaggtcttccaaatccagcatgtattttatgcctttatcacatctcaattcagattagacacatttcagtagccacatgtagctagtgactaccttattggacagcatagtcctagcctctctctagtaaagcttgaaaacagatcttgaagattagcaatgaacttcactgcctagcagaagaaagcccaatactatttaaaggaagacaacataatgcaaacatttaataatgtaataacaatgccagcatcaaacgaaattactagatatgctaaaaagcaggaaaaaatacttgtaacaaggagaagaatcagttaagagaaacagacctggaagtgacaaagcaatgggaattagcaggacaagggatgttacaaacataattttaattattggggtataaaataatttaaaagggaaaaacaccaaaaaaacaggtttg

SEQ ID NO: 41408 - DNA, 830 bp, Macaca Mulatta
  misc_feature (1)...(830): n = A,T,C or G
ggagtgaagtatttggtcacctcagtctcacaagcagagaggcaggatttcctctgaggggtggtgggaagttaagccctaaatttggctgttccttcttattttttcttgctttcttcagtatcgttttctgttcctgattttgaatgctctagattactgttaagttttcctttttgactttatttgtggcatctgtttcttcctgtaatttatttgtttccttaactggatcttttaagattctttttatttttctattagtcttcatttgtactcacgcttaagagannnnnnnnnnnnnnnnnnnnnnnnnnnnngnnnnnnnnnnnnnnnnnnnnnnnnnnnnnnnnnnnnnncaatctcgannnnnnnnnnnnnnnnnnnnnnnnnnnnnnnnnnnnnnnnnnnnnnnnnnntccatgtagctgggactacaggtgtgtgcctccacnnnnnnnnnnnnnnnnnnnnannnnnnnnnnnnnnnnnnnnncannnnnnnnnnnnnnnttcgaactcctgaccttgtgatccgcccacctctgcctcccnaagtgctgggatgacagtcatgagccactggtacctggccgaaagtcattctttcttcacctatgtttggtgattctaaaccttagcaccaccttaaatttttggtaccatttaaagaaacagattccaacttgattccagtattcgccttctagaaacgggtacccaaaaaaatttgagttacatgggaagggtttgtttgaaaacctttattgttagaaaaaaggttaaaacactaggccttaaaatgcccacataaaattgtggatttccta

SEQ ID NO: 41409 - DNA, 718 bp, Macaca Mulatta
ggggtggtagggtggtggacctgttggtcccgttttcccgtcgcacgtggcggccactgttggcttctgaatgctttacaaggcggagatccacgccgaggccgttggatcggccgtgggtacatccgtctgagccgttcctgtcccagcgcagagcggcggcctccggcggcgccctgcagccatggactaccggcgttttcttatgagccgggtggtccccgggcagttcgacgacgcggactcctctgacagtgaaaacagaaacttgaagacagtcagagagaaggatgacattctgtttgaaaaccttcaagacaatgtgaatgagaatggtgaaggtgaaatagaagatgaggaggaggacggttatgatgatgatgacgattgggactgggatgaaggagttggaaaagtcactaagggttatgtctggaatggaggaagcaacccacaggcaaatcgacagacctccgacagcagttcagccaaaatgtctactccagcagacaaggtcttacggaaatttgagaataaaattaatttagataagctaaatgttactgattctgtcataaataaagtcaccgaaaagtctagacaaaaggaagcagatatgtatcgcatcaaagataaggcagacagagcaactgtagaacaggtgttggatcccagaacaagaatgattttattcaagatgttgactagaggaatcata

SEQ ID NO: 41410 - DNA, 801 bp, Macaca Mulatta
gggctttgacttgcaaggcaaacctaagcttgccttatgctaagagtatgcttcttcctttccctcgttccactgcctctgaaggctgccgacgtaagtttacagtatcagagacgtgtagtggcttagctttaggggcacagttttgccagtaaggcggagtctctttagtcttgtgattctattgcaaccttgagtatttccgcgtctcagacataaatgctacagctatttctgttctgtgccaggtaactctctgggtccaagggaacttagaagaaagtcttgggctatgagacattcctggtttgggtgaaactatgaagaaaatagtgtttcaggagatcagaacttaaatcctggctctgataattactagcactaatttcccagtgtgcttcttaccatccgtgaaacggacttcatatactgtgtctctcacagtaatgagatcaaaatgaaatgatctatttcgtagtgctttgtaaactgtaaagaggcacacaaaagtgcaattattatacctaatcatgtgaatatatctaatgccacagagctgaacacttaaaaataattaaaacggtaaattttatgttatttatattttactacaataaaagtttattttaaaaaaagagtataatttttatcgtcttttatagggattgagcactgagtaagaaaagaagtgttccctacctgaagtcttccaaactttttgtgattgcaaaccttctagtgggtaaaaaatatatatatataataaaaatatggattatatgccacattgggtttctaaaa

SEQ ID NO: 41411 - DNA, 357 bp, Macaca Mulatta
agcagccacagcagcccatggttctggtggattgagggtggagcaggtagaggagcaggtgagaagcaggtggcaggtgcaggtgtggagctccctgagccccggctctttatattcctgcccaggtgtttatactgatcacatgaatactgttgttgtttctgctgtttcacatgcacaagtgttatttttaatctcttcaccgtcctatgagccgccatcagctcaagccaagctctactttccttggtttctaaatttggcctcttcctcataggcgtttccctttgttagaagacactgggctccctctccagcgggtgtcctaggagtctgggaggcagtggtggcttggct

SEQ ID NO: 41412 - DNA, 574 bp, Macaca Mulatta
aaccaataaagaagatgaagatctccgcagggctattgaactaagtatgcaaggtagttccagaaacacatcgcaagatcttccaaagacatcatgtggaactcctgcttcggaagagccaaagaaaataaaagactattttgaaaagcatcagcaggaacagaagcagcagcaacaacagtcagatccgccaggtcacagttcatatctacacgaaaggccaacaacaagttcgagagcaattgagagtgatctcagtgatgacgtcaatgaagacatggtacaggccgctgtcgacactgttttagaaattatgagaaagaatctgaaaatcaaaggagaaaaataatgccgttaaaaataatttagtcatactttccaagattatcctgtgtgatcatattgtaggacccattttggtcatctgtcaaatagatgaggaaataaggcttttagatggtctgcaaacaaaatggtgagagatatgtgggactaaataatgattgttcaactagtagccaaggagacattcagcaattaattaaatttaaaatagctttcaaaatgttccttt

SEQ ID NO: 41413 - DNA, 242 bp, Macaca Mulatta
attgaatatttatacaaatgggggcggtggaaagaggagaaggagagggagtacaaagacagggaatagtgggatcgaagctaggaaaagcagaaacacaaccactcaccagtcctagttttagacctcatctccaagatagcatcccatctcataggatgggtgttgtttcaatgttttcttttctgtggttgcagcctgaccaaaagtgagatgggaagggcttatctagccaaagagct

SEQ ID NO: 41414 - DNA, 654 bp, Macaca Mulatta
  misc_feature (1)...(654): n = A,T,C or G
tccatgtagcttaaaaatgaaggatgtaaaaggtttaggagtttgatgtattgaaaggtattcgtgtattccctcatgtgagtattaagtatacactttgtctgtttgatgaatttcaaatctttgtggaaggcagtagacacgatagcagtttacagggtggaaaaccctggttggaaagcagggcacaggctggagagattcaaagcttcttcctgcttatcccacccagatgtgcccaggaattgcaatacacagcatctgtagggtctcgcttgttccgagatgtttatataaaggacaggtgaagaaaccttaaatctggtgccctcttaacaaaggtgtgatgcattattcttattacttgtcctttcaattcttacctaggtggctttcacgtagtctaaggtaaggccagaagaaaaataaccannnnnnnnnnnnnnnnnnttatttcacggctgctaaattttactagttttcatataccatgtgaaacccaacaactagacaatctgattctttgtaatagtcattcataataaactttgaataaatatctaagtgaatggacgttcttaaatacccaggcgagtttaggtactcaggctgcaaaggcataaacaattgagtccctancttcaaggagttgac

SEQ ID NO: 41415 - DNA, 836 bp, Macaca Mulatta
cccgagtttcgggggccctttacgggagctaaaattcttcccaagggggaaggttttttcggaaagggcctctttggatggaatacccccatttattcccctcaaattaataaaaattgaaatggcattgggccccccctggcagctgggataacggggcgaacggtttttctcaatttttgcctttggcccagcttttcatttgggttgagagggcatagacctttttggattatcattcccagggctttaagttttttaaaggagcaaaaacagtttccttggtctttcttgtagccttcaactttatcttccactaccaaaggaagttcaggaacttcctcaatacgatgacctttagacatgaccagtgctggtagggctgaggcagccagggcagaacagatggcatatcgtttttgggttgtgttcactctacgatgccaacggcgccaggttttggttggtgcaaacattcggcctccacgacacatgtttccaaaagcaccctggccagagcggtgagtcccaccacctcgaactctgggaattcgagccacagctctgccagtaccccaagactcagcactggtctgatgacctgctaattcactgacagcgtagggctgtctgttgtttttgcgcaggttggtgtgaacaaagttcacaatatctggtcgaataggagccttgaatacagcaggcaaagtgacatttttgccagatgactcccccttttcggagtacaccgatatcagtgggcgagcacacgccatggcggagagaggagaaaaccacgttcctctcaccccggatgctgctacaggaaaagcccc

SEQ ID NO: 41416 - DNA, 475 bp, Macaca Mulatta
tggtgcaattattatttttaatgtataatcacaaaatgatagtttttaatgatatctcttcagtgaaacttgttattaattcttttaaacataagcttatgattctctctttagaaataaggaaatcgactacagtgggatctgcaaataaatctgaacaggcagatacataatgtaatggtaaatctcagacttttgtggtttccattagtgctatcttataggtggtctatcatctctgcctggcagagtggacctctgatgtaacctctgaaatcagtcaagcttgtggatttgaggtcatggatgaggacattttattctgtccaatgaaaaatgagtgaacacaagcaaaaattgttgagattttggagaagttattgttttgttttaagccaacaatcaatgttttgtatcacaaaaacagaaataagcataaacactaagggttaaaaatatgtatgaaaagatttag

SEQ ID NO: 41417 - DNA, 770 bp, Macaca Mulatta
  misc_feature (1)...(770): n = A,T,C or G
ggggcgtccgggccggatcaccacagaacacgacgtccattgctggggtcctcggcgatgcccgtgtgcgcagccccgcgagtctcagatatgatgtaagatacttcttcaagattggacagctggggaccttcttctaattaaccttaaaccgacttacagccatagagacacctcacaaagttcccatttttcgttgttgttgattttttgctttacaccttttctgaccttgcaaccatgtatggaagtgctcgctctgttgggaaggtggaaccgagcaaccagagccctgggcgttcacccaggcttccacgttccccctcgcttgggtcatcgtcgaaaccaatagtacaaggagggagttcggggaagcaatgtttggaggttggcaatggggaaaacccttttctatgggaaaaaatatacagtcctttaaatgctgcctaatgccccacctctgggcccttatgtatcctaaattgaccctggaaaaatggtggggttccaaaaaaccccctaaaaaaccccccctggaacccctttggccccgtttctgggggggaaacttctctgccctttatcggggggtttccggaaataaaaaggcctaatggggnnnnnnnnnnnnnnnnnnnnnnnnnnnnnntaaacccattggggggggtttcccccccttgtggaccccccctttataacccctttttttggggaaagaaaaaattnccccccctcccccccccctcccccggggggaagaaaaaataagg

SEQ ID NO: 41418 - DNA, 156 bp, Macaca Mulatta
tggctgaaaggggccaacatagagctcaggttgtggcttcagatggtacaagctccaagccttggcagcatccatgtggtgttgatcctgagggtgcacagaagtcaagaattgatttttgggagcctccatctagatttcagaggatgtatggaa

SEQ ID NO: 41419 - DNA, 696 bp, Macaca Mulatta
gtgaggtggatgggggagtgaaactccatggttcctgctttgtgttcctttcccagctccatctctttccctagggaccaggcactcatatggcggggtggggtcctagcctcagtttgaagaagtgggggctggagcggggtggggtaggggtagggatagggcataatcaaaggggccatttcttgcttttctttcctcatcttcactgcccccttgagctaggtggattttctctcatgacaagagtatgtggtagggaaagcaggtttaagataaaaagacaacccaccccctgcccttttgcttcccctccatcagtctggttgacaggaagaaaccacaacatcaacaccaacaagtttccgtgttccttttacagcaaaagggactttttatataaccaaatgtggtgttttagtgactttttgataatgtacagttttttgtgaatttaaatttatttctttctatatttttaggaccaatctcatttttaataaggttaaaaagaaaaaaaagtctagcgaaaaaactcctgtttttgccatgtgatgttccacaagtgcagctgtagaaaagtgcttgtcagttgaataaaaaaaaccacatttgatagagattcaaaagactctgtgtattcatcttcccttctacgtgtacacctgagggggagacggcgttgggatggtcatg

SEQ ID NO: 41420 - DNA, 811 bp, Macaca Mulatta
  misc_feature (1)...(811): n = A,T,C or G
gggtagctggtactacaggcacacgccacccatnnnnnnnnnnnnnnnnnnnnnnnnntaaatacgatgtcttgctatgttgcccaannnnnnnnnnnnnnnnnnagctcaagttatactcctgcctcaacctcccaaattgctgggannnnnnnnnnnnnnnnnnnnnnnnnnccnnnnnnnnnnnnnnnnnnnnnnnnnnnntggagtctcgnnnnnnnnnnnnnnnnnnnnnacaatggcacgatcttggtgcaccannnnnnnnnnnnnnngnnnnnnnnnnnnnnnnnnnnnntagctnnnnnnnnnnnnnnnnnnnnnnnnncctgccacgatgcccnnnnnnnnnnnnnnnnnnnnnnnnnnnnnnntcttcaccatactgaccaggctggtctcaaaactcccgacctcaggtgatccgtccannnnnnnnnnnnnnnnnnnnnnnnnnnnnnnnnnnnnnnnntgcgcttggccgaaaaattttattaatacctattatatgtcaagtactattccaggcattggatatccaatggannnnnnnnnnnnnnnnnnnnnnnnnnnnnncgggccgccctggccccccgnnnnnnnnnnnnnnnnnnnttcgtttgggcgcgcgggcccccgttaaggaaaatgaaacatgggtccaaaaccggttttcccaaggaaaaaccccggttcaatgaacagaggccttggaattcccccccaattaaaaaaacgcccggggggaaaaccaaacgttttcggaaaaaaattccaaaagggaattctcaaagggcctttaccggggacc

SEQ ID NO: 41421 - DNA, 3707 bp, Macaca Mulatta
  misc_feature (1)...(3707): n = A,T,C or G
caaagaagctcaccttgagtttgggagggctggtaagctccatcctttctcgtgacctcagccaagcatggaacttgccctccccttctggccttggtgatcactttttcgggaaaagtgagactgaggacccccaggtgttccatccctaagaaaagcttgggaaaccaagccccttccattcccctcccaagcaccccagccaagccccagagagccagtccggaatgatcccgctatggccaagctctggttcaaattccagcggtacttccgccggaaacctgtgcgcttctttactttcctggcactctacctgactgccgggagccttgtcttccttcactctggctttgtgggccagcccgctgtctcggggaaccaggcgaaccctgcggccgcaggaggcccggctgagggtgctgagctgcccttcttaggcgacatgcatctgggcagaggtttccgggacaccggtgaagcctcgagcatcgctcgcaggtacggaccctggttcaagggcaaggatgggaatgagagagccaagcttggcgactacggtggagcctggagccgagccctcaaggggagagttgtccgggagaaggaggaagagcgannnnnnnnnnnnnnnnnnnnnnnnnnnnnnnnnnnnnnnnnnnnnnnnnnnnnnnnnnnnnnnnnnnnnnnnnnnnnnnnnnnnnnnnnnnnnnnnnnnnnnnnnnnnnnnnnnnnnnnnnnnnnnnnnnnnnnnnnnnnnnnnnnnnnnnnnnnnnnnnnnnnnnnnnnnnnnnnnnnnnnnnnnnnnnnnnnnnnnnnnnnnnnnnnnnnnnnnnnnnnnnnnnnnnnnnnnnnnnnnnnnnnnnnnnnnnnnnnnnnnnnnnnnnnnnnnnnnnnnnnnnnnnnnnnnnnnnnnnnnnnnnnnnnnnnnnnnnnnnnnnnnnnnnnnnnnnnnnnnnnnnnnnnnnnnnnnnnnnnnnnnnnnnnnnnnnnnnnnnnnnnnnnnnnnnnnnnnnnnnnnnnnnnnnnnnnnnnnnnnnnnnnnnnnnnnnnnnnnnnnnnnnnnnnnnnnnnnnnnnnnnnnnnnnnnnnnnnnnnnnnnnnnnnnnnnnnnnnnnnnnnnnnnnnnnnnnnnnnnnnnnnnnnnnnnnnnnnnnnnnnnnnnnnnnnnnnnnnnnnnnnnnnnnnnnnnnnnnnnnnnnnnnnnnnnnnnngacaaccgttgcatggacagaaggttcctgccgggcaagtccaagcaactcattgctttggccagctttccaggtgccggcaacacatgggctcgccacctcattgagctggccacgggcttctacactggcagctactacttcgatggctccctctacaacaaaggnnnnnnnnnnnnnnnnnnnnnnnnnnnnnnnnnnnnnnnnnnnnnnnnnnnnnnnnnnnnnnnnnnnnnnnnnnnnnnnnnnnnnnnnnnnnnnnnnnnnnnnnnnnnnnnnnnnnnnnnnnnnnnnnnnnnnnnnnnnnnnnnnnnnnnnnnnnnnnnnnnnnnnnnnnnnnnnnnnnnnnnnnnnnnnnnnnnnnnagagtggccagagttcgtgaggaactatgccccatggtgggccactcacacactggactggctcaagttcggcaagaaagtgctggtggttcactttgaggacctgaagcaggacctcttcatccagctgggccggatggtcaacctgctgggcgtggctgtcagggaggaccggttgctctgtgtggagagccagaaggatggtaacttcaagcgctcggggctccggaagctcgagtatgacccgtatactgcagacatgcagaagaccatctctgcctatatcaagatggtggacgcggccctcaaagggcggaacctcacgggtgtccccgatgactactacccaagatgatgcgtccacacagggggagggtagactgggagtcctgaccatgtaggccctgaggactcaagacccctggtgaggcacactcatctgtcctnnnnnnnnnnnnnnnnnnnnnnnnnnnnnnnnnnnnnnnnnnnnnnnnnnnnnnnnnnnnnnnnnnnnnnnnnnnnnnnnnnnnnnnnnnnnnnnnnnnnnnnnnnnnnnnnnnnnnnnnnnnnnnnnnnnnnnnnnnnnnnnnnnnnnnnnnnnnnnnnnnnnnnnnnnnnnnnnnnnnnnnnnnnnnnnnnnnnnnnnnnnnnnnnnnnnnnnnnnnnnnnnnnnnnnnnnnnnnnnnnnnnnnnnnnnnnnnnnnnnnnnnnnnnnnnnnnnnnnnnnnnnnnnnnnnnnnnnnnnnnnnnnnnnnnnnnnnnnnnnnnnnnnnnnnnnnnnnnnnnnnnnnnnnnnnnnnnnnnnnnnnnnnnnnnnnnnnnnnnnnnnnnnnnnnnnnnnnnnnnnnnnnnnnnnnnnnnnnnnnnnnnnnnnnnnnnnnnnnnnnnnnnnnnnnnnnnnnnnnnnnnnnnnnnnnnnnnnnnnnnnnnnnnnnnnnnnnnnnnnnnnnnnnnnnnnnnnnnnnnnnnnnnnnnnnnnnnnnnnnnnnnnnnnnnnnnnnnnnnnnnnnnnnnnnnnnnnnnnnnnnnnnnnnnnnnnnnnnnnnnnnnnnnnnnnnnnnnnnnnnnnnnnnnnnnnnnnnnnnnnnnnnnnnnnnnnnnnnnnnnnnnnnnnnnnnnnnnnnnnnnnnnnnnnnnnnnnnnnnnnnnnnnnnnnnnnnnnnnnnnnnnnnnnnnnnnnnnnnnnnnnnnnnnnnnnnnnnnnnnnnnnnnnnnnnnnnnnnnnnnnnnnnnnnnnnnnnnnnnnnnnnnnnnnnnnnnnnnnnnnnnnnnnnnnnnnnnnnnnnnnnnnnnnnnnnnnnnnnnnnnnnnnnnnnnnnnnnnnnnnnnnnnnnnnnnnnnnnnnnnnnnnnnnnnnnnnnnnnnnnnnnnnnnnnnnnnnnnnnnnnnnnnnnnnnnnnnnnnnnnnnnnnnnnnnnnnnnnnnnnnnnnnnnnnnnnnnnnnnnnnnnnnnnnnnnnnnnnnnnnnnnnnnnnnnnnnnnnnnnnnnnnnnnnnnnnnnnnnnnnnnnnnnnnnnnnnnnnnnnnnnnnnnnnnnnnnnnnnnnnnnnnnnnnnnnnnnnnnnnnnnnnnnnnnnnnnnnnnnnnnnnnnnnnnnnnnnnnnnnnnnnnnnnnnnnnnnnnnnnnnnnnnnnnnnnnnnnnnnnnnnnnnnnnnnnnnnnnnnnnnnnnnnnnnnnnnnnnnnnnnnnnnnnnnnnnnnnnnnnnnnnnnnnnnnnnnnnnnnnnnnnnnnnnnnnnnnnnnnnnnnnnnnnnnnnnnnnnnnnnnnnnnnnnnnnnnnnnnnnnnnnnnnnnnnnnnnnnnnnnnnnnnnnnnnnnnnnnnnnnnnnnnnnnnnnnnnnnnnnnnnnnnnnnnnnnnnnnnnnnnnnnnnnnnnnnnnnnnnnnnnnnnnnnnnnnnnnnnnnnnnnnnnnnnnnnnnnnnnnnnnnnnnnnnnnnnnnnnnnnnnnnnnnnnnnnnnnnnnnnnnnnnnnnnnnnnnnnnnnnnnnnnnnnnnnnnnnnnnnnnnnnnnnnnnngtccaagacctgggtcagttctttgctggtggtcccctctgaccacaagcttctgtctgaagattcctcaggtcaacaccatcattaaatgcgagttttgttgatgattc

SEQ ID NO: 41422 - DNA, 642 bp, Macaca Mulatta
gggggtgtgaacacaggaatcccattcacagtactgaggattacatctgacgctgtccccagactccggtaaagcagctttcaccaggaaatagacactgttagactgaacaagtttcaacgagcctcaaggagaagaagcaggtattctctctctgggaccttctcaaatctggacaaaaggctaagtgctgagaatgttgcatctgaaaatcccctgtaggaatggtgtctgaattccatgccatgtttctgctctcagtgtggccttgcatccttatttattcactccagcatttttaagtgcctcctatataccaggctctggggaccccaagttgagtaaaataaaatcactgctctgtcagtcccaggatctctaaagtggaatgcaccctccacccctgtccccgggggagtgaaagcctactccaggacaaccctttagcaatgagaagaaaatgaaaaactctgataaaaataaagcctcacctttaacttcacttccagattgaattttccgaaacacaaagttttggttacggcccaaaataagaaaggtaaaaacctttaaacccggaaattccccgaaggaacttactaaaaaccccagggaaaaatgaaatttgaaaacctctttcac

SEQ ID NO: 41423 - DNA, 302 bp, Macaca Mulatta
  misc_feature (1)...(302): n = A,T,C or G
gagagagagacctagnnnnnnnnnnnnnnnnnnnnnnnnnnnnnnnnnnnnnnctcagagggcttgcactttgcctcattgactggggaaatacaaaggagctccaaaactacactctgaaatatgtgccagatttgggttggaaggattaacttcccttgcttttgcccagtttgttatagtgtcttgctagtgtttttcagcttggtagagtcacattagaagagatgctccaagacagacgctacagacaagactcacacacatggacagtacacggcagtctcgatgcatagaaaacg

SEQ ID NO: 41424 - DNA, 859 bp, Macaca Mulatta
ggactttaatggagcaaagatacataccagcttctaatgatggtgtgagaaatagtcctataaactggtctcttcatcatatatgctctcacttttgatatcagaatattaaaagacaggctgacctgtatcacacagaattaaggcagtaatttcctgcttcagtagatcaagggtagggctaaggcatcccttggtaattctgattcacagctagatttgggaaacacaaagttagggaatggctatatgtggtttgctagatggagcagtcaatgtcttaactatcaagagttgtgaatctgaatcatggcactaggtcaggggtgctgtggaatgaaatgaccttagttcacaaaggagtgatttgtcctcatatgtcaaatgaggaatgagacacttagcgtcacctcgggttgtttcataaagaccaaagtacaaaataacaagttgttaaaaaaagtaaaaaggggctaatttgaaatgccctaaaatgaaagggcaaataaaggaaatttcccactaagtgaagaggattcagagaaaaaaggagccgggtccccgaaaaattattttaaatctacgagagaaaaaatcagtaactcccaaatgtagggactacagggtcaattacgcggtggcaaaaaagacttaaaaggggtattccaaaccaacttcaacccggaaaaaaaaaaccacgaattggtttcactcatggagaacaacagggcaaaataagaagcgtttaagccaagtcttatataatggagtgaaaatatatttaaagtagggatacaaaatctcgggcggtccaacttccctccagactaatgggtctaagaatccacaccgagacgag

SEQ ID NO: 41425 - DNA, 207 bp, Macaca Mulatta
taatatgcgacaaatatataaagcgctcatggtgtggtcaacagatgacgagacaagctccaaaagatgcgcctctcctcaagaaccactgaaggacagtgggacctgagtattgaaagggtcgtgaataacattgactcatgccagccataaatattgaagaggtgatgataagcatgtggaaaagaggagcaaacctcaaagacc

SEQ ID NO: 41426 - DNA, 724 bp, Macaca Mulatta
tcgaagtgcaccaatttttgacacttattaaatcagatgatcttaacatatccagagaagagagcattctggacttagttctgagatgggtaaatcataacaaagaattgcgtgcagagcatcttgttgagcttttgaagcaagtcagattggaacttgtaaatccttcttttttaagacaagccctaagaaggaacacaatgcttctgtgtgatgcagattgcgttgacataattcaaaatgcattcaaagccatcaagacaccccaacagcactctctaaatctgcgctatggcatggagactaccagtcttctgctttgcattggcaacaattcttcaggaatcagatcaagacataggagctatggggatgccagtttttgttatgatcctgtatcacggaaaacctatttcatctcatctcccaagtatggagagggtttaggaactgtgtgtactggtgttgtcatggaaaataatactataattgtggctggagaagcaagtgcctctaaactctctagacaaaagaacaagaatgttgaaatttataggtttgtatctagcagcaaatttgcttaattatgttgttttgatactagcagcagtagaagaaagaactgcaaaaagtcatcacatcttaaattatttgtagtcaaaattaccatatacatctcccataaggaatagtatacagaacatgcttttgcgtgtctgtgtgg

SEQ ID NO: 41427 - DNA, 783 bp, Macaca Mulatta
ggataccacattaacagttcacctcaatacgttcaaaaatcattatctgcctccaaatctgtttctctgttccttttccccattttccctgacactgtcattctcacagtcatgcaagatggaaatcttggagtcattttgtcctcatcccacatcctcatcctgctttgtgttatttggtctacattacttttctcttcccacagttgctgtcttaagtacgttgtatctttttctgactatcaccgaacctcctaaattgtctcccaatgtctagtcattatcccccgtaatccatcaattattgtacggtagtgtcagaattgttttaagatacgcactgattatgttgcttcattaaaattccttaatagctaataaaaaggaggaggggaaagctaatacatgttccttctagaagatacagatagataagcaaaatgaagaaaatatattcataaatcccaacactcaggtcatcaactatcatcagtttagcctgtacatattttgtaagctgcttatttttcttttatacatcatgagcatattccaatgcagttaactacattctacagtatatatgattttactagctatatagtaataccattgtatgaatttgcaccactattttaactttcatgccattcagcttttttatggtatatcctttcaatacaccctctggttttataccttgaatcagtaacctgcggtccggtggtcggtttaaccctaccaacctaagaatggccttccacagttttaaaatcatcgggg

SEQ ID NO: 41428 - DNA, 1893 bp, Macaca Mulatta
  misc_feature (1)...(1893): n = A,T,C or G
agtcctattctggtgaaaacacagctagtgccattgcccgttctgctgccgccacggctttgtctctccttgtgccagttttcattatctcttgcaaagagaaggttgaggaaatcctgaacatgctgactgccaggttacctgggaaaccaagtgctgatgagtctcaagccgtgcaaatccacatgggccttgctttagggatgtttctctctcgcttgtgtgaagagaaactcagnnnnnnnnnnnnnnnnnnnnnnnnnnnnnnnnnnnnnnnnnnnnnnnnnnnnnnnnnnnnnnnnnnnnnnnnnnnnnnnnnnnnnnnnnnnnnnnnnnnnnnnnnnnnnnnnnnnnnnnnnnnnnnnnnnnnnnnnnnnnnnnnnnnnnnnnnnnnnnnnnnnnnnnnnnnnnnnnnnnnnnnnnnnnnnnnnnnnnnnnnnnnnnnnnnnnnnnnnnnnnnnnnnnnnnnnnnnnnnnnnnnnnnnnnnnnnnnnnnnnnnnnnnnnnnnnnnnnnnnnnnnnnnnnnnnnnnnnnnnnnnnnnnnnnnnnnnnnnnnnnnnnnnnnnnnnnnnnnnnnnnnnnnnnnnnnnnnnnnnnnnnnnnnnnnnnnnnnnnnnnnnnnnnnnnnnnnnnnnnnnnnnnnnnnnnnnnnnnnnnnnnnnnnnnnnnnnnnnnnnnnnnnnnnnnnnnnnnnnnnnnnnnnnnnnnnnnnnnnnnnnnnnnnnnnnnnnnnnnnnnnnnnnnnnnnnnnnnnnnnnnnnnnnnnnnnnnnnnnnnnnnnnnnnnnnnnnnnnnnnnnnnnnnnnnnnnnnnnnnnnnnnnnnnnnnnnnnnnnnnnnnnnnnnnnnnnnnnnnnnnnnnnnnnnnnnnnnnnnnnnnnnnnnnnnnnnnnnnnnnnnnnnnnnnnnnnnnnnnnnnnnnnnnnnnnnnnnnnnnnnnnnnnnnnnnnnnnnnnnnnnnnnnnnnnnnnnnnnnnnnnnnnnnnnnnnnnnnnnnnnnnnnnnnnnnnnnnnnnnnnnnnnnnnnnnnnnnnnnnnnnnnnnnnnnnnnnnnnnnnnnnnnaatctgttcctccttctcttcttaaattagtgatgaaacccatagcaactgttggagaaagctaccaatatcctcctgtgaactgggctgcacttctctctccacttatgaggctaaattttggnnnnnnnnnnnnnnnnnnnnnnnngaaattatggtgacccaggcacagtcatcccagaatgcagctgcactattgggcttgtgggtgacgccaccactgatccacagtctgaggatatctgtacctctgtggataaaacatctctgatgaacagatcctgggttttgttgaaaatttaatggtggcagttctttagcagcttccccacttggaaatcctgagctatgcccaagtgctttacagggtctgagccaggccatgaatctgcccagccctgcccaccacctctggagtctgctctctgaagctactgggaaaatttttgacctcctgccaaataagattcgggagaaaggatctagagctgtatatcagcatagcaaaatgcctcttagaaatgacagatgatgatgccaatcggatcgcccaggttactaannnnnnnnnnnnnnnnnnnnnnnnnnnnnnnnnnnnnnnnnnnnnnnnnnnnnnnnnnnnnnnnnnnnnnnnnnnnnnnnnnnnnnnnnnnnnnnnnnnnnnnnnnnnnnnnnnnnnnnnnnnnnnnnnnnnnnnnnnnnnnnnnnnnnnnnnnnnnnnnnnnnnnnnnnnnnnnnnnnngttttgaagagaatggagtggctcttggaactgatgggttatattagaaatgttgcttaccagtcaacatcctttcagaatatggctc

SEQ ID NO: 41429 - DNA, 1367 bp, Macaca Mulatta
gggtgagaacagcactgagtaggtgctgtgtgtgtttgtgttcaattaagaaattccagaataaataaaaatgaattaattcaacaaacattttctggagcaccgacaatctgcccagtgcaccaggctaggtatctggtacaaagataatgaaaacagtctcttggaacctaattggggtcctcatttgatcaggactttctttcgtccccttttaagccaaccagttttgtccggacaagacaaaaccaacttgggctgctttagagaagcccagctcggtgttgacaatagctgcccagcctctgaaagggactgattggattatgtggcaaatggaggtgcaaggatgactctgacggtgacaaacgaagtgggcggagacctgctttgagttaatccaggctattaggaggggaccttttgtcttccagagactggcagcttttaccagtggtttttacatccttaatgttcaggacgaataatttatggtcagtgaaaatctgggccccagtgagattcgagtgggctgtaaaatcgggagtcctgctcccagtgagtaatggtagtgaatgtttctgtcactttttgcaaccgtccattcatttgatcctcacaactccctgtcctgagtcagggccgggcactgccactccccagggaaacagaggctgtcaagagggctctgtagttttgggccccacctggatcattgaaactcctgttccctgagttctagaggaagaattgtacctgtctcagtcccggcctccttcagaaggcctccctctgcatttctaactttgctctgcctgcagcctgctgcaggtccctgctgtcatcttttctagccactacagcctctgtctttcctttcacagccaagcttcttgaaaggcctgtctacacttgctgtcttccttcctcacctccaatttcctcttcaacccactgcttcctggactcggctcctactccgtgggaaggggctcttcacaaaagggtaaagaatttttccggttagctttaatcccttgtccatggttttccagcctcctgggaacacgaacgaacaccattttttcaatggccctttccttcctcaacagggggcttccttgcggggccccccgggtttcaacttttcgggggggccccctttaaaacatttccccccttttcacccggaaaggcaccccccttggccttccccccccctttccaccccccggttttcccttaaaacggttcccccccctttaaggggaaaacttttgggcaataacccccccaagggggttcttttctcggggaacatttttccggggggaaaccccggggccccttttttttttacccccttg

SEQ ID NO: 41430 - DNA, 644 bp, Macaca Mulatta
  misc_feature (1)...(644): n = A,T,C or G
ggggggccacatgaacagcggggtcagctagatgaacatctagacttaactggaaccaagacatgcttatttgtgcaaattgtgactccttgattttgggatnnnnnnnnnnnnnnnnnnnnnnnnnnnnnnnnnnnnnnnnnnnnnnnnnnnnnnnnnnnnnnnnnnnnntgtgctcaagatnnnnnnnnnnnnnnnnnnnnnngatagctgagattacagctggagaccatgggaacagaagcttcatcatcagttgagttaatgtgtgaatgggtcgcaagagttccagcaccaccaacagcggatgaccaggtcatctatgctgagtaagaaggtttcctcttccatggccttctcttcatcaagaaaagactctagccaaccaagctgtgcttaggtttcagacaataaagctcctacagccccaaggaaaaaataaaatgcaaccttcatagcatcttgctnnnnnnnnnnnnnnnnnnnnnnnnnnnnnnnnnnnnnnnnnnnnnnnnnnnnnnnnnnnntttantttgcccccttcataacttcttggttataaaagaaacaggaacataaacaaaactcttcttcacatctcgtcaataatacttccatgcctccatcctcgaccctccttaaat

SEQ ID NO: 41431 - DNA, 830 bp, Macaca Mulatta
gggggatgtaagatggcgactgtcgaaccggaaaccacccctactcctaatcccccgactacggaagaggagaaaacggaatctaatcaggaggttgctaacccagaacactatattaaacatcctctacagaacagatgggcactctggttttttaaaaatgataaaagcaaaacttggcaagcaaacctgcggctgatctctaagtttgatactgttgaagacttttgggctctgtacaaccatatccagttgtctagtaatttaatgcctggctgtgactactcactttttaaggatggtattgagcctatgtgggaagatgagaaaaacaaacggggaggacgatggctaattacattgaacaaacagcagagacgaagtgaccttgatcgcttttggctagagacactgctgtgccttattggagaatcttttgatgactacagtgatgatgtatgtggcgctgttgttaatgttagagctaaaggtgataggatagcaatatggactactgaatgtgaaaacagagaagctgttacacgtataggggagggtatacaaggaaaggttagggatttcctcgaaggatagtggttggttaataagtcccacggcagacacagcttccttagagccggctccaccaccttaaaataaggtttgttggtttaagaaagacacccttctgagtattctcactagggagactggcgtcaaggcaatcgaagattttgggaagctggaacgcaaggccttcttcctaaagccaaaagcgggattgcattttaaaatttgagtttccattctaaaagggctccacaagaaaa

SEQ ID NO: 41432 - DNA, 575 bp, Macaca Mulatta
ttcatgccttaagaatcactttagaattcacactggaataaaaccctataaatgtaaggagtgtgggaaagcattcactgtttcctcaagcttacataatcatgtaaaaatccatactggagagaagccctatgaatgtaaggactgtgggaaagcctttgctacatcttcacaactcatcgaacatataagaactcacactggagagaaaccgtatatatgtaaggaatgtgggaaaaccttccgtgcttcttcacacctacagaaacatgttagaattcacactggagagaaaccctatatatgtaacgaatgtgggaaagcctacaatagattttatttacttactaaacatttaaaaacacactgaagaaaaactctgaatgtaaggaatgtggaaatcttaggaatttctcataccataattaccacatttgaattcatactgaggagaaatcttattggtacaaagaatgtggggaggccttcagttatccccattcattttgaagacatgaaagaactcatactctctgtgtcccccataaattttaggaatgttagggcgccattgg

SEQ ID NO: 41433 - DNA, 622 bp, Macaca Mulatta
  misc_feature (1)...(622): n = A,T,C or G
ccagattttaaaaggttataaaaaaaatcccnnnnnnnnnnnnnnnnnnnnaaaagggggttcccagttctttttgagacacccattgggggggaggggggtttaaaacaccccccccctggattccgaggggtgggtttccgaaaattttgaaggccccagggccctttcgtttattgtgggcttcccccccctgggcttgggggtgcaaccgtttcaaggggaaacgcccttccttgggtgggcccctggttaagcaaaagctgttttttctggtggattctattcaggcctggggccgcccaacctccgcgggcccgggtaaagtaaagagccctccaggagaggacgccggcttttcccctttcgcctttcgcagggcagagaagcgcaggccaggctggggagggggcctcagaaccgctcacaagtgtggaccacaggctgcagcgggaagcggggatgccggatgggacctgtagcccacacttctaccacgcagggctgaggtcaccaggccctgaagtgtccttgggcagagctaggataaacctcccatacctggaggagccgtttcctggaactggactgtgtttgtgtgtgcgtgcgtgtgtgtgtcccc

SEQ ID NO: 41434 - DNA, 1651 bp, Macaca Mulatta
  misc_feature (1)...(1651): n = A,T,C or G
tggaggaatgctgggtgacagagatagccaatggctccaagaatggcttggatttcaaccctatgaaggattacatgatcctgagtggtccccagaagatagctattgccgtgttgtgcactcttctgggcctgctaagtgccctggagaacgtggctgtactctatctgatcctgtcctcccaccggcttcgccagaagccctcatacctgttcattggcagcttggctggagccgacttcctggccagtgtggtctttgcatgcagctttgtgaattttcatgttttccatggtatggattccaaggctgtcttcctgctgaagattggcagcgtgaccatgaccttcacagcctctgtgggtagcctgctgctgaccgccattgaccgatacctctgcctgcgctacccaccctcctacaaagctctgctcacccgtgggagggcactggtgaccctgggcatcatgtgggtcctctcagcactggtctcctacctgccgctcatgggatggacttgctgtccccaggncctgctctgagctttttccactgatccccaacgactacctgctgggctggctcctgttcattgccttcctcttttccggaatcatctacacctatgggcatgttctctggaaagcccatcagcatgtagccagtttgtctgggcaccaggacaggcaggtgccaggaatggcccgaatgatgctggacgtgaggttggccaagaccctggggctggtgctggctgtgctcctcatctgttggttcccagtgctggccctcatggttccacagcctggccactacgctcagcgaccaggtcaagaaggcctttgccttctgctccatgctgtgcctcgtcaactccatggtcaaccctgtcatctacgctctgaggagtggggagatccgctcctctgcccatcactgcctggctcactggaggaagtgtgtgagggggcttgggtcggaggcaaaagaagaagccccgaggtcctcagtcaccgagacagaggctgatgggaaaatcactccgtggccagattccagagatctagaccactccagttgctgatgaggcctcttcccaatttaaacaactcaagtcagaaatcaattcactccctggacgagagagaggggtcttggcactctcttcttacttgaaccagccccaggcacctagacacagacccctttttgctgatgagtgttggaactgactcctggaaggcagcctggccttgcccacctgcacacagtctgttggataggtagggcccacgaggagtagccaggtgggcgagatgcaaagggcctgggacaggctcagtacaagtcaggtcaggctttgtgcctgcatcctccagagaccacaggagccagagggagcctccaggcccagcaaagagggacttgggagaaatccgagaagaatgggttgttctcttgggaagtcagggtatcagatgggatggacatccaggtcttctccctgcctaattgtcaaggcctccttggctctggagctatgaaaggccccaactttcaggtcacccttgccactgaggaccgagaactatgctatgataaggattaagagtgttgacttgcctctttcagagataaatgacaagccttc

SEQ ID NO: 41435 - DNA, 778 bp, Macaca Mulatta
  misc_feature (1)...(778): n = A,T,C or G
ggnnnnnnnnnnnnnnnnnnnnnnnnnnnnnnnnnnnnnnnnnnnnnnnnnnnnnnnnnnnnnnnnnnnnnnnnnnnnnnnnnnnnnnnnnnnnnnnnnnnnnnnnnnnnnnnnnnnnnnnnnnnnnnnnnnnnnnnnnnnnnnnnnnnnnnnnnnnnnnnnnnnnnnnnnnnnnnnnnnnnnnnnnnnnnnnnnnnnnnnnnnnnnnnnnnnnnnnnnnnnnnnnnnnnnnnnnnnnnnnnnnnnnnnnnnnnnnnnnnnnnnnnnnnnnnnnnnnnnnnnnnnnnnnnnnnnnnnnnnnnnnnnnnnnnnnnnnnnnnnnnnnnnnnnnnnnnnnnnnnnnnnnnnnnnnnnnnnnnnnnnnnnnnnnnnnnnnnnnnnnnnnnnnnnnnnnnnnnnnnnnnnnnnnnnnnnnnnnnnnnnnnnnnnnnnnnnnnnnnnnnnnnnnnnnnnnnnnnnnnnnnnnnnnnnnnnnnnnnnnnnnnnnnnnnnnnnnnnnnnnnnnnnnnnnnnnnnnnnnnnnnnnnnnnnnnnnnnnnnnnnnnnnnnnnnnnnnnnnnnnnnnnnnnnggacttctgccctaaccaattcaaaataatgaaacgcaccccccagccgtaaccaaaaataactggtcccgaaagaaacttcaaatatcctaacttcccaccaaaaaaaaacccatttttgaatggaatataaaaaaccaaaggccctttaacctaaaagccttttggctccctgtgccctccctcgaacgtatatatcaaacacctt

SEQ ID NO: 41436 - DNA, 161 bp, Macaca Mulatta
ggctcacatccccatagtgctgggttacagtgaaggcacgccccgcactctgctctggagacgctgggtgggatagggaacatcccgagtggcgcccgcagtcatggtggtgttcgtgggccgccacctcccggcgctcctagggctatttaagaagaagg

SEQ ID NO: 41437 - DNA, 659 bp, Macaca Mulatta
  misc_feature (1)...(659): n = A,T,C or G
gggaaggttttcataatacgggaggccaagtctatgatactgcctcaaagagaccctattgtttagatgcatcatcttctctcatttgatccatagagcataggcaaagacatcaacctcaggccttagagaaaagtggaaatgttattatgacaaccatccatgagttatcgctttttatgaagttaaatacagtcatgtgttgcctaacagcagggatacattctgagaaatgcattgttaggcaattccgttgtgtgaacatcatagtgtacttacacaaacctaggtggcacagcccacaacatacccaggctatatggtaaacctgtacagcatgttgctgtactgaatattgtaggcagttgtaacacaatggtatttgtgtatctagacatagaaaagatacagtaagaatatggtattacaatcttacgggaccactgtcagatatgcggtctgtctttgaaaagttgttacgcggcgcatgactataaatacctagctggttagcatttacattccttgccagggagtttgaaatttataatatagaaataactttaggttttaagtagagttaaagaggtnaagcacatgttgccacaacccagaaagtatttttagaagactggatttcctaccttaggatctaaaaa

SEQ ID NO: 41438 - DNA, 649 bp, Macaca Mulatta
  misc_feature (1)...(649): n = A,T,C or G
ggnnnnnnnnnnnnnnnnnnnnnnnnnnnnnnnnnnnnnnnnnnnnnnnnnnnnnnnnnnnnnnnnnnnnnnnnnnnnnnnnnnnnnnnnnnnnnnnnnnnnnnnnnnnnnnnnnnnnnnnnnnnnnnnnnnnnnnnnnnnnnnnnnnnnnnnnnnnnnnnnnnnnnnnnnnnnnnnnnnnnnnnnnnnnnnnnnnnnnnnnnnnnnnnnnnnnnnnnnnnnnnnnnnnnnnnnnnnnnnnnnnnnnnnnnnnnnnnnnnnnnnnnnnnnnnnnnnnnnnnnnnnnnnnnnnnnnnnnnnnnnnnnnnnnnnnnnnnnnnnnnnnnnnnnnnnnnnnnnnnnnnnnnnnnnnnnnnnnnnnnnnnnnnnnnnnnnnnnnnnnnnnnnnnnnnnnnnnnnnnnnnnnnnnnnnnnnnnnnnnntaaaccttaaagccaaactacattgaatataaaaaaataaaaatcttgtcgcccccctcgcccctccaagaactttcaaaaccatttttcagggcccgcgccccaaaaggtaagtaaaaatgctcaatccttttcctagaagtcctgacctaaaagggcttggattcccacaaaaaaaaccccgggggcaaccagactttctaacaaatcaatggattcgaggctta

SEQ ID NO: 41439 - DNA, 780 bp, Macaca Mulatta
  misc_feature (1)...(780): n = A,T,C or G
ggctacttttctctctggcactgtcttggctatcattctctgtccagaactgtacacttgcctttttgtgaacaggaatatgcagcttatcttcctgacagatgatacatttctgtccttgcctttgtccatagcctcttctctctgccaggcacatgagtcacagaatccctgtcatgaagctggtcctccagcccggcaagtcaacccatgtttcattactttatgttcaatatacatttatatagttttttgacacagagtctcgctctgtctcccaggcttgagtacagtggcacgatgtaggctcactacaacctctnnnnnnnnnnnnnnnnannnnnnnnnnnnnnntggttctcctacctcagctnnnnnnnnnnnnnnnnnnnnnnnnnnncaccaccacacccgactcnnnnnnnnnnnnnnnnnnnnnnnnnnnnnntgnnnnnnnnnnnnnnnnnnnnnnnnnnnnnnnnnnnnnnnnnnnnnacctgcctgggcctcgnnnnnnnnnnnnnnnnnnnnnnnnnntcactgcgcctggcctcaacacatttttgaatgactggtacttgcaacttcgtacagggatatgagtgacctttgaggatcaaagaatggatagacaagacacgtatgggatgcaaactattcccgaaggaatttaaagaccataaaaaggagaacctgggccctgtagcaccactgatcacctgttaattgcacctctctctgctgaaagcaagggttgcattttcttgaacaaccctcttt

SEQ ID NO: 41440 - DNA, 812 bp, Macaca Mulatta
  misc_feature (1)...(812): n = A,T,C or G
ggtgtgacggttaatattgagtatcaacttgatctgattgacagattcaaattattgttcctctgaggttgttgccaaagaagattaacatttgagtcagtggactgggagagcctgacccactctcaatctgggtgggcaccacctaatcagctgccagcggggctagaataaagcaggcaggaaaagttggaaagagcagacttgctgagtctcccaatcttcatctttctcccatgctggatgcttccttccctcgaacattggactccaagttcttcagcttttggattcttggacttaaaccagtggtttgccagaaactcttgggcctttggccacagactgaaggctgcactgttggcttccctacttttgaggtttagggtctgggactggctttcttgctcttcagcttgcagttggcctattgtgggactttatcttgtgaagctgtgagtcaatactccttaataaactcccctttatatatatacatcgtatcctattaattcgtgtccctctaagagaacccctgaactaaaacacttggctcttccctattttgattgccatttttattggcccctggaaatcccaggccgccacaccgtaaaaaccttttcccggcaaaattttaaaatgttccaattccgcagaatccctctaagttttcccaccacatcctggaacatattttccgggggccttctttccgtcttctctcaaaataaagggctttgtccggaattggaaaccccgtttatttttcgaagccacagagagaattttgacaccggnggaaaaaacat

SEQ ID NO: 41441 - DNA, 640 bp, Macaca Mulatta
  misc_feature (1)...(640): n = A,T,C or G
ggggaggctcaagttcgccactttactcagaccgatgcacagtcttcccattttacacttttttaataaacataattgcnnnnnnnnnnnnnnnnnnnnnnnnnnnnnnnnnnnnnnnnnnnnnnnnnnnnnnnnnnnnnnnnnnnnnnnnnnnnnnnnnnnnnnnnnnnnnnnnnnnnnnnnnnnnnnnnnnnnnnnnnnnnnnnnnnnnnnnnnnnnnnnnnnnnnnttttnnnnaaannnnnnntnnnnnnnnnnnnnnnnaannnnnnnnnnnnnnnacccccctttcccnnnnnnnnnnnnnnnnnnttggaataaataacaatattcccaacaaatttctcttccaaaaaaaaagtgcttgttgtatatcactcgaatttgaaaaacccccccgaaaaaaacacccccgcgcgggaaacaaatcctagaaggaaaattaatgaggtgtttgttgcattcctcacgggggtcccacctaggggtgttttatattttgccttcacccaatccccccccccaccctgttgaattatttatattattctccaagagtccccccaaagaggtctaaaaatttgtcaggcgaacccccgcgggcacctcctatttttcgataaataaggggaaaaatcct

SEQ ID NO: 41442 - DNA, 142 bp, Macaca Mulatta
ggagctgagctgaatgactttgccgtcttcaccaccttcggcctggcctctgctctgctcctaggcgtggatggacttctgagtgggatcctggccatcatctatgtgtaaggtgcttctttccacttgtgcttttattcac

SEQ ID NO: 41443 - DNA, 657 bp, Macaca Mulatta
  misc_feature (1)...(657): n = A,T,C or G
aaagagatattcctttacaatacatatcccaaagctttcagttaaacatgatatatcacaaatgcgattaaaatgttaaagcaagaggaatgcaaatagcattaaatgatgaccaaaatgtaaaatattgtagatttcaaaagctgtgtatctattaggtgggataccaaatgtaaatgatgtaactaatgttgttttttcacttnnnnnnnnnnnnnnnnnnnnctaaaaacgttttgatattatacaatgtatttgtttcagataaggtcgttttcatttagtatatataattaatgtgtgtataagtttaagtaaattcctgtaagtaaaaatggatttatcacaaaatacagttctaaagaaaggtatatatactcatatccagagtgtccactgatttaatgggaactaggtataacttcaggagaattttgcacctaattcactaatctatgtaaatatccaaaagcttgtcctatctttccgcattatttcaagggatcattttttcattctcctttcacagcacttttctagtaaattctgtaacacagaaattccgtcttggaatcatttcatgttaccaataattctagacttttataacatttaacatgttgatggaaatagctatctgctagagtcttttgcctt

SEQ ID NO: 41444 - DNA, 798 bp, Macaca Mulatta
  misc_feature (1)...(798): n = A,T,C or G
ggatagaagagtcttccaaacctgtgaggctatcacaacagctggaaaaagttgtaacaaccaattacaaacctgttgctaatcatcaatacaatattgaatatgnnnnnnnnnnnnnnnnnnncggaaagcgagctcgagctgataaacaacatgttttagacatgctattttcagcctttgagaaacatcaatactataatcttaaggacttggtggacatcacaaaacaacctgtggtgtacctgaaggaaatcttaaaagaaattggtgttcagaatgtaaaagggattcacaaaaacacatgggagctgaagccagagtacagacactatcaaggagaagaaaagagtgactgagaagcctcctagtcagcatgctagtgaaacagctagcggcgatgctgtgctataggcgctgatactggaaggcttgaacaccgtatgttaataatggttaagtgacaatactttcatttctctcggtaaatttttttaacctgtaattcttgtaaagtttcttaactgtttttttgaggagaaagaacaaatttatttatagacttaacttgtattaaaccagattactcacaataagaaacaggggtttggaggattaaaagggttttttcttaaatattagctttttaatgtgtacaattaggaaaatgttttttaaatgaagactctcctaccccttgctgggatctgaaggagctgaagtaaatacagattccaggaagaattggtatagccaggaaaaaaaagtcaacttacgaaaactccttaaaagaattaa

SEQ ID NO: 41445 - DNA, 835 bp, Macaca Mulatta
cccttttcaagaacaaggagagtggagggagtcacacgttggtctatggaagtcgcttcctctctcaagcctcagtttcctcattttcatggagaacttgagtcttcagaagtgaactagcagagaagtgtttcggaagcagccagtcgctccacagctgtgagcagcagggacggtgacttttcttttgcagaatgacgacgcatgccttgttccgaacccaccattgcatctcacaggcctgccggtggagcccccgccatcctaccagagtgtgattcaacaggacacacaacacaagcagcctcagaggtgaagaggtttggccccggctccccagaccttcagaacccacacgtggccccttctccctggcatggagagaaaccagttcccaagggagctgtgacgggcaaggggctaacagtgctgcagctagaactgcctggcctgggagtggtagccgaggcagcaatggtcctatatactcaggccctagaggaactcccaggaccccccaggaacatctctgcacctgacttggttgaccagagctacctcagctgaacctgggcacaaccaggacccatcaccctccctgccagcctccagagcaaactcctgggcctgcagaccccaggtgccccccatgccctctgacctcccttgtctgccttctctgatcaatggtggatgcacaggaggatataaggggagccaggaaggaaggtctccagagcggcacaggcaggggcttcccttgcctcaacctactaagaggtctctgggggagcctgtgtatctgaatccctggatttaggatgagggcagctgg

SEQ ID NO: 41446 - DNA, 929 bp, Macaca Mulatta
cccaggcccaggaccaaactgaggctcccctgtcctccttacctcaggaaactgtcatctccacccgtcaaccagcctaatcctggagtgctgtggaagccgctctcagaccccttggcagctccccaggtccagatcgaggctgcccctgccccgctcagtccctgcacagccaccggctgggtgactgggaccccttggaaccaggcctgaggacctacccactgcccctgcttcagcaccctcagctccactccctcacggccagctcaggccacccagggaggcgctcttgcccccagtcccgccctctggaatggctactgcttgcaggcttgacagcccggccccagtccctcaccagcagctgctgcgggatgagctgcatgtacagcttccttggccactgctcggtcctcctgtggggcacgaggggacgagggtcaggaggccccagctcccctggacgctgccaccgcccccagcccggcactcacaggatctccccctggttcacgtagacgtgggacggcagccacctcttggaccgactgttgggctcaggcctgggcttttgggggagagataaagaggagccctcagggctggagacccccaaccccagtgtcccctcccagccacagtccgtgaggatctgggggtcccaggtccccaggctgccgagggctcacctcctgccactccatgacgccgctccatgccagaaacttgttgttgacgatctggactgggcctgagttgacaccaccaggtcccactgcctgttggaagaaagggggtgggaagaaggggccctgggtcctgggaaacctgtctgtcctagggtccgccgtccctccctccgagtcttggcctgtcgaccccagctgggtccattctctagccccaggggaacagggcctgccccc

SEQ ID NO: 41447 - DNA, 389 bp, Macaca Mulatta
  misc_feature (1)...(389): n = A,T,C or G
gatattggtgatatttcgaaaccctaaagatacggcagtatcttttttccatttccacaacgacgtccccgatattccaagctattgctcttgggatgaattcttcagacagttcatgacaggacaagnnnnnnnnnnnnnnnnnnnnnnnnnnnnnnnnnnnnnnnnnnnnnnnnnnnnnnnnnnnnnnnnnnnnnnnnnnnnnnnnnnnnnnnnnnnnnnagaatctggctgctggaataaaacagattgctgacttcttgggattctttctaactggggagcaaattcaaactatctcagtccagagcaccttccaagcaatgcgtgcaaagtctcaggacacacacggtgctgtcggcccattccttttccgcaaaggtaaagtt

SEQ ID NO: 41448 - DNA, 327 bp, Macaca Mulatta
  misc_feature (1)...(327): n = A,T,C or G
ggggacacatctcagctggcttcctcttccctcttgctctctctcctactccggctcttctatcctggtgttccttgaatgcctatcttccttttgtgccacagaacttctgacgcccgctacaagttactcatttccttggttgttctgaactttaaataaggtaaggtatgttaccttatgcatttttcattgttaaaaatagacaatactgatgattcagatgatgttactgatgaaaataataaagaagacaattatnnnnnnnnnnnnnnnnnnnnnnnnnnnnnnnnnnnnnnnnnnnnnnnnnnnnnnnnnnnnnnnnnc

SEQ ID NO: 41449 - DNA, 682 bp, Macaca Mulatta
  misc_feature (1)...(682): n = A,T,C or G
gcggtcttcccgcaccctctgctgccctctccccaccgtcttcttcccgcaccttctgctcccnnnnnnnnnnnnnnnnnncttccccaccgttttctttccctcagtctctccgcctcctcgcagcaccggttcctgtggcggcatcttttcctcccatgtccctctccccannnnnnnnnnnnnnnnnnnnnnnnnnnnnnnnnnnnnnnnnnnnnnnnnnnnnnnnnnnnnnnnnnnnnnnnnnnnnnnnnnnnccgtcttctcccggcctattactgcaaccgttttcttcctcaccccgcaccgttttcttcccatgtcnnnnnnnnnnnnnnnnnnccctcttctcctctccccatcgtcttctnnnnnnnnnnnnnnnnnnnnnnnnnnnnnnnnnnnnnnnnnnnnnnnnnnnnnnnnnnnnnnnnnnnnnnnnnnnnnnnnnnnnnnnnnnnnnnnnnnnnnnnnnnnnnnnnnnnnnnnnnnnnnnnnnnnnnnnnnnnnnnnnnnnnnnnnnnnnnnnnnnnnnnnnnnnnnnnnnnnnnnnnnnnnnnnnnnnnnnnnnnnnnnnnnnnnnnnnnnnnnnnnnnnnnnnnnnnnnnnnnnnnnnnnnnnnnnnnnnnnnnnnncaccgttttcttcccatgtcttcccacctgcatgcagcagcgtctgt

SEQ ID NO: 41450 - DNA, 584 bp, Macaca Mulatta
  misc_feature (1)...(584): n = A,T,C or G
gaccttgctatcactgctattaccatggcagaaccgcctaagaaatgagatagaagaagctctggacacagatctcctcaagcaggaagcagaacatggagccctggatgtccctcatctttctaactacattctcaatttgatgactctgctatgtgcaccagttcgagatgaagcgatacagaaactagaggccataacagatccagtacagttactgaggnnggggcatcttccgtgttctgggcctaatgaaagtggacatggtgaactataccatccagagctttcgaccctatctgcaggagcattccatccagtatgaacaagctaaattccaggaactccttgataaacagcccagtngtctcctcgattataccacaaaatggctaaccaaagcagccacagacatcactacaccatgtccgagttctcctgagtcacctagctcctctcgcagcgtggcgtgttcacttccaaacggggcaggtaacaactcagagcccccgagtccaacaatggtgctataccaaggctacctgaacctcctcctctgggatcctgaaaacgaagaattcccn

SEQ ID NO: 41451 - DNA, 659 bp, Macaca Mulatta
  misc_feature (1)...(659): n = A,T,C or G
ggtaaggatctttctttgaatggttaatttttaattttctagttaccaccaaataagagacatacttttaggtataattttccatcatatgaatgtttgagtagattttttaaaggagacagaataacttcattgtttctcatttgctgctgttacattaggagtagtgacatttgcactatagtttaacgtgcttgtggacccttaacatttataatcagctttataatcactgataatcatagcatgtaaattctatgtgcattgttcattcagactcacatttatgtatttgtttgtataaatgcagaaagcgtacccaccttaaactatagatttatattaatagtctcatggtcagaattaggtagactttttaggttgttaataaagcttttttctgggatgtttaaaataatagatcttttgacccatgttctgtgtctttctgattcacatcttcttgtctcctttcaatacttggttgcaaaactcttcagtgcaacaggtgaatattcttttacattcatcatagatgagttttgtaatcaagtacaagtgaaattcacatgcagtcatgtagttcatgctgatctttagtaagcttagtagttgtccaccgtnnnnnnnnnnnnnnnnnnngtacannaacccctgtc

SEQ ID NO: 41452 - DNA, 825 bp, Macaca Mulatta
  misc_feature (1)...(825): n = A,T,C or G
gggcatnnnnnnnnnnnnnnnnnnnnnnnnnnnnnnnnnnnnnnnnnnnnnnnnnnnnnnnnnnnnnnnnnnnnnnnnnnnnnnnnnnnnnnnnnnnnnnnnnnnnnnnnnnnnnnnnnnnnnnnnnnnnnnnnnnnnnnnnnnnnnnnnnnnnnnnnnnnnnnnnnnnnnnnnnnnnnnnnnnnnnnnnnnnnnnnnnnnnnnnnnnnnnnnnnnnnnnnnnnnnnnnnnnnnnnnnnnnnnnnnnnnnnnnnnnnnnnnnnnnnnnnnnnnnnnnnnnnnnnnnnnnnnnnnnnnnnnnnnnnnnnnnnnnnnnnnnnnnnnnnnnnnnnnnnnnnnnnnnnnnnnnnnnnnnnnnnnnnnnnnnnnnnnnnnnnnnnnnnnnnnnnnnnnnnnnnnnnnnnnnnnnnnnnnnnnnnnnnnnnnnnnnnnnnnnnnnnnnnnnnnnnnnnnnnnnnnnnnnnnnnnnnnnnnnnnnnnnnnnnnnnnnnnnnnnnnnnnnnnnnnnnnnnnnnnnnnnnnnnnnnnnnnnnnncacccccggggggaaatggaagagaaaaaacaaaaaacatgttggcccgcctcgggccctctaaaaagctttccaaaaccatttcgttttggcgcgcggggcccaattaaggtaaaatgaaaaagggtcaatagcctgttttccaaggaaaatcctgggtcacgaaacaaaggggcttggggagtggcccaccaaaaaaataaaaaccccggggggggcaaccgaaacgtttctgaaaaaaaaatcccnaaagggatttttcgaaaggaacataaaggggggagtgagag

SEQ ID NO: 41453 - DNA, 2886 bp, Macaca Mulatta
  misc_feature (1)...(2886): n = A,T,C or G
gcttcttccctaccatggaggagatgttcggtggaggggccgcagatgactacggcaaggccgggccacccgaggacgagggggaccccaaggcgggcgctgggccacccccgggcccccctgcctatgatccctatgggccctactgtcctggccgggcgtcgggagccgggcccgagacaccaggcctgggcctggaccccaacaagccccctgaactgccctccacggtcaacgccgagccactgggcctgatccagagcggcccccaccaggcggcgccaccacccccgcctccgccaccaccacctcccgcgccggcctccgagcccaagggtggcctcacctcgcccatcttctgctctaccaagccaaagaagctgctcaagacatcctccttccacctgctgcggcgccgcgaccnnnnnnnnnnnnnnnnnnnnnnnnnnnnnnnnnnnnnnnnnnnnnnnnnnnnnnnnnnnnnnnnnnnnnnnnnnnnnnnnnnnnnnnnnnnnnnnnnnnnnnnnnnnnnnnnnnnnnnnnnnnnnnnnnnnnnnnnnnnnnnnnnnnnnnnnnnnnnnnnnnnnnnnnnnnnnnnnnnnnnnnnnnnnnnnnnnnnnnnnnnnnnnnnnnnnnnnnnnnnnnnnnnnnnnnnnnnnnnnnnnnnnnnnnnnnnnnnnnnnnnnnnnnnnnnnnnnnnnnnnnnnnnnnnnnnnnnnnnnnnnnnnnnnnnnnnnnnnnnnnnnnnnnnnnnnnnnnnnnnnnnnnnnnnnnnnnnnnnnnnnnnnnnnnnnnnnnnnnnnnnnnnnnnnnnnnnnnnnnnnnnnnnnnnnnnnnnnnnnnnnnnnnnnnnnnnnnnnnnnnnnnnnnnnnnnnnnnnnnnnnnnnnnnnnnnnnnnnnnnnnnnnnnnnnnnnnnnnnnnnnnnnnnnnnnnnnnnnnnnnnnnnnnnnnnnnnnnnnnnnnnnnnnnnnnnnnnnnnnnnnnnnnnnnnnnnnnnnnnnnnnnnnnnnnnnnnnnnnnnnnnnnnnnnnnnnnnnnnnnnnnnnnnnnnnnnnnnnnnnnnnnnnnnnnnnnnnnnnnnnnnnnnnnnnnnnnnnnnnnnnnnnnnnnnnnnnnnnnnnnnnnnnnnnnnnnnnnnnnnnnnnnnnnnnnnnnnnnnnnnnnnnnnnnnnnnnnnnnnnnnnnnnnnnnnnnnnnnnnnnnnnnnnnnnnnnnnnnnnnnnnnnnnnnnnnnnnnnnnnnnnnnnnnnnnnnnnnnnnnnnnnnnnnnnnnnnnnnnnnnnnnnnnnnnnnnnnnnnnnnnnnnnnnnnnnnnnnnnnnnnnnnnnnnnnnnnnnnnnnnnnnnnnnnnnnnnnnnnnnnnnnnnnnnnnnnnnnnnnnnnnnnnnnnnnnnnnnnnnnnnnnnnnnnnnnnnnnnnnnnnnnnnnnnnnnnnnnnnnnnnnnnnnnnnnnnnnnnnnnnnnnnnnnnnnnnnnnnnnnnnnnnnnnnnnnnnnnnnnnnnnnnnnnnnnnnnnnnnnnnnnnnnnnnnnnnnnnnnnnnnnnnnnnnnnnnnnnnnnnnnnnnnnnnnnnnnnnnnnnnnnnnnnnnnnnnnnnnnnnnnnnnnnnnnnnnnnnnnnnnnnnnnnnnnnnnnnnnnnnnnnnnnnnnnnnnnnnnnnnnnnnnnnnnnnnnnnnnnnnnnnnnnnnnnnnnnnnnnnnnnnnnnnnnnnnnnnnnnnnnnnnnnnnnnnnnnnnnnnnnnnnnnnnnnnnnnnnnnnnnnnnnnnnnnnnnnnnnnnnnnnnnnnnnnnnnnnnnnnnnnnnnnnnnnnnnnnnnnnnnnnnnnnnnnnnnnnnnnnnnnnnnnnnnnnnnnnnnnnnnnnnnnnnnnnnnnnnnnnnnnnnnnnnnnnnnnnnnnnnnnnnnnnnnnnnnnnnnnnnnnnnnnnnnnnnnngctggcgttgcagacggggcgcgaacccccacccatttggcgagtccagaaggcgcttctgcagaaattcactccagagatcaaggacggccagaggcagttttgtgccaccagtaatnnnnnnnnnnnnnnnnnnnnnnnnnnnnnnnnnnnnnnnnnnnnnnnnnnnnnnnnnnnnnnnnnnnnnnnnnnnnnnnnnnnnnnnnnnnnnnnnnnnnnnnnnnnnnnnnnnnnnnnnnnnnnnnnnnnnnnnnnnnnnnnnnnnnnnnnnnnnnnnnnnnnnnnnnnnnnnnnnnnnnnnnnnnnnnnnnnnnnnnnnnnnnnnnnnnnnnnnnnnnnnnnnnnnnnnnnnnnnnnnnnnnnnnnnnnnnnnnnnnnnnnnnnnnnnnnnnnnnnnnnnnnnnnnnnnnnnnnnnnnnnnnnnnnnnnnnnnnnnnnnnnnnnnnnnnnnnnnnnnnnnnnnnnnnnnnnnnnnnnnnnnnnnnnnnnnnnnnnnnnnnnnnnnnnnnnnnnnnnnnnnnnnnnnnnnnnnnnnnnnnnnnnnnnnnnnnnnnnnnnnnnnnnnnnnnnnnnnnnnnnnnnnnnnnnnnnnnnnnnnnnnnnnnnnnnnnnnnnnnnnnnnnnnnnnnnnnnnnnnnnnnnnnnnnnnnnnnnnnnnnnnnnnnnnnnnnnnnnnnnnnnnnnnnnnnnnnnnnnnnnnnnnnnnnnnnnnnnnnnnnnnnnnnnnnnnnnnnnnnnnnnnnnnnnnnnnnnnnnnnnnnnnnnnnnnnnnnnnnnnnnnnnnnnnnnnnnnnnnnnnnnnnnnnnnnnnnnnnnnnnnnnnnnnnnnnnnnnnnnnnnnnnnnnnnnnacgagctgtacctgccccccatgcggaagatcgacggcctgctgaatgagcacaagaagaaagtcctgaagcggctgtcgctaagcccagccctgcagg

SEQ ID NO: 41454 - DNA, 804 bp, Macaca Mulatta
  misc_feature (1)...(804): n = A,T,C or G
ggctaaacttttgaggtgtggcacaggacagagaaagacttattttaaaacatcctgtcttcaacccaggagaagaagagactggcttttagagccctcaatgtagcaagaagagcctgaatcagtaggagtgataaagaaggtatataagatactacagaaacatccgtaccggttgcctgggtgagtataaagaaaaagaaggaattgactttcaagaaaaataattgacatttgatagtcttaagagacaaaagtcaaaacagggtagattcggtcttaatgggagacaaatttagcaagcaagctgagatcttaggtctacattttaggccaaggaaaaggaactgagtgcatttgttttttaaggtagattatatgccagtgcacaacatacttaacgtaagtctgattagctttataataataattttgaaattattttatttgtaactatcctaagcattaccttttattgttagattattatctaatgcccacaaatgatagatagcatttgaaagtaattgctggcagggcatcnnnnnnnnnnnnnnnnnnnnnnnnnnnnnnnnnngccatggttgatgcatcacatgaggcnnnnnnnnnnnnnnnnnnnctggcaaacgtggcnnnnnnnnnnnnnnnnnnnnnnntgaaataattagctggggcgtggtggtgcacatctataatccagctactcagaaggctgaagcatgagaatcgcttgaattgaaggaagtgggaaggttgnncattgagctgaaatcacacccattgcatttcaaacctgggggg

SEQ ID NO: 41455 - DNA, 543 bp, Macaca Mulatta
  misc_feature (1)...(543): n = A,T,C or G
ggattgtttatttttaagtgttctataatgttaaataaaactttgatcatctgcagtgtcctccctgcacgcctcctgatgtagggattgttccagaggtgcaggcttttccatttcaaggacatcagattgatttttataatagttttggctaaagaatgtttttcagccaggtgcagtggctcatnnnnnnnnnnnnnnnnnnnnnnnnnnccaaggtgggcannnnnnnnnnnnnnnnnnnnnnnnnnnnnnnnnnnnnnnnnnggtgacactccgtctctaccnnnnnnnnnnnnnnnnnnnnnntgtggtggtgcgcacctgtaatcctnnnnnnnnnnnnnnnnnnnnnnnnnnnnnnagnnnnnnnnnnnnnntggagattgcaatgagccgagatcannnnnnnnnnnnnnnnnnnnagcaacagagcaagactctatctcnnnnnnnnnnnnnnnnntnnnnnnnnnnnnnnnnnnnnnnnnnnnnnnnnnnnnnnnnnnnnnnnnnnnnnnnnnnnnnnnnnnnnnnnnttgt

SEQ ID NO: 41456 - DNA, 700 bp, Macaca Mulatta
  misc_feature (1)...(700): n = A,T,C or G
attaactgttatgtcatactgtatgtgacatattcttataagagaatagaggcaaaagtatagaactgaggatcattgtatcttgagttggaaaattatgaaacttcaccatattatggtcatacatattttgaagaacagactgaccaaagctcacctgttttttgtgttaggtgctttggctgaacttgattccagcccccttttccttttggtgttgtgtatgtctcttcaagttcatttgctctcaaataaatcttcaactcttgccccatgtcctccttggcagcaggatgctggcatctgtgtagtcctcatactgtttactgataacccacaaattcattttcatggcagggctaagctcagaccctgccttgacctggcaagaggaggttttcccagaccacaatgccgatatcttatttaatgcagactgtattcttgcagtgtgttgttttttttgtgactcaaggttgaattaaaatgcctgtgaactgcaaactggcttatgattgacttggtgcaataaagttcctttctaaccatttctggtttagaaaacattcagccatcctagaaactagcaatattatttttgcctcttttgtttaccttccttntagatgaggtatgtnttgtctttacttaagggtatcagcaggtcactctgtgtactgagagatgctattggctcccg

SEQ ID NO: 41457 - DNA, 587 bp, Macaca Mulatta
  misc_feature (1)...(587): n = A,T,C or G
ggggaaaatcctagctgagaaaaagctgatcctgcctaactcttggaacttttattccacagagaggtgtgcttaggtgggggcatagctggattggatgcacgatggcctaccttccaatagacaggaatcctgccctgtaatagtctatatatagtatggggcaggagaacatctctaagactatgtagtaatgggaggtctatgagtagggaataggccttgttagaaagcggtgcctccagctcagtggctggtgtgtcagtctcttcttccgttgagctaaatcaggtccacctgagctaccaaaaggagggaggaaaagaacctccagagtctttgaatttgattctcatcaactactgagtgctaggagagcttggagtaaaattaaagaacaactgtcaataatctttgaagaatcactgaagaaaaaggtcccagaaaaccaagaacaggcagatattttttgagacataaaggtggaagaagatgnnnnnnnnnnnnnnnnnnnnnnnnnnnnnnnnnnnnnnnnnnnnnnnnnnnnnnnnnnnnnnnnnnnnnnnnnnnnnnnnnnnnnnnnngtc

SEQ ID NO: 41458 - DNA, 607 bp, Macaca Mulatta
ggggggggcagaaccatggaggaaaagccttcgaaagtgtcgctcaagtcttccgaccgccatgactcggacaaggagagcgtgcacagcgacattcgggacctgtggaccacgaccacgctgtcccaggcacagctgaacatgccgctgtccgaggtctgcgagggcttcgacgcggagggccgcagcattagcaagacccgcgggtgggacagcccggggagccgctcgttggacgaaggggacaaggccagccacaagccggaggaaatagacgagcacgcgctggtggagctagagttgcaccgcggcagctccatggaaatcaatccgggggagaaagacaccgcatcccgatcgaggccgaaagtcttcctcaatgtcatcactcatattgcgaagcacacgccccatcgagctactgggcaaacaccaaaacagctgccctgcccctgaggaaccctggaaatgagctttggaatccaccaaaccctccgaactccctttgggattggggggcccttccggcaaggaccgcccgaaaatcaggggtcaaaaccccgaaaaaggtttcttaataaaacccttgggccaaaaaacaaaacct

SEQ ID NO: 41459 - DNA, 768 bp, Macaca Mulatta
  misc_feature (1)...(768): n = A,T,C or G
ggtaatttgaggtgacaattattttaaaacagttgtcagaattacatatatatttttcttttttgagacaacatctggccgttactcaggcccgagtgcagtgggtcaactgcagcctctgcctcctgggcttggggaatcctctnnnnnnnnnnnnnnnnnnnnnnnnnnnnnnnnttgtgcaccacaatgcctggctaaattttgtnnnnnnnnnnnnnnnnnnnnnngagacaggattccaccacgttgcccaggcttnnnnnnnnnnnnnnnnnnnnnnnnnnnnncccaccttgacctcccagagtgttgggattacaggcgtgaaccactgcgcccaccccagttatgagaattaaataagcaaaatgcctggaatatagcgacaagtcaatgagtgttcctttccctattaaacagaaaactagaggatatttcttttgattattttttgtttgagggtgctacaggcaggtgctatagtttgttatctttgtatacttggttttagaacttaatgcctttgtagattagatgggtattcttatggaaacagatgggaagtattctggattaaaaatcagttttagatttagaattttaaaataagcctttttatttttacttaataatttcaaatgtacctgaaaagggccaagaagatagtacagagttcttataaaccgtttcatctacttgtcctcttgaagtctatttctaattttaatgttggggaaagaaatcttcctcctgggtcccccaacg

SEQ ID NO: 41460 - DNA, 817 bp, Macaca Mulatta
  misc_feature (1)...(817): n = A,T,C or G
ggnnnnnnnnnnnnnnnnnnnnnnnnnnnnnnnnnnnnnnnnnnnnnnnnnnnnnnnnnnnnnnnnnnnnnnnnnnnnnnnnnnnnnnnnnnnnnnnnnnnnnnnnnnnnnnnnnnnnnnnnnnnnnnnnnnnnnnnnnnnnnnnnnnnnnnnnnnnnnnnnnnnnnnnnnnnnnnnnnnnnnnnnnnnnnnnnnnnnnnnnnnnnnnnnnnnnnnnnnnnnnnnnnnnnnnnnnnnnnnnnnnnnnnnnnnnnnnnnnnnnnnnnnnnnnnnnnnnnnnnnnnnnnnnnnnnnnnnnnnnnnnnnnnnnnnnnnnnnnnnnnnnnnnnnnnnnnnnnnnnnnnnnnnnnnnnnnnnnnnnnnnnnnnnnnnnnnnnnnnnnnnnnnnnnnnnnnnnnnnnnnnnnnnnnnnnnnnnnnnnnnnnnnnnnnnnnnnnnnnnnnnnnnnnnnnnnnnnnnnnnnnnnnnnnnnnnnnnnnnnnnnnnnnnnnnnnnnnnnnnnnnnnnnnnnnnnnnnnnnnnnnnnnnnnnnnnnnnnnnnccagtgaactcctgttatgcacaattgctagtgatatatgggcctgttcgggccgacctcgggcccttcaagaaaattttttaagacctttttttttttggccgtggcggggcccaaataatgtaaaagtaaacccagggacaccaaacctgtgtacccaaaggaaaataccctgggatataagaataaaccgacttttggatattctcctcccccgttttataattaaaagtcccccgggggaggaacctaacatgaagaccgagttttcttttg

SEQ ID NO: 41461 - DNA, 853 bp, Macaca Mulatta
  misc_feature (1)...(853): n = A,T,C or G
ggnnnnnnnnnnnnnnnnnnnnnnnnnnnnnnnnnnnnnnnnnnnnnnnnnnnnnnnnnnnnnnnnnnnnnnnnnnnnnnnnnnnnnnnnnnnnnnnnnnnnnnnnnnnnnnnnnnnnnnnnnnnnnnnnnnnnnnnnnnnnnnnnnnnnnnnnnnnnnnnnnnnnnnnnnnnnnnnnnnnnnnnnnnnnnnnnnnnnnnnnnnnnnnnnnnnnnnnnnnnnnnnnnnnnnnnnnnnnnnnnnnnnnnnnnnnnnnnnnnnnnnnnnnnnnnnnnnnnnnnnnnnnnnnnnnnnnnnnnnnnnnnnnnnnnnnnnnnnnnnnnnnnnnnnnnnnnnnnnnnnnnnnnnnnnnnnnnnnnnnnnnnnnnnnnnnngggcggcctcggcccttcaaaaagctttaaaaaccattgttttgggccgcgggcccaataggtaagtgaaaatgggcctaacctgttttccaagaaaaatccgggtcacagaaaaaggggttgggaattttccnnnnnnnnnnnnnnnnnnngcgggggggcaaacccaaaccgttttttgaaacaaaatcccccaaatggggggttttcgaagggccttttcacggggattcttatccaaacaggggagcctcaaaaggcgaagcctctcaaaatttcaaatttagcgccccgcgccgagggccacattatatatgaaaaaggatacgggtgtggtaattttattttgaagccatttcctgcccccaaacaggggagaagacaacttaccaaaacggggggctgtgtataaaaacgcctagaaaatccacaaagggggaggaattaaaaaccctctgggtccgcccttatggggtaaa

SEQ ID NO: 41462 - DNA, 833 bp, Macaca Mulatta
  misc_feature (1)...(833): n = A,T,C or G
gnnnnnnnnnnnnnnnnnnnnnnnnnnnnnnnnnnnnnnnnnnnnnnnnnnnnnnnnnnnnnnnnnnnnnnnnnnnnnnnnnnnnnnnnnnnnnnnnnnnnnnnnnnnnnnnnnnnnnnnnnnnnnnnnnnnnnnnnnnnnnnnnnnnnnnnnnnnnnnnnnnnnnnnnnnnnnnnnnnnnnnnnnnnnnnnnnnnnnnnnnnnnnnnnnnnnnnnnnnnnnnnnnnnnnnnnnnnnnnnnnnnnnnnnnnnnnnnnnnnnnnnnnnnnnnnnnnnnnnnnnnnnnnnnnnnnnnnnnnnnnnnnnnnnnnnnnnnnnnnnnnnnnnnnnnnnnnnnnnnnnnnnnnnnnnnnnnnnnnnnnnnnnnnnnnnnnnnnnnnnnnnnnnnnnnnnnnnnnnnnnnnnnnnnnnnnnnnnnnnnnnnnnnnnnnnnnnnnnnnnnnnnnnnnnnnnnnnnnnnnnnnnnnnnnnnnnnnnnnnnnnnnnnnnnnnnnnnnnnnnnnnnnnnnnnnnnnnnnnnnnnnnnnnnnnnnnnnnnnnnnnnnnnnnnnnnnnnnnnnnaaactcatcccctaggatattcgtaactacaccgaataccattacttacgtttgttccccccaccttttcatttatgtttctaatcaaataaggatcgctgtatttccgcccatttatgggggggggccttntaaatacaacctggaatatccctctttaatttcctccaaggggctaacaacaacgttggaaaacacaaaaaactcgtggttggccccaaaaaggcccccaaccttttccattacaatattaataattttcccatggggga

SEQ ID NO: 41463 - DNA, 231 bp, Macaca Mulatta
gctgccacccagacaatgaggaagccagctgggataactagaaacaaagcacagcacttaaatctcagcgtcaagtgcttatctatgtcttcagtctgtcacatttggctccgactcctttttctcatgcatctattaggggatggaaacaaatgtttaattcagcaacagcttagaatctgatgcctatcatgaagataaccataaataaatgaaagctagaaggccaaa

SEQ ID NO: 41464 - DNA, 315 bp, Macaca Mulatta
  misc_feature (1)...(315): n = A,T,C or G
ggggtaatcacgacctcattttcctgatcccatatcaccacttatgttgacagggcttaatatactaattacggccctctactctctccacatattcattacaacgcaacgaggaatacttacacaccatataatcaacataaaaccctccttcacacgcagaaaatatattaatattcatacacctcgccccaattatccttctgtctctcaatcccaacatcatcctaggatttacctcctaggatgatnnnnnnnnnnnnnnnnnnnnnnnnnnnnnnncnnnnnnnnnnnnnnnnnnnnnnnnnnnnnnnc

SEQ ID NO: 41465 - DNA, 806 bp, Macaca Mulatta
gggggcaccccgcccccgcccagctccttgccatttctcgttccctatgttgtgttttggagtctggagcaatgaagacctctgtgctcttaggcgggtccttcctcttttctttattgttttggaattcttctggactcaacccagcaataactgcaacatgctcagatgattggttgttagtcagaatgaaaataaggccctttgataacaacacagaagttagaattggcgacatacatctgggagataactgtcctgtaacaagactgttgtcatttaactacgagttttcttatcctgtcacttcttgtgggatcaagaaaattatgttccaaagaaatgatgatgccatattatcagagatcagttacagaccaaggtcgcatactacttatgaatttccagtggtttgctttgtgaagaggcttaaattcccatctgcgatgcattttggaatgagtgggtttgatgccaacaccttgaaaaaaatccctcaaaaatcaaaaacaagagtcaccagctcccacacaaagtaaaacatgggcacctaattttaaaagtgttaataaggagcgactctccaagaagtcactgcatcaataatgcctgtgtgacaccctctcctccccaaagcactgcagcaagtggtacctacttgctgagaaccagtttcatcagtactgtttgatgtgtctgtacaaagatgagtagcaatatctgttaccaagtttcactacatttttggaagtttggggaaaaacttatcttattcccttgaatatttttacattcggtttaaatgt

SEQ ID NO: 41466 - DNA, 308 bp, Macaca Mulatta
ggaagtaacgtgcgtgtcagaggaacagggcggggtgcgtctagtaaaaggcctggagacgggtcggctctctgcattggggaagatgaaatcgacttgactttgtgaaattgaccagccccctctataaaacttacagtcccccattgggaaactgaccaccacccacaactccgccagcgaaactgcccagcccttctctgccaagcaaaaagaactactctctcccttgactgttaagagggccggagttaccgccgcggctgccccactacccccacccccaataaagcctcttctttcagggc

SEQ ID NO: 41467 - DNA, 467 bp, Macaca Mulatta
catactgagatcacactacttgtccctgaatgtgactggttgcctggtagacctaaatgaattaaaccctgaccctgctcatgagaagttacaggctaagagaggggcatacatgtaaatacatgcacttagtaggttttacagatgcaatgacagaaatacgtacaaggtaaagtgtcacaaaacaaggaaaaatttcattttgtactctgaggcttcactgaggacataaaagttttgtaatcacaacgaatttgttttgtaggaatacagggcatcagcgttttaaaaattcatggggagaaaaaaaccagttagtaaatcaggaaatagcaaaaggcacagtatgttaggaaacagtctttgagctctaagaaggaaaaggtatatggaggtaggcagtggggatattatgacatgacactagatttttttttcctacagaacatgcggtcttaaagatatac

SEQ ID NO: 41468 - DNA, 426 bp, Macaca Mulatta
ggggaagcggcgccggcccggaccccccgcgggagcaggcaacgggcgtgagggcgaggcggcggcggcggcgaccagagagcagcagccgcttggatactgtcttcagccttttcttcaagtttctaaccgtgaattgtgttgtgtcaaactggatgaattatcttagttgaatttttaccagttgaaaattggagattctatagactactgaaaagaagttgctttcagagctggagatgtgaataaaatttctgtgccagggttgataaaccatcttgaggattccatccaggaaaacccatcacagttggttgttatgtctccttagactcctctgggctgtgacagtttctcagactttagttattgaggagtactgatgaggtatttagtagactatcactcaattgggatgtgtcagat

SEQ ID NO: 41469 - DNA, 282 bp, Macaca Mulatta
  misc_feature (1)...(282): n = A,T,C or G
ggcacacgctgaggttctggaatgcagccttttttgacgctgtccattgtgagaggacaaagcgatctcccactaccannnnnnnnnnnnnnnnnnnnnnnnnnnnnnnnnnnnnnnnnnnnnnnnnnnnnnnnnnnnnnnnnnnnnnnnctccagttcaacgagaacatcacctttgggcagcnnncacgttctcgcacaacatgctggccttcggactgaacaagaagctgtgcaatgacttcctgaagaagcaggctgtgattggcaacctggatgaag

SEQ ID NO: 41470 - DNA, 645 bp, Macaca Mulatta
ataaactcagaacaaacacaacagtagttggaattcaaaacctgctaacatccacattaagagtccttgttcggttgtgggaaatcaaatgctcagaataaaataagtaatccctcacagcagacagctttatcgatggtagtgcacaattatgagtcttcaggtataaatataacaaagggaacagaacttcagattgctgtagtgtcaccgttagttctgtcagaggtcaaaacattgtctgtcaaaggaataacacctgcagcattacctgaaacagtgtatcccgttattaaagaaggtagtgtctgtagtctacaaaatcaattggcagaaaacgcaaaggcagctgctgctttgaaagtcgacgttagcggaccagtagcaagtacagcaacatcaaccaagatttttccactaactcagaaggaaaagcagaatgagtcaacacatggtaattcagaagctacacctaatgtcaatcaagggaagcataacaaattagagtcagctatgcattctcctatgaacgatcagcagacctcacaggaatcacggaatagtactgttgtgagtagtgatatattacagattgacaatatttgttctctggttgaaggtgatacctcttacaattcccagata

SEQ ID NO: 41471 - DNA, 1812 bp, Macaca Mulatta
  misc_feature (1)...(1812): n = A,T,C or G
tggacaccgaggagaagcggcatcgcacgcggtccaaaggggttcgagnagttcccgtggaaccagccatacaagagctgttcagnnnnnnnnnnnnnnnnnnnnnnnnnnnnnnnnnnnnnnnnnnnnnnnnnnnnnnnnnnnnnnnnnnnnnnnnnnnnnnnnnnnnnnnnnnnnnnnnnnnnnnnnnnnnnnnnnnnnnnnnnnnnnnnnnnnnnnnnnnnnnnnnnnnnnnnnnnnnnnnnnnnnnnnnnnnnnnnnnnnnnnnnnnnnnnnnnnnnnnnnnnnnnnnnnnnnnnnnnnnnnnnnnnnnnnnnnnnnnnnnnnnnnnnnnnnnnnnnnnnnnnnnnnnnnnnnnnnnnnnnnnnnnnnnnnnnnnnnnnnnnnnnnnnnnnnnnnnnnnnnnnnnnnnnnnnnnnnnnnnnnnnnnnnnnnnnnnnnnnnnnnnnnnnnnnnnnnnnnnnnnnnnnnnnnnnnnnnnnnnnnnnnnnnnnnnnnnnaagaccatcaaatgaattgtcacaatactcgaataatgcaagacacagaaaaggatgataacaataatgacgaatatgacaattacgatgaactggtggccaagtcgttgttaaacctcggcaaaatcgccgaggacgcagcctaccgggccaggactgaatccgaaatgaacagcaatacctccaatagtctggaagacgatagtgacaaaaacgaaaacctgggtcggaaaagtgagttgagtttagacttagacagtgacgttgttagagaaacagtggactcccttaaattattagcccaaggacacggtgttgtgctctcagataacatgaatgacagaagttacgcagacagcatgtcgcagcaagatagcagaaatatgaattacgtcatgttggggaagcccatgaacaatggactcatggaaaagatggtggaggagagcgatgaggaggtgtgtctgagcagtctggagtgtctgaggaatcagtgcttcgacctggccaggaagctcagcgagaccaaccctcaggagaggaacccgcagcagaacatgaacatccgtcagcacgtccggccagaagaggacttcccaggaaggacgccggacagaaactactcggacatgctgaacctcatgcggctggaggagcagttgagccctcggtcgagagtgtttgccagctgtgnnnnnnnnnnnnnnnnnnnnnnnnnnnnnnnnnnnnnnnnnnnnnnnnnnnnnnnnnnnnnnnnnnnnnnnnnnnnnnnnnnnnnnnnnnnnnnnnnnnnnnnnnnnnnnnnnnnnnnnnnnnnnnnnnnnnnnnnnnnnnnnnnnnnnnnnnnnnnnnnnnnnnnnnnnnnnnnnnnnnnnnnnnnnnnnnnnnnnnnnnnnnnnnnnnnnnnnnnnnnnnnnnnnnnnnnnnnnnnnnnnnnnnnnnnnnnnnnnnnnnnnnnnnnnnnnnnnnnnnnnnnnnnnnnnnnnnnnnnnnnnnnnnnnnnnnnnnnnnnnnnnnnnnnnnnnnnnnnnnnnnnnnnnnnnnnnnnnnnnnnnnnnnnnnnnnnnnnnnnnnnnnnnnnnnnnnnnnnnnnnnnnnnnnnnnnnnnnnnnnnnnnnnnnnnnnnnnnnnnnnnnnnnnnnnnnnnnnnnnnnnnnnnnnnnnnnnnnnnnnnnnnnnnnnnnnnnnnnnnnnnnnnnnnnagcctctccggatgcccgatcgctgcagcagagaaactggccaaggcacaggaaaagcaccagagctgtgacgtgtccaagtccagccaggcctcggaccgcgtgctcag

SEQ ID NO: 41472 - DNA, 601 bp, Macaca Mulatta
cttccctgaatgctggtttcatacagtttttgtgctgagaacagatgccaacgtactgtacgaaagacttgaaacgaagggttataatgagaagaaactgaaagacaatattcagtgtgagattttccaagttctttatgaagaagccacggcatcttacaaggaagaagtcgtgcatcagctgcccagcagtaaaccagaagagctagaaaataatgtagatcagatctggaaatggattgagcagcagatcaaagatcataattcttgacttataagactagctactttacaatcactcttgctgatatatctctgcagacatcatagaaattgttaaagtatcaggaacactttattaaaatcgtgttgcgggactagcaggcggatagaataaaggtttatgcctgtgtttctttttctccatgtgaaagctaaacatttgaaatacaaaaaatatagcattatcaaggattgagacaaaactgtcatttcaatgcttaaattgctaaagaataaataaatctgaagaaacaggtggatatcttttaagtttattacagaaaaaatgcagatgatctcttaaaataaagactaaaga

SEQ ID NO: 41473 - DNA, 2247 bp, Macaca Mulatta
  misc_feature (1)...(2247): n = A,T,C or G
gcccttggagactggagctcagatattgctgataatcagagttggcgtgtctccccagttgatttacaattggggcttggatactgttttaaacttgggaggcgcctcctaatcatctcgatacaaccactaatgtgactacactagagatagactctttccacttaattctaccactcttgctttacttcatgagaatgaaaatgtaagattgcaccatgaattcatttggggaaagattgatactacgcnnnnnnnnnnnnnnnnnnnnnnnnnnnnnnnnnnnnnnnnnnnnnnnnnnnnnnngctctgtcaccctggttggagtgcactggcgtgattnnnnnnnnnnnnnnnnnnnnnnnnccgggttcaagcgatactacgnnnnnnnnnnnnntnnnnnnnnnnnnnnnnnntacccaccaccatgcctggctagnnnnnnnnnnnnnnnnnnnnnnnnnnnnnnnnntcgaacttttcacctcgtgatccaccagtnnnnnnnnnnnnnnnnnnnnnnnnnnnnnagttgagccaccgcacctggccctgtgttttattttagnnnnnnnnnnnnnnnnnnnnnnnnnnnggcctcacctactggaatgggaaagattgatattttattcattttatttagnnnnnnnnnnnnnnnnnnncttttctgagacnnnnnnnnnnnnnnnnnnnnnnnnnnnnnnnnnnnnncatttgtggctcactgcaacccctacctcccaggttcaagcgattctagtgcctcagcctactgaatagctgggatgaccagcatgtacttccacannnnnnnnnnnnnnnnnnnnnncatagagacagggttttgccatgttgcccaggcttgtctcaaactcccggnnnnnnnnnnnnnatnnnnnnnnnnnnnnncaaannnnnnnnnnnnnnnnnnnnnnnnnngccctctcctggaaggactgatatcttataacataatttatagttacagaaaacatgtgagttcactaggaataaagaaattttgaagataataaaagattttcacttatgttgtaatttcgacacagtttggtatagaatgtggagattttaacatttacacctagcttgttcataaactaagacctgaatgggttgtgtctattagctgcacccctgagtagccacacaagcttgggaaggcctcagccccctccttgtacagcaggaatgagaatagcactgcctgttgggaagcttgagggaggctatggatggcagcacttggcagagggtctggtcatggaaggtaccagcaaatgtcagctacttttatgattttattttatccaaaatgaagggaataagagaggagggaacaagactaatcaggagagatgaagatctgggagtgagggaaggagtaagcagaaatgaaggcagcatggagcagctgaggggggagatggctttcaccacttcccagcatctattgacattccactctcaaatattttgtaagactctttattcaaggtaatgtttgaaccctgctgaggcagtggcatgggtctctgagagaataattaacttaatttgactatctggtttgtggatgtgtttactctcatgtaagtcaacaacattttgggatggggacacactttctgggcactgctggccagtcccataatggaacataaggaagtggttcttctacttctgttatttctgaaatcaggtaagacatagtttttttttggtgtaacaattattttttctaccacagtgtagtaaaaatacatatgccatggctttatgtgcaatttgttttatttaatttttgattcatgaaactcccagttcaaaatcttgtgtaagattgaaaaattcttaaaaaataagtttaatttccctgtgaagactgtcaggatgctggaatgaatgggcagagaaaataatgggtgatttttctaatctaaaagagtgtacctacgtgatggacagtctagtnnnnnnnnnnnnnnnnnnattgtagctcactatgcaaaggatggccaagcacttcacctggaactcagttttattaatttatatcatctctgttcgggtgccatgctcccctcacttgcaagttgaaacaatgaaatagctctttgaatatatttggttctttgacctgttcattgagtgggacccagcatttctctctttgttatggcctgaggaaggctttccattggtgtacatttgccaagggcg

SEQ ID NO: 41474 - DNA, 2662 bp, Macaca Mulatta
  misc_feature (1)...(2662): n = A,T,C or G
cagaggatgagactcctgtgcccttgccaatctgtgggacacgtcctattgtgcagcagcagcgcatatggcacctgtaccgagtcatctctgaaaacatcagcgagtggaagtgcatggcttttgccaagnagttcagcttagctatggcccaggagaagacagagggctggctgacagaggcagcacggatgagcacaaccctggggctgaacagccccgtgctgcagcactgcatgcgcatcctgggggagtttcgcagctacctgcacgtgctcgctaagctgggcagcctccagccacagannnnnnnnnnnnnnnnnnnnnnnnnnnnnnnnnnnnnnnnnnnnnnnnnnnnnnnnnnnnnnnnnnnnnnnnnnnnnnnnnnnnnnnnnnnnnnnnnnnnnnnnnnnnnnnnnnnnnccaggtctggcaaaatgaaaacgaacgaattcatgcccaagagactatacggcagttgcagcgatactgggaagtgcgccagctgcgcctgctcaacttcatcctgcatgtaccctacgagcccccagcctcagagcgctccaagaggcaggtgctccgcagcccccagtgggaggtagtggacaaagatagtggcaccttcatcctctcannnnnnnnnnnnnnnnnnnnnnnnnnnnnnnnnnnnnnnnnnnnnnnnnnnnnnnnnnnnnnnnnnnnnnnnnnnnnnnnnnnnnnnnnnnnnnnnnnnnnnnnnnnnnnnnnnnnnnnnnnnnnnnnnnnnnnnnnnnnnnnnnnnnnnnnnnnnnnnnnnnnnnnnnnnnnnnnnnnnnnnnnnnnnnnnnnnnnnnnnnnnnnnnnnnnnnnnnnnnnnnnnnnnnnnnnnnnnnnnnnnnnnnnnnnnnnnnnnnnnnnnnnnnnnnnnnnnnnnnnnnnnnnnnnnnnnnnnnnnnnnnnnnnnnnnnnnnnnnnnnnnnnnnnnnnnnnnnnnnnnnnnnnnnnnnnnnnnnnnnnnnnnnnnnnnnnnnnnnnnnnnnnnnnnnnnnnnnnnnnnnnnnnnnnnnnnnnnnnnnnnnnnnnnnnnnnnnnnnnnnnnnnnnnnnnnnnnnnnnnnnnnnnnnnnnnnnnnnnnnnnnnnnnnnnnnnnnnnnnnnnnnnnnnnnnnnnnnnnnnnnnnnnnnnnnnnnnnnnnnnnnnnnnnnnnnnnnnnnnnnnnnnnnnnnnnnnnnnnnnnnnnnnnnnnnnnnnnnnnnnnnnnnnnnnnnnnnnnnnnnnnnnnnnnnnnnnnnnnnnnnnnnnnnnnnnnnnnnnnnnnnnnnnnnnnnnnnnnnnnnnnnnnnnnnnnnnnnnnnnnnnnnnnnnnnnnnnnnnnnnnnnnnnnnnnnnnnnnnnnnnnnnnnnnnnnnnnnnnnnnnnnnnnnnnnnnnnnnnnnnnnnnnnnnnnnnnnnnnnnnnnnnnnnnnnnnnnnnnnnnnnnnnnnnnnnnnnnnnnnnnnnnnnnnnnnnnnnnnnnnnnnnnnnnnnnnnnnnnnnnnnnnnnnnnnnnnnnnnnnnnnnnnnnnnnnnnnnnnnnnnnnnnnnnnnnnnnnnnnnnnnnnnnnnnnnnnnnnnnnnnnnnnnnnnnnnnnnnnnnnnnnnnnnnnnnnnnnnnnnnnnnnnnnnnnnnnnnnnnnnnnnnnnnnnnnnnnnnnnnnnnnnnnnnnnnnnnnnnnnnnnnnnnnnnnnnnnnnnnnnnnnnnnnnnnnnnnnnnnnnnnnnnnnnnnnnnnnnnnnnnnnnnnnnnnnnnnnnnnnnnnnnnnnnnnnnnnnnnnnnnnnnnnnnnnnnnnnnnnnnnnnnnnnnnnnnnnnnnnnnnnnnnnnnnnnnnnnnnnnnnnnnnnnnnnnnnnnnnnnnnnnnnnnnnnnnnnnnnnnnnnnnnnnnnnnnnnnnnnnnnnnnnnnnnnnnnnnnnnnnnnnnnnnnnnnnnnnnnnnnnnnnnnnnnnnnnnnnnnnnnnnnnntgggtcctaatggtgtgggcaagagagctatagtgaatagcctggcacaggccctgggccgccagctggtgatgctgccctgctcacctcagatagaggctcaatgcctgagcaactatctgaatggtgccctgcagggtggtgcctggctgctgttggagaaagttcagcagcttccccctggcttgctgtctgccctgggccagcgcctgggtgaactgcacagcttgtatgccccactgtaccaggaggcttcccgaaacacaagcaccatagaccccaccgagccccagctccttggcagtggcttctttgaaaaacatcacgtgtctatgcgccttggctatggctgtctcctggtactgcgtgccctgagctctgctgtgcctgccaacctgcacctgctgctgcggcctgtggcattggcattgcctgatctgcggcaagtggcagagctgactctgctaggtgcagggatgcgggatgccttccagatggctacccgcctatccaaattcttctctctagagcgtgagctggtgtctgggcccctgccctgccgcctgccactgctcaagcagatactggaagacacaatacagacactaaatgtggccaaggaggaaacgaagtgccagcagcctcgcagcctagctgccattgaggaggctgccctactg

SEQ ID NO: 41475 - DNA, 779 bp, Macaca Mulatta
  misc_feature (1)...(779): n = A,T,C or G
ggggcacgatccnnnnnnnnnnnnnannnnnnnnnnnnnnnnnnnnnnnnnnnnnnnnnnnnnnnnnnnnnnnnnnnnntactacaggtgcgcgccaccacacctggctgattttagttannnnnnnnnnnnnnnnnnnnnnnnnnnnnnnnnnnnnnnnnnnnngaactcctgactgcaagtgatctgcccttcttgggnnnnnnnnnnnnnnnnnnnnnnnnnnnnnnnnnnnacgcctggccaacttgattatattaattttggnnnnnnnnnnnnnnnnnnnnnnnnnnnnncgaagaatttgtggatcttggtataaagtcattggaacatatctgttttaaccgaaagagatcctaggcagatacctcaaaaggttaaaaattcttaatcctacagaattttaaatgaatcttatcaaatgttttgtaaacaaacaatgtgaatggcccaaacattgccctccctttcactggcaagtaattttaattgtcttagttaagaattctccccaagtttttctaattgtactttatcctggtggtttcaatgagataaatattgccatagaaaaaacattttcccgcataaaatttgcttgggtaacaattcagggttttatatttaatattaacccagagcctttttacatattaaaaaccccattactccaaaaaatgctaagaattggctgccccttctttccattnnnnnnnnnnnnnnnnnntttagcccaataatttttggccttcattttatatatggggttaaaaaac

SEQ ID NO: 41476 - DNA, 804 bp, Macaca Mulatta
  misc_feature (1)...(804): n = A,T,C or G
ggattgtgagctaccctacaaaggaaacctcatggaaaggaagaaagagaagcctcagaccaacaactcatgaggaattgagaccctcagtccaacagcccttgaagaactgaatcctgccaacaagctgagtgagctcagaagtgaacctatccccagatccaggcctggttatgtatcctgtgatttacatgcagaactccagtagttccatcaaacccttgttcaagtattcaaatgaattcaaaactactgcttgggaagatgnnnnnnnnnnnnnnnnnnnnnncagcaacaacactttctcattttgcagtgtaccgcctgtatacgagtcagacagcaacttaccatttttaatttcctcagtaaaatactagtgatggtgacttcatttaagaacttaagcatctccttgcaatcagcagcacagggcacttgcatggaaggactccagtctgaatttgactgttatacatcgttcattaaaagtcctgctgagaaaattggtatgtcagtatcagagaagttgaacccttttatttttatcagatttttaaagctttatcatgacattgaagcacaccatgagctagccacatactggaatttattactctgattccctatataagtgcccttgaggaaaactgcaattttaatttactccttanactttgaaaataaagaattgcccataaatagaagctataagtgataagccttttgtaaaaatcatttttcaaagaaaaccattcagtttgttgtttcactattacgttacattaagaataaaattttttt

SEQ ID NO: 41477 - DNA, 822 bp, Macaca Mulatta
  misc_feature (1)...(822): n = A,T,C or G
gggtagaaaaaaggaaatgtattagttgggtggccaagaagcttcccttgtaatgttgagagacttccgctttctgaatttcactggttctctaaggtaaaagagttaaatggtacccttgttcaccaaggaaagtgatccaaactctatatctagtgcagatatttcctttgcattatttagtcttctctggagagaaaatacagtttccccttcctctttctcttcacatttactcttttcaatccaaaataagagacacagaaagcaaatcacagccagtttggcatcttctcagtgctactagtataggcacatacacatacacagtctgagcaaggtaataaagaaccctgtcaggtccacttggaacatggccttgctacttggattagctcctttacgcctgaaaataactttcctggtcatggaagaactggatgcatcttttaacttatgaaatagaagttgaacttgaaaactctctttaaaaaatcctggttttgcaggacagctacataatgaatgtatatattaagactttgtagctgaattgcacatgaaatcagattgccaacttcttgactttcaacgttagacatttatccttaagttgtgagcgatatatgcagcatgctgtgaaacgtctattatagttctttaattcatcagtattaatacagaattatctttttgcgtttcttggtactttttattcagtgtaatcagaagctgtgatgttttgcctttgaagtcccgtgctttgttactgnnnnnnnnnnnnnnnnnnnnnnnaaacacggaactggactaatggaaagc

SEQ ID NO: 41478 - DNA, 793 bp, Macaca Mulatta
  misc_feature (1)...(793): n = A,T,C or G
gggacagtgtttagaatatgtctagtaagcactaaaaaagtatagtagtttttgaatggcaatctggctactgcatgctgtttttaggatactcccacctcccagaatcaggttgcttctagacattttttccttagtgcagttgggtctgtactgggagagactcattgactcttctcctgagtcaccttgaggctgggtcaggtttatagacattctgtagatttagatgtactcacttgcttattcaacaaacaatgagaatctgttatataacaggcactgatttaggtattggaaatacagtgctgaaccaggcagagccttgtttctcctggaattcgtaatcttgtgggcaagattagcaatagtcaaacaaggcaaagaataccagctaataatatgtacttttaaaatgaggggacttagtaaagataggtttcagaaaagacttgtctaatgaattatgagtgttaatctgaatgacaaggagcagccctttaagatcaggccagagaagaatttcaagaacaatgaacatttggttcttttcacttttgtgaaacatatttcaaaagctatatttttataaaattaggggaagaggaaatgaagaattttgactaggaagatgnnnnnnnnnnnnnnnnnnnnnnnnnnnnggactttgggaaatacgtcnnnnnnnnnnnnnnnnnnnnntccttggcgaacacnnnnnnnnnnnnnnnnnnnnnnngggaaggggatttgggataatagaagtggggggaaaggtggcctttagggggaa

SEQ ID NO: 41479 - DNA, 632 bp, Macaca Mulatta
tttatgttctaatacttagaagtgacaaagatctaattttatgttgattttggagagagcattttcccccagaaaagttcataataggacaagacaacatccttcacctcatttgggatttgtgcagcgcaatcataaaggatcatttctgcaaaaatattagggcggggccgttaattttcccaagggcctttcttaatctagaccgtgccaccatcatctctcacctgctgtatgctagtttccttctaactgaaatctcgggtgccgtcttttaccatccttaggcagttttacaaactgtagcaagatcgatcttaaaagggagatcatctcattcccttgcctaaaaacttttggacattaaaatatagtgatttcctattgctcttaaaatccagttccttgtcatggcctacaggcccaaggtgacttgtcttcttgattgctcctctcactgtacttccggccacacctctccctcacccccccccagattatgctctggcaacattgttgttttagtttgtgaacacccccacccagattatgctctggcaacactgttgttttagtttgtgaacacccaggattttactgatatctccaggattctgccttgcttgtctctc

SEQ ID NO: 41480 - DNA, 196 bp, Macaca Mulatta
aagcaggaatctccctgtatctggctcagacggcccggggcacggccgccccgggcgagggtcctgtctacagcaccattgacccagcgggggaggagctgcagaccttccatgggggcttcccccaacatccctcaggggatgcgggcccctggagccagtatgctcctccagagtggagccagggggacagtgg

SEQ ID NO: 41481 - DNA, 301 bp, Macaca Mulatta
actgcaaaagtcctggggacgttacatgatgagtgctaagttaagatggaaatggcattacatctgtggatggaagagaaacatgttccagagatggcaatccggttcggtgctatctaaggtttcaggcatccactggctggggggtggggttcctggagcatatcccccgaagataaggggggactactataataccagtctttctgcctcctgtgattcagagatatgtaggcccacgtaggccaaacaaagagagggctctaaagtccaaccaactcaacaatgtttcacactgagc

SEQ ID NO: 41482 - DNA, 636 bp, Macaca Mulatta
  misc_feature (1)...(636): n = A,T,C or G
ggggagtcctggtttcagccgcagccgctggcgcgcactgttcagctgtgttagctgctcgaaggacgtgtccagcagctgctggaggtccacgccgcggtgatacatcctcttcgcagactgcagaaaaacagcagatttgtgatttaactgggagttttctgggatcaaacagtggcttcgtttacagtaatagaccctcatttttagctgagcatgtggccttctggagttatgactacattctccagactgttgaagctaggtgtccttgtgactaaatcgtgggcaataggatataagcaaaagcggaatgtgcggcttcctggaactctcagccttctctccactgctgaaatgcagacatgacagcttgagctagagggtgccagccagtgccatgatgtgatcaaggccatcaacagcagagcctcaggggagcaggagccttggtccctgaggacacgctgaacctaacttgggaatcttgagttggccacctccaaattttacctgataaagtaaacatctaacttgnnnnnnnnnnnnnnnnnnnnnnnnnnnnnnnnnnnctgtcggccgctccgccctccaaatctttcaaaccttcattggccgcggcccctaggaataata

SEQ ID NO: 41483 - DNA, 187 bp, Macaca Mulatta
  misc_feature (1)...(187): n = A,T,C or G
agccgcagtaaagcacgtatggagtggaagttagagcagtccttacgggagcaggcactgctgaaagctcagctgacacannnnnnnnnnnnnnnnnnnnnnnnnnnnnnnnnnnnnnnnnnnnnnnnnaacatctaaaaggagagagggcccggtggcagcagaggatgagaaaaatgtcccagga

SEQ ID NO: 41484 - DNA, 775 bp, Macaca Mulatta
  misc_feature (1)...(775): n = A,T,C or G
ggcagcttcatacacattgaccagagctcaagctcctgcctgcaacttctgcctagagttgaagaaaagcaaactggccttggcaggcacagtgtcatcataccctcaccccacaggtttggggtctgcttgaggattcataaatcagccactctggattgttgaggaatggccatggcagccacagaaaaaagaatttttttctctgagccaaggnnnnnnnnnnnnnnnnnnnnnnnnnnnnnnnnttttcatttcattggaagatctccaatgaactgaacagctccagtcagcagcagttaccaaactgtgaatctgggccccaccactcttcccccttaccagttctgtcagcatccccctctccagcggcacttccatggagtcgattctgagactctggccatgaacacccgtttcttcagtgatttgttttgggcttttggctcaaaaccccaggctcttgtttttgtctaaactcttactctttcctgagcagcaggaggtagggaccactttgatgtcagacttctggtagctggacatgttctcaagataggcggctgttcatgacttttgcaccagaatgaaattgttagagggagggcttctggctgtggttctaaatggagccccaggaaactgccctcccccaggggtttatgctctgtagagccctgtggatcaatctcgaagtcctctagcaggggtgagggagagcagtgacttcagctgagtccctgccagtggttaagcaagcaatggtttcaaa

SEQ ID NO: 41485 - DNA, 233 bp, Macaca Mulatta
cagctggactgaggaactgaaccaggaggtcactggccacacagagcaactccaggtaagcaggtccgaggtcactgacttgcggtgcaccctccagggtcttgagttgcagttgcagctcagcatgaaaactcccttggaaagcacattggcagaaacagaggtgtgctctggagcccagctggcacagatccaggcactgatcagcagtattaaagcccagctgggtgatg

SEQ ID NO: 41486 - DNA, 886 bp, Macaca Mulatta
  misc_feature (1)...(886): n = A,T,C or G
cgaggccagcgtcttatggtgtttaatggttaagagtaatgactttcaatgtcaaattgattgcgttcatacctttgcaaatatatggcaaaaacgtgcatgcatccccactcctaaaccagattttgatagcacatgtgtattagtccattttcatgctgctgataaagacatacctgagactgggcaatttaagaagaaagaggtttaatggacccacagttccacatgattcatggcagaagatgaaggaagagcaaagggacatcttacaaggcagccagcaaagagagaatgagaagcaagagaaaggggtttccccttataaaaccattactctcaagccagttaaccagaagttgattgctgaatggccattcatggaatgaccaattgctcaaatttctcaaaaccattgaactgtagaatttatagtaacttttattaggttggaagctgaaacaggttttaaagaattctgcaatattttggtttatcaattttaattgtgaatccagcattttaaggaatgttcaagtctatttagctaattggtcatttggcaaattggttttcagaggattggctttcagtaaattgacttttagcaaattgaaggttaacaattctgttgttaccttcatgttggacatggtgaaactggggctcagaaacgtttccacacctgttcaatgtctcacagcttgttcatgtcaaccttatcttttgcccaccttgtttttttaaggtcctttcactggggccactggtctcgcctactttcccaatttgggtctggagcgccctagctctgggggacacccccgagattaaggcccccccataagagaatttctcaaaagggttgtttctcntccaacagctg

SEQ ID NO: 41487 - DNA, 632 bp, Macaca Mulatta
actttgcagtggtataagaaaggataaattagaagggaaagaaactcaagttatgaaaatcctattaacaatttcaattgtatataataattgttatgctaatggaaaaataatcactatcattaaataagattattttaattcttaaaaggtccgagtgaagctgaagaattccagcttgaggtgagtgggctactaggggagatgaactgcccatatctttcactgacatctggggatgtgaccaagcgccttctcattcagaagaactgcctcctcttgctcagtaagttcctggctactagaatatagctattattttctgtttatgttttccatgactagtaaactgaccatgtttttttgtttgtttgtttcattatggatataattcaaaattcattttaaaagaaaacttccttaaatttccaatttaggagctgagggtagacgtgtgcactggtagcattattgttttcgtaactgatactctttcagtatttcagcttcagtggtactcaggctgttgtgcttctcctaatgtgatcactggtagtgttggagtgatgcttaagtgtatgatctttacacttgcgaaatagagtagaagcacatttttaagtgtaatagga

SEQ ID NO: 41488 - DNA, 754 bp, Macaca Mulatta
ggtctgtttttcccgttcttgcttgctttgtagcttttgatttgagctttagttgcttgtcgttgattgagagaaaactgaggccttagttgtgggtttgggagtggacaccaggatcgagttgaaggtgtttctgcataaactccaaacagatggctggacagtggttgccagtagtctcaaacccaaaaagtgggtgtggagattttcaaagatgccgcctagctgaatacctatgaaaaacaggtagacagggaagatggctaaagatttaacaaccccttttggaccaccaaccaggcacaagtaatgtttttgtattatatagcatagctaacctagcaaaataaatcattttcccagctctggagcaatggaattaatctatatggctgagtgaaaccttccttttattctcagatgatttataaaatttctgattagttttcaggacattagtatgaaatgacctgtattttagatggctgaactagtctctcttgaaaagtgagcacaagtgagaaagtaatgttccagaggaggacttccaggtctggttaaaattggtaactagccattctggagcgaaaaaccacagaacaacaacatccgatggggcagctggtttttcaagcgttccgtccaacagggcagtacaaaaattttttctatccctgaaagtgaaggcccaaggacttcgccctttgggctcctggtttccaaggggaaaaaaagttttcttttaacggggcca

SEQ ID NO: 41489 - DNA, 560 bp, Macaca Mulatta
  misc_feature (1)...(560): n = A,T,C or G
gaaactgaacaactaaacaaactcagtagaggagatggaagacagaatctcttttcttttgattcagaagttcaggtattaatgatannnnnnnnnnnnnnnnnnnnnnnnnnnnnnnnnnnnnnnnnnnnnnnnnnnnnnnnnnnnnnnnnnnnnnnnnnnnnnnnnnnnnnnnnnnnnnnnnnnnnnnnnnnnnnnnnnnnnnnnnnnnnnnnnnnnnnnnnnnnnnnnnnnnnnnnnnnnnnnnnnnnnnnnnnnnnnnnnnnnnnnnnnnnnnnnnnnnnnnnnnnnnnnnnnnnnnnnnnnnnnnnnnnnnnnnnnnnnnnnnnnnnnnnnnnnnnnnnnnnnnnnnnnnnnnnnnnnnnnnnnnnnnnnnnnnnnnnnnnnnnnnnnnnnnnnnnnnnnnnnnnnnnnnnnnnnnnnnnnnnnnnnnnnnnggaattttctcagtgtccaatccacatcctgaaatttttctagttgcaagaattgaaaaggtgctgcagggaaacattacacactgtgcagaaccctacatcaaaaattctgatccagtaaag

SEQ ID NO: 41490 - DNA, 1733 bp, Macaca Mulatta
  misc_feature (1)...(1733): n = A,T,C or G
ggatacaggtggttgtttacatggataagttctttaatggtgatttctgagatcttagtgtacctgtctcccaagcagtgtgcactgtacccaatatgtagtctttatccctcacccccatcccaaccttccctctccgagtccccaaagtctagtatatcattcttatgactttgcatcctgtgcttctttcttgtctcccatcaacccattctcctattgaagtatggtctttctaaactatacatgtaccactcccctgatccttactgccgccaagcaaaattcctaggtcttaaaacaagactggcttctttatcactccaaacttacatccctagcctatcatgctttttatcattttcatgccctcactcatgatgttctctctgctcgaaatccatcacatccctctgccccaactccttgtacaagtaaactttctcttgaaagctgagccagatcaaatctagataggtgcctctcctcctagtgcctaaagtcctttatctagctgaattgtaactgcctcttatctctcccattagactatgtgtttaaagaagacagacctatgtcttagtttactgcatattcatagtacctagcatattcatttaataaacgaatttttaataggcacttgattaatggttattgaattgtgttttcagagaaataaaaacaaagcctaggaaaacaggttgacagtgggaaatcatggaaggttcatgatcaggagtgtaacaggaatatgaagactggtcagattccacaactctgagccacaattatctttggaaggagtcatttacctgcatgtttaaaggtcacagcataactgtttcccttccttattcttctatccctgcaattatcttctctttctaccctctcctttagctatcacatctactgctaccacttccttttccatttctgcagatgagttcctaattggtttcctacagtcatttttaaatgacctctaaaatacaggactttctaatattgacctactctcctaggactctattttaccccagcacttccacacttgaaagtaatatttaaaaattaactaaaaatgtataaaacaatttagcttcaagaatattacacaccactgtaaagtcagaaacctaaatatatgagaatnnnnnnnnnnnnnnnnnnnnnnnnnnnnnnnnnnnnnnnnctttaaaaactagacgggcatggtggtgtgcacctatagtcctagctaatcaggaggctgaggcaggaggatcacttaagcccaggaagaagttgtagtaagccataagcacaccactgcactccaacctgggcaacacagcaagaccctgtttcaaaaaatatatatagcattaccacttaaagaatattacacagccaattaaaaagaatattatatagaatatctaaggaaagaaacaagatggttaggggacagtgaggagagagacttactttttaccatatacccttttgtaccttttgtatttgtacctcatacatgtattacctagtcnnnnnnnnnnnnnnnnnnnnnnnnnntaagcttactttaaaaatattatataagtatactacttcttgattcacaaagacgtacaacacattgttaggtgaaaaaagaaaccacaaaacagtattacagtattgtaatattaacgtgggcaatgggtgtatacatttaagtataataatcactagaggatttggaaaaa

SEQ ID NO: 41491 - DNA, 809 bp, Macaca Mulatta
  misc_feature (1)...(809): n = A,T,C or G
ggnnnnnnnnnnnnnnnnnnnnnnnnnnnnnnnnnnnnnnnnnnnnnnnnnnnnnnnnnnnnnnnnnnnnnnnnnnnnnnnnnnnnnnnnnnnnnnnnnnnnnnnnnnnnnnnnnnnnnnnnnnnnnnnnnnnnnnnnnnnnnnnnnnnnnnnnnnnnnnnnnnnnnnnnnnnnnnnnnnnnnnnnnnnnnnnnnnnnnnnnnnnnnnnnnnnnnnnnnnnnnnnnnnnnnnnnnnnnnnnnnnnnnnnnnnnnnnnnnnnnnnnnnnnnnnnnnnnnnnnnnnnnnnnnnnnnnnnnnnnnnnnnnnnnnnnnnnnnnnnnnnnnnnnnnnnnnnnnnnnnnnnnnnnnnnnnnnnnnnnnnnnnnnnnnnnnnnnnnnnnnnnnnnnnnnnnnnnnnnnnnnnnnnnnnnnnnnnnnnnnnnnnnnnnnnnnnnnnnnnnnnnnnnnnnnnnnnnnnnnnnnnnnnnnnnnnnnnnnnnnnnnnnnnnnnnnnnnnnnnnnnnnnnnnnnnnnnnnnnnnnnnnnnnnnnnnnnnnnnnnnnnnnnnnnnnnnnnnnnnnnnnnnnnnnnnnnnnnnnnnnnnnnnnnnnnnnnnnnnnnnnnnnnnnnnnnnnnnnnnnnnnnnnnnnnnnnnnnnnnnnnnnnnnnnngcgaaactaaccccttaaaaattggatcccaataacctggatccaacggaaaacaagtttacccctaaggggaaaaaaaaccggccaatttctaattcctaagagatcccaatttcgaacaaataaaagacttaagaaacctcccaagtttgggaat

SEQ ID NO: 41492 - DNA, 668 bp, Macaca Mulatta
  misc_feature (1)...(668): n = A,T,C or G
ggggagatcctaactgccttgtcaacatctttgagcatcggcagctccggaggccggggtaactggcggcaggtaggaaactatgtgaaagaatctcctgatgtcataatttccgggtgtcactggaacatttgatcatcattcctttggcaattccagccttctatggaaggccagtagaaagcattgatttattcacctctacaggaatcagactcagcctcttttggttttcagtgaattatgccttttcgatttggaacccagccaaggaggtttccagtggaaggaggagactcttcaattgggctggaaccggggctgagctccagtgctgcctgtaatgggaaggagatgtcaccaaccaggcaactccggaggtgccctggaagtcattgcctgacaataactgatgttcctatcactgtctatgcaacaatgagaaagccacctgcacaaagcagcaaggaaatgcatcctanatagcaccattaagtcttttgtcaaggtctgactaggtcaagggtaatggaccagtatcatctgctgatctggtaacaaataaagtggtgcaccttnnnnnnnnnnnnnnnnnnnnnnnnnnnnnnnnnnnnnnnnnnnnnnnnnnnnnnnnnnnnnnnnnnnnnnnnnccccncncccccaacta

SEQ ID NO: 41493 - DNA, 783 bp, Macaca Mulatta
  misc_feature (1)...(783): n = A,T,C or G
ggnnnnnnnnnnnnnnnnnnnnnnnnnnnnnnnnnnnnnnnannnnnnnnnnnnnnnnnnnnnnnnnnnnnnngcccgcctcagcctcccaaggtgctgtnnnnnnnnnnnnnnnnnngcgcacccggctcagctaacttttttaaacatagttttaatcgttactagtatgctcaaaaacattcaatggctccctgttgcttatgtgataaagttaatactcctcagcttgccattcaagaaccatcttagcttaaccttttctctatttgcatctcactcatacacctttcagatgccagtgccatttccctctcatgcctcttaatgatgtttctttaaccttagctatcttgcctgttttgaactttatccaggatgttgaagttttattcagttttcaagatccaaatgaaatactttcttattcatcttacatccctcatctaactgtttattacagatagtgggatatgcatttgtttagctgactaggagcaggaaccatatggtaattgcctccaacatagtaggacctcattaattaaaataatgatttataatcaaattgaactgaatggatcatttggttctcagctttgctgttaaaactctttaatgctccttaatgngaaagaaggaagtaaaaatagagtgaatgtttgaattttctgttgccttttaacatggttcctgaactctcaataagtaccttgtagccttaactccccgcagcaagccattcctacacggggatcctttaccccatccaaagtgggggtt

SEQ ID NO: 41494 - DNA, 442 bp, Macaca Mulatta
  misc_feature (1)...(442): n = A,T,C or G
aagctgactggacattctggcaggccgaggatggagactctcctgaaagtgctttcaagcatcttgttgtgccagttgacctgggtgagaagccaacaaccagtgcagagtcctcaagccgtgatcctccaagaaggggaagatgctatcatcaactgcaattcttcaaaggctttatattctgtactctggtacaggcagaagcatggtgaagcgcccatcttcctgatgatattactgaaaggtggagaacagaagagtcatgacaaaatagtcgctacgtttaatgaaaaaaagcagcaaagctccctgtaccttatggcttcccagctcagttactccggaacctacttctgtggtgcagagttctcggtaaacaacctcttctttgggactggaacaagactcaccgttcttccctnnnnnnnnnnnnnnnnnnnnn

SEQ ID NO: 41495 - DNA, 947 bp, Macaca Mulatta
  misc_feature (1)...(947): n = A,T,C or G
cagggacaccgagctgggctgccagaggacatggggcctgagcctgttggaatctacaacaacattgatcgctttgggattgtgcnnnnnnnnnnnnnnnnnnnnnnnnnnnnnnnnnnnnnnnnnnnnnnnnnnnnnnnnnnnnnnnnnnnnnnnnnnnnnnnnnnnnnnnnnnnnnnnnnnnnnnnnnnnnnnnnnnnnnnnnnnnnnnnnnnnnnnnnnnnnnnnnnnnnnnnnnnnnnnnnnnnnnnnnnnnnnnnnnnnnnnnnnnnnnnnnnnnnnnnnnnnnnnnnnnnnnnnntcttggccctgccctacaggtcatgaaggagaagggcaagaggtcatctgaacacatccacccagatcaacctggacgtgagcaggacactaaggaatcacatcttcttcagggatcgatatggannnnnnnnnnnnnnnnnnnnnnnnnnnnnnnnnnnnnnnnnnnnnnnnnnnnnnnnnnnnnnnnnnnnnnnnnnnnnnnnnnnnnnnnnnnnnnnnnnnnnnnnnnnnnnnnnnnnnnnnnnnnnnnnnnnnnnnnnnnnnnnnnnnnnnnnnnnnnnnnnnnnnnnnnnnnnggattccacagcccaaatggcgggacagtccaggggctccaagaccatcaggagcatgtggtccccgtgtcacaacccaagaccaggtggcatnnnnnnnnnnnnnnnnnnnnnnnnnnnnnnnnnnnnnnnnnnnnnnnnnnnnnnnnnnnnnnnnnnnnnnnnnnnnnnnnnnnnnnnnnnnnnnnnnnnnnnnnnnnnnnnnnnnnnnnnnnnnnnnnnnnnnnnnnnnnnnnnnnnnnnnnnnnnnnnnnnnnnagcgcctcacgaagacgtccaggtgtggcctgtgggcacggtttcggaaccagttcttccatacctgggagttggatgatgactctgtgc

SEQ ID NO: 41496 - DNA, 1954 bp, Macaca Mulatta
  misc_feature (1)...(1954): n = A,T,C or G
aggcagcccgctgatccgatggaggagaacgaggtgagagcagcagcgacgcggcccctgggcctggccggcccgaggagccctctgagagcggcctggatgtgggcacctcggaagccgtgtcggccgacagcagcgacgccgcggccgccccggggcaggcagaggccgatgactctggcgtggggcaaagctcggaccgcggcagcnnnnnnnnnnnnnnnnnnnnnnnnnnnnnnnnnnnnnnnnnnnnnnnnnnnnnnnnnnnnnnnnnnnnnnnnnnnnnnnnnnnnnnnnnnnnnnnnnnnnnnnnnnnnnnnnnnnnnnnnnnnnnnnnnnnnnnnnnnnnnnnnnnnnnnnnnnnnnnnnnnnnnnnnnnnnnnnnnnnnnnnnnnnnnnnnnnnnnnnnnnnnnnnnnnnnnnnnnnnnnnnnnnnnnnnnnnnnnnnnnnnnnnnnnnnnnnnnnnnnnnnnnnnnnnnnnnnnnnnnnnnnnnnnnnnnnnnnnnnnnnnnnnnnnnnnnnnnnnnnnnnnnnnnnnnnnnnnnnnnnnnnnnnnnnnnnnnnnnnnnnnnnnnnnnnnnnnnnnnnnnnnnnnnnnnnnnnnnnnnnnnnnnnnnnnnnnnnnnnnnnnnnnnnnnnnnnnnnnnnnnnnnnnnnnnnnnnnnnnnnnnnnnnnnnnnnnnnnnnnnnnnnnnnnnnnnnnnnnnnnnnnnnnnnnnnnnnnnnnnnnnnnnnnnnnnnnnnnnnnnnnnnnnnnnnnnnnnnnnnnnnnnnnnnnnnnnnnnnnnnnnnnnnnnnnnnnnnnnnnnnnnnnnnnnnnnnnnnnnnnnnnnnnnnnnnnnnnnnnnnnnnnnnnnnnnnnnnnnnnnnnnnnnnnnnnnnnnnnnnnnnnnnnnnnnnnnnnnnnnnnnnnnnnnnnnnnnnnnnnnnnnnnnnnnnnnnnnnnnnnnnnnnnnnnnnnnnnnnnnnnnnnnnnnnnnnnnnnnnnnnnnnnnnnnnnnnnnnnnnnnnnnnnnnnnnnnnnnnnnnnnnnnnnnnnnnnnnnnnnnnnnnnnnnnnnnnnnnnnnnnnnnnnnnnnnnnnnnnnnnnnnnnnnnnnnnnnnnnnnnnnnnnnnnnnnnnnnnnnnnnnnnnnnnnnnnnnnnnnnnnnnnnnnnnnnnnnnnnnnnnnnnnnnnnnnnnnnnnnnnnnnnnnnnnnnnnnnnnnnnnnnnnnnnnnnnnnnnnnnnnnnnnnnnnnnnnnnnnnnnnnnnnnnnnnnnnnnnnnnncaggggccaagcccttcgcctgtgagtactgccacttcagcacacggcacaagaagaacctacgcctgcacgtacggtgccgacatgcaagcagcttcgaggaatgggggaggcgccaccctgaggagcccccctcccgccgtcgccccttcttctctctgcagcagattgaggagctgaagcagcagcacagtgtggcccctggaccacctcccagctccccaggacctcctgagnnnnnnnnnnnnnnnnnnnnnnnnnnnnnnnnnnnnnnnnnnnnnnnnnnnnnnnnnnnnnnnnnnnnnnnnnnnnnnnnnnnnnnnnnnnnnnnnnnnnnnnnnnnnnnnnnnnnnnnnnnnnnnnnnnnnnnnnnnnnnnnnnnnnnnnnnnnnnnnnnnnnnnnnnnnnnnnnnnnnnnnntgcaggtggccgtggtgaagtcggaggacatggaagcagggttagcatcccctggtgggcagccctcccctgaaggtgccactccacaggtggtcaccctccatgtggcagagccggggggcggtgcggcagccgagagccagctaggccctcctgacctaccacagatcaccctggcacctggtccatttggtgggactgggtacagtgtcatcacggcaccccctatggaggaggggacgtgagctcctggcacaccttaca

SEQ ID NO: 41497 - DNA, 756 bp, Macaca Mulatta
  misc_feature (1)...(756): n = A,T,C or G
ggaccctgaggctatagccctcccagctgatccgcacctctcagccccgtcctgggcacataagggtccctttgccccactagccagctcccattcagcctgcacttctctgcataaaccttactccttaaaaaacagcctcccggctggcgcagcacttcacatnnnnnnnnnnnnnnnnnnnnnnnnnnnnnnnnnannnnnnnnnnnnnannnnnnnnnnnnnnnnnnnnnnnnnnnnnnagtgaaacgccatctctgctaaaaatatagaattagctgggtgtggtggcannnnnnnnnnnnnnnnnnnnnnnnnnnnacnnnnnnnnnnnnnttcnnnnnnnnnnnnnnnnnnnnnnnnnnnnnnnnggagatcgcannnnnnnnnnnnnnnnnnnnnnnnnngagtannnnnnnnnnnnnnnnnnnnnnnnnnnnnnnnnnnnnnnnncagcctcctgacccccaggcctcacaagctcttcactacttgatcccagccctggtcttctccccagaccctcagcacaggcacgattgcttgtgcagactcactgtctcctgccagatcttaggccccttgggagggcccaggcctggggctttctctcaccgtccaccattttccgtacctttgcacaatgctgtgggaggtttagccaaactggacttgcccattaaatttctgaaaattggccgggccacagcattaattccccagaccatccaaaaataactgtgggccctgggtta

SEQ ID NO: 41498 - DNA, 822 bp, Macaca Mulatta
gggtcaggatgacagtcggagataaagacattgatttccttgtagatactggtgctgaacattctgtagtaaccaccccagtcgcccccttatccaaaaagactattgacataattggagccacggaggtttcagcaaagcaagctttctgcttgcttcagacttacactgtaggaggacataaagtgattcaccagtttttgtacatgcctgactgtccctttcccttgttgggaagggacttgcttagcaagctgagagccactatctcttttacagagcatggctctttgctgctaaactgacctgtaacgggagtcattatgacccttacggtaccctgagaggatgaatggagacttttcttaactgagctgagccaggagataagaccagctctggctaagtggtggccaaaagtgtgggtggaagacaaccctccagggttggcagtcaaccaagcccccgtacttatagaagttaagcctgggcacagctagttaggcaaaaacagtactcagtccccagagaagctcttgaaggtatccaggtccatctcaagcacctaagaacctttggaattacagtttcttgtcagtctccatggaatactcccctcctgccagtttccaagccaggggacaaggactacagggcctgtacaggatttgcacttggtttaatcaagctacagtgacctttacatccaacagtacctaacccgtacacattggtttgggttgctgcccactgaaggacaccctggttcacctggcttggacctgaaaagaccctttctttagcatccaattagtccctgaa

SEQ ID NO: 41499 - DNA, 684 bp, Macaca Mulatta
gtccctggctcccctcctgcctcgagaagggcagggcttctcagaggcttggcgggaaaaagaacggagggagggatcgtgctgaggtataaaagccggttttcggggctttatctaactcgctgtagtaattccagcgagaggcagagggagcgagcgggcgggccggcgagggtggaagatccgggcgagcagagctgcacctcgggcgtcgtgggaagggagatacggagcgaaaagggggcttcgcctccggcccagccctcccgctgaccccccagacagcggtccgcaacccttgccgcatccacgaaactttgcccatagcagggggcgggcactttgcactggaacttacaacaccctagcaaggacgctactctcccgacgcggggaggctattctgcctatttggggacacttccccgccgctgccaggacccgctcctctgaaaggctctccttgcctcggtttggacgctggatttttttccggtagtggaaaaccaggtaagcaccgaggtccatttgtcttttaatttatttttgtatcgctttaatgctaagatgagtcgaatgccgaaatagggtgtcttttctcccattcatgcgctattgacacttttctcagagtagttgtggtagcttgggctggggtggggggttaatccagaactggatcgg

SEQ ID NO: 41500 - DNA, 1142 bp, Macaca Mulatta
  misc_feature (1)...(1142): n = A,T,C or G
gagcgggagtgagttcctgggcgaggggacccggcagcggttgagtgggggccaggtgcctccacagtcagccatggcagcgctgcgctacgcgggcctggacgacacggacagtgaggacgagctgcccccgggctgggaggagagaaccaccaaggacggctgggtttactacgccaantcacaccgaggagaagactcagtgggaacatccaaaaactggaaaaagaaaacgagtggcaggaggtttgnnnnnnnnnnnnnnnnnnnnnnnnnnnnnnnnnnnnnnnnnnnnnnnnnnnnnccatatcaacaaaagaaccacctacgtagacccaagactggcatttactgtggatgataatccaacaaagccaaccacccagcagagatacgacggcagcaccactgccatggaaattctccagggccgggatttcactggcaaagtggttgtggtcactggagctaattcaggaataggnatagggtttgaaactgccaagtcttttgccctccatggtgcacacgtgatcttggcctgcaggaacatggcaagggcgagtgaagcagtgtcacgcattttagaagaatggngcataaagccaaggtagaagcaatggccctggacctcgctctgctccgtagcgtgcaacattttgctgaagcattcaaggccaagaatgtgngcctcttcatgtgcttgtgtgcaacgcagcagcttttgctttaccctggagtctcaccaaagacggcctggagaccacctttcaagtgaatcatctggggcacttctaccttgtccagctcctccaggatgttttgtgccgctcagctcctgcccgtgtcattgtggtctcctcagagtcccatcgngatttacagatattaatgactccttgggaaaactggacttcagtcgcctctctccatcaaaaaacgactattgggcaatgctggcttataacaggtccaagctctgcaacgtcctcttctccaacgagctgcaccgtcgcctctccccgcgtggggtcacgtcgaacgcagtgcatcctggaaatatgatgtactccaacattcatcgcagctggtgggtgtacacactgctgtttaccttggcgaggcctttcaccaagtccatg

SEQ ID NO: 41501 - DNA, 1945 bp, Macaca Mulatta
  misc_feature (1)...(1945): n = A,T,C or G
ccctgcgggaaccgaccgggccgggggagaggggatgctgctgtctctgggatgagtgcgagttgggggccgagggaacttggatgtggggtgcagagcgctgtagtggggacccccaggccggcttttgcttgcaccggagggaagaagaaactacactgcggggacgagcggaagggtgggcatgagcggcgaaaggtggtgaagcggatgggaaaccgagccctggaatcatggagccgaaagactctgggcgagcagaattggaaccttcggattatttacactcttattcaggtctttgaggtccttacctatgaggtgggcagctgggagcccggggctgagatctgcttctggctcctcctccggcagcttctgaaaccctggaaggggcaaagagtccacgattggggccagggcagccacccatgcaggctacccttgagaggacaggcagcagggatggggagcctggattcctagaggaagaggtatctgggaacgcagctgggagctgggagcccctgaggggctgaagcggggaaggagagacagtctgctcttacccagtccttgttgggcctgtgccccggggtcagcggtgtccgttacctggttgggtgggtcacagtgcccagagttcagattcagctcatctcacccctacccctctgannnnnnnnnnnnnnnnnnnnnnnnnnnnnnnnnnnnnnnnnnnnnnnnnnnnnnnnnnnnnnnnnnnnnnnnnnnnnnnnnnnnnnnnnnnnnnnnnnnnnnnnnnnnnnnnnnnnnnnnnnnnnnnnnnnnnnnnnnnnnnnnnnnnnnnnnnnnnnnnnnnnnnnnnnnnnnnnnnnnnnnnnnnnnnnnnnnnnnnnnnnnnnnnnnnnnnnnnnnnnnnnnnnnnnnnnnnnnnnnnnnnnnnnnnnnnnnnnnnnnnnnnnnnnnnnnnnnnnnnnnnnnnnnnnnnnnnnnnnnnnnnnnnnnnnnnnnnnnnnnnnnnnnnnnnnnnnnnnnnnnnnnnnnnnnnnnnnnnnnnnnnnnnnnnnnnnnnnnnnnnnnnnnnnnnnnnnnnnnnnnnnnnnnnnnnnnnnnnnnnnnnnnnnnnnnnnnnnnnnnnnnnnnnnnnnnnnnnnnnnnnnnnntgccctccagccccagtgcccccattgagactgaaccagagccagagcagggggctttcatacctcaaggacggggccaccccctctctgtagacctacacacctggctgggactttccacacacccctgctcccctcacccagcttcctgtttacccagagctggggtggggcagctggatgcctgggttctctgaactggggaagaagttggggtagggagacagactctcagggtggaaccaaaggggtccttagacatcttctggctcagcagagagggaaactgaggctcagggaggaaaggtaacttgcaggaagccagtcagcagagctgaaatgagaacacagatctccaggtttccagtgtggtttgcattcttctaaaccctcaaggtaggtgctgaaggaagagctgatcctgtctctgaggtcaagggctggagtaggacaaggactggagtcttgagggatggatgtctgggtccttgagaagaactgattcccatactgggctgacatcctcccattcccttgctcacctccagccccctgtgctgagtgagaaagggagaggtaagccttagcttcaccactgactactgactcactgaggagggatggaaatggagctttacctctcgctacaaagagtaaagacagatgaacgaggcatactcccaccctcagagagcttcgaagtcgacaatgagccctatccattagtaggtgcttactaaatgtttatatataaatgaataaaaggacaaataaatgcaggaataaccaaaacaaagcag

SEQ ID NO: 41502 - DNA, 613 bp, Macaca Mulatta
  misc_feature (1)...(613): n = A,T,C or G
ggggagacttctgacagctggacttttagccacagagactcgggatgtgaaggatttctcatgtctccccttttgcctcaggagttagcagcacttcttccatcttcttgagttgagagagatttgtgcctttgaactccatggcatattcatcctctaacagcgacatagaggactacaactccaaatccaattccaacctgagcctctctgtgggctatttcccctgtgaggacaccccctgtgaggacacaacctcctgtgaagacgcaacttccaaggatccttccatccactttctccctcccatccaaggggcatgggggactgaaaggataaggagatgcatgaagagacaagaccaaattcacgatgaaccagaacacttttgcaaactaagtatcttcctggcctgggacgcgcacgtcagctccaacaacacagactcaatagctaataggcttctaaatggagacaaccagtggatagatgacttcccacaagaaagaaccaaactgtctgtcagcaaactgaataatcttgtgcaagagttcagaatttctagaaaactgaaaaagatgacaagatgacccctttttcctgaatgatcaan

SEQ ID NO: 41503 - DNA, 2870 bp, Macaca Mulatta
  misc_feature (1)...(2870): n = A,T,C or G
agtggtttactttgtagagtgagtgcgggaaatgatatggcatgtctcactactgatttacttactgcccttggcaaaatagaacctgtctttattcccttggtgttagcctttcgctactgggctaannnnnnnnnnnnnnnnnnnnnnnnnnnnnnnnnnnnnnnnnnnnnnnnnnnnnnnnnnnnnnnnnnnnnnnnnnnnnnnnnnnnnnnnnnnnnnnnnnnnnnnnnnnnnnnnnnnnnnnnnnnnnnnnnnnnnnnnnnnnnnnnnnnnnnnnnnnnnnnnnnnnnnnnnnnnnnnnnnnnnnnnnnnnnnnnnnnnnnnnnnnnnnnnnnnnnnnnnnnnnnnnnnnnnnnnnnnnnnnnnnnnnnnnnnnnnnnnnnnnnnnnnnnnnnnnnnnnnnnnnnnnnnnnnnnnnnnnnnnnnnnnnnnnnnnnnnnnnnnnnnnnnnnnnnnnntctcctttaacattggaaacaccaaatcgggtatccttgggacagttatggttagagctgctgaaattttacacactgggttatctttggaggaatatgtcatatgtnnnnnnnnnnnnnnnnnnnnnnnnnnnnnnnnnnnnnnnnnnnnnnnnnnnnnnnnnnnnnnnnnnnnnnnnnnnnnnnnnnnnnnnnnnnnnnnnnnnnnnnnnnnnnnnnnnnnnnnnnnnnnnnnnnnnnnnnnnnnnnnnnnnnnnnnnnnnnnnnnnnnnnnnnnnnnnnnnnnnnnnnnnnnnnnnnnnnnnnnnnnnnnnnnnnnnnnnnnnnnnnnnnnnnnnnnnnnnnnnnnnnnnnnnnnnnnnnnnnnnnnnnnnnnnnnnnnnnnnnnnnnnnnnnnnnnnnnnnnnnnnnnnnnnnnnnnnnnnnnnnnnnnnnnnnnnnnnnnnnnnnnnnnnnnnnnnnnnnnnnnnnnnnnnnnnnnnnnnnnnnnnnnnnnnnnnnnnnnnnnnnnnnnnnnnnnnnnnnnnnnnnnnnnnnnnnnnnnnnnnnnnnnnnnnnnnnnnnnnnnnnnnnnnnnnnnnnnnnnnnnnnnnnnnnnnnnnnnnnnnnnnnnnnnnnnnnnnnnnnnnnnnnnnnnnnnnnnnnnnnnnnnnnnnnnnnnnnnnnnnnnnnnnnnnnnnnnnnnnnnnnnnnnnnnnnnnnnnnnnnnnnnnnnnnnnnnnnnnnnnnnnnnnnnnnnnnnnnnnnnnnnnnnnnnnnnnnnnnnnnnnnnnnnnnnnnnnnnnnnnnnnnnnnnnnnnnnnnnnnnnnnnnnnnnnnnnnnnnnnnnnnnnnnnnnnnnnnnnnnnnnnnnnnnnnnnnnnnnnnnnnnnnnnnnnnnnnnnnnnnnnnnnnnnnnnnnnnnnnnnnnnnnnnnnnnnnnnnnnnnnnnnnnnnnnnnnnnnnnnnnnnnnnnnnnnnnnnnnnnnnnnnnnnnnnnnnnnnnnnnnnnnnnnnnnnnnnnnnnnnnnnnnnnnnnnnnnnnnnnnnnnnnnnnnnnnnnnnnnnnnnnnnnnnnnnnnnnnnnnnnnnnnnnnnnnnnnnnnnnnnnnnnnnnnnnnnnnnnnnnnnnnnnnnnnnnnnnnnnnnnnnnnnnnnnnnnnnnnnnnnnnnnnnnnnnnnnnnnnnnnnnnnnnnnnnnnnnnnnnnnnnnnnnnnnnnnnnnnnnnnnnnnnnnnnnnnnnnnnnnnnnnnnnnnnnnnnnnnnnnnnnnnnnnnnnnnnnnnnnnnnnnnnnnnnnnnnnnnnnnnnnnnnnnnnnnnnnnnnnnnnnnnnnnnnnnnnnnnnnnnnnnnnnnnnnnnnnnnnnnnnnnnnnnnnnnnnnnnnnnnnnnnnnnnnnnnnnnnnnnnnnnnnnnnnnnnnnnnnnnnnnnnnnnnnnnnnnnnnnnnnnnnnnnnnnnnnnnnnnnnnnnnnnnnnnnnnnnnnnnnnnnnnnnnnnnnnnnnnnnnnnnnnnnnnnnnnnnnnnnnnnnnnnnnnnnnnnnnnnnnnnnnnnnnnnnnnnnnnnnnnnnnnnnnnnnnnnnnnnnnnnnnnnnnnnnnnnnnnnnnnnnnnnnnnnnnnnnnnnnnnnnnnnnnnnnnnnnnnnnnnnnnnnnnnnnnnnnnnnnnnnnnnnnnnnnnnnnnnnnnnnnnnnnnnnnnnnnnnnnnnnnnnnnnnnnnnnnnnnnnnnnnnnnnnnnnnnnnnnnnnnnnnnnnnnnnnnnnnnnnnnnnnnnnnnnnnnnnnnnnnnnnnnnnnnnnnnnnnnnnnnnnnnnnnnnnnnnnnnnnnnnnnnnnnnnnnnnnnnnnnnnnnnnnnnnnnnnnnnnnnnnnnnnnnnnnnnnnnnnnnnnnnnnnnnnnnnnnnnnnnnnnnnnnnnnnnnnnnnnnnnnnnnnnnnnnnnnnnnnnnnnnnnnnnnnnnnnnnnnnnnnnnnnnnnnnnnnnnnnnnnnnnnnnnnnnnnnnnnnnnnnnnnnnnnnnnnnnnnnnnnnnnnnnnnnnnnnnnnnnnnnnnnnnnnnnnnnnnnnnnnnnnnnnnnnnnnnnnnnnnnnnnnnnnnnnnnnnnnnnnnnnnnnnnnnnnnnnnnnnnnnnnnnnnnnnnnnnnnnnnnnnnnnnnnnnnnnnnnnnnnnnnnnnnnnnnnnnnnnnnnnnnnnnnnnnnnnnnnnnnnnnnnnnnnnnnnnnnnnnnnnnnnnnnnnnnnnnnnnnnnnnnnnnnnnnnnnnnnnnnnnnnnnnnnnnnnnnnnnnnnnnnnnnnnnnnnnnnnnnnnnnnnnnnnnnnnnnnngcagcccagctggtccgcaaccttgtaaatgctcaacaggtggctggttcagctcagcaacagggtgatcagtccataaggactagacagtcctcagaatgt

SEQ ID NO: 41504 - DNA, 843 bp, Macaca Mulatta
gggagttagagctttacttccatatgaatgtgttacgttatatgacaaactaatgtagcagttttacttaccttatgcacaaaggtattcccaggtaggggacaatagtagcattcgcagtggtgataatgcttcaaggtggatgtgtttggaagtttggcctttaggaaatggagagtagtgggaaaaacatcagatttcaccaaagaaccaaagtgactccacaattgggatgccgacacaccttgctaggaactgacaacttaagtatggtctggagcttaccagctcctaccagtccagtgtgcttataagtgcaaaagaaagtaagggcaaccccagatttctaatctaccaagtatccccctaacctccttacctctctgctaatagatttttttgtggttgttgtaaatgttttggtttggttatttatttatttatctattggatctatcgatttttttaaagaatttgaggtttaccctaagccttttaaggcctgttttcacccaagggtttgggccctcaaggggaaagaaatagtggtgaccagaataattttttaaatttaattggcaaagtttcttgggggaacccttttttgggggggccacaatggttatccaattttttattggcaatggaaccattttccagaaaaccaatttttaaaggggaaaacggggacagcctttacattttatcctcccctaagtctccataatttttcatgggaactgtaaagaaaattttttttttagccggattaatataagccgattagaacctttaatttttccaaataaaatttagggggaaaaattttatcttcaatctttc

SEQ ID NO: 41505 - DNA, 822 bp, Macaca Mulatta
  misc_feature (1)...(822): n = A,T,C or G
gggggtccagctcttcctgctgctaaaaccatgctctggcgagaccctgtttcgctgagggctgctccttctgccatctcctgccatgcttaggggaaactttcccggacttggtgcaccaggactacaagtctgaaaattcaaccctcctccccggtgccaagaacagtctgcaagactccgtttcggcaagtcaggctacaggcgaagctgagtgttatgaacagatcaactggcccacagcaaaagtgacatccatcgatgcaggaaccaaaagccccagcttcagactcctctcatgagctgtgagacaggaagaaaggatgggagatatttttccccccttttctacaaccatacattgatcttaaatgagttccaaataggtcaatagaagatacctgtgattgttcttgccttcattgaagatgcttatgcctcattgaggcatttactgatacataaaaatgccaggccagtctgacatcttaaccgaaatctacagggtttagaagttttcgtgcgacagagtcttgctctgtcgcctaggctggagtgtanntggccggtcttggatcactgcggcctctgcctcccggggtccggcgattctcccggcctcggactcccgaaaacctgggattaccggaaggaattttttacatctcccaatattataaaagtcggggaaatgcctatacagtcttaattcctgcctattggaaaccctggaggaaatcggagaagtttttcctttttgtggcggaaaagcttttataagacttcttaattggaataaaagatattcgtaattctctccac

SEQ ID NO: 41506 - DNA, 421 bp, Macaca Mulatta
aggcccaggtgctgtgtgaagagggtctgccctgggcgtcatgctgaccatgagggcagtgtggggcacctctggacacttactaagggcccatctgtgtccaaatatgccaggagccagaaagcagcctcaccctggagcagctcactgtttcagcagctgggaccagaaaggccactgggcgaggcaggtggacagggaaggagcaggggatgtgcacgtggccacttgagagctcagtggccacaggcaggggccgaaggatggcggactccaggctggggtcccaccaaggacagtaatggctgtgacagcagcaccttcttcccctacggggccagtgtccctgccctctgctcctctgcgtgccgcactcctccccccaggacagggaagggtctggggtgcacggttgcatcat

SEQ ID NO: 41507 - DNA, 1262 bp, Macaca Mulatta
  misc_feature (1)...(1262): n = A,T,C or G
caccgcgcctggccccaaaagtacagttttaacagtaagtaatgcatgaagaaactgtaacaaatggcctaaatacagagttggacagaaccaaaccagttatgtctagaattactcaattgaaactaatataggtacatacaaaataaagttggagattataattgctatttagaatcaaatttgaagacttccttgataaaatgtaagaatgttcttttgaaattgtaaatgaaactatcaatagatggagagctagagacttattaacccctcctacacacataaggaaataagtgacaaagtctcttgcactgaagttatgtattttaacagctttacatgtaatattcatatataaaaaactttaagtgcttttctccaatttaaaaatctaaagaattcagaaataaggcattcaatatttgaaaaaagtacagatttacaaaatgtgtatattctgtcatgaaaactccacaccaacattatacacttggaaaaaaaatacaaacaggatatattacaaatttatgcagcaataacttagttcacaccatgcaataaaaagtacattaatcaagatacacaagcttttgtaggttctaaactgaaggnnnnnnnnnnnnnnnnnnngcagaatccttaaaacctgtggcacttaaaatttgttagcctttctactgagaggtaaattatacacaacaatgatgaaaaagattaacagaccagttgtctattatgaatcattccagctttgttcaacaatggccgaaactcttttctcatattctcgtttgttttcctgataaagctgtgctgcctggctattggctggactgttaggattcggttcatccagcagagactgaattgatgttaagatagaagatacatcgtatgttggactccatcgattctgaaggatatctaaacatatgctaccatcagcatacacatttggatgaaacattttggataaaaacctaacagttggtggtttatttggatattcttcagaaaattctattactagtttaaaagtaccatcttcaaaaggtgtcccttctggtccaaatataactgcattccactgcatgatgttgttttcagatggtgcgccactgacacccacaggtgggtcctcttgtaaccgcttgaaatcccgcataagcctccttcgggccggggtcgacatgctccgcagctgccccgcggtcagtctgaaagaaaagagtcccgcgcagccccccaccccccggcgc

SEQ ID NO: 41508 - DNA, 627 bp, Macaca Mulatta
  misc_feature (1)...(627): n = A,T,C or G
gggactaaatgaaacataatatttatttataaaagtatgtagattgttaaatcaccaaaagagtgctatgaacattatgtatgcggaagcaggcctttgacctcctggaaagcactgctcaaaggtcattagtgaccatttttgaattccccaaacagaaaacttcttagaaaacatgctgagattttatttacagggaattctttgacacatttcaattggtgtgtagtcaagtatagcaagtacctaataatgactgaatttcctgcccctagcgtcatgcatattcattagaactcttatgttgctggtctgatctgattctttgcttgcgggtggaaccgcactgaaaaaaatataatcttttaaacttcaacatgtttagtacttatattgccttagaanaccccgacccctcaccgtggaaatgacagaaatgacctcctaagtgactttatttatccattatgattcctcttgttcnnnnnnnnnnnnnnnnnnnnntattcttttaaaaaattggcaaatatgggtttcttttcctttcacagaaaaatcttttttcttttggggaacacgccttacaatttgataaactgaatttcagaatcggaaaacaatgtttgg

SEQ ID NO: 41509 - DNA, 790 bp, Macaca Mulatta
  misc_feature (1)...(790): n = A,T,C or G
aaaccatgttctttcttaagggttaccccagaagagctggttaattttttggccaaaggtggcctatttccttttaactttccaattaaacccagaggtacccccagccccagccaacccacaaaaaaagggaaccgcatngctgtacagcaagagaagggggaggggagacgatttttcagggtgataactttacatggcaaccaaaagggaaaataagtaagacaaacctcacaagatagatataaaactaatttgcagtgacatttgatatgtagttttatcagaagtaatacatttaggttacagttatgtgaaaaagagaaactatatgaaattataggctttctcctagaatatccaaaatgcttatcaacagttaattagtacaagaaagatgaccaccaggtgactgaatagacagaatgacatgtagtattttaaaaacacagattctgggactagaagctaccaccaaaatatccagaaatctgagttaacaggtcctttactttgcacacttgctgctgatatatagaaccacgaagtgttagcacagaccacaaatgcaaccgctagcctagaggccctcacagaagagaaggcgatgaacaccatcccgccagggtgaggacagggagtgtcggatgcgtttgtgtttccccccatatacaaaggccatctctagcgcggaaatctctcaacagctcaagcccattctcgctgcctcctccgtgaaacaacagagctcaagcttggtgctgggaagtctttctgatgctggtttgcc

SEQ ID NO: 41510 - DNA, 390 bp, Macaca Mulatta
  misc_feature (1)...(390): n = A,T,C or G
ggacattgggtgttcctggcaaactgccacctgtcactgtcttggatgcctaatctggacaagctggtggagcagctgcaggtggaggaccctcatccatccttccgcctctggctcagctccagcccccacccagacttccctatctcaatcttgcaggccagcatcaagatgaccacagagccaccaaagnnnagggcctaaaggccaacatgacacgtctttaccaactaatgtcagaaccacagttttcccgctgctccaaacctgccaaatacaagaagctgctgttttcactctgtttcttccactctgtattacttgaacgcaaaaagttcctgcagcttggctggaacataatctatggcttcaatgactctgactttgagg

SEQ ID NO: 41511 - DNA, 652 bp, Macaca Mulatta
tcataactcacgctcgaagttatgcctttttcaagtttagaaaatatcggttattatctctttattattatgctgctgcagcattatttgaattctttccctcagaaatttatgttagaagtttcctagacttcattctattctcatgactcttaattagtcttgccaaattttcatttcattatctcattgcattttaggtaatttcttaatctctatcttccagtttgctagttctttcttcaactgtttatctattttattgtttaacctatttattttctatttcaatgattacattttttgagattttattagcaaaatggttaaaaggatggtttcggaggattgtctggatttacattttgcctccattatttactagctctccagttttggttaaattaattaaccttttgtgcttcttgatgtgtaaaattgaaataacaattgtatataaataaatatagtgttgttttggtaattcagtaaaattatttatgtaaaatgcttaagacagtgcctgaaatgacattgagtcctcaaaaagtaaattattattagcattattatcattccttcacagagttttctgttatttgctgtgttttactattattggcttaacacttgattttctgatttttaacaa

SEQ ID NO: 41512 - DNA, 683 bp, Macaca Mulatta
  misc_feature (1)...(683): n = A,T,C or G
ggcactgccaccatgcccgcgctaagttttgtacttttagtaannnnnnnnnnnnnnnnnnnnnntnnnnnnnnnnnnnnnnnnnnnnnnnnnnnnnnnnnnannnnnnnnnnnnnnnnnnnctgctggtattataggtgtaagccaccatgcccggcctgcttttactttcaaatacttactctgtcacttcaaacacactcttggcaatagcatcgacccctttcacccttttgtcctactacttgttctgaaaaatcacagacattgtatctacttaagtgagagccttgttggtacctcctaaggccactgacctggaaggtgaaaatcacacagcaatgaaaaatggtttctctttatgtccaatgtttctactcctaaccagatctaaggactgcctggcatttctgctgtttccttgtcagttctctctcccagaggttgggagtccaatttccacccattttttttcaggcactgttgttgacagtagaaatgcagtgttaaacaagacattgctccctacccatcacaagcttattctgatggaaggaaacagatacannnnnnnnnnnnnnnnnnnnnnnnnnnnnnnnnnnnnnnnnnnnnnnnnnnnnnnnnnnnnnnnnnnnnnnnnnnnnnnnnnnnnnnnnnnnnnnnnnnnnnnnnnnnnnnntggc

SEQ ID NO: 41513 - DNA, 144 bp, Macaca Mulatta
  misc_feature (1)...(144): n = A,T,C or G
tagacacagattaactgtaaacagttctctctctctccagtggacaaaaagaataagcttccaatgccaactccatatcagaatgacatccaccgctggcctgtcctgctgccatacacgcgggctcatgtgnntggggaggcg

SEQ ID NO: 41514 - DNA, 882 bp, Macaca Mulatta
  misc_feature (1)...(882): n = A,T,C or G
ggggcttctcatcatggcggaccctagagataaggcgcttcaggactaccgcaagaagctgcttgagcacaaggagatcgacggccgtcttaaggagttaagggaacaattaaaagaacttaccaagcagtacgaaaagtctgagaatgatctgaaggccctacaaagtgtcgggcagattgtgggtgaagtgcttaaacagttaactgaagaaaaattcattgttaaagctaccaatggaccaagatatgttgtgggttgtcgtcgacagcttgacaaaagtaagctgaagccaggaacaagagttgctttggatatgactacactaactatcatgagatatttgccaagagaagtggatccattggtttataacatgtctcatgaggaccctgggaatgtttcttattctgagattggagggctatcagaacagatccgggaattaagagaggtgatagaattacctcttacaaaccccgagttatttcagcgtgtaagaataatacctccaaaaggctgtttgttatatggaccaccaggtacgggaaaaaacactctttgggcacggagccgtttgctagccagcctggaactgccaatttccttaaaggtttgtaatcttagtttctaatttggagacaaaagtaccattagggagaaaaggtgcctccgttttcgattccagaggaaaattgtgtttaatttaatgcccaagaanaacccatccgagccccatcgccattttaatgtttctttatgtcggaagagaaanattaagaaatggccccaatatagggagagaggaccagtcaacgacggtatatttacctcggaaagagagggaacccatatacaggataatatgaacaagaaaggaac

SEQ ID NO: 41515 - DNA, 641 bp, Macaca Mulatta
acatgagttggagagagaggttttactggatgctcatttgtaccttttgagttttgaaccagttgaatttattatctattcaagatgaattaatttttaaataacatgctacactcctagcacagaagattcttttgagacgtaaaacacggttgtgaaagtgttttgtaatttgtaagtatactaatattataattgcaaagagttaatgttattcagctgtgacggttgattatgttacaaaggctgaaatggtcatatcagtcagggcatgatctctttttcttggtactcctcaaacatcatcagcttagtaaaatttagaccagtatgatcctctgaaataaatctgtcaaagttgacattagaaaaatttttccttgatatggcatctcttcaaatggctaaagcaataactatgtgaaaaaatagctatctggtttaagttttaagataaaagatgcatctgtttttaatctttcatcattactttttactgcataatttttatatattttattaatgcaaattttattgtattcactattaagttgtaattaatatttacctgcctatgtgctcaaccttatactaagagcactgtggaacataaactaggatgaactaattgtgcttcacca

SEQ ID NO: 41516 - DNA, 764 bp, Macaca Mulatta
  misc_feature (1)...(764): n = A,T,C or G
ggcacctcataaggcaggtgactcaggatattttaaaccaagatcagtaaagttcccatccactttctttgaatcagcaagttttatccagacccatctctcagcttttattaaatttcttcttataataagcccacatgtaaaacagtttcctagttacnnnnnnnnnnnnnnnnnnnnnnnnnnnnnnaatctcgnnnnnnnnnnnnnnnnnnnnnnnnnnnnngcaatcttagctcactgcaacctccacctttgggttctattnnnnnnnnnnnnnngnnnnnnnnnnnnnnnnnnngtacaggcacccatcaccacannnnnnnnnnnnnnnnnnnnnnnnnnnnnncgctnnnnnnnnnnnnnnnnnnnnnnnnnnnnnnnnnnnnnnnnnnngcctgcttcggcctccannnnnnnnnnnnnnnnnnnnatgagccaccgtgtccagccctcctcattactcttgactcctcttaagtaactttaagtcctagtaggaagtactnnnnnnnnnnnnnnnnnnnnnnnnnnnnnnntgtagtctcgctccattgcccaagctggattgcaatggcccgatttcagctcattgcaacctcctgcaccctgggttcaagcaaatttcctgcctccgccttccaagtaagctggggattacagggtgccccatcacccatgcccagggcaaattttttggaaattttccagaagaagaaccgggggttttccaccaattttttgggcccaaggccttgggc

SEQ ID NO: 41517 - DNA, 691 bp, Macaca Mulatta
ggatcctgctttgtactttcctccccatagtaaacacaaaccagtggagatgtgaagcaaagtaagagcaacaaggcaaacctctccttcctccaaagaggattgcatcctcttgctgtctttgccgatgctctcctccaggcccatccccgtcatgtcttctttcctgtctttctagcagaattctggctcctctcataggaccttcttgcaggaattttccctgactgctgcctccaaggagaggctccccaccagaaagttttaagaggcgtatgcctctggggttaatgaggtcctttctgtcaccttgctttctgttcctagttatctttctgtaacttgtttcctaaactactctgaaaggcagagaccgtctcttgaaagctcatctgttcttaacccctttccctcattccagtgactgcagcatcttccacacaccattccctcttagcatttacgtccatgtcatgcttttgttggtttatttgtttattttctgcttcccgccattagatcgtttggtagaattaatgaatgcctatgggttaatagattttttctctggatcctgttttctctgtgtctgtctggcccagctgcttagaaaagccttccggtttggggaatttggatccacctttctttgtggggagagtaatgacccctgggtcccttaatgcccatc

SEQ ID NO: 41518 - DNA, 92 bp, Macaca Mulatta
cagacattggaactgtcctcaaagttgtcagcatttcaaaggaaaagtggaatatggaagaggtagtgctggaggagttgcagatattcaag

SEQ ID NO: 41519 - DNA, 672 bp, Macaca Mulatta
  misc_feature (1)...(672): n = A,T,C or G
ggggctttttcgcaacgggtttgccgccagaacacaggtgtcgtgaaaactacccctaaaagccaaaatgggaaaggaaaagactcatatcaacattgtcgtcattggacacgtagattcgggcaagtccaccactactggccatctgatctacaaatgcggtggcatcgacaaaagaaccattgaaaaatttgagaaggaggctgctgagatgggaaagggctccttcaagtatgcctgggtcttggataaactgaaagctgagcgggaacgtggtatcaccattgatatctccttgtggaaatttgagaccagcaagtattatgtgactatcattgatgccccaggacacagagacttcatcaaaaacatgattacagggacatctcaggctgactgtgctgtcctgattgttgctgctggtgttggtgaaattgaagctggtatctccnagattgggcagacccgagagcatgctcttctgggttacacactgggtgggaacaactaattgttggtgttaccaaatggattcactgagcccccctaccctcgaaaaaatccaaaaattgttaagatttccctttattaaaaattggcatccctaaacattatttgtgcccttttgtttgatgtccactttcaaccataatattcctgttcagtggtatc

SEQ ID NO: 41520 - DNA, 902 bp, Macaca Mulatta
  misc_feature (1)...(902): n = A,T,C or G
agctctacaatgaggagatccttgacctgtttgacagcacccgtgaccctgacgcccgccaccgcaggtccaacatcaagatccataagggcgcgaacggtggcatctacaccaccggcgtcactttaatgatcatccactcccaggaggannnnnnnnnnnnnnnnnnnnnnnnnnnnnnnnnnnnnnnnnnnnnnnnnnnnnnnnnnnnnnnnnnnnnnnnnnnnnnnnnnnnnnnnnnnnnnnnnnnnnnnnnnnnnnnnnnnnnnnnnnnnnnnnnnnnnnnnnnnnnnnnnnnnnnnnnnnnnnnnnnnnnnnnnnnnnnnnnnnnnnnnnnnnnnnnnnnnnnnnnnnnnnnnnnnnnnnnnnnnnnnnnnnnnnnnnnnnnnnnnnnnnnnnnnnnnnnnnnnnnnnnnnnnnnnnnnnnnnnnnnnnnnnnnnnnnnnnnnnnnnnnnnnnnnnnnnnnnntgatcagcgccttaggggaccagagcaagaaggtggtgcacgtcccctacagggactccaagctcactcggctcctccaggattcgctggggggcaacagncagccagaccatcatgatcgcctgtgtgagcccctcagaccgagacttcatggagaccctcaacacacttcaatatgccaatcgnnnnnnnnnnnnnnnnnnnnnnnnnnnnnnnnnnnnnnnnnnnnnnnnnnnnnnnnnnnnnnnnnnnnnnnnnnnnnnnnnnnnnnnnnnnnnnnnnnnnnnnnnnnnnnnnnngggcaagcgagtgataggagaggatggcgctgagggctatagcgacctgttccgggagaatgccatgctacagaaggagaatgcggccctgcggctgcgggtgaaagccatgcaggaggccatcgacgccatca

SEQ ID NO: 41521 - DNA, 759 bp, Macaca Mulatta
  misc_feature (1)...(759): n = A,T,C or G
gggagatcatgatggaatgagtgggtggcttttctaccagccattccttcagaattcatgaggggtggggggcagggggactggaattgtcttagcaccctaatgttatgacaaaactatgctactttagaaatgcaatctacttttcaccaattggatctgaagtaaccaatgacatcataagaaatcactgcattaagaaaattcttgccgtgccctttgaaaagctgttcagaaatcatttacagtgatctttcatcatggtctctgtagtgaaacgttttagtgtgataaatttcaaaattctaaacaaattacccacttttatattggaaatctctaccagaaccccctcttcattttttaaggcatacatttgcttgttttcaagatcaagaattctgagctagctttaagtagcaaactgatttatatatgcaattataggatgcattaagatgaatgatagcctttacataacatattgaaaactttactgcagatgttttgttttgaaaatggcattgtatggtaaatgcaaattaattttgtaaaattatgttaaacagtatgttcagacactttctgccatggccaanaagtatgtatgaaagtatgtgtgtatttgtctgtgaaaggatgccaatgttttacctgatatcttagtgacacttcagttatctatctatgcaattcctttagatctggtgatttcggtaaacagggcagcccatgtttccaccgatgcccctttgtatt

SEQ ID NO: 41522 - DNA, 735 bp, Macaca Mulatta
  misc_feature (1)...(735): n = A,T,C or G
cccgcccgggaccaggctgaccttcctcgacggtggcgtcgagggctggagcctgagtgctgcgaggcttcccgcatggctgagccaccgcgaggggttgcagagcggctcaggggtcagttcaagcatcttctctcctccctcgcccccagacagagctgggcgcgggattccggttccagatggagtgagggtctcgggacggccctggaaaaggggagcccacggtcaaggctgcctattgccatctcgagcagagatgtcacctgctgccgttggaggaaagggagcccggtggggatgagcgcatttagcccaatgctgggaacaaagcacaatccacgcttctgcgatttcgctccattttgaaatgtgttggcgctttggttgggccactgcggtgggcaaggccggggaaggagggggctgctgttaatggagaaacctcagggggacggtccttcgtgcaacaattaggaaactccatcctgactctgtgcgcgctttaaggagatggcttcgctccaggtcctcgagggatgcagctttggcgcggatgacggtggggtgctnnnnnnnnnnnnnnncctctggaaatgtctgggcacggatcccggggccatcgacgactcctccccatccccagcaggcgggagctcttacattccgagcgactgctctcaccctctggcgctcacacacctgtaactccaaacctccgtctcagaatggtcc

SEQ ID NO: 41523 - DNA, 786 bp, Macaca Mulatta
  misc_feature (1)...(786): n = A,T,C or G
gggccnnnnnnnnnnnnnnnnnnnnnnnnnnnnnnnnnnnnnnnnnnnnnnnnnnnnnnnnnnnnnnnnnnnnnnnnnnnnnnnnnnnnnnnnnnnnnnnnnnnnnnnnnnnnnnnnnnnnnnnnnnnnnnnnnnnnnnnnnnnnnnnnnnnnnnnnnnnnnnnnnnnnnnnnnnnnnnnnnnnnnnnnnnnnnnnnnnnnnnnnnnnnnnnnnnnnnnnnnnnnnnnnnnnnnnnnnnnnnnnnnnnnnnnnnnnnnnnnnnnnnnnnnnnnnnnnnnnnnnnnnnnnnnnnnnnnnnnnnnnnnnnnnnnnnnnnnnnnnnnnnnnnnnnnnnnnnnnnnnnnnnnnnnnnnnnnnnnnnnnnnnnnnnnnnnnnnnnnnnnnnnnnnnnnnnnnnnnnnnnnnnnnnnnnnnnnnnnnnnnnnnnnnnnnnnnnnnnnnnnnnnnnnnnnnnnnnnnnnnnnnnnnnnnnnnnnnnnnnnnnnnnnnnnnnnnnnnnnnnnnnnnnnnnnnnnnnnnnnnnnnnnnnnnnnnnnnnnnnnnnnnnnnnnnnnnnnnnnnnnnnnnnnnnnnnnnnnnnnnnnnnnnnnnnnnnnnnnnnnnnnnnnnnnnnnnnnnnnnnnnnnngccaataaatgcctaaataataaggtaaccatgaaaataattttttcttcccaccatgccaataaaggtcccccaaaaatccgggaatatcggaaaaaaacccctccaaccccgaaaaaaaccgtctaaacaaagctcccaaagggcccaatataaaa

SEQ ID NO: 41524 - DNA, 522 bp, Macaca Mulatta
acacagccctttgccctctgaggggtacagacagccggtcatttaagtggggtgtgaggagagcattgacaaggaaaggacaggatgcctgggagcacagggtggggagtgtagggcagacgctaggaggaagtccctgagattaaggcctgaagcataactttagacaaagagtacagaagagtgtgttcctgactaatgaaaagcttagtttattaatacttagggcttgttgaatggagtatacttttgcagccctcccctactttgtgccatccagccgagagaggtctacaatagcagccctgattcgcgggaggaaagagcccacttcagctgcagggtggccctgttcccaggagagatttgagtctgaccccacagtggcagcaaggcagctctgtgcatgcattatctccacagcacacgtcatcgagtcagctttacttcatccagcctgattgtagaagtcacagtagacactgtgagggaatcgtgtggaattttcactggagcattctg

SEQ ID NO: 41525 - DNA, 1004 bp, Macaca Mulatta
  misc_feature (1)...(1004): n = A,T,C or G
tcaggatgaaaccgttccaactcagatcatcaggcattagagtctcataaggaatatggcaccctagatccgtcacataccagttcacaatagggttcgtacttctgtgagaatctaatgctgctgctgatctgagaggaggagatacttgctttaactttccgctgtgtggccagttggggatgcctgttttttatacagatattctaatataaattgctatttttgatgttactaacaattagtctctagggctttaaaagtctagatgaaataccgattcaaattctggtttttacaatttgtttgttggacacacagaaatctttgcaaccatcataatacatcaatatttaacctgaataatttggattcttttatttttcaggattatgttaaatttcctatattctggtataaacataatacagatctcataagtctagccttgattttactgctccctaatacagagcagttaaatttcaaaatcacatagtttgccaaaaaagaataacccatccctgtcttcttaaagtggtagggttttaaaattcatcgtacaggtaacaaagttgataacaaatattattttgaactgggcaaaatctagccccatatgtaattgtgttcctcttgtatctgagaggcctgtgttggacaatcatagtactctgcttttactgtgctcaaataacctgaaatatatagttgtttctgagtaggaaagaaccaaatttaaatttccttagcgaccatcctggagaagacacttctcaattggggcttacatttttcatctatgatcctagatagtcttctgaaagaacgactagactttttataacgatacaaagtttttaaaaaatacataaaagtaggccnnnnnnnnnnnnnnnnnnnnnnnnnnnnnnnnnnnnnnnnnnnnnnnacgggcggacnnnnnnnnnnnnnnnnnnnnnnnnnnnnnnnctacaccggnnnnnnnnnnnnnnnnnnnnnna

SEQ ID NO: 41526 - DNA, 270 bp, Macaca Mulatta
aggggtgtcggatggcatccgatgtggggagggcgcctgccatgggccagaagctcccagcagagcccaggggacagaaaggcaggggcaggcgtggcctgggccggtctccacccagaaccaccatgctcaggctcttgccatggctcagccctggtggggagagtcagccctgggggactcatgtcctgcctggtccaagccatctcctcggacgcccgaaggcttccttcttttttacttcctgcaggggcctttcctgtttctcct

SEQ ID NO: 41527 - DNA, 808 bp, Macaca Mulatta
gggcatgacttaccttatgctgtaatttgtatttcctcaggatttaagagcttcctagcataaaatctttgctaaacgtctgtatacatgttattggtgctccgaaaaatagtcagtagaatggtgtactacaattgggctttatcatcttattctgaacctcgtgtagattatagtaaagtaaacaattcagtgtgttccaggaaattatattagatctgtgtttctatcagttcactggaataatctgataattgttacttttacatggtatggctgcaagaatagtggaaagaggaggacttgagagttggttgaacccgggtttgaaatctggcttagtcatttttcagctgttatcctgggtgagttttgccaactttcttagcttcatttccctcattagagttaatagctactcttgcattgaaaattaagttagattacctgtccagcatacccatcatcatacactcaatgaaggtcacattttgtatttaaaataaactcatatgaaaaaaatttgtttttattttacacagaattatgattcttcccggggatataaattactgattagatttatatgtgggccaattcttaaagtcattgggaatgccgttttcatttcaatccccaaagttcctggtagcccagaaaaatatccccattttccctgtcggggataaattccagtaaagcccctgccaggggaaaaaaacaattgtaaatttaaaaatccgtgacctccggccattttgtcaccttgttatttattctgcccaaaaaaaaccctggcctaaaggcg

SEQ ID NO: 41528 - DNA, 2252 bp, Macaca Mulatta
  misc_feature (1)...(2252): n = A,T,C or G
ntggcagctctgcagactgagatggagaacttggccctgcatctcttctacatgcagaacattgaccaggatatgcgggacgacatccgtgtgatgaagcaagtggtgaagaaggccgagacggagaggatccgggcagaaatcgagaagaaaaagcagnnnnnnnnnnnnnnnnnnnnnnnnnnnnnnnnnnnnnnnnnnnnnnnnnnnnnnnnnnnnnnnnnnnnnnnnnnnnnnnnnnnnnnnnnnnnnnnnnnnnnnnnnnnnnnnnnnnnnnnnnnnnnnnnnnnnnnnnnnnnnnnnnnnnnnnnnnnnnnnnnnnnnnnnnnnnnnnnnnnnnnnnnnnnnnnnnnnnnnnnnnnnnnnnnnnnnnnnnnnnnnnnnnnnnnnnnnnnnnnnnnnnnnnnnnnnnnnnnnnnnnnnnnnnnnnnnnnnnnnnnnnnnnnnnnnnnnnnnnnnnnnnnnnnnnnnnnnnnnnnnnnnnnnnnnnnnnnnnnnnnnnnnnnnnnnnnnnnnnnnnnnnnnnnnnnnnnnnnnnnnnnnnnnnnnnnnnnnnnnnnnnnnnnnnnnnnnnnnnnnnnnnnnnnnnnnnnnnnnnnnnnnnnnnnnnnnnnnnnnnnnnnnnnnnnnnnnnnnnnnnnnnnnnnnnnnnnnnnnnnnnnnnnnnnnnnnnnnnnnnnnnnnnnnnnnnnnnnnnnnnnnnnnnnnnnnnnnnnnnnnnnnnnnnnnnnnnnnnnnnnnnnnnnnnnnnnnnnnnnnnnnnnnnnnnnnnnnnnnnnnnnnnnnnnnnnnnnnnnnnnnnnnnnnnnnnnnnnnnnnnnnnnnnnnnnnnnnnnnnnnnnnnnnnnnnnnnnnnnnnnnnnnnnnnnnnnnnnnnnnnnnnnnnnnnnnnnnnnnnnnnnnnnnnnnnnnnnnnnnnnnnnnnnnnnnnnnnnnnnnnnnnnnnnnnnnnnnnnnnnnnnnnnnnnnnnnnnnnnnnnnnnnnnnnnnnnnnnnnnnnnnnnnnnnnnnnnnnnnnnnnnnnnnnnnnnnnnnnnnnnnnnnnnnnnnnnnnnnnnnnnnnnnnnnnnnnnnnggggaagaagtggggcccctggagcttgaaatcaaaaggctgagcaagctgatcgaagagcacaacgccacggtggtccaggcccaggtgacctggctgcgcctgcagcaggagatggtcaaggtgacacaggagcaggaggcacagctggcctccctggannnnnnnnnnnnnnnnnnnnnnnnnnnnnnnnnnnnnnnnnnnnnnnnnnnnnnnnnnnnnnnnnnnnnnnnnnnnnnnnnnnnnnnnnnnnnnnnnnnnnnnnnnnnnnnnnnnnnnnnnnnnnnnnnnnnnnnnnnnnnnnnnnnnnnnnnnnnnnnnnnnnnnnnnnnnnnnnnnnnnnnnnnnnnnnnnnnnnnnnnnnnnnnnnnnnnnnnnnnnnnnnnnnnnnnnnnnnnnnnnnnnnnnnnnnnnnnnnnnnnnnnnnnnnnnnnnnnnnnnnnnnnnnnnnnnnnnnnnnnnnnnnnnnnnnnnnnnnnnnnnnnnnnnnnnnnnnnnnnnnnnnnnnnnnnnnnnnnnnnnnnnnnnnnnnnnnnnnnnnnnnnnnnnnnnnnnnnnnnnnnnnnnnnnnnnnnnnnnnnnnnnnnnnnnnnnnnnnnnnnnnnnnnnnnnnnnnnnnnnnnnnnnnnnnnnnnnnnnnnnnnnnnnnnnnnnnnnnnnnnnnnnnnnnnnnnnnnnnnnnnnnnnnnnnnnnnnnnnnnnnnnnnnnnnnnnnnnnnnnnnnnnnnnnnnnnnnnnnnnnnnnnnnnnnnnnnnnnnnnnnnnnnnnnnnnnnnnnnnnnnnnnnnnnnnnnnnnnnnnnnnnnnnnnnnnnnnnnnnnnnnnnnnnnnnnnnnnnnnnnnnnnnnnnnnnnnnnnnnnnnnnnnnnnnnnnnnnnnnnnnnnnnnnnnnnnnnnnnnnnnnnnnnnnnnnnnnnnnnnnnnnnnnnnnnnnnnnnnnnnnagaacctttcagagattgtggccctgcagacgaacaataagcacctgcaggccgtgaaggaggggcgctacgtgttcctgttccgctccaagcagtccctagtgctggagcgccagcgcctggacaagcggctgggtctcatcgccaccatcctggaccgcgtgcaagacgagtacccccagttccaggaggccctgcacaaaatcagccagccgatcgccaccaagctcgagt

SEQ ID NO: 41529 - DNA, 233 bp, Macaca Mulatta
tcagctttacagcagccagtgctgaatggccctgtggccctccctgttttttttgatcctggccagagaagacagagggacccggcttgggcttctgcatgttctacccctgaccccagcctcaaggggcccctcgaaggccctctctggtttctgtggggctccgtacagctttcctcatggatctaagcccccatgtttcccatctgactctgagtggatgttttgggggg

SEQ ID NO: 41530 - DNA, 635 bp, Macaca Mulatta
  misc_feature (1)...(635): n = A,T,C or G
gggaggtcacctaaatctagtggtcctgtgtgatgctctttctgccagtccctgaatctctgcagcttctcttacctgtagttaaagcacaattgcagtgacgtcgcattccgaagaaggaaggtcagcagaggctatgcatgttgtgtgatgatgagtgtttacagccaccttctcctaaaacgaaatttatactggggtggatagtattccattatgtagacttatcgactttgctaagtgctttttagacagcttaaaaattttcaagattttaaaagatgtataaggttaagtttgcaaatataatggaaatgctgtatatcttttgaagtgataaactccacgttggaattttaaagaaaacatgttgtaataatgctgttgtaagtaatattttaatgtctctctgcctgttttctatttcagcacattcattgtggtgaatgttcatagcattataactgcttagccattgaatgataacatttgttagtggaaattggaaaatttatttgtgaaattctgcagaattcatttttctatttcaatatttgctgaggttaaataaaaattttcagccnnnnnnnnnnnnnnnnnnnnnnnnnnnnnnnnnnnnnnnnnnnnnnnnnnnn

SEQ ID NO: 41531 - DNA, 866 bp, Macaca Mulatta
  misc_feature (1)...(866): n = A,T,C or G
ggnnnnnnnnnnnnnnnnnnnnnnnnnnnnnnnnnnnnnnnnnnnnnnnnnnnnnnnnnnnnnnnnnnnnnnnnnnnnnnnnnnnnnnnnnnnnnnnnnnnnnnnnnnnnnnnnnnnnnnnnnnnnnnnnnnnnnnnnnnnnnnnnnnnnnnnnnnnnnnnnnnnnnnnnnnnnnnnnnnnnnnnnnnnnnnnnnnnnnnnnnnnnnnnnnnnnnnnnnnnnnnnnnnnnnnnnnnnnnnnnnnnnnnnnnnnnnnnnnnnnnnnnnnnnnnnnnnnnnnnnnnnnnnnnnnnnnnnnnnnnnnnnnnnnnnnnnnnnnnnnnnnnnnnnnnnnnnnnnnnnnnnnnnnnnnnnnnnnnnnnnnnnnnnnnnnnnnnnnnnnnnnnnnnnnnnnnnnnnnnnnnnnnnnnnnnnnnnnnnnnnnnnnnnnnnnnnnnnnnnnnnnnnnnnnnnnnnnnnnnnnnnnnnnnnnnnnnnnnnnnnnnnnnnnnnnnnnnnnnnnnnnnnnnnnnnnnnnnnnnnnnnnnnnnnnnnnnnnnnnnnnnnnnnnnnnnnnnnnnnnnnnnnnnnnnnnnnnnnnnnnnnnnnnnnnnnnnnnnnnnnnnnnnnnnnnnnnnnnnnnnnnnnnnnnnnnnnnnnnnnnnnnnnctatcatctaaaaggctcctttcgtcctccctagtagcaagcaatttttaatcactccacatgtacctgggaaaagcccttttgcctctccaaacgtcagaggtactacctaattccgaaccacaccctctttccctaacccttaagaagtggaccttaacatggtggttgcgccccccccgcctttttaattctacccgcattttcctgaacaaaaa

SEQ ID NO: 41532 - DNA, 822 bp, Macaca Mulatta
tcattacctcatcctcaagctttgctcaacataagaggatacatacaggtgagaaacccttcttatgtttagaatgtggtaaagcctttaatagttccacaatccttactaaacataggagaattcatactggatagaaaccctacacatgtgaagaatgcggcaaagcctttagacagtctgcaatcctttatgtacataggagaattcatactggagagaaaccctacacatgtgaagaatgtggcaaaacctttagacagtctgcaaacctttctgcacataggagaattcatactggagagaaaccttacaaatgtgaagagtgtggcaaagcctttggacagtacacagacctgaatcgacataagaacattcatactcgagagaaaccttacaaatgtgaagagtgtggccaacactttgcatggcgcacagccctgaatcgacacaagaaaattcatactggagagaaaccttacaaatgtgaagaaagtggcaaagcctatgccccaccaacagacctgaatcaacacaagaaaattcttactggagagaaaccttacaaatgtgaagagtgtggcaaagcctttggtcggtccacagccctgaatcaacacaagaaaattcatgctggagagaaaccttacaaatgtgaagagagtggcaaagcctttagtaggtcaagaaaccttgctgcacataagagaatttacaccagagagaaaccctacacatgtgaaggtcgtggcagagcctttggatggtccacaaacctgaatgaatataagaaaattcatactggagataaaccgtacaaat

SEQ ID NO: 41533 - DNA, 620 bp, Macaca Mulatta
gggctggcaggtgctccctgcagtcctcagcatcagggctacctctattgacaggggatccttgggcattgaggccgtaggttttctttggtgaataaatatgtatggcttataaaacatacgtgtttctaaatttatgaaattatatgtatgtgtatacattcattcatgctttcatttaaccaacatttatttttttacatagcagaaaccacttcataactgtgagactctggataaatcatatagtttcctgagtgtcattctctcctctgtgcaatggaggtaataacgattcgctccagtgtcgtcctgcaccttgaacaagatcgtcaattttaaagggcttcatcagatgccagcccagaaggtgtacagtgggtactaacgtctcccctgacgccttcccctcacgtgcttactattcagtcacctcaattttttgctccttctacgtgcttatgctcacttcgtctatcgtatcataatatagttctatcgtaggcatctatgtacacctcggtttatattaattcaaacagcctctttccctcatctttcaaatcttttatacagatcccttaaaattacttcatactattccaaacatctctctcact

SEQ ID NO: 41534 - DNA, 185 bp, Macaca Mulatta
ccacagtcttcctgcttcttttggtgtttgggctggtaccagatctggggattttctaaagggactgggggaggggagggcattgtcaatggtggtatctttagcctgagacagaagatttttaaaggcaaaattatatttctggtttgttgtttcagaagaccaataaagactgtattttccta

SEQ ID NO: 41535 - DNA, 1104 bp, Macaca Mulatta
  misc_feature (1)...(1104): n = A,T,C or G
gcatctgtttttaaaatgattatatttgtctctgatatttgaaagcacttttgtagttttgatgatgaaaaatgttaaacatgtacatattaccattatttaagaaataattccttacatactgtgataaatcattgctgttacatacagtaacatgtcttaattatatttaatgccttactgctttatataagtaaatccaagtttcagaattaaaattaagcattatttcagatggtccagtcagatgcgttacataggctatataaatttgtctccattttcaccatcaagcacaaataattgggtcaaaactgtctgaggtctgttgaagaaaacggttcattaggcaaaaatgagtagaggtcttttatattaactgtaacagacaaattagtaatcccttaacctctgttttcaaagagaaaatacccaatttagacttttttcctgaactatacatatagcatcaaattgggaaacaaaggccaaaggtgtatagattgcttgaaagggcgtgatagtgccnnnnnnntagtgcctgtttttaagatctgttgagtcggctatagtctggctaaggaagaagcgtttgcatactgattccatcatttaatctttaaaagtatgtgttctaaaaatgtaaccagaatgattcttcaatagaaatgagatttggtggagtctggattgcctgttttnnnnnnnnnnnnnnnnnnnnnnnnnnnnnccacctcgttttctgggcattatttcctaattgttgatgtttcaggcttttgataagtcattttatatatttcaaatttcagttggaataagtatttatggcaagtggagttttatgtactttcagaagaccatcaggaaaagacaggacaaagaagtcaaacaaagcctttgcaaatattagaggaccttagccaattaccaacaagtatttaatagggaagttacaaattggttctcttagcaaattaaacatttaaaaaatagttttaatgtgccttgggcatcttgaaaggaagagtgtgatataatttatgctcagtgttaactggtcagtttacattgtatttattaagcctgcagaaaaatgaggtt

SEQ ID NO: 41536 - DNA, 622 bp, Macaca Mulatta
gtgggagcgggttaggccatgctgctttgagcaggccacttggtccatttcactgtaaggctttgccgaggtgaaaacatttcagcatcttctcctcaggtcaatccataaagaccaggtccagcaccgtggtcttagcacatccctggcctcaggccctcacccagcagtgaggcagcaactgcccagccccacagtgcgcctactgtcaggcggctcttgtttgaaactcagttccacattctttcctgatgggcaggtggctgaaggcccagccatcagtgtcacttgttgccaccctgtgcctcccctggcctctttgagctttgcccagaacaacaacaatctcatacataacctaactgggaaatcattactgcagaatgcagatgatccattctggaggaagccgtgccttgagctcagtgagctcccaggcaagcagggcatctggccgacttccctcacaacagctgctcccacatccccccggactggagcctcagccttgattgaggcaggaagaactcaggagatctgagaccacaagcgttagctcaagtagtctaccaagcatctagccactgcccaggttccagagcataccacgtatgcagtgcct

SEQ ID NO: 41537 - DNA, 654 bp, Macaca Mulatta
  misc_feature (1)...(654): n = A,T,C or G
gtggttgggctctgggctgagaccacccagccctgggcttccctgattgcctacagctgggcctctttctgggcctggcagggctgggtacagcccgcaagcgctgggctctgggcaagtctccactctcaactctgagtatctgtcatccaagcaaggctgactgatgctcacttgggagttagaaggatgggctgggggctgcacaccaccctgccctgaacacaagtgctccctgggtttcagaccccacacaagtgtggccgaggtatcaggagcaacctgaggatgaggctgggggcagcggctgagcgcttgcagatgtgtttcggcaaatggtctgagagtcacagcctcaggtgctgaggacgggattggggcggaaggcctgtgcgctgtcctcccactgagaagggatcctggggcagtatggaaggggcagctgtacctgtttgttaaattcatgtgtgtaaaataagaaacggacagacggccgnnnnnnnnnnnnnnnnnnnnnnnnnnnnnnnnnnnnnnnnnnnnnnacgggcggatcatgnnnnnnnnnnnnnannnnnnnnnnnnntaacacnnnnnnnnnnnnnnnnnnnnnnnnnnnnnnnnnnncttagccgggcgaagtggcgggcgcctgtg

SEQ ID NO: 41538 - DNA, 744 bp, Macaca Mulatta
ggggtagtggcttcgtcctccgcttttctgttcctccgctgacgtctcctagctctcgtcagcctcccgccggcagtctccttaacaccgaacaccatgccttcaattaagttgcagagttctgatggagagatatttgaagttgatgtggaaattgccaaacaatctgtgactattaagaccatgttggaagatttgggaatggatgatgaaggagatgatgacccagttcctctaccaaatgtgaatgcagcaatattaaaaaaggtcattcagtggtgcacccaccacaaggatgaccctcctcctcctgaagatgatgagaacaaagaaaagcgaacagacgatatccctgtttgggaccaagaattcctgaaagttgacccaagaacacttttttgaactcatttctgcctgcaaactactttagacatcaaaaggtttgccttgatggtaacatgccaaagactgttttgccaattatgaatccaagggggaagaacttcctggaggaagaattccccaaagaacctttccaatattccaaaaaaatgacctttttttcttggaagaagggaagggaaacccccccgggtttacccccaaaagaagaaaaaccccacttggggttggggtgaaagaaaaaaaaagttggaaaaatgtgtttttggggccccctgagaacaccctttttatacaccacctttgtttataggggggaatttttgttttctccccaaaaaa

SEQ ID NO: 41539 - DNA, 3436 bp, Macaca Mulatta
  misc_feature (1)...(3436): n = A,T,C or G
ggagtttgaccctgaggagttttaccacctgctggaggcggctgagggccatgcgcgggagggccaaggcattaagactgaccttccacagtacatcattgggcagctgggcctggccaaggaccccctggagnnnnnnnnnnnnnnnnnnnnnnnnnnnnnnnnnnnnnnnnnnnnnnnnnnnnnnnnnnnnnnnnnnnnnnnnnnnnnnnnnnnnnnnnnnnnnnnnnnnnnnnnnnnnnnnnnnnnnnnnnnnnnnnnnnnnnnnnnnnnnnnnnnnnnnnnnnnnnnnnnnnnnnnnnnnnnnnnnnnnnnnnnnnnnnnnnnnnnnnnnnnnnnnnnnnnnnnnnnnnnnnnnnnnnnnnnnnnnnnnnnnnnnnnnnnnnnnnnnnnnnnnnnnnnnnnnnnnnnnnnnnnnnnnnnnnnnnnnnnnnnnnnnnnnnnnnnnnnnnnnnnnnnnnnnnnnnnnnnnnnnnnnnnnnnnnnnnnnnnnnnnnnnnnnnnnnnnnnnnnnnnnnnnnnnnnnnnnnnnnnnnnnnnnnnnnnnnnnnnnnnnnnnnnnnnnnnnnnnnnnnnnnnnnnnnnnnnnnnnnnnnnnnnnnnnnnnnnnnnnnnnnnnnnnnnnnnnnnnnnnnnnnnnnnnnnnnnnnnnnnnnnnnnnnnnnnnnnnnnnnnnnnnnnnnnnnnnnnnnnnnnnnnnnnnnnnnnnnnnnnnnnnnnnnnnnnnnnnnnnnnnnnnnnnnnnnnnnnnnnnnnnnnnnnnnnnnnnnnnnnnnnnnnnnnnnnnnnnnnnnnnnnnnnnnnnnnnnnnnnnnnnnnnnnnnnnnnnnnnnnnnnnnnnnnnnnnnnnnnnnnnnnnnnnnnnnnnnnnnnnnnnnnnnnnnnnnnnnnnnnnnnnnnnnnnnnnnnnnnnnnnnnnnnnnnnnnnnnnnnnnnnnnnnnnnnnnnnnnnnnnnnnnnnnnnnnnnnnnnnnnnnnnnnnnnnnnnnnnnnnnnnnnnnnnnnnnnnnnnnnnnnnnnnnnnnnnnnnnnnnnnnnnnnnnnnnnnnnnnnnnnnnnnnnnnnnnnnnnnnnnnnnnnnnnnnnnnnnnnnnnnnnnnnnnnnnnnnnnnnnnnnnnnnnnnnnnnnnnnnnnnnnnnnnnnnnnnnnnnnnnnnnnnnnnnnnnnnnnnnnnnnnnnnnnnnnnnnnnnnnnnnnnnnnnnnnnnnnnnnnnnnnnnnnnnnnnnnnnnnnnnnnnnnnnnnnnnnnnnnnnnnnnnnnnnnnnnnnnnnnnnnnnnnnnnnnnnnnnnnnnnnnnnnnnnnnnnnnnnnnnnnnnnnnnnnnnnnnnnnnnnnnnnnnnnnnnnnnnnnnnnnnnnnnnnnnnnnnnnnnnnnnnnnnnnnnnnnnnnnnnnnnnnnnnnnnnnnnnnnnnnnnnnnnnnnnnnnnnnnnnnnnnnnnnnnnnnnnnnnnnnnnnnnnnnnnnnnnnnnnnnnnnnnnnnnnnnnnnnnnnnnnnnnnnnnnnnnnnnnnnnnnnnnnnnnnnnnnnnnnnnnnnnnnnnnnnnnnnnnnnnnnnnnnnnnnnnnnnnnnnnnnnnnnnnnnnnnnnnnnnnnnnnnnnnnnnnnnnnnnnnnnnnnnnnnnnnnnnnnnnnnnnnnnnnnnnnnnnnnnnnnnnnnnnnnnnnnnnnnnnnnnnnnnnnnnnnnnnnnnnnnnnnnnnnnnnnnnnnnnnnnnnnnnnnnnnnnnnnnnnnnnnnnnnnnnnnnnnnnnnnnnnnnnnnnnnnnnnnnnnnnnnnnnnnnnnnnnnnnnnnnnnnnnnnnnnnnnnnnnnnnnnnnnnnnnnnnnnnnnnnnnnnnnnnnnnnnnnnnnnnnnnnnnngcagatgatggcagcggcggccccctcatgagccccctgtccccgcgctctctgtcctcgaacccgtcgtcccgtgactcctcgccgagccgagacccgtcccccgtgtgtggcaacctgcggccccccatcgtcatccacagctccggcaagaagtacggcttcagcctgcgggcaatccgcgtctacatgggtgatagcgacgtctacgctgtgcaccacgtcgtctgnnnnnnnnnnnnnnnnnnnnnnnnnnnnnnnnnnnnnnnnnnnnnnnnnnnnnnnnnnnnnnnnnnnnnnnnnnnnnnnnnnnnnnnnnnnnnnnnnnnnnnnnnnnnnnnnnnnnnnnnnagagcggcaacaagatatccctgcggaccacggccctggagaacacctccatcaaggtgggccccgcacggaagaatgtggccaagggccgcatggcgcgcaggagcaagcggagccgtcggcgggagacccaggnnnnnnnnnnnnnnnnnnnnnnnnnnnnnnnnnnnnnnnnnnnnnnnnnnnnnnnnnnnnnnnnnnnnnnnnnnnnnnnnnnnnnnnnnnnnnnnnnnnnnnnnnnnnnnnnnnnnnnnnnnnnnnnnnnnnnnnnnnnnnnnnnnnnnnnnnnnnnnnnnnnnnnnnnnnnnnnnnnnnnnnnnnnnnnnnnnnnnnnnnnnnnnnnnnnnnnnnnnnnnnnnnnnnnnnnnnnnnnnnnnnnnnnnnnnnnnnnnnnnnnnnnnnnnnnnnnnnnnnnnnnnnnnnnnnnnnnnnnnnnnccgccccaagacgggccgtcgcaagtccaccagcagcatcccaccctccccgctggcctgcccgcccatctcnnnnnnnnnnnnnnnnnnnnnnnnnnnnnnnnnnnnnnnnnnnnnncacctgcccgatccccgcggctgcgccgaggccagtcagctgacaagctgggcacaggggagcggctggatggggaggcagggcggcgcagtcgtgggccagaagccgagctcgtggtcatgcgacggctgcacctgtccgagcgccgagactccttcaagaagcaggaggctgtgcaggaggttagcttcgatgagccgcaggaggaggccactgggctgcccgcctcagtgccacagattgccgtggagggcgaggaagctgtgccagtagctctcgggcccaccgggagagactgatccccctgccaggtctctccctggcctcaaagtcacacgtttccttgtgcaatgttttttctgtaaagtcacgcctggatggggaccgagccaccagcctgacacccagaaagcaagaagccatcttggtccttgctgggaggtggagatatcacttcccttgtgttctggtgtcaatcagggggctggatggggcaggaatgggggataagggtagctttgtaaatagcagcaaatccctgcaactaatttattacnnnnnnnnnnnnnnnnnnnnnnnnnnnnnagacggagtctcactctgttgcctgggctggagtgcagtggcgtgatctcggcgcactgcaacctccgcctcccaggttcaa

SEQ ID NO: 41540 - DNA, 299 bp, Macaca Mulatta
gcaccggctccaggagaggaatgtggccaggtgacctggggtaatcacttcatcctcacaggaagtgcttttttttggctggaataatagtgactgagctgtaaaaacaaatgcccctgccttccaggctctctgggcaagatatacccccttgggagatgactggggctgggacgaggtggggtttgttttggggattgtggcgtgccacctgtaaccttctaatctttaaactctatttgttccttttcctttaattaaacctgacaaagaaactccccagttcgtgattcccgtga

SEQ ID NO: 41541 - DNA, 729 bp, Macaca Mulatta
  misc_feature (1)...(729): n = A,T,C or G
cttgtgcaaatatctttattacgcataagcatatgaatactcatgtaataggtttcccaattctggggcactcagattgggagcaaaagcaaatgttttcaatttttgtttacaaaagtatattttaccaaattgctgtaaagtataaatagcttaaaagagaaagttcataaatctggagattaaaacattcaaagaatcaacacattctcaaataaaatattatgaaaacattatcgttttgattatttagtgcaataaaactgaggtttttttcttctttgtcttgaatttcatgaaggtatcagactgttcattaaaattttgaaagttctcagagagtccagtggtatgatcttgaagttatcaaaacttgtattcaagagtcgttgtcagaatgttttccatatatctcctcaaagaaaaagcaattttggactgtagctgattataaatacttcaaggaagaatcaaagcaactgtctgagaatgacaaagatttaaaatgactatggttaaaaatctaacgaggattttattaggttgattatggtaaagacacggctcacatagaaatctacttacttctgtggcatatgacactatgactgataacattcgatttccagaatttcacatagtgtttagaatacnnnnnnnnnnnnnnnnnncattttcnnnnnnnnnnnnnnnnnnnnnnnnnnnacctgtcggcccaggctggcgtgc

SEQ ID NO: 41542 - DNA, 748 bp, Macaca Mulatta
  misc_feature (1)...(748): n = A,T,C or G
cccgggggggtaaatttggaatttttggggtttaaagggtgggcccaagtgacnnnnnnnnnnnnnnnnnnnnnnnnnnctttgggaagaagggaaaattcggatttggggggcccccggggggttcccagttcccccaaggttaacccaaggccccatttggcccagggtggttttcggggaaaaaccccccccttcttggcccccttgtgggcgttcccagtggggggttaattcagaaatggtcccgggggggtaaatggccgggcttggcagttttttcttcacggggcggaacggaaggggtttttttgccgggggttcaacaggctttcgagggacattctttcattagggatataatctaggcatttttggggaagtttaacccaccccgggtacccgccgttctggtcacccaccaactgggttttgtaagagttgcaagaaccnnnnnnnnnnnnnnnnnnnnnnnnccttggatttagcggctgagtacttcctcttgtacatggcctttctggaatacatggcagatcgggaatacctgccaattcctctgacaaggacagggttgcggctgcaatggggcttccccttcttgggcttcttagccttgaggttaccctttttcaccttgccaccagcatcagccttcttggcttcgggtttcttctctttagtatctggcttctcaactttttcacccgccatcttgcaagatgggaaagagaactaaggtctcccc

SEQ ID NO: 41543 - DNA, 451 bp, Macaca Mulatta
  misc_feature (1)...(451): n = A,T,C or G
ttaaaatattaaaaggaatctgaaggtatgaaaagtccagtggagaaaatctcaatgcttaatgttactactaattgattcctactagtgccaggtttggggggatattatttaaatgaagctccttaagactattaattgcccataggttccaaatagaaattaataagacttatgaacatttttagaaagtagattgttttctcctggttctctaaggaactacttctgtagtcttacatagtctcatccttgtttgttgtggtgcagtcaaactcctcaggcatttggaaagcatgtggtagacctccttccacactccacccacacccaccctttccgctgcgtctggaggtcttcaccaatgaagtagggcagcccacacaagcnnctctcaggaagcanncctgtccagaggcacccggagcacttttcagagcacatccagccc

SEQ ID NO: 41544 - DNA, 258 bp, Macaca Mulatta
cctataaaagagctctttttaaaaagatgtatggaggtacttttagtcagctccgagatacagttttccatctcccatgataactacttattacaggaatgcctccaacaattaaaaacacttctaagattaactagcttacatctttagggtgcttattgtacttgaaaaaaacaagttgtaaaacagtatgtataaaagtatgatagtgtgcataatacagggaaaaaatcaaaaggaatataggaattattgttg

SEQ ID NO: 41545 - DNA, 170 bp, Macaca Mulatta
agaccaggatctcccgtctgggctgcagatgcctaagaagaaaggaactgaaccaactctggtattggggtccacagatgccaaatatggcccctggagtagaggagaagttgaggctgtggttgaagacacatctcctgtaactgatttgccagttatggtctgtgtga

SEQ ID NO: 41546 - DNA, 177 bp, Macaca Mulatta
  misc_feature (1)...(177): n = A,T,C or G
gctttattaggagatctggaaggagccaaaagggctatcgtcaagtactcaatcttgtagccagaggatctgaaacttcaaatttgctatggcttgaagtagatacattttataaaaagaaactaanaagtgctaattcttctgcttttgaatgttgaaaacattttgatagtaact

SEQ ID NO: 41547 - DNA, 1019 bp, Macaca Mulatta
  misc_feature (1)...(1019): n = A,T,C or G
cgagcgccgattacttctgggggcttcagaggcaagggtatcctgaccacgtgctgggacttcagacgagaaggcaccccgaccgggtcctggggatggcaggacaagcccagggttccgtcgtcacctttcactccctactcccgaatctcgccctgaagttgcagccagtccaggtattcatttacccataaaattaagtatctgtgagtaacacaagtcactaatccacacagatctgagtctacagatacctcccagagacgccaccatcccttctggtagaagaacagctcaggggcccacgctgctaggaagggagactgtctccagcctgacgctgcagagtcctcaacacaaagtctaccttctggaaccatgccgtctcctacagaggcaactaggggcatgtagggttttttaaaatcttttttttttcttgagacggagtctccnnnnnnnnnnnnnnnggnnnnnnnnnnnnnnntcnnnnnnnnnnnnnnnaagtgagctgaggtcacaccacggcactccggcctgcgtggnnnnnnnnnnnnnnnnnnnnnnnnnnnnnnnnnnnnnnnnnnnnnnntatattggttttttaacaggggaaaaggtcttactttttaaccacnnnnnnnnnnnnnnnnnnnnnnccaaataagcgccggggggacctgttggggtcttggaaaaccccaaaatttttggccctaaagaggggaatcatacgggatctgacaagggcgcgaacccggggcagtatataaaactggccgataaaataaaagaacgnatttgggtcccaacaaggatcaggcacaaacagggtcacagaggtcacaaatggagggagacacacacggggcgagatacaacnctcgctgctccccaggcccaagctcagctcgacacatggaggcgatcaaagaacaaatagaaaagaaagagaaaacaaacaagacaaagacnnnnnnnnnnnnngnnnnnnnnnnnnnnnnnnnnnnnnnnnaaga

SEQ ID NO: 41548 - DNA, 803 bp, Macaca Mulatta
  misc_feature (1)...(803): n = A,T,C or G
gggagtggcacgttctgtgctaagtacttcacatccattattttatttaatcctcacaaaaaacatgaggttggtactggattatctttattttattgnnnnnnnnnnnnnnnnnnnnnnnnnnnnnnnnnnnnnnngaaatggagtcttannnnnnnnnnnnnnnnnnnnnnnnnnnnngtnnnnnnnnnnnnnnnnnnnnnnnnnnnnctannnnnnnnnnnnnnnnnnnnnnnnnnnnnnnnnnnnactggcattacaggcccatgccaccacgcctggctattttttgtattttcagtnnnnnnnnnnnnnnnnnnnnnnnnnnnnnnnnnnnnnnnnnnnnnnnnnnnnnaccctcctcggcctcccaagtatggggatttcaggtgtgagccaccgtgcccagcctagaattatctttattttataaatgaggaaactggcaccaacaaaagttaagtaacttgacaaaggtcagatagttagtggcaaagctgaggctgaaatagatctgtctgattccagccctgagtccctattcttgaactattgttacactatcatcatctataaaagtgggataatgatagggctaattaatgtcagaaataaacaaatggaaggtggcccaatatggtatcatgccccgtaatctcataacctatggcaggtgcaaagaatggggtgggaatttcaaaaccagcctgtaaaacatggcaaaacttctgttcccttcaaaaaatagcaaaaaaatttcccgggccaggagggcatgcccattcgggccccaacccccccgg

SEQ ID NO: 41549 - DNA, 339 bp, Macaca Mulatta
aaccctacaaatgtgaaaaatgtggcaaagctttcaattagttctcaacccttactgaacataagggaatttatacagaagggaaaccctacaaatgtgaagaacgtggcagattttttaactcttcctcaatccttactaaacataaggtaattcatactggagggaattcctacaattgtgtggaatgtggcaaagcctttaaccagtccttaaggcttaccacatataagacaactcatactggacagaaaccatacacatgtgaagaatgtgggaaagcctctaacagatcctcaattcttaacagacacaggctaattcatactagagagaaac

SEQ ID NO: 41550 - DNA, 622 bp, Macaca Mulatta
aagaagtatctgcaggcaagtgggctccgggccccgctctgctccgggcggcagcagcttcagacgggcctcccgctgtcggacgcggcaaatctgtccgtgtgagttcataaaaggggccctgatttgagggtccaacggaaggaagccctggggcgaggggcggagcaaccgagtgccagtgtcccgcccggcaggtcctatacgcggagcgctggggcctggagccctgcgccctcccggtgatcgtgaacatcgcggctgcgccctgcgacacgctggacttcagccccctggacgagtcctcctcactcatcttctacaacgtcaacaagcacccgggcggccggcagaaggcccgaatcctgcaggccgggacgccgctggggctcatggcctatctgtactccaggtgcgtcgggagaaaagctcaccccgaaagggagacgtagccctgggtgctgaagagaggtggggagtgtgcccttgcccctcagctaggctgttcgcgctttttagtttagaaaaatgtttaatcggggtttagggtttaggccaacgtgcactagatgccgccggcagctttgcagagccccaggccagagtggcctccgccgcttgt

SEQ ID NO: 41551 - DNA, 631 bp, Macaca Mulatta
  misc_feature (1)...(631): n = A,T,C or G
ggggnnnnnnnnnnnnnnnnnnnnnnnnnnnnnnnnnnnnnnnnnnnnnnnnnnnnnnnnnnnnnnnnnnnnnnnnnnnnnnnnnnnnnnnnnnnnnnnnnnnnnnnnnnnnnnnnnnnnnnnnnnnnnnnnnnnnnnnnnnnnnnnnnnnnnnnnngcttgcaaatgatgtctttataagtaagcaaacagcagaagacccatgcgagttgcttctttcttcctggagatgttggcaggataactggaatcctaggagctcctctgtgttgaatttgagaggcagaacaaaaagaaaagtggccttttccattccaaatcatggaggtaatgtgtagagaagtgatagccacatttcaagaatagggaaagtaactgggtaaaagaagcaggactacccattctaggagacaacatagagacacttgccaagtcctgagttcagaattttgtttttgagatgaatataaaagcacctaaaggtcaaggaaaattttcttcctgtgataaggaaccttgtgaaattccatctcctggctcagaagctcccccactgagcgccttgtgacccccccacccctgcccacaagagcacaaccccctttgactgtaattttccactaacctcccc

SEQ ID NO: 41552 - DNA, 771 bp, Macaca Mulatta
  misc_feature (1)...(771): n = A,T,C or G
gggctcaggaaaccacgcctcacgcgtgctgacctgaaagttaatctttaggtcagttttgaaaaactccgcctcctctctcctttttcatatttctttctttctttttaatcctgtttaagtgaactgactctgagttataaggaactgtcctgctttgtggggaagagggctgtttcttggcaggcaaaaaagttttatcttccctactcaccatccctctctctgcctcccttgcgtttggcaggctgtgtgaagccagtgagctgtgaggtgttttgacaggggaggtctgcatgcagcctcttctttgtcctaacaattcctttgttgatcttgcctgtgataaatcatagcgcctgcattgctctggtctaggcgtcatttgcaacacacagtatcgtaagcgagagattgttctgcctatattcagtgttttccatgcagcaattcttgttgttgacgttcacagtactgtaacgagtaacagacttgatcacagtctcctcgtgcctgtgcagggctgcacaggcatgatcttatcagggttccaatctgttagattgcctttaaacnaanaaaacaaccaaaaaataaaatcctgacgtttcacctgtctcacacaaaaaaatacctcgagggaaatttccccctgcaatgtaaacccctaaagccctctctcctttgtggcatccgggggataagtcttttttaaaataagaacctgtaaattacagggaaaacattaaagaaaaattgttctttgggggg

SEQ ID NO: 41553 - DNA, 1094 bp, Macaca Mulatta
  misc_feature (1)...(1094): n = A,T,C or G
agatcgtaaagctgaaaattgaaatcatgaaagtagacaggactaaactgaagaagacacctaccgaggcnnnnnnnnnnnnnnnnnnnnnnnnnnnnnnnnnnnnnnnnnnnnnnnnnnnnnnnnnnnnnnnnnnnnnnnnnnnnnnnnnnnnnnnnnnnnnnnnnnnnnnnnnnnnnnnnnnnnnnnnnnnnnnnnnnnnnnnnnnnnnnnnnnnnnnnnnnnnnnnnnnnnnnnnnnnnnnnnnnnnnnnnnnnnnnnnnnnnnnnnnnnnnnnnnnnnnnnnnnnnnnnnnnnnnnnnnnnnnnnnnnnnnnnnnnnnnnnnnnnnnnnnnnnnnnnnnnnnnnnnnnnnnnnnnnnnnnnnnnnnnnnnnnnnnnnnnnnnnnnnnnnnnnnnnnnnnnnnnnnnnnnnnnnnnnnnnnnnnnnnnnnnnnnnnnnnnnnnnnnnnnnnnnnnnnnnnnnnnnnnnnnnnnnnnnnnnnnnnnnnnnnnnnnnnnnnnnnnnnnnnnnnnnnnnnnnnnnnnnnnnnnnnnnnnnnnnnnnnnnnnnnnnnnnnnnnnnnnnnnnnnnnnnnnnnnnnnnnnnnnnnnnnnnnnnnnnnnnnnnnnnnnnnnnnnnnnnnnnnnnnnnnnnnnnnnnnnnnnnnnnnnnnnnnnnnnnnnnnnnnnnnnnnnnnnnnnnnnnnnnnnnnnnnnnnnnnnnnnnnnnnnnnnnnnnnnnnnnnnnnnnnnnnnnnnnnnnnnnnnnnnnnnnnnnnnnnnnnnnnnnnnnnnnnnnnnnnnnnnnnnnnnnnnnnnnnnnnnnnnnnnnnnnnnnnnnnnnnnnnnnnnnnnnnnnnnnnnnnnnnnnnnnnnnnnnnnnnnnnnnnnnnnnnnnnnnnnnnnnnnnnnnnnnnnnnnnnnnnnnnnnnnnnnnnnnnnnnnnnnnnnnnnnnnnnnnnnnnnnnnnnnnnnnnnnnnnnnnnnnnnnnnnnnnnnnnnnnnngagattaaagcagcttctttacgaacattaacatcaattgtccacttggagagaactcccaaactcagcagtattattgactgtactggaactgcctcataccatgg

SEQ ID NO: 41554 - DNA, 309 bp, Macaca Mulatta
taaggatcgtcactgtgagtctgatttgaaaagagtctatggcacagattgtagaactagctgtgatcagagtacaatgaagtgtacttcagaagtgatacaaccaaacttggcaaaagcctgtcagttactcaaagactacctactgcgtggtgctccaagtgaaattcgtgaagaattagaaaagcagctttattcttgtattgctctcaaagtcacagcaaatcaaatggaaatggaacattctttgatactaaataacctaaaaacattattgtggaagaaaatttcctacactaatgactctta

SEQ ID NO: 41555 - DNA, 1157 bp, Macaca Mulatta
tttcttacattaaaaaggctgtaattaaagtcatgaagagatctggtcgtattaaatattttcacaaacttgccttaataaaaggtgaaaatgttaatgtttagtatactttatgaagcctcttgagctttgtaaatggacaggcatggggaataagaatcagtgttaatttatatgatcttatcctggtggatgtgctattttcttaaaggaggatgaagcccttttcaaactgtcatcccagtggagcagagtactcagtgaacagttactccatagtgcaatccatattaataggcttctcatcttaaaatcttcatctcttcttttgcttaattactgaaccataaattgcttcagagaaatttaaatgctggtatttgaactttatacatgatactttctgtagtttcttttaatttttgaaaggtcagctgcttccctttatacttttctcttgatttggttcaagatgtttgatcctgagtgctttgagtgatatgcggaataggagaatataaaaacaaacctgccaaatacactagaaagcatttcagtaagaaatactggcccttctttaaaacatttctcttgcatataccaaggatgggagtaaaagatgccttaatgtttaatttttgtattgttggagacattgattttaataaaatcctatttatctgctgttgtgtgcttttagttgttggataactgaggtctcctaaatggttcaacataaaaccacatttcaagtcttgtttcttttttggagtgtcttttcaagtattcaaatgtatttctcaacctgagcatctttttaatcatgtacatgggagtctttttatatgctgaatcattacacatgcttgattttaaaataataatagtagaggaaactattgtctacttgtaccaggaaaggtttctgatgtttaagtgttttgtacagtgattttgtatatgcgccccgcctttaaaaacccatgaaaactgttaagtctgggtagggaaattgtttattgcctcaagattacaccctgttgcaacttgggggcctaaattttttattgaaacatttaaccgttttaaagaaattttaaaattaattttggagctggtgtccgccaaatttttcactccgttaaacctgaacttca

SEQ ID NO: 41556 - DNA, 772 bp, Macaca Mulatta
  misc_feature (1)...(772): n = A,T,C or G
gggggacnnnnnnnnnnnnnnnnnnnnnnnnngatgaggagactagctacatggaaagcagatatctagacttctgatccaggaagaaaagtacactaattctcccaacaaccaccctaacaaaacactaaaaatggagaataaaatactgtaaatgacatattcttaaatgcatcaaaaagttagtaatgtttcacgtgtccatgtgaagagatcaccaaacaggctttgtgtgagcaacatggttgtttatttcacctggttgcaggtgggctgagtcctaaaaaggagtcagcaaaggtgatgggattatcatgaattcttataggttttgggataggcggtggagttaagagcaatattttgggggcagggggtggatctcacaaagtacattctcaaggatggggagaattacaaacaaacttcttaagggtgggggagatgataaagaacattgatcagttagggtggggtagaaacaaatcacaatggtggaatgtcatcagttaaggctattttcacttctgtggattttcagttgcttcaggccatctggatgtatatgtgcaggttactggggatatgatggcttagcttgggctcagaggcctgacaagtaaaagtatgaaattatcaagccaaagtcggaatgaagtttgcaaggcagagagataagtggagggctgcagtcatttcagtcctgagcatgtggcaagccttacaaaaagtgaagtttggtttttcatgggcctcagaggggttctgggac

SEQ ID NO: 41557 - DNA, 775 bp, Macaca Mulatta
  misc_feature (1)...(775): n = A,T,C or G
cattctgggccncgaaaggaaaaacaaatttaaccctggacaggcatatgaggccaacaaaaacaggttaaaaaaaatcatatatttatnnnnnnnnnnnnnnnnnncttaatccttatcaatttaaggaaaccacgattttcctttttcatttaaatacgtaggtaaaaatgcctctatattgttatttagacatcattttcttccaaagaaaatgaagtgcagggacaagagacctggtggatataagttcataccctcagttataaatgcnnnnnnnnnnnnnnnnnnnnaagttttataaaaaactatttcttgttctttaagtaaagaacattatacaaagaaaatatattgtgaaataccccagannnnnnnnnnnnnnnnnnnngaaagatatgtccattctaggaaatggtgtggggtgggggtcgggggtgcagagtagggcctagtccctgttgtcatttttgtggttgttattgtttctggaaggactctcgggtgccaatgaggctctctaagccataatcctctgaatgcagggcatgcagctccttaaaagacagacagccctgggagaaagagaagggaatatgttctgaattcatttgactcagtttctcgcctgccaagaatctcttccaagcagtgatggttcctcactcattcagggataagatgatgtcatcttccaaatcagagttgtcagagctgtcagtgtcccccaggatcagttccacctcctcatctgcatcagagtcttcatcctccc

SEQ ID NO: 41558 - DNA, 744 bp, Macaca Mulatta
  misc_feature (1)...(744): n = A,T,C or G
ggattcagggctttattgttatgaacagctttataactaacaacatgtctttaagatcaggtagtggttaaaatagtgagctggggccaggagtgnnnnnnnnnnnnnnnnnnnnnnnnnnnnnnnnnnnnnngggagggcnnnnnnnnnnnnnnnnnnnnnnnnnnnnnnnnnnnnnnnnnnnnnnncnnnnnnnnnnnnnnnnnnnnngcaaaaattagcccagtgtggtggtgnnnnnnnnnnnnnnnnnnnnnnnnnnnnnnnnnnnnncaacaatctcttgaacccgggaggcagaggctacagtgcactgagatcacaccactgcactgcagcctggttgacaaagcgaggnnnnnnnnnnnnnnnnnnnnnnnnnnntagtgagttgtaaaagcaatgaacagtcgctttctggccaggaattgtagaccagggccttttaacaaatgatctggaaggaaacttatcaacagcagtgaagatggaaagatattctgcaagagctctgtcttcagagggcactgtcatttctgcctatggaaaagaatgcctgtctcataacagtgcaggctgtgctcctttgaaacccgaaaataaagtaaaggtccttgacctgttgggctaaaaagcttcccagacaaaccaagctccgggtacagaaagaaagctatttccaagggctcacccatccccaaggtactccagaataatttctcaaaaagggaataccgaaagggc

SEQ ID NO: 41559 - DNA, 90 bp, Macaca Mulatta
atatgtacacgcacaaacacttcacgaatgagagagccctgacttcacctgcagctcagtgcaccaaggccccgtggaggagtgaggccc

SEQ ID NO: 41560 - DNA, 522 bp, Macaca Mulatta
gtgccttggtcccggagactttggaaggcccacgtcctggatgtgagttaggatgaggggagggccagcccctcacgccctctctcagttgcggggaagcaggctgaatggctggtcagcccaccgtaccatttggtcctctggggagcactccagtgtgcccgatccgtttccctgagctccatcactatgataaagtcctgttgaggcccctctattcccatttccaccaggaaaacctaagaaaccaaaccagggccacctctccttcccagcagaggctcccaaggccccagggctgtttctgcccacgccacatccccacggcccactcgcactgctgcagccccctcacatccgggaggggagcgtgggctaccggttgcttctcaccaggccctggctcctggcttcctggggggtcctggggtcctggggaaacagtgcctgctctgccccagtctcctccctcaggctgtggggtagaaggggcggggcggggaggtgcgcagcgtggcgtgt

SEQ ID NO: 41561 - DNA, 157 bp, Macaca Mulatta
gttctgtgctttattatgaagaataatggacgatgatgatgcaaagctcaaagcagaaatagaagctgaattggataaactcagcatttcctccttggaaaaagaggacattgagagtgattcaaaatcagaaacccagagtgatgatagtgataca

SEQ ID NO: 41562 - DNA, 1097 bp, Macaca Mulatta
  misc_feature (1)...(1097): n = A,T,C or G
ggnnnnnnnnnnnnnnnnnnnnnnnnnnnnnnnnnnnnnnnnnnnnnnnnnnnnnnnnnnnnnnnnnnnnnnnnnnnnnnnnnnnnnnnnntacgccctactcgtcacacaactaccaactttcataaactagctaagcaatcctctatgacagctcagtagtatgggactcccttaaaaccaaaaattccaacccccccccacaaaaggacaccccccccttcacccaggttttacaacccaaatatacacccatctttcaacattacctacccttcaactaannnnataaacccctagccgtaaaaataaaccccaaaatttcaagccgccctgtgaatacactatcggaaccgttttaaccttaaaccccacaccnnnnnnnnnnnnnannnnnnnnnnnnnaacccccccctctgggatnnnnnnnnnnnnnnnnnnnnnntggnttgggaaaacccaatttaaccccctcttccccccctaaatannnnnnnnnnnnnnnnnnnnnttgnggtgttgnnnnnnnnnnnnnnnnnnnnnnnnnnnnnnnnnnnnnnnnnnnnnnnnnnnnnnnnnnccaacaaatataatatattataaaggagnanntatatataaattatttttttcgcgcgccccccannnnnnnnnnnnnnnnnnnnttattcttaacatataataaagtaaaaagaaacaattatatgacccataagcatgaactttgttgcattataatagataaaatagaactgctgcgagcatatataaacataaatatcaaactagtatgatggatagtttatatatcaacccaccagatantcgtcatggttgatttattgaggggagggcagagaataactataaatactacctctccctcgcgcccgctccgctatgagcgttgtatggtgttatattatnggtgggattatgtggntactaaactcatatagatacgtgttgttcactattgatntcactattactaatgtaatctttatacgcgtcaaatgttatacacaaatgtaataattactattattataaatcagatacactgatcgantatatgcttctcaaatctaactcac

SEQ ID NO: 41563 - DNA, 788 bp, Macaca Mulatta
  misc_feature (1)...(788): n = A,T,C or G
gggattcaggggctgccggctttgttgggtgtgcttggtttggtgtccctgcggctgaccgtgattggtgattcgcagcatcttcgtaaccgctaacaggtcaaaatgcagnnnnnnnnnnnnnnnnnnnnnnnnnnnnnnnnnnnnnnnnnnnnnnnnnnnnnnnnnnnnnnnnnnnnnnnnnnnnnnnnnnnnnnnnnnnnnnnnnnnnnnnnnnnnnnnnnnnnnnnnnnnnnnnnnnnnnnnnnnnnnnnnnnnnnnnnnnnnnnnnnnnnnnnnnnnnnnnnnnnnnnnnnnnnnnnnnnnnnnnnnnnnnnnnnnnnnnnnnnnnnnnnnnnnnnnnnnnnnnnnnnnnnnnnnnnnnnnnnnnnnnnnnnnnnnnnnnnnnnnnnnnnnnnnnnnnnnnnnnnnnnnnnnnnnnnnnnnnnnnnnnnnnnnnnnnnnnnnnnnnnnnnnnnnnnnnnnnnnnnnnnnnnnnnnnnnnnnnnnnnnnnnnnnnnnnnnnnnnnnnnnnnnnnnnnnnnnnnnnnnnnnnnnnnnnnnnnnnnnnnnnnnnnnnnnnnnnnnnnnnnnnnnnnnnnnnnnnnnnnnnnnnnnnnnnnnnnnnnnnnnnnnnnnnnnnnnnnnnnnnnnnnnnnnnnnnnnnnnnnnnnnnnnnnnnnnnnnnnnnnnnnncccccgaaccaagcaaaggcgtcatccttttgcaaggcaaagccagctgggaaaaattggcccgccacctccttttcttgaacttatcaacatttccaaggaaagggggttca

SEQ ID NO: 41564 - DNA, 874 bp, Macaca Mulatta
tgactctgagaaacagctcctcagtgccttaatttatccttgtggggttatcggaacagccggagctccttctccctcttttccttctgttcttagggatctatgtgctcactgtggtgggcaacctgggcttgatcaccctaattgggacaaatccgagccttcacacccccatgtactttttcctcttcaatttgtcctttatagatctctgttattcctgtgtgtttacccccaaaatgctgaatgactttgtgtcagaaagtatcatctcttatgtgggatgcatgactcagctatttttcttctgtttcttcgtcaattctgagtgctatgtgttggtatcaatggcctatgatcgctatatggccatctgcaaccccctgctgtacatggtctccatgtccccaagggtctgctttctgctgatgtttggttcatatgtggtagggtttgctggggccatggcccacactggaagcatgctgagattgagcttctgtgattccaacgtcattgaccattatctgtgtgaagttctccccctcttgcagctctcctgcaccagcacacatatcaatgagctggtatttttcattgttgttggagtaatcatcacgctatccagcttaagcatcgtcatctcttacgctttgatactctccaacatcctccgtattccttctgcagagggcagatccaaagcctttagcacatgtagctcccatataattgctgttgctctgttttttgggtcaggggcattcacctacttcacagcatcttttcccagctctgtgaaccatggcagatttgcctcagtcttttataccaatgtggttcccatgcttaaccctttgatctacagtttgag

SEQ ID NO: 41565 - DNA, 603 bp, Macaca Mulatta
tgaataaaaaagatttgaagaaaaggccgagccgtcgcgtgcctagcatgctgcgtggaagctgaagctttatctcccgcatgacccctctggtcagccgggcccctcagatgagaattgcacccaggccagcaccagccgctaagccgccagcagcggcacccccatctgcagttggctgtcctgctgctgcgcctcagcagccaggtctgatggcccagatggcaaccactgcagctggcgtggctgtgggctctgctgtcgggcacacactgggtcacaccattactgggggatttagtggaggaagtaatgctgagcctgcgagacctgacattacttaccaggagcctcagggagcccagctggtacagcagcagcagcctttcttctatgcgatcaaacaggttttggagtgtgccgagaaccaggatgacatcaagctctgtgagggtttcaatgaggtgctgaaacagtgctgacttgcaaaaggattggcctaatcaagaagttcaacctggagaaatgggaaatcagctctataaccaagttaatttagtataaaaatagaattgatagtgggtataaagtgtaaccattagt

SEQ ID NO: 41566 - DNA, 542 bp, Macaca Mulatta
tagcactttattaataaacacgacgagtaaagttgtcacatttatatgtactatctacccaagagtaagtataaaattatctttgtttatatgtaccacagcatttttgacaatgctaagcatgttaaatacatatgttaatggaaaatggtaattgaatagactgtattaaaaagtcatggacttaatagagtctcctttggaatatggacatgttctaatgtcaaactgtaaaactttgcaggttagaatacctgtgtgataaagtgtcaatggataatgcagtagctttcatgatgggatactttatggttagtggattttcactgtttgctcatttaatatatattgagtactcatgtgccctgaaacccatgttaatgacaaagctaggcctcaaatgtctatttctcagcataatgatctgcctcacaaagctcttgtgaaatcagttgggaaaaagctgtctacagtgaatattgacaactaggccaaaactgaatctagtccacttgtgagaattttttatttctatatactgt

SEQ ID NO: 41567 - DNA, 696 bp, Macaca Mulatta
  misc_feature (1)...(696): n = A,T,C or G
tcacgnnnnnnnnnnnnnnnnnnnnnnnnnnntaacacggtgaaacccgtctctactgaaaaatacaaaaaactagccgggtgaggtggtgggcnnnnnnnnnnnnnnnnnnnnnannnnnnnnnnnnnnnnnnnngcgtgaacccgagaggcgnnnnnnnnnnnnnnnnnnnnnncgnnnnnnnnnnnnnnnnnnnnnnngnnnnnnnnnnnnnnnnnnnnnnnnnnnnnnnnnnaaactaatctttgctataaggaaaatgccattttaaaagttcttgtatggcttagttttcattgctctgctctgaatgagctatataatgggtgtttttccttctttctctgttcttgagtgtcacttattccttcaagatgtgctgaccaccatgttttagaaacagagctggaggctagcgatacaggaatatttgatctctgatctcagtatgcccacagtttggtggggatacagagaaacaaagaaagcatatttctttttctctgagtttttaggtcagagtgggaatgcattacttagtcctatgagtaaatcaataaacttgaatttagagtgataatacttgctggttttacacttatttctgtgcctttggcaggagagaggcaaatatcgttgagtgtgtgaatctggtactgttcaggagggtatgctcaagaggcttgtatggtagc

SEQ ID NO: 41568 - DNA, 625 bp, Macaca Mulatta
tttatattgtcttagttaagaattctcccctagtttttctattgtactttatcctgttgttttcaatgagataagtattgtcatagaaaaagcattttccggcataatatttgcttgggtagattttttgttttattattaatattaaccaagagccttttacatatttaaaacccatagttcagaaaatgctagtattgctgcccttcttcacataaatttttaaaagaattatactataattttgcttcattttatattggcttaaaacagccttcaagaaagttaactaggaaagaagaccttttcgttttatttttactgtttatatatagaagacaaatcagcatttggggttagttttacatgaccagttatcaaatggtcatagtatgaagtgtgcagttgttcgttattagtaaattatgtttgatttttaaactatttagtactaatagttgagatgaaaactgaagaaaaatgccaatgtgatgtttgtgtatagctagccttaaaaaacttcccatgtttttaggtgattttttcccccctcttagttctctggagaaacaatgaagatgggccatttcaattccagatgtaaacaaaaagtaatttttattta

SEQ ID NO: 41569 - DNA, 638 bp, Macaca Mulatta
aaagtagcattttcctacatggtcaactatctggaacatacctaaacactgggagtttactgcttattaaatggaaactatgaagtctaaggccaactatggccagaatccaaattgtaacataatgatatttcatccaaccaaagaagagtttaatgattttgataaatatattgcttacatggaatcccaaggtgcacacagagctggcttggctaagatagttccacccaaagaatggaaagccagagagacctatgataacatcagtgaaatcttaatagccactcccctccaacaggtggcctctgggcgggcaggggtgtttactcaataccataaaaaaaagaaagccatgaccgtgggggagtatcgccacttggcaaacagtaaaaaatatcaaactccaccacaccagaatttcgaagatttggagcgaaaatactggaagaaccgcatctataattcaccaatttatggtgctgacatcagtggctccttgtttgatgaaaacactaaacagtggaatcttgggcacctgggaacaattgaggacctgtggaaaaggaatgtggggttgtcatagaaggcgttaacacaccctactgtaatttggcatgtggaagaccacatttgct

SEQ ID NO: 41570 - DNA, 579 bp, Macaca Mulatta
acgcgattcccttttgcccttctttctgcgggcctttctggtacttgagcggtgtccagagcgtgaccagttctcgtctatccggctgtctttaaggagcgatgactagcgttggccaatagttggctgtcgaaagtgccggcccccgcgccggcgcctgcagcagccgggtgggaaggctcaagatggcgtgcctgttagagaccccgagtccgcatgagcgtcctttcggaagtaacagctagcagtcgccactatgttgacaggctatttgaccctgatccccagaaagttctacaaggtgtactagacatgaaaaatgctgtcattggaaacaacaagcagaaagccaatctcattgtttaaggagctgttccaagattgttggtacttgcttcagcaagaaacctcaagcacagagctgaaacctgaatgtgcagtggtgttgggaagtcttgctatgggtactgaaaacaatgtcaagtctactaactggactgcccatattatcgctgccttattgcaaggactactgtccccagacctgaagttaattgaagcttgcctctgatgcctgcg

SEQ ID NO: 41571 - DNA, 392 bp, Macaca Mulatta
attacaagattttcagctttttccttgtccagaaaaaacactgaaaggtttgcaagaagctcagtaccgtttggtaactgagatacagaagcagaccactggattggctttgcaaggtaaagatgtacttggagcggccaaaactcgatctggcaagactttggctttccttgttccagtgcaggaagccttatatcgtctgcaatggacctcaacagatgggctgggagttctcataatatcacctatgagagaactggcctatcagaactttgaggttctccaaaaagtgggaaagaatcatggcttctcagctggtctcatcattggtgcaaaggatctgaaacacgaagctgagaggatcagcaacataaatatacttgtgtgcacac

SEQ ID NO: 41572 - DNA, 643 bp, Macaca Mulatta
  misc_feature (1)...(643): n = A,T,C or G
ataactatgtgaaacgattctaaatctttgaactttgtaatatattttaatatttattgtggttagtctgttttcattgttttctttaaagaactgtcctgcctattcttctatgttaatttcttaaacttagaatcggcttatgtaatttaaaatgttttatcgctattattctttatacttagtgtacaaagaaaaaaaggtttagctggacaaggtggttctggcctgtaataccagctactcaggaggatgaggcagaagaagcacttgaacctgggaggtggagactgcagtgaactgagattccacaactgaactccagcctaggcaannnnnnnnnnnnnnnnnnnnnnnnnnnnnnnnnnnnngcattttgtaacagtgaagccttctatccaagaaggttgttttttcatttaagactcattttatgccttttaatattttagttttctttttataacttctactttttttactgtaaatggactatttaatattagattacataaggagctcttctttataaataaagcaattaaacattacatattagagcatcaagatgggtaattataattaaatagcactgtataattgagtgctcttaggttctccaccatactatcatatttgcgaa

SEQ ID NO: 41573 - DNA, 687 bp, Macaca Mulatta
  misc_feature (1)...(687): n = A,T,C or G
agtcatgctatannnnnnnnnnnnnnnnnnagtttataaatatttatgctcaaaatacagatcaactgaatatttttggtcttgtttacaagataaatcatactttaaaatgatacaggcccctcaagtgtcttaggaaaaagtcattggtgctataaaacctttcaatatcatttttgaacccattgttcagactctgctaggttttaatctgattgcttgtgatttttgataatgtagcagcagcataattataaaagtggtctctgatgtgtggataaagagctcagcccattagaaacactttgtaatttaagaatatgatgcagaatgaccttacatttacttgtgcccagcttcccaaaaagaaaattgttttgttaagaggaaggcagttaatttggctagaatccaaaaactcattcagcatggctgtttttcccttatttcaaatgaaaaacttttctaatactaaaatacataatcctgctttgctttaaattcccatatccatcactcaagaggaggcatagtgattcttaaatattcatagaacatttggtgagttgtaaagagatgtattattgcattgtaggtttttgcattgatgtgtcgattttttgttttgtccccaagattccttccagcacttaatgaatgttcacatgataaatgtttaagtatcat

SEQ ID NO: 41574 - DNA, 508 bp, Macaca Mulatta
caagctaatactgaagacttgactgaaatatcatgtatctagcctacagtattgtacttaactgttacaggtgagaagacagttctctgtttgcactgattatgatattctgaataaatatggaatatattttaatgtatatccagaagtttttcagtaagcttgtctttttctataatgtcatacagaaattaaatatcactttattctgttaattattttcaagcttctgtgtctgttctgtgatttttatcctccatcgcacagtttcctttctcctaagaaattccttctctgttccacttttagccagttgcccaaagtagaaaggacaacttgcttttcaagcagctggttattttaccgagaggggaagcctccctagtctgtgcaaacacagtgaagaggttcccacgttggtatcttgagtctttacatctcctctgacctcacatactgtatgtaaagctagacaggacaactgctgcagaagctggcacagatgggc

SEQ ID NO: 41575 - DNA, 431 bp, Macaca Mulatta
caggcggaggcgcgggccgcgctggtccgggccgccgacaccctggaggatgtctacaaccgcacccagagcctgctggccgagcgcggcctgctccagctgacctaggacagcggctgcggggaccggcgggaacgcagcggatcgcccggggtagggccgcgcagcccgaggtcagctccgcagccggcgccgcggccgcctccgtatcccgcctcttccgtaacgtcgcggcggcgagggctgcccccggcagggaatggcgttgagctccctctgtccgcagtctcggaaagacagcaggagctgtgaggaataaaaagtatttggcagcatcgacgtagggcgttttgtgtgatgacgacaggcgcttaagggaaattaaaaacgaatgtgagaagatgtgtcatctctgttcccggcagccgaga

SEQ ID NO: 41576 - DNA, 790 bp, Macaca Mulatta
ggcatgttagccacgatgatctcgatctcgtgacctcatgatctgcacggatggccttaatcttgatcatgtcttggatgtgaggttttaaaaaatcaaccttattactaaagacatttctcaattttatcttttgctggttggaaattaaaaatagttactttttgcaatctcacttacaagctagcaagttcctttgaggactgtcttttttgtagtacctttgtaaatgtagctaacagaaactaagacaaactagtaccattttgtttcctgtcctcttcacttaagtttacaagttcattaagtacatgatctgcctttctggaaaaactagacttaaacaatgcaacttttgaattcaaaatcagagaaatagcagaataagcgtttgacaaaatctaatacccattcgtgataaaaacagtcaacaaactaggaatagtagaaaaattcctcaacccaaaaagcagcatttacaaaaaccccaaaactaatatcatatttagtggtgaaagactaaatgcattccccctaagatcaggaacagagaaaacatctactctcatcatttctattcaaccttgtattagagatttagtgatgatagtgaggcaaggaaaccaattgaaagcttctagattggaaaggaagaagggatactcacttatttttagatggcatgatcttgtatgtagaaaatcttaagcaatctaaaagcactcttgcaactagtgaacaagttcagcaatgttgcaggatacaagataataggcaaaaaaatcattgt

SEQ ID NO: 41577 - DNA, 347 bp, Macaca Mulatta
atgacaaagaaaagaaggaacaacggtcgtgccaaaaagggccgcggccatgtgcagcctattcgctgcactaactgtgcccgatgcgtgcccaaggacaaggccattaagaaattcgtcattcgaaacatagtggaggccgcagaggtcagggacatttctgaagcgagcgtatttgatgcctatgtgcttcccaagctgtatgtgaagctgcattactgtgtgagtcgtgcaattcacagcaaagtagtcaggaatcgatctcatgaagcccgcaaggaccgaacaccccctccccgatttagacctgcgggtgctgccccacgtcccccaccaaagcccatgta

SEQ ID NO: 41578 - DNA, 265 bp, Macaca Mulatta
ttggagcaggctaagtgtgactgtcatatctttaatgggactgagcgggtgcggtacctgaacagatacatccataaaagggaggagaaccgtgtgagtgtcatatcttcaatgcgtgtgagcgggtgcagtacctgaacagaaacatccataaatgggagggaggagaacctgcgcttcaacagcgatgtgggggagttccaggaggtgagggaactggggtggcctgtcacagagttacaattatggggtttttgagagcttc

SEQ ID NO: 41579 - DNA, 780 bp, Macaca Mulatta
  misc_feature (1)...(780): n = A,T,C or G
gggaaaccnnnnnnnnnnnnnnnnnnnnnnnnnnnnnnnnnnnnnnnnnnnnnnnnnnnnnnnnnnnnnnnngatcatagaaagataataatcatataaaaagattacacattgacatctacccagaggtgggtgaaccctgcaacggtcttttacaaaatgttgtcatgactagtgctcattcgctggtcatcttcagcctacgtcttcttttcccagaaacagaagcaaaatttttcctttgggaaagtcattttgtcctgttctcaaccatgcagctatcatatgcagctgaccccatcccctacacaaggggccagccataactgactctaggcaatcaacatgtctgattccactggccacaagttgggatggaacatgatccaatttgacctaatgagagcaagttctaggtttctgaaaaaattatctgaagggtgtgccacaaagatataaagtctagaagcacttctttcatctggctaccataggaaaagagcctagagcaccctatgagttgaaactgacaccatggaaggcacactgaagacatgctacaaactcagtcctggttacnaagctgagtgcctgcatcagtcttcatgtaaaacatacccacagccaataagccaattttaattggtttcttttccccttccnnncntctcagtcannnnnnnnnnnnnnnnnnnnnnnnnnnnnnnnnnnnnnnnnnnnnnnnnnnnnnnnnnnnnnnnnnnnnnnnnnnnnnnnnnnnnnnnnnnnnnnnnnnnnnnn

SEQ ID NO: 41580 - DNA, 566 bp, Macaca Mulatta
  misc_feature (1)...(566): n = A,T,C or G
ggttcctaaccaggtagcaaggagctccctacaaggctgacctaatgaagggaggagccaatctggctctcagctccaccagtttagggaacataaaagaagaaggcaaagcagtctctcaacattcatcttcctggaagtgttaaggcccgaagagggaaaagttcaacaagaaaccatcatcaggattcacagttcaccacaatctcctacaacaacagtactactcatcataagattaaaaatcggccagacgcannnnnnnnnnnnnnnnnnnnnnnnnnnnnnnnnnactgaggcaggcnnnnnnnnnnnnnnngnnnnnnnnnnnnnnannnnnnnnnnnnnttnnnnnnnnnnnnnnnnnnnnnnnnnnnnnnnnnnnnnnncgtggtggcaggtnnnnnnnnnnnnnnnnnnnnnnnntgctaaggcagaagaattgcttaaacccagaaggcnnnnnnnnnnnnnnnnnnnnnnnacgccattgcactccagtctgggcaacaagagtgaannnnnnnnnnnnnnnnnnnnnnnnnnnnnnnnnnnnanaacatgtc

SEQ ID NO: 41581 - DNA, 354 bp, Macaca Mulatta
atgcccaactctgccatggacaccagagtcctctcctgtgtggtcatctgtcttctggggacaggtctctcaaatgccggcatcacacagaacccaagacacctggtcaggaggaggggacaggaggcaagactgagatgcagcccaatgaaaggacacagtcatgtttattggtatcggcagctcccagaggaaggtctgaaattcatggtttatctccagaaagaaaaaatcatagatgagtcaggaatgccaaaggaatggttttctgctgaatttcccaaagaaggccccagcatcctgaggatccagcaggcagagcaagaagactcagcagcttatttctgtgccagc

SEQ ID NO: 41582 - DNA, 688 bp, Macaca Mulatta
  misc_feature (1)...(688): n = A,T,C or G
gttgtgcaccctacagttgatttcctctgtgaaatacagtatttgtttatcaaaaggcaaaaatcttcatcactcagaaacagaaagtaaatgaattctgaaagcatttctgggttgtttttttggttttggttttcgtttgggttttttgtttannnnnnnnnnnnnnnnnnnnnnnncagtctcannnnnnnnnnnnnnnnnnnnnnnnnnnnnnnnnnnnnnnnnnnnnnnnnnnnnnntgagttcaagcagttctnnnnnnnnnnnnnnnnnnnnnnnaggattacaggtgcccgccaccacgcctgactaattttttgcatttttttaatagagacagagtttcaccatcttggccatnnnnnnnnnnnnnntnnnnnnnnnnnnnnnannnnnnnnnnnnnnnnnnnnnnnnnnnnnnnnnnnnnnnnnntaccatgctggccatcatttctgtgtttaatatctgcagtgcctcaaagtgtttacattttatcactctatatccatccttaatgcttaaaagctttagaagtatgttatatatagttctgctgtggcatttattttcatatttgtaagtcctagctttgctgctaaaccgtgagctcttggaatgccagaggcacagttatcttgcacgtcattgtattcttaagcactaacatatgtctggatgccttac

SEQ ID NO: 41583 - DNA, 700 bp, Macaca Mulatta
  misc_feature (1)...(700): n = A,T,C or G
cgggagccaatagcatctctcagtacacagagtgacctgctgatacccttaagtaaagacaanacatacctcatctanaaggaaggtaaacaaaagaggcaaaaataatattgctagtttctaggatggctgaatgttttctaaaccagaaatggttagaaaggaactttattgcaccaagtcaatcataagccagtttgcagttcacaggcattttaattcaaccttgagtcacaaaaaaaacaacacactgcaagaatacagtctgcattaaataagatatcggcattgtggtctgggaaaacctcctcttgccaggtcaaggcagggtctgagcttagccctgccatgaaaatgaatttgtgggttatcagtaaacagtatgaggactacacagatgccagcatcctgctgccaaggaggacatggggcaagagttgaagatttatttgagagcaaatgaacttgaagagacatacacaacaccaaaaggaaaagggggctggaatcaagttcagccaaagcacctaacacaaaaaacaggtgagctttggtcagtctgttcttcaaaatatgtatgaccataatatggtgaagtttcataattttccaactcaagatacaatgatcctcagttctatacttttgcctctattctcttataagaatatgtcacatacagtatgacataacagttaat

SEQ ID NO: 41584 - DNA, 642 bp, Macaca Mulatta
ggctgttacgggcacggcacagacctgttcttgcctcctgggtcgcgcccgtcatgtggatttacgacatcacagacctcagggtagctggccagggggtcccctgagaggtgggtgttgaacagctcccagatgctctctggtcaaccaggcttcctcagtcaaagacacaggtcccttcaatattggcttttggggagaagatgagtgccgaagccacactgcggtaaatgcacgtatcgcaagattcctgtgatttgttttggaacccaaaacagaacgtgtcgctcacaggcgggctcatggggaagtggaagtggaatggaaggctctagaagtagacactgctgtcgctcagcccctccctggtggggaggtgggggcagccgtctacctgctggccgcctccaggctggccctgatcatggccgtccttccttccttccttcctgcagggggacccgaggaccacctcgagaggctgctacgtgatgtgaacccacactcctcatccacacacctttctttacccagagccactgaaaactatttttatatcattggctttctttagttcttgatacatttctagagaatttctaagcaaactgccagaacgtgtgggtgggtatcctccagcct

SEQ ID NO: 41585 - DNA, 778 bp, Macaca Mulatta
  misc_feature (1)...(778): n = A,T,C or G
ggcatagtggcacgtgcctgtactcctnnnnnnnnnnnnnnnnnnnnnnnnnnnnnnnnnnnnaccaggaaggcgtnnnnnnnnnnnnnnnnnnnnnacgctactgcattnnnnnnnnnnnnnnctnnnnnnnnnnnnnnnnnnnnnnnnnnnnnnnnnnnnnncaaaacccagcnnnnnnnnnnnnnnnnnnnnnnnnnnnntggcactctgggtggcggaggcaggagtatcacctgggcccagannnnnnnnnnnnnnnnnnnnnntatggtaagaccctgttctccacataaattttaaaatattagccaagtggttgggtgtggtggctcatgcctggccaggcgattacctcttaaacctgagctttcaatttatattctcttcaggagcaaccacaatctcttaatctactgacaactggggagaaagaaggcataatcatacccagaaaccacccacggttctgcatgctgatcagagatattgaaaaggcggcatccaaggttctcaacatccctcagccgccccttctcgtgncaataggtagccatatacatccattcctagaaaaggaggacacagaagaggtgtttttaagcagaagaaacagggggtcccacatacagggagtagccacccaatatcaggacccccatgtttgaggccccaagcttcctggcaagggggctaagacccctttaacaccattcacaggggctcccttccccaccttaactgtttttccaagtttttccctaacaaaaaggggaac

SEQ ID NO: 41586 - DNA, 848 bp, Macaca Mulatta
  misc_feature (1)...(848): n = A,T,C or G
ggggcagggtcttgcctgtttgtcactatagtaccctcttacctgcctttctttgtgttagttcatgaaatatttctggagagcatgagagaagttatccaagcaggaaannnnnnnnnnnnnnnnnnnnngtatgtcaagaaatcaagggagaatcgaatttgatatcaaggattaaatatgagtatatgatgctggaggggaagagaagaagacactacggctggtgttgttcacaggagcctgtttccacagtaggtaaaactggccactcagaagaactaagctcccatgctctgtggaacattttcccagtgaagaatcctgatgcccattaagggagggagggacaagaaatagagctctgcacctcccatcttcaaagtactgaggtgggtgtgtgatgacaggtggtgctaaattaaaaggcacattgattctgtctgccatggtaacaaatgatgcccagtgctctgtggtttgcagcaacaaagctttgcttctgttggatgtgacttcccttgggatacaggctgacaggacccctgtttataacatgctacctcttatggcaaagggctttctgtttaaatgtggcataaatttatatccatttccccctttattgggcccaagccaacttaccttggccaaccccctacgtccactaagaacagggcctgcactatttttttttcccattcacaaaaccctcccattttccctggccccccccggaaagggaacgtacatgttccttgtntgccccccacccgcagcgccagtttagcacctctccaaatcctctatacaccccctcattacctcgccccccccccagacctttc

SEQ ID NO: 41587 - DNA, 489 bp, Macaca Mulatta
acctcgccaagatcatggtagacatccgggcccaatatgacgagatggctcggaagaaccgagagaagctagacaagtactggtctcagcagattgaggagagcaccacagtggtcaccacacagtccgccgaggttggagctgctgagacgacgctcacagagctgagacgtacattccagtccttgccgatcaacctggactccatgagaaatctgaaggccagcttggagaacagcctgagggaggtggaggcccgctacgccctacagatggagcagctcaatgggatcctgctgcacctggagtcagagctggcacagacccggacagagggacagcgacaggcccaggagtatgaggccctgctgaacatcaaggtcaagatggaagctgagattgccaccgaccgctgcctgctggaagatggcgaggaattcaatcttggtgatgccttggacagcagcaactccacgcaaaccatccaaa

SEQ ID NO: 41588 - DNA, 728 bp, Macaca Mulatta
ctactaccagttcttcatttaatcatctgtaccagttggcaccacatgcccagacaaccaccatggctgcctacacgctggtgctgatccaccacagagagagcacgtggaacctggagaactgcttcagtggctggtacaatgccaacctgagcccggtaggccacgaggaagcaaagtaccgcaggcaggcactgggagatgctggctccaaatctgatatctgcttctcctcagtgcagaagagagtggtcttgacaatctggacagtgctagatgccactgatcagatgtggctgccagtaatgaggacttgacacctcaataagggcactgtgggtgtctgactgcagtcaataaagcagaaactgccgcaaagcatggcgaggccctggtaaagatctggaggtgttcctgtgatgtcccaccacctctgatgaagcccaaccatcctttctacagcaacatcagtaaggatcacaggtatgcagatgtcactgaagatcagctaccctcctgtgagagtctgaatgatgctaccaccagaactctgctcttttggaatgaagaaatagctccccagatcaaggaggggaaatgggtactgattgaagcccatggaaacagccttccaaccattgtcaagcatctggaaggtctctgaagaggctatcatggagctgaacctgtcaactggttattcccattgtctatgaattggacaagga

SEQ ID NO: 41589 - DNA, 551 bp, Macaca Mulatta
ggcagaaggaggggacatttctgtcacaggaacatgctcatataaacatagttacctgtccttgactatcaccatggctgtcaggtgattctgggctcctggggcccaaggagtgttaggttttgaggaatgtgccataggtgatgtgtcctgctaacacgcagatgctgctccaaaaagttagttgatatgacacagtcacagacaatcagaacagtcagcagcccaagaaaggtccccatagctgctgtgctgggtagcacttgccatccagtttctagagtgatgaaatgctctctctgtaccgttcaatacagtaggcactggcactagccacatgtgccaactaagcacttgaaatgtggccagtgcaatgaggaattgaacttttaattgcatttaataaactacatgtaaatagtcacatgtggtcagtggttaccatattgaacagtgcaggtagatcctggactgggggcagatctgagggacaggggtttgagtagcgggaggacactgggaataggggcttggggctatttacctgccat

SEQ ID NO: 41590 - DNA, 691 bp, Macaca Mulatta
actttcgctttgctgatctgtagcctgtctcatactgagtgtcaaagagacactgagtgtcaaagaaggaagtaaacatctttgggcagatttaatttctgactgtgttgggaagggaagtaacatgatgggtgcaagatacacagaatggaacatcggggcttggactcacgttcctcatctgtgaagccagggcattgcctgagtggtccatagggtcctttctggctctaacattctacacttttaggattttaattcctgattgacatttggctaagcagaagacacctgattagagaccacctattaccatctctctctctctagggacgaccggagtgagcactggcctgggagtctgaagactgtgccttcagacctacttcgtcacttactagctggcgactttggtcaatcatctagtttttccgggccttatgttccttatatgtgactactaagaggctactagattagaggattacagatccttctgactcttaatttccagtggtcagattaaaaattagtttgctaataatggctatgttaaagagctctgaccttggagtcagtttatggctccacatccaagctcagccactcactagttttgcttttcacccaacccctctatgccgtggtttccttttctgttaaatggggatatctgctctgtttacctcag

SEQ ID NO: 41591 - DNA, 78 bp, Macaca Mulatta
agtttgccccattctgtttgtagagtctcatagttggactttctagcatatatgtatccattttcttatgctgtaaaa

SEQ ID NO: 41592 - DNA, 808 bp, Macaca Mulatta
  misc_feature (1)...(808): n = A,T,C or G
ggatagacatgctttgtagtgaactatagtagcaataatttctgtacctgatcaagagtttattgcagcctttcttttccnnnnnnnnnnnnnnnnnnnnttagtattaacaaatggcaacgcgtagaaaagttaacatgaagattttagaaggagagaacttacaggacacagatttgtgattctttggctgtgacactattggatgtgattctaaaagcttttattgagcattgtcaaatttgtaagcttcatagggatggacatcatatctataatgcccttctatatgtgctaccatagatgtgacatttttgaccttaatatcgtctttgaaaatgttaaattgagaaacctgttaacttatattttatgaattggcacattgtattacttactgcaagagatatttcattttcagcacagtgcaaaagttctttaaaatgcnnnnnnnnnnnnnnnnnnnnnnnnnnnnnnnnnnnnnnnnnnnnnnnnnnnnnnnnnnnnnnnnnnnnnnnnnnnnnnnnnnnnnnnnnnnnnnnnnnnnnnnnnnnnnnnnnnnnnnnnnnnnnnnnnnnnnnnnnnnnnnnnnnnnnnngaccnnnnnnnnnnnnnnnnnnnnnnnnnnnnnnnnnnnnnggggccccccggcttttttccaaaaaaaacacagggggccaaaaccaggttcttttgaaaannnnnnnnnnnnnnnnnnnnnnggcgggggggacctccccnnnnnnnnnnnnnnnnnnnnnnggagggaaacttccggagggtctttaaaccgggctacaaggaggag

SEQ ID NO: 41593 - DNA, 341 bp, Macaca Mulatta
  misc_feature (1)...(341): n = A,T,C or G
atggcggtcatggcgccccgaaccctcctcctggtgctctcaggggtcctggccctgacccannnnggctcgcactccatgaggtatttctacaccgccgtgtcccggcccggccgcgggcagccccgcttcatcgccgtgggctacgtggacgacacgcagttacatgcggttcgacagcgacgccgagagtccgaggatggagccgcgggcgccgtgggtggagcaggaggggccggagtattgggaccgggagacacagaacatgaagaccgcgacacagacctaccgagtgaacctgcggaccctgctccgctactacaaccagagcgaggccggtg

SEQ ID NO: 41594 - DNA, 265 bp, Macaca Mulatta
aattttgagactgaagaagtagaactttccttctccaagaatggagaagacctaggtgtggcgttctggatcaacaaggaatccctggcagaccgggcccttctaccccatgtcctctgcaaaaattgtgttgtagaattaaactttggtcagaaggaggagcccttcttcccaccaccagaagagtttgtgttcattcatgctgtgcctgttgaggagcgtgtgcgcactgcagtccctcccaagaccatagaggaatgtgagg

SEQ ID NO: 41595 - DNA, 808 bp, Macaca Mulatta
  misc_feature (1)...(808): n = A,T,C or G
ggcatggtggcacgtgcctgtagtctcagtnnnnnnnnnnnnnnnnnnnnnnnnnnnnnnnnnnnnnnnnnnnnnnnnnnnnnnnnnnnnnnnnnnnacaccactgcattccagcctaggcgacacagcgaggnnnnnnnnnnnnnnnnnnnnnnnnnnnnnnnnntttgtataggaaaatatcaacaaattttgtcaatatgtatcactgctagaatatcactgatctaaatagtttacaaaccatttttgttgaacttttggcatacaaataacaagcatcactggtaccaccacctgacagcactagatgaagatttttacttaaagttgattggggccgggcgcagnnnnnnnnnnnnnnnnnnnnnnnnnnnnnnnnnnnnnnnnngggcggatcacaaggtcaggagatcgagaccacannnnnnnnnnnnnnnnnnnnnnnnnnnnnnnnnntanccgggcgcggtggcgggcannnnnnnnnnnnnnnnnnnnnnnnntnnnnnnnnnnnnnnngcggnnnnnnnnnnnnngnnnnnnnnnnnnnnnnnnnnnngcnnnnnnnnnnnnnnnnnnnnnnnnnnncatgagacacnnnnnnnnnnnnnnnnnnnnnnnnnnnnnnnnngttgattggacaggaagtttgaaatccacacttactagtagggtggacactaagatcttgaatgcctagatttatatgactttaagtgctttgccctcataccctgtggcttacaatttatagaggatttgcattttttaaaactttccagaatcctttgaaagtttgcatcta

SEQ ID NO: 41596 - DNA, 1214 bp, Macaca Mulatta
  misc_feature (1)...(1214): n = A,T,C or G
gggaagtggttaacttgaaaagtttctgattttaataaatgcttaaatacttattggagaagtagggtagtattaagccaaatgtaaacccacataggttgttctaactaacacaaactgaaaaaaggtcatttcttttgcccgatgatcagaatcgttgccagtcttgtctgggggaggctgtaggagnnnnnnnnnnnnnnnnnnnngggagtcgnnnnnnnnnnnnnnnnnnnnnnnnnnntcccnnnnnnnnnnnnnnnnnnnnnnnnnnntccagacnnnnnnnnnnnnnnnnnnnnnnnnnnnnncagctgggattaaggcgcccacaagtacactcagcnnnnnnnnnnnnnnnnnnnnnaagatggggtattcaccatgttgggcccaggattggtcatcaaaactctttgaccctcgtagatactgagcccatacttcgaaccttccccaaaagatggctaggggaactaacagagttgttggaggcctatttcgccgcctccacagcccatataaaaggacgacacctcttatttgaaaaagtaaataaaaaaattcttttatttaacactgggatctcacttatttcacaaaaaaatttggctgcttgagggaggttccncatattactccccacttcggggatgtaacacccccctccagcaagaaagtacctaatagtgcgttcaaaaattgtatggcggacaaagaaatgaacttttgcggaggaaggataacacctcgggagagaaantttttgctcgcaacatcaaacacctggtcttccccccccgctgtgggcgaaacatgcgccgaaacacgcatcttctattttttactttttaccatccgagggagtgggtnttagtagtgcacataaattgcagatgccgcctctcggtacacagcaaacactgtctttttttttttangacatcacatgcgcggaggtacttaagatgttactctttcactgcacaccattancacccgcaactttcttgaataatgactacccttacctgcattatgtgtttatagagaaagaggagcgccccctaatatctgccacagaactgataacattgaactctcttctctaccacatgtaattttgtgggaagatcatacactcggcgctcttcccctccatgtatgtccctccgaccaagatattataaacagtatgaaactactctatctgn

SEQ ID NO: 41597 - DNA, 790 bp, Macaca Mulatta
  misc_feature (1)...(790): n = A,T,C or G
ggcataaattaatctttacctttagagtcaaatgattttgtaaggttgccaagccaattcaatacggaaaaatacatttgtaacaaatgctgctaagacaattgaatatccacaagcaagttgaaattctcactcacaccatatacataattagctcaaaataatcatatatccaaatgtaagctctaaatagaccaaatccatagtagataatatataaaaacgtaatttgggtctaaagttaaacaataactcctataatttctaagatatgatacttaaagcccaacaaaaataaataaacatgaatatattaactttataagaattaaaatcttctgggattcaaagtacatcattaaaagtaaaaagataatgcaaagaatagaaatattcacaatcacatagaaggagctattatccataacatacaaaatattttacaactcaaaataaaaaggcaagtatcacaatcaaattggtaaactatctgaatagacatgtatccagagatactatattcatgtctcgtaagcacatgatatgggggctaagtcttttgtcattaagaaaatgcaactctaagcaaccatgagatacacttcacaaatctaacgggtatattgtgaaaaaaangtaaatttaaaaaggcaaaatactttgtgagattttggtgatgtgacactctgggatgtgaaaaagccgagagatnataaaatggtatttactaggaagcttggaaagagaggcagggtcaaactggtgagggtacangcagaatcgcctcctg

SEQ ID NO: 41598 - DNA, 647 bp, Macaca Mulatta
  misc_feature (1)...(647): n = A,T,C or G
gggcaacagagtgacaactattacttaatgcaacattttggaaagtcaacaactgatggaaacaaactcctcacagggtggaatgaactataattaagacaacttctgaatggctagtttctcctgtggacacatgaccaaaaccactgaaaccactctatgtttatttctccctattacctgttcttctcttaggttggtaaatgtgggacactgagggaaattaaccttctctacaactggacagaagaacgtagagggatatgttttccactggatcattcaaacagtttgtataattcagcatcatacacaaagttattgatcagaattttgagaccactaacaatgacacataaaaaaacaggaagaaaactattcattttacctaagacagctgaattagtaaaaatatgtttcctaaaccaatgtaaaatcagaaaacaaactccccacaattttggtaatttctaccccagtccaaatttagacacaaattatggtactattagaaattagcctaaattaatatgacatttgctcactgtaataccagattcattnaaaaacgtaactgtttcctnnnnnnnnnnnnnnnnnnnnnnnnnnnnnnnnnnnnnnnnnnnnnnnnnnnnnnnntcgccgcc

SEQ ID NO: 41599 - DNA, 669 bp, Macaca Mulatta
ggggacatcccattagaaggagcattgaggagtaggtaccagcttgccatggcctgtgggccggggtatcttcaaggccttacagctccactttcttctgccagattagagaatcagccatatattgaagggccctggctccgggcctgcggtcagaccaacgtgtcctgcagggtggtgaaggggaagctggtagaggtaggcaagtggccatggcaggtgagcatcctgttcctgggcacgtacatctgcagtggctccctcatccaccaccagtggatcctcacggctgcgcactgcttgcagagatccaaggaccccaacctgtacaccgtgatggtgggagtccaccacctcccagaaaatggcactcaactcccgctcattcgcatgacgattcataaggatttcagcaatcttgtgtctcaggacattgccctcctaaagctcagaaactccatcccatggacccccctcgtccagcccgtctgcctccctaacatcaatttcaagccatccattggaagcattgtgctgggtaattgggttggggaactaacggggaaaaactggacccccagtacttcctacagctttcacaaggggctgtcagaatttttaacattaatccgctaactcgttaaattttccttctgaagaaataaaata

SEQ ID NO: 41600 - DNA, 664 bp, Macaca Mulatta
ctttgttttgttttctctcgtaagttacttgtgtttttgaacacagcacagatcttaaaaggtgaaacagtaaagcaagacaggtcagcagagagacaggatagtattatcaccaatgtggtggactgggagaagccagaaggctaaccttgactgtgaaggaattgcggtggctttcaggaaggagatgacatctcagccttaaaggacaaggaaaatttcatgaagggtgaaagcaatagtatcctccgggcatcaagaagtgcccagcagatgtgagaacccttggatgtttaaaaaggtacagagagggcttcttggtgcagagctggcactcggcagttgttagttacccagggttcccgtgacgggttgtcagtgggtgtaaaggaatgtgaggcggtaggtataggttgggggcataccgttaccatcttgactgagacagttaacgccaacattttagtttggagtttattctttagttacagacaaaaagctgttggagtggaagagtagcataatgaatttctctcctttctttctgtctctctcggatgctaattttgacacaagcagaaagggtggattggcgaaggcgaggactctcataggtgagagggaagcctctagttgcattaacagagagagggcacatgaaagg

SEQ ID NO: 41601 - DNA, 277 bp, Macaca Mulatta
gggagctggagctgaggcgccgcgcggagcgcgcacctcagccctgagcctggcggcggccggcatcgctgtcttttctccttctccccaatatggcagcggcggacggcggcgggcccggcggggcctctgtggggactaaggaggatggcggaggcgtcggccacaggacggtgtacttgtttgaccggcgcgaaaaggagtccgagctcggggaccggtctctgcaggtcggggagcgctcggactacgcgggatttcgcgcctctgtgtgtca

SEQ ID NO: 41602 - DNA, 131 bp, Macaca Mulatta
agctcgaggattggagttcctgatgatcctagggacggagtcctacaccaacactgtaatgacccccaagggcatctcctgtaacccgtacaaccacctgatcttcatctggggcaactttctcctgcaga

SEQ ID NO: 41603 - DNA, 218 bp, Macaca Mulatta
tccatgttgacggggctctactctcccacttctggaaacatcatcatcaatggcaagaacctacagacagacctgtcgagggtcagaatggagctgggtgtgtgtctgcagcaggacatcctgttggacaacctcaccgtccaggaacatctgctgctctttgcttccataaagtctccacagttgaccaaaaaggagctgcatcagcaagtcaatca

SEQ ID NO: 41604 - DNA, 817 bp, Macaca Mulatta
  misc_feature (1)...(817): n = A,T,C or G
ggtcaagaatcctggagagaaaagataggtactaaagcctcgctagtgatttgcctggttgccgacccccgcaactcacccaccctacatgcacgcttcagactcttccgggcagatgctccctgcctgacacacagtgacactttgggaaaaattgcagaacagtaaccaactctaagcagagaaatgtgatgtcaaaatgatagtaatgagagatgtcatttgttgaaaccctgctagctgccatgcactatactatttcttacatctaaatctgataagttgtaccccattttataaatagacactttaactctgataagtaaacctatgcaagatcaaaatactgagaaatgtcctaactggggatttgaacctggttctaaattccgaagtccaagctacatccacgccaacctcctacctctcatctccgggactttgtgagtagaaaaacaagtgttgcttctctcctcttttttctgtccaagactgacactgacactnnnnnnnnnnnnnnnnnnnnnnnnnnnnnnnnnnnnnnnnnnnnnnnnnnnnnnnnnnnnnnnnnnnnnnnnnnnnnnnnnnnnnnnnnnnnnnnnnnnnnnnnnnnnnnnnnnnnnnnnnnnnnnnnnnnnnnnnnnnnnnnnnnnnnnnnnnnnnnnnnnnnnnnnnnnnnnnnnnnnnnnnnnnnnnnnnnnnnnnnnnnnnnnnnnnnnnnnnnnnnnnnnnnnnnnnnnnnnnnnnnnnnnnnnnnnnnnnnnnnnnnnnnnnnnnnnnnnnnnnnnnnnnnnnnnnnnnnnnnnnnnnnnnnnnn

SEQ ID NO: 41605 - DNA, 806 bp, Macaca Mulatta
  misc_feature (1)...(806): n = A,T,C or G
gggccaagaaaatagaaatggaaatcagatctatttatcagcttgcaattaataaactgtcacttgagcagaccttcagctgaacgctccacgagtctcctccttgagtctttccaatagtctgcatggcccatagagaggagcgtctcagctcttgcctcctccatgcccagcctcagagcaaggatctggggtctgttttgctcaatttaatgcaagggcaaacgtggcactgccccatgggacagagtgatgtgtttctttccctcccaaacctgtcatattttgagtctgaaaggagaaatcaaaagcaggctctctctnnnnnnnnnnnnnnnnnnnnnatgtgtttatttacccagctcctgagttatttatcaaagcgtactctgtgcagcagcccgccggagcacctgatctccttgcctgtgccgcctcgatttacattttgtttattacatccagcacactggagcgagcactagacccgagccagccagaacaaatgtgcttggagcaagatctttatccgctgtgttgggtttgggatatttttcatgcagggnatcccttcatgggtgttttttggtgactgagcaaatggtgttcttttcattaaaacctgtatacagtgtgggcctaacnggtttgggctgggttggtggaaactttttgctctgcccgcctgttgtgtaatagagattttttctggggatgaagtcaatggtttaatgtcccacaaattttttaaccacaagtgaatggcaaaaaagattctttaaaacaccctaccaggggagccttct

SEQ ID NO: 41606 - DNA, 752 bp, Macaca Mulatta
ggttaatgagttttcctacagagatacttatgtgcagaggcaataaattgactgctttgtgattgatcaccttgaaaaaaatgagcatgcctggatatattagtcctttcttgcactgctataaagagatacctgaggctgggtaatttataaagaaaagagatttaattgtctcatggttctgcaggctctacaggaagcatagcaacttctgctctggggaggcctcaggaaatttacaatcatggtagaaggtgaagaagaagtaggcagatcttacatggcttgagcagaagcaggagagagtgggaagaaggcgccacacacttttaaaccaccagatctcacaaaaactcgttgtcacgaggaaaacacccaggggggttggtatgaaaccatgagaaactgccccaaagatacaatcaccttctatcaggccctaccaccagcactggggattacatttcagcatgagatttgggtaggagcagattcagaccataccactagcactgtgcttatcagatgaatatcaccagttggaaggctagattctacaagaggaagaatgtccctggaaattggtctttaagttgtgattcttctgcacactgtcattcaggggattatgagtcactcatccctccccagtaagctcaatcaacccagattatcccgaccaccagagactgaggttgtagcctgaaaaaggttctccgcattttctatgaaggcccaatgggaaagccctg

SEQ ID NO: 41607 - DNA, 1156 bp, Macaca Mulatta
  misc_feature (1)...(1156): n = A,T,C or G
ccactcccggggggacgttccgtgccgcggccgccgcggccgccgcttctttcacacttgagttgggagctgcgcgccgcgctcagttactggagagctggccgcgcgccgccgcctcccgcacgcttgcacgcgggcccggcttcggggttttgggttcttactccgagcggcagggaggagggggagcccaggacacactgtggnnnnnnnnnnnnnnnnnnnnnnnnnnnnnnnnnnnnnnnnnnnnnnnnnnnnnnnnnnnnnnnnnnnnnnnnnnnnnnnnnnnnnnnnnnnnnnnnnnnnnnnnnnnnnnnnnnnnnnnnnnnnnnnnnnnnnnnnnnnnnnnnnnnnnnnnnnnnnnnnnnnnnntgtccctgtgtctgtagagatgatttacagttcagcccggctgaagctgaccgaatgagactatgggctgtgcctccgccaagcatgttgccactgttcaaaatgaagaggaagcccagaaagggaaaaactaccagaatggagatgtgtttggcggtgagnnnnnnnnnnnnnnnnnnnnnnnnnnnnnnnnnnnnnnnnnnnnnnnnnnnnnnnnnnnnnnnnnnnnnnnnnnnnnnnnnnnnnnnnnnnnnnnnnnnnnnnnnnnnnnnnnnnnnnnnnnnnnnnnnnnnnnnnnnnnnnnnnnnnnnnnnnnnnnnnnnnnnngcatgcacatctctgaaagccaacaagaattcttcagaatgctggatgaaaaaattgaaaaggggtcgggattactgttcggaagaagaggatatcacatagcaccaattttaccactcaaaccaggagctactactgtgtaaataggttacaccccagttgaaatctttgcaaaggtcggttctattcagcgaacagcactatagcaaaagaagatcgttccatatcgtacgccccattaaattacagtgtttcttaatgaacttgcaaaggaatattgctnnnnnnnnnnnnnnnnnntgttatcgaactttctttgttgctgctagttaaaacttgttgcaacttttcacttctcttgtgtccaggtatgcagcaaaattctgcaatttcaccttaaagatactgttggttttacagatgctctccaacctattttctataagatgaggtagtg

SEQ ID NO: 41608 - DNA, 813 bp, Macaca Mulatta
  misc_feature (1)...(813): n = A,T,C or G
aaatgctatcaatatcaaatatctcccccaggacactctcacatgctttgagccccactctctctcagggcctctcaccccagagcttgctaaatagtaggagacatgcaaatagagccctccctctgcttatgaaaaccagcccagccctgaccctgcagctctgggagaggaggcccagacctggcattntcaggtgttttcacttggtgatcaggactgaacacacaggactcaccatggagtcatggctgagctgggtttttcttgttgctattttaaaaggtaatacatacagaaatagaaaaagttgagtgtgagtgaatcagagtgagataaactggatatgtgtggcagtttctgaccagggtttctttttgtttgcaggtgtccagtgtgaggtgcagctggtagagtctgggggaggcttggtccagcctggcgggtccctgaggctctcctgtgcaacctctggattcaccttcagtaactactggatgttctgggtccgccaggctccagggaaggggctggagtgggtctcaagtattagtggtagcagtagtagcacatactacccagactctgtcaagggccgatttaccatctccagagacaacgccaagaacacgctgtatctgcaaatgaacagcccgagagccgaggacacggctgtctattactgtgcgagagacacagtgaggggaagtcagtgtgagcccagacacaaacctccctgcagaaacgttcaggcgaaatcagtggcagggggtgctcaggacccactgatcagagtcaacccagaggaaggtg

SEQ ID NO: 41609 - DNA, 478 bp, Macaca Mulatta
aaggaagcaactgtctttagcaaatagaagatcataaacatccttctggagatcttgagatgttgactgcggtttatagggcaatgaaaatctgcctacctgagtgggcaatgagacgggagtgccacctgtgatccttccagggagcaattctttctggtgccaggagcccaaaggaaactcagtcaaccagctacagatgggcttgctccgagtttgttctagaagtcagaactgccagctctgaaaataggtcacaagtgacaggccgtccctgggctgctcacaggaagtagctgcaaaggtcagggaaagtttttaacgactatacaggccagtgaatgacaggctttgaggagcttctcttcttggcatctgaaacaggcacgtggaggagctgccttggagacagaatgacagctgtggtgatgtgagcctgattcctcagtcccataaaacagatacctttgcaaaaaaa

SEQ ID NO: 41610 - DNA, 3202 bp, Macaca Mulatta
  misc_feature (1)...(3202): n = A,T,C or G
agggctgtatgacaaatgttcttatacctcacgtgaccgaggatgggtcgtgggcattcacaccatcagtgaccaaggcaacagagacccacgctactttttctccttgaagacagaccgggctcggcaagtgaccaccatcaatgcccaccgcagctacctcccaggccagtgggtatatctagctgccacctatgatgggcggttcatgaagctctatgtaaatggtgcgcaggtggccacctctggggagcaagtgggtggcatattcagcccactgacccagaagtgcaaagtgctcatgttagggggcagtgccctgaatcacaactaccggggctacatcgagcacttcagtctgtggaaggtggccaggactcagcgggagatactgtctgacatggaaacccatggcacccacactgctctacctcaactcctcctccaggagaactgggacaatgtgaagcatgcctggtcccccatgaaggatggcagcagccccaaagtggaattcagcaatgcccacggctttctgctggacacaagtttggagcctcctctgtgcggacagacgttgtgtgacaacacagaggtcatcgccagctacaatcagctcccgagttccgccagccnnnnnnnnnnnnnnnnnnnnnnnnnnnnnnnnnnnnnnnnnnnnnnnnnnnnnnnnnnnnnnnnnnnnnnnnnnnnnnnnnnnnnnnnnnnnnnnnnnnnnnnnnnnnnnnnnnnnnnnnnnnnnnnnnnnnnnnnnnnnnnnnnnnnnnnnnnnnnnnnnnnnnnnnnnnnnnnnnnnnnnnnnnnnnnnnnnnnnnnnnnnnnnnnnnnnnnnnnnnnnnnnnnnnnnnnnnnnnnnnnnnnnnnnnnnnnnnnnnnnnnnnnnnnnnnnnnnncctgcgccaccccgccttcatgaagaagcaacagaacggggtgtgtgacatggactgcaactatgaacggttcaactttgatggtggagagtgctgtgaccctaaaatcaccgatgtcactcagacttgctttgaccccgactctccacacagncagagcctacttggatgttaatgagctgaagaacattcttagattggatggatcaacacatctcaatattttctttgcaaactcctcagaggaggagttggcaggagtagcaacttggccatgggacaaggaggctctaatgcacttaggtgnnnnnnnnnnnnnnnnnnnnnnnnnnnnnnnnnnnnnnnnnnnnnnnnnnnnnnnnnnnnnnnnnnnnnnnnnnnnnnnnnnnnnnnnnnnnnnnnnnnnnnnnnnnnnnnnnnnnnnnnnnnnnnnnnnnnnnnnnnnnnnnnnnnnnnnnnnnnnnnnnnnnnnnnnnnnnnnnnnnnnnnnnnnnnnnnnnnnnnnnnnnnnnnnnnnnnnnnnnnnnnnnnnnnnnnnnnnnnnnnnnnnnnnnnnnnnnnnnnnnnnnnnnnnnnnnnnnnnnnnnnnnnnnnnnnnnnnnnnnnnnnnnnnnnnnnnnnnnnnnnnnnnnnnnnnnnnnnnnnnnnnnnnnnnnnnnnnnnnnnnnnnnnnnnnnnnnnnnnnnnnnnnnnnnnnnnnnnnnnnnnnnnnnnnnnnnnnnnnnnnnnnnnnnnnnnnnnnnnnnnnnnnnnnnnnnnnnnnnnnnnnnnnnnnnnnnnnnnnnnnnagagaattgggatcagcatgtgatctttgcctggaagggagaatcctggtacagtatgctttcaacgcctcctccccaatgccctgcagcccatcaggacactggagccctcgtgaagcagaaggtnnnnnnnnnnnnnnnnnnnnnnnnnnnnnnnnnnnnnnnnnnnnnnnnnnnnnnnnnnnnnnnnnnnnnnnnnnnnnnnnnnnnnnnnnnnnnnnnnnnnnnnnnnnnnnnnnnnnnnnnnnnnnnnnnnnnnnnnnnnnnnnnnnnnnnnnnnnnnnnnnnnnnnnnnnnnnnnnnnnnnnnnnnnnnnnnnnnnnnnnnnnnnnnnnnnnnnnnnnnnnnnnnnnnnnnnnnnnnnnnnnnnnnnnnnnnnnnnnnnnnnnnnnnnnnnnnnnnnnnnnnnnnnnnnnnnnnnnnnnnnnnnnnnnnnnnnnnnnnnnnnnnnnnnnnnnnnnnnnnnnnnnnnnnnnnnnnnnnnnnnnnnnnnnnnnnnnnnnnnnnnnnnnnnnnnnnnnnnnnnnnnnnnnnnnnnnnnnnnnnnnnnnnnnnnnnnnnnnnnnnnnnnnnnnnnnnnnnnnnnnnnnnnnnnnnnnnnnnnnnnnnnnnnnnnnnnnnnnnnnnnnnnnnnnnnnnnnnnnnnnnnnnnnnnnnnnnnnnnnnnnnnnnnnnnnnnnnnnnnnnnnnnnnnnnnnnnnnnnnnnnnnnnnnnnnnnnnnnnnnnnnnnnnnnnnnnnnnnnnnnnnnnnagaccaaggtgaagaatgcgatgacttgaacaagatcaatggtgacggctgctcccttttctgccgacaagaagtttccttcaattgtattgnnnnnnnnnnnnnnnnnnnnnnnnnnnnnnnnnnnnnnnnnnnnnnnnnnnnnnnnnnnnnnnnnnnnnnnnnnnnnnnnnnnnnnnnnnnnnnnnnnnnnnnnnnnnnnnnnnnnnnnnnnnnnnnnnnnnnnnnnnnnnnnnnnnnnnnnnnnnnnnnnnnnnnnnnnnnnnnnnnnnnnnnnnnnnnnnnnnnnnnnnnnnnnnnnnnnnnnnnnnnnnnnnnnnnnnnnnnnnnnnnnnnnnnnnnnnnnnnnnnnnnnnnnnnnnnnnnnnnnnnnnnnnnnnnnnnnnnnnnnnnnnnnnnnnnnnnnnnnnnnnnnnnnnnnnnnnnnnnnnnnnnnnnnnnnnnnnnnnnnnnnnnnnnnnnnnnnnnnnnnnnnnnnnnnnnnnnnnnnnnnnnnnnnnnnnnnnnnnnnnnnnnnnnnnnnnnnnnnnnnnnaggcctccatgtcctgagctgcaggaacaatccccctgattatccctgtggtccatgacttcagccagcccttctaccacagccaggcggtacgtgtgagcttcagttcgcccctggtcgccatctcgggggtggccctccgctccttcgacaactttgaccccgtcaccctgagcagctgccagagaggggagacctacagccctgccgagcagag

SEQ ID NO: 41611 - DNA, 602 bp, Macaca Mulatta
  misc_feature (1)...(602): n = A,T,C or G
aggttaaatgtatctttagaatacagtatgaagaggtcttgtatattcaaaggcnnnnnnnnnnnnnnnnnnnnnnnnnnnnnnnnnnnnnnnnnnnnnnnnnnnnnnnnnnnnnnnnnnnnnnnnnnnnnnnnnnnnnnnnnnnnnnnnnnnnnnnnnnnnnnnnnnnnnnnnnnnnnnnnnnnnnnnnnnnnnnnnnnnnnnnnnnnnnnnnnnnnnnnnnnnnnnnnnnnnnnnnnnnnnnnnnnnnnnnnnnnnnnnnnnnnnnnnnnnnnnnnnnnnnnnnnnnnnnnnnnnnnnnnnnnnnnnnnnnnnnnnnnnnnnnnnnnnnnnnnnnnnnnnnnnnnnnnnnnnnnnnnnnnnnnnnnnnnnnnnnnnnnnnnnnnnnnnnnnnnnnnnnnnnnnnnnnnnnnnnnnnnnnnnnnnnnnnnnnnnnnnnnnnnnnnnnnnnnnnnnnnnnnnnnnnnnnnnnnnnnnnnnnnnnnnnattaggcacagggcttgtgccctgaaggacactgcacatgctatcattgcggctgaattagatccagaatttaataaactttgtgaggaaattaaggaagcaagaataaaaagag

SEQ ID NO: 41612 - DNA, 776 bp, Macaca Mulatta
  misc_feature (1)...(776): n = A,T,C or G
ggcatggtggctcatnnnnnnnnnnnnnnnnnnnnnnnnnnnnnnnnngggcggatcacaaggtcaggagattgagaccatcctgctgaacacannnnnnnnnnnnnnnnnnnnnnnnnngaaaaaattagccgggtgtggtggcaagcgcctatagtcccagccnnnnnnnnnnnnnnnnnnnnnnnnnnacgtgaagccaggaggcggagcttacagtgagctgagatcgcgcctnnnnnnnnnnnnnnnnnnnnnnngagctaaactccatcnnnnnnnnnnnnnnnnnnnnnnnnnntgatgaagagtcacaaaacaggagaagatatttgcaacacatgcaacaaagaattttcaggcgttatataatataaattttataagtcaactgaagaaaaacccaatagaaaaaggagtcaagaaagaaataggcaattcacagaaggaaaagcccaaatgaccaagaaatataaaaatatagtcaacatttcaggaaatcaggagcctaagttaaaacaatcaccacccacctgaatggaagaaattcaagtctggcaattccaaatactggagagcatacagagcaatggaaactcttactaccctgccaaaagacagtgcaactgccactactgttttggaagttannnnnnnnnnnnnnnnnnnnnnnnnnnnnnnncagagatttatattataccttttcatgtatacccccatgtgaaaagcctaccaaaagccattcccggcaatagaaaatacattattttccttgc

SEQ ID NO: 41613 - DNA, 684 bp, Macaca Mulatta
  misc_feature (1)...(684): n = A,T,C or G
gggnnnnnnnnnnnnnnnnnnnnnnnnnnnnnnnnnnnnnnnnnnnnnnnnnnnnnnnnnnnnnnnnnnnnnnnnnnnnnnnnnnnnnnnnnnnnnnnnnnnnnnnnnnnnnnnnnnnnnnnnnnnnnnnnnnnnnnnnnnnnnnnnnnnnnnnnnnnnnnnnnnnnnnnnnnnnnnnnnnnnnnnnnnnnnnnnnnnnnnnnnnnnnnnnnnnnnnnnnnnnnnnnnnnnnnnnnnnnnnnnnnnnnnnnnnnnnnnnnnnnnnnnnnnnnnnnnnnnnnnnnnnnnnnnnnnnnnnnnnnnnnnnnnnnnnnnnnnnnnnnnnnnnnnnnnnnnnnnnnnnnnnnnnnnnnnnnnnnnnnnnnnnnnnnnnnnnnnnnnnnnnnnnnnnnnnnnnnnnnnnnnnnnnnnnnnnnnnnnnnnnnnnnnnnnnnnnnnnnnnnnnnnnnnnnnnnnnnnnnnnnnnnnnnnnnnnnnnnnnnnnnnnnnnnnnnnnnnnnnnnnnnnnnnnnnnnnnnnnnnnnnnnnnnnnnnnnnnnnnnnnnnnnnnnnnnnnnnnnnnnnnnnnnnangcaatctttcactctctcttacagtttagcgcggcatacatgcactaagatccacctcaactactcttgaccgttgagaggaaccatctattcaacattcgattttgcccga

SEQ ID NO: 41614 - DNA, 657 bp, Macaca Mulatta
  misc_feature (1)...(657): n = A,T,C or G
gggattgtagctttggtaatgccatctttcccccctcattatatttgttaaattttcattggttttctatattaaaattatcaaaaataatattgtaaaatatgcataacataaaatatatcattttaagccattattaagtgtacataggttgggcgtgnnnnnnnnnnnnnnnnnnnnnnnnnnnnnnnnnnnnncagacgagtggatcaccnnnnnnnnnnnnnnnnnnnnnnnnnnnnnntatggtaaaaccctatctctactaaaaactacaaaaaaattagccaggcatggtgtcannnnnnnnnnnnnnnnnnnnnnnnnnnnnnnnnnnnnnnnnnnnntnnnnnnnnnnnnnnncgannnnnnnnnnnnnnnnnnnntnnnnnnnnnnnnnnnnnnnnnnnnnnnnnnntaagannnnnnnnnnnnnnnnnnnnnnnntacataaagtgacaataaagtacgttcacactgttttgcaaccataaccaccactcatgttcatagttctttttgtcttgcaaagttaaaactcatgttaatccagtctcactgttaaaccactgttcactttccttccatgattctacatctcataattagtagtgagnnnnnnnnnnnnnnnnnnnnnnnnncgcgctcggctcaaaa

SEQ ID NO: 41615 - DNA, 573 bp, Macaca Mulatta
aaatcatattcctgctcacagcctacaaggccctatgtgatctgccccgtggagctcatcctccattctcccccaaaccctgtgccacagtccctggactcctttttattgctctaataagccaagagcatttctccctcagggcctatgcacttgccattcccctacctttccccatatcttcaccttccggccctttgcatccttcagagttcagtgtagcatctcctcatcggaggccttctctgccattctctccagagtagccctccacgacttacttcctgttccctggcgtcctctcttttcacatatcacagactggaatcatcttaggtttctgtcctcaaggtatggcccaacaccccatctccctcctactagaagctccacttgggcaaaaacttgtctgctgtgtgctccggggagtccccagcgcgcagaacagtacagtgatggagctctagaaggctttgtcggaatagttggtttcaggaaactgtttggtgacaccactcattcattccaacacttaacaaggcaccaggcacctggcaaatacagagacctatg

SEQ ID NO: 41616 - DNA, 763 bp, Macaca Mulatta
  misc_feature (1)...(763): n = A,T,C or G
ggcatggtggtacatgactgtggtcccagccnnnnnnnnnnnnnnnnnnnaaggctagctgaagccagggaagtcaaggctgcaagtgagctgcgatcgtacccttgctcgnnnnnnnnnnnnnnnnnnngagaccnnnnnnnnnnnnnnnnnnnnnnnnnnnnttgttaaatgctgtnnnnnnnnnnnnnnnnnnnnnnnnnnntaataacaataacaatgaaacaatatcgacaaggagagcaccactaacttcaggtttgagcctcagctctcaactagcaaaacttttctaagttctgtaatatccaccaaccatggacatattagagataattttaggcaatatatatattttgttttagtaattacatatatttttaaatctttggaatttcttcttttttttccctctggtgttgaaactaatattattacacattttaatgtgcagtaaaatatcagtaggacaaaaatctgcaattttattgtatgtaggtattgcttaggataaagctacagtgaccatctaagtaaacaagttaatatgtttgaggaaaatcaatcaataaaaagtaatactaataatacacatggaattgacaaaaaactatganggtggtactttccttgaaagagcttggggaaacccttgaactaggaggggattttttctttttaaatttaaaaaaccttttgggaagagcactcctttttttttgccaaaaaattacccttcaccttaaaccttccaccaaatcca

SEQ ID NO: 41617 - DNA, 677 bp, Macaca Mulatta
ggggggtggggctgtgggtgccatcttgtcaccttggaggaagagcccacctgggaatgacatcaactcagagggaagtcagcagagccaagaggccgggagaggtgattcctggtgacatcatcctgctcctgggtgcagccacagtggagttggcctcgaatgttgtccctggcatggaaatgaccagaggtcgccctcacatgtcagcagacacctccagccatgtccttcatgttcctcattagcaaagtttgtaggggtagtagtctcagttggcatttctagctgagatgtgtagctgggaggtctccacgctgcgggccttgggacgacttctgcctccaaggagacccttactgatgatcataggctcctcaaggtcatcagccaaggcagctttgcagaagtcaaggcggctggcccagcacattctcactgggaccgagatggctgtggaggtcaccccaatagggcagcagggctcctgcagccttcagcgtctgtaccacagggtccatatgatgaagacccttcatcgcccgaagatcatcagactcccgtggctgggcgccagaagagactcttctagtattgattaaccagctcgagagacttcccacttcacctcgaattctctccttgaagggaaagtccgggcagtcacaatagatatc

SEQ ID NO: 41618 - DNA, 764 bp, Macaca Mulatta
  misc_feature (1)...(764): n = A,T,C or G
ggatactcaggtttaatatttacgaaacctaaaagttcatgaagtgaaattatttgaattaaatactactgtgcagttgcaaattattgtgaattcaccctgcccaaatcatccaggactgggtcaatttaatgttgatttggtctataacaaaccagttggttacattgcattttcaggaaatggtcaccagtgcaacattttcttattaaagaagagagagcctaacttttagcatggaatcttaatggaaatatgattttgcagaaaggagtctnnnnnnnnnnnnnnnnnnatatttgaaaatttggagattaatctcaatttctgggttgtctgtcacacatgacaaaaatttactgaagtaatgttgtgtgtgattgataaaagttataatggagaaccacaaaagtgtatgagaacagcagaaaaatcatctttcacagcagagatgatatattggaaaatataaaatcaaaatatagtttaaaaatagatggaaatttaaaaagttaacttcatcatgctttataataaatgcattggtactttatcattgatcaagggttctgccagtgtttgagggtaagattgcagtcagttggtgagtttttctcttaaatactatcctcacagcaggaagttgctaaacagatctgttattaccctgagttcagggacgcaagctttaacggaaaggtctgaaatgacgcaacatcccttccttttggtcttgcagttataaaaaggggaaaaggaaagtt

SEQ ID NO: 41619 - DNA, 535 bp, Macaca Mulatta
  misc_feature (1)...(535): n = A,T,C or G
ggatcttgaaatgctgggcaactgcagctgtagatcttaatctacagtacttatcaaacaattcagctttttcttgtaatgtcatnngacttttctctgcttcttgggagcgcttcaggcatcnactaaatgggggcgcccgtcctattagtccccaggtttaccgattccaagggttatggatgacatactgaaaaattgcaggaacatgagtgatccctttcctggaaaagcatttacggggaaacaactgcctaaaaataacaccatgcggggtttaaccaaaatcccaaaccttgattccctgcaaagggggctccaaatttggaaagttgaaaatttgggaaggaaattttgcccctttggaaaatgcccccnnnnnnnnnnnnnnnnnnccccggggggggaaaaagtccccccgttaaaaccttggggtttctggnnnnnnnnnnnnnnnnnnnnnnnntaannnnnnnnnnnnnnnnnnnnnnnnnnnnnnnnnnnnnnnnnnnnnnncnaaaccccccaacggggg

SEQ ID NO: 41620 - DNA, 123 bp, Macaca Mulatta
gactacacgcacgacatggaggcggcccacatggcggccaccgccatcctcaacctgtccacgcgctgccgcgagatgccgcagaacctgagcaccaagccgcaggacctgtgcgccacgcgg

SEQ ID NO: 41621 - DNA, 651 bp, Macaca Mulatta
gggatcctgatccaaggtgacctcaatatacaagtaataccaatacttccagtatttccactggttggaccacagtgttaatcaacaattcatctttgcctctagctcaagctttggcttggggggtccaaagatcattcgtaaaattccaccccagcttatttttccactctaggcttaatgaacaacttgctgtggctggaacacttttatgggaacaactcactggaacttcctctagtggctcagacacacctttggaactagcatcatggggatatgaagtatctttggaccctgggcaagggttgtatttcgtatgtggaaattcagggtacatgagtcttccgagtcaatggaaagggacttgcggcatcgctgctttactttccagactgttttatgcaaatgctagtacatataagacacagccatgcattttgtaaaagggcagctccagtggtattacatccttttagcactgcaataacaagacttttaggaccacacttgggcccaattcctctccattgtcttccaacaaacacaggcttggcagaaatattgccgctttccagaaaaacacataaaattcctcggagggttgttttacaaaaggaggggtaaattccccccctatcgaagggacgt

SEQ ID NO: 41622 - DNA, 2202 bp, Macaca Mulatta
  misc_feature (1)...(2202): n = A,T,C or G
ggtgtgactgaagaaatatcaaatgtttcctagtaagacagcaactcagnnnnnnnnnnnnnnnnnnnnnnnnnnnnnnnnnnnnnnnnnnnnnnnnnnnnnnnnnnnnnnnnnnnnnnnnnnnnnnnnnnnnnnnnnnnnnnnnnnnnnnnnnnnnnnnnnnnnnnnnnnnnnnnnnnnnnnnnnnnnnnnnnnnnnnnnnnnnnnnnnnnnnnnnnnnnnnnnnnnnnnnnnnnnnnnnnnnnnnnnnnnnnnnnnntggttcacatttgagtaaagacaggggagtttgttttcagaatgatatactagtctgcaggatgaatttcataactgacattgtaccttggactgcaactaggactttcattggaatcagnnnnnnnnnnnnnnnnnnnnnnnnnnnnnnnnnnnnnnnnnnnnnnnnnnnnnnnnnnnnnnnnnnnnnnnnnnnnnnnnnnnnnnnnnnnnnatcatggaggaaaactcattagaattcttaagtgatcttacaccaggagatcaggacccatctcagagtgaagaggaagacattgcaaagaccagaagagaatcagaatatcctttcattggtggtctacaaaatgaagtcagagattttgtgactgggtataaagaaaaaagatggaaaaataaagatcctaaacacagtttccaaaacgttatgtctatagttgaattggacaatacaccaaagaattacctctctaaggaaggtgataacttgtttgtaagtttgtcactgatgccagatgaaacctctgttactagtccaatagtgactcaaaacctttcctgtgtaacaactgatgactgctctggcatgaaggtagaaaagcatattagagataggcataccatagcgttagacacccagaaccttgctgcggaaacttcatgctcatttatgaagaagagagaaatagtagataaaagtctcccacgtgaannnnnnnnnnnnnnnnnnnnnnnnnnnnnnnnnnnnnnnnnnnnnnnnnnnnnnnnnnnnnnnnnnnnnnnnnnnnnnnnnnnnnnnnnnnnnnnnnnnnnnnnnnnnnnnnnnnnnnnnnnnnnnnnnnnnnnnnnnnnnnnnnnnnnnnnnnnnnnnnnnnnnnnnnnnnnnnnnnnnnnnnnnnnnnnnnnnnnnnnnnnnnnnnnnnnnnnnnnnnnnnnnnnnnnnnnnnnnnnnnnnnnnnnnnnnnnnnnnnnnnnnnnnnnnnnnnnnnnnnnnnnnnnnnnnnnnnnnnnnnnnnnnnnnnnnnnnnnnnnnnnnnnnnnnnnnnnnnnnnnnnnnnnnnnnnnnnnnnnnnnnnnnnnnnnnnnnnnnnnnnnnnnnnnnnnnnnnnnnnnnnnnnnnnnnnnnnnnnnnnnnnnnnnnnnnnnnnnnnnnnnnnnnnnnnnnnnnnnnnnnnnnnnnnnnnnnnnnnnnnnnnnnnnnnnnnnnnnnnnnnnnnnnnnnnnnnnnnnnnnnnnnnnnnnnnnnnnnnnnnnnnnnnnnnnnnnnnnnnnnnnnnnnnnnnnnnnnnnnnnnnnnnnnnnnnnnnnnnnnnnnnnnnnnnnnnnnnnnnnnnnnnnnnnnnnnnnnnnnnnnnnnnnnnnnnnnnnnnnnnnnnnnnnnnnnnnnnnnnnnnnnnnnnnnnnnnnnnnnnnnnnnnnnnnnnnnnnnnnnnnnnnnnnnnnnnnnnnnnnnnnnnnnnnnnnnnnnnnnnnnnnnnnnnnnnnnnnnnnnnnnnnnnnnnnnnnnnnnnnnnnnnnnnnnnnnnnnnnnnnnnnnnnnnnnnnnnnnnnnnnnnnnnnnnnnnnnnnnnnnnnnnnnnnnnnnnnnnnnnnnnnnnnnnnnnnnnnnnnnnnnnnnnnnnnnnnnnnnnnnnnnnnnnnnnnnnnnnnnnnnnnnnnnnnnnnnnnnnnnnnnnnnnnnnnnnnnnnnnnnnnnnnnnnnnnnnnnnnnnnnnnnnnnnnnnnnnnnnnnnnnnnnnnnnnnnnnnnnnnnnnnnnnnnnnnnnnnnnnnnnnnnnnnnnnnnnnnnnnnnnnnnnnnnnnnnnnnnnnnnnnnnnnnnnnnnnnnnnnnnnnnnnnnnnnnnnnnnnnnnnnnnngaatccttgttgcctgatgactatgtggttcctcttgactggaagacactaaagatgatctatttgcaatggaagatgtcagtgga

SEQ ID NO: 41623 - DNA, 793 bp, Macaca Mulatta
  misc_feature (1)...(793): n = A,T,C or G
gggtggtggcacacgcccnnnnnnnnnnnnnnnnnnnnnnnnnnnnnnnnncnnnnnnnnnnnnnnggaaggcagaggctgcaatgagctgagagcannnnnnnnnnnnnnnnnnagggtgacagagtaagactctgactcaaaaaaaagtctgcctcaaactttgtaaaatgctaagacatcnnnnnnnnnnnnnnnnnnnnnnnnnnnnnnnnnnnnnnnnnnnnnnnnnnnnnnnnnntatgaagaaaatactgcctcacacagatcagtagttggaaagaggaggaatattttaatgtcctttttctgatcattgtggatgttcttttttgataccaacaccaaacctcaacaaatggtagttttctgaaggttagttggacaaaaagaaaagaaacaagtgcatatgaaaactagtgaaatgctactgagggctgtatttgaattaatagaattgtgcccacattgttttcctggttttgatctggatgtgtaggataccgtcattgcgggggagctgggtgaaggatacatagaactctctatactatttttgcaacttcttgtgagtcttcaactatctcaaaataaaagttattnnnnnnnnnnnnnnnnnnnnnctaagacagtaaatgcttattttaaaatttgcccctttaagttttggggnnnnnnnnnnnnnnnnnnnnnnnnnnnnnnnnnaaataacatgccagaagttggttttttaaactttaaaacccccgcccttttaactaacccccccaggcgaaaatggtaaagaaaaaaa

SEQ ID NO: 41624 - DNA, 180 bp, Macaca Mulatta
tttcacattgtggctctgtctttgtcctctgctttctgggatggcttctcaaatttgtcttccatgttactgaattacttttccgaagtgtcacttctctgttgtgctctatggacacaagtaaatcggtccattttatattctcacaattatttcttctcaagttaataacttatttct

SEQ ID NO: 41625 - DNA, 497 bp, Macaca Mulatta
acagacaatttgaaaagagttaatgatgtatagcattttaatagaaggcctcatttgtattccacctcccggtaacatttttatctgtggatggcttgcttgggtaaggacatgaagatagttcctctagcttgtttgtttctgaaatgtggtcttactaattgatgactgtacacagagtcgttatgttagaaaattttgaaaagtaggcagtatgaaagtactgtattaacgcagttatttaaaagcattagataagatatttgaaagtaaatatttgaatattgtttactttgaaaagtaaatgatattcagtgtaggaaatggtgtgaaactttttcaggtgccgatgtttggagaccttttaaaggtatggagagtcgacttgactacaccgtgtggagcaagttttaaagaagcaaaggtacagcagtcccaagttgttgtaaaatttatttaaattgaggccagagtctagctcttgccgggaatggagt

SEQ ID NO: 41626 - DNA, 812 bp, Macaca Mulatta
  misc_feature (1)...(812): n = A,T,C or G
ggcgtggtagcaggtnnnnnnnnnnnnnnnnnnnnnnannnnnnnnnnnnnnnnnnngcaagaacctgggaggtgnnnnnnnnnnnnnnnnnnnnnngnnnnnnnnnnnnnnnnnatgggcgacagagagagactctgtcnnnnnnnnnnnnnnnnnnnnnnnnnnnnactgcctctgaagtcacatcaagtaggtagttgaaccaataataaaatagtgaagattctcattcaatttaggcttgtgtaaaagtaattacttttgcagcaacccaatacaactcaggagcaaaaatacaatagaagatacttgtctttatttgtctttattttgatgccataaacttagggggtcagggaaaggagccatcaaagagatctggtcctgctttcattcagagggatgtgagaagaaacacagtgtttatgaaatgtataagccctgattacatcccagtgtgacgatgcttcaagatccatcatggtctttctgtgataggaagaagggctccgcatagctaaccagtaatcagaaaaaaaacttttccctacaaaggacttaatccatctcctaaggatagacaggggggaaaaacctcacttccccagaagttttccattttgggacccggaaatagtgaaaaaggtttggagggagtcaaaaggtgcgtattttcatccacttacttttttccctggctcccagtaaagnnnnnnnnnnnnnnnnnnnnnnnnnnnnnnnnnaaaggaatttttgccttttgagggtggtggcccccccaagcttggaaacccaagtgttttaaatcttg

SEQ ID NO: 41627 - DNA, 768 bp, Macaca Mulatta
  misc_feature (1)...(768): n = A,T,C or G
gggtttgagatgnnnnnnnnnnnnnnnnnnnnagctcaagcagtgctcctgtctcagtcttcaagtagctgggactataggtacacaccaccaccatcctcagtagtcatttttgagtgggctagttaaatagactgacactcccatcatatattatttagccagttccttcataggctaacttataagttagctgtttctaatttttaatttatatagtcatatttccacgaacaatccagtagtgttgtcatattcatttttatttactttggnnnnnnnnnnnnnnnnnnnnnnnnnnnnnnnnnnnnnnnnnnnnnnnagacttttccaaataagggtcagggtttttaagtatgaaaaaaaagtttcagggtctttcctcttggcatgacccttgtgtggctgtttcccaattccaacccaaagttttattaggataaaatcttggctttaggtgtatggatattaaatgtcagtacctgaatttggggtttgcaataatttctgcttacttccaacttccccgtgctactccaaattctttttgccatctctatctacattaaataactaattgaaggcaaggcgcggtaggnnnnnnnnnnnnntnnnnnnnnnnnnnnnnnnnnnacaagtggataacctgaggccaggattttgagaccaccttggccaaaatggcagnnnnnnnnnnnnnnnnnnnnnnnnnnnntttacccggggggtggggggtgggccccctggaatccccaccttacttgggga

SEQ ID NO: 41628 - DNA, 750 bp, Macaca Mulatta
  misc_feature (1)...(750): n = A,T,C or G
gggggtgaacgagtcctcctaagtgtcctggcagcagcttcaacttgcggttcaacaggacccttactgtgtctcccggccagagtgtgccctcttttggatccggacctccaaccctgcagagcccagggtcgcagggcaggaagctccaaatcccgctgtgggtcttagagactgacactacactgaagctgagtgtggtggcacatgcctacagtcccagctaccagggaggccgaggcaagaggattcnnnnnnnnnnnnnnnnnnnnggagctcaaagcctatttggggagaaaacataaaacagcctggataattcgattctccattcgtgtatatggaaggcctcctgcagggagattatgggaagtaatgatcacagggctctgagctcttcttactcgcttgttctgatgaagcacactgccttgttatgaactgccctatggagaagcccatgtacaagaaactgaaaccagcctggcatggtggctgnnnnnnnnnnnnnnnnnnnnnntggaggctgagtctccccagtttttttcactttggaacttcagcctgtgtcagcctgcatcttcagtactgtcccgaaaaactctgtgggcaggttgtattggacagaacaagtgggccttcaccgggcttttaccttcccggaaatttaggaattttcctaaagttcagtcccaaaggctgaaattctgattccggggctttcccccagccagggcgatttccccttaa

SEQ ID NO: 41629 - DNA, 744 bp, Macaca Mulatta
gtgaagcctttaattgacgccgtttatagtactggagtacataatattgatgttcctaatctttaatttgctttagctgtatacatacacccataccccaaaaatgttttgtctgtttggatctatgttgcctctcttatacgcaacaggtaatttttttcactgtactttttgtatcatgtaaaaactacacaggatatgagaaaattttaaattatatgcatcacatcagaagaacatattattggcaaataataaaattatcatgttttcaaactgtgcaaagtgttttatttagtagtctgcctcgtctctgctacttgaccctgaaattcaattgagactacccacagtagagtacattatgagcttcctgcctctattcgtttgtacttacttaccttttgcttgggcaaatattaacagcaatggaatgaaagtgagagaaacttaccaagttttacctcaaagcaaggtaaagctttaaagagagcatcattagagccttcagaattcctcctcctttgccgtgtttaattcaaatgttagtagaaataaaaagcagtaatgagttatttatattccatcaaatgattcttcctttatctttagacaacactaagacacttcgcctgaactgaatgtttacccgtttttattgctactcctcctcctctctccaaataaaacaaataaatatctaagactgcaagattacttcatcttccacaggtttgcatgtac

SEQ ID NO: 41630 - DNA, 285 bp, Macaca Mulatta
tgctgagaaggagccgggcggggcccggcgggatcgctgcgagggccctgtgaggaggggcacaagacactagaagcggcctcggggtcgtcgcgctgagccctgctttggagccgggggcgctttccgcctcggtgaactcgagagtagcaactctcctccgggtaactggagtgccacagcgggcagacgtcgtgacgacaggcctcggagaggagaggggcccaaggatggctcaaaggatgcataggagttgggaaggcagaggaacaagtgtgttcagag

SEQ ID NO: 41631 - DNA, 608 bp, Macaca Mulatta
agaacaaaaccaaggcaaagatagcagagaattctgccaacccgccagtgggtggtaaagcaaaaagccccgtgtttcctgctctaggcgaggccagcagtgatgatgatctctttcagtctgcgaaaccaaaaccagcaaagaaagcaaatccctttcctctcctggaagatgaggatgacctctttacagatcagaaagtcaagaaaaatgaaacaaaatccagtagtcagcaggatgtcatatcaacaacacaagatatttttgaggatgatatatttgctacggaagcaattaaaccctctcagaaaaccagagagaaggagaaaacattggaatccaatttatttgatgataacattgatatctttgctgacttaactgtaaaaccaaaagaaaagtccaaaaagaaagtggaagccaagtctatatttgatgatgatatggatgacatcttctcctctggtatccaggctaagacaaccaaaccaaaaagtcgatctccacaagccgcacctgaaccaagatcggaacacgaggtgtccaacatctttgatgatcccctgaatgcctttggaggccagtagagcatacaggctatccacatg

SEQ ID NO: 41632 - DNA, 836 bp, Macaca Mulatta
  misc_feature (1)...(836): n = A,T,C or G
ggtctcttctgcccacaacccctgtgctctccaacatcttcagttttggggtgctgtcagctatgctactaccgtgtctttgtgaggaagctccccaacatccctcagtgcctgggtgcttgatctccagtatgcatgccgccagtatcttcacaacacttcttctccacctcagcaattgttcctcagtactaaggggacctctcaccttttcactgaatatatggctacctggaataaaattatttccccacctcccttggaaaacaaattgtgggcctggggatttttattatggggtccgggggagcccgtggtggaccatgaaaggggaaaccctattttttaacaaatggggaatcttgtcgcaatttggaaattcccgccccccttaaaataaactttggggagttttcnnnnnnnnnnnnnnnnnnnnnnnnntccccccttattgnnnnnnnnnnnnnnnnnnnnnnnnnnnnnnnnnnnnnnnnnnnttaaaagcgccaacccnnnnnnnnnnnnnnnnnnnnnnnccccccttttttccaacaaaaagggaaaaggggcaaatatatttttctgaaaattttctccccgggggggtgtaataaaaaaatattttttccacggagaattcttggcgggcccacaaattttttttaggggggtgtaattttttgcaaaggcgggtgaagaaataaataaattcccccccccacaacaagggaggaggaacnnnnnnnnnnnnnnnnnnnnnnnnnnnnnnnnnnnnnaataccccgggacagagcgaaaaaataaatttcttttctccgggggagaataatatagaa

SEQ ID NO: 41633 - DNA, 432 bp, Macaca Mulatta
cccttctgtggggacaatgtcatcaaccatttcatctgtgagatcctggcagttttaaagttggcttgtgctgacatctccatcaatgtgatcagcatgggggtggccaacgtgatcttcctgggggtcccagtcctgttcatctttgtctcctacatcttcatactcaccactattttaaagattccctcagctgaggggaggaaaaaggctttctccacctgctctgcccacgttactgtggtgattatcttctatggaaccatcctctcaatgtatgggaagcccaaatccaaggattccctaggggcagacaaacagacctttcagacaaactcatctccctcttctatggacttttgactcccatgctgaaccccatcatttatagtctgagcaacaaggatgttaagactgctgtgagaagcctgg

SEQ ID NO: 41634 - DNA, 728 bp, Macaca Mulatta
  misc_feature (1)...(728): n = A,T,C or G
cattcaagagaacctcaagttgtttttctgacagtgatgatgtggtatacagatacatccacagggntatttattatctattaccagcataatgcattgtcagatggcaaggtggcattttgaaaagagcactgggcaagcagttagcatatctgggcctaccttcagcttcatcatttacaaacttctgaccttttgacactaaaactgctcctttatctttctgagtctcagattcttcatctgtaatctggagttgttaattccagtccttactaccttttggagttggaataatgagatggaaagtggatgaaagtactttgaaaattatgacagttaagggccgggannnnnnnnnnnnnnnnnnnnnnnnnncaccttgggaggccaaggcaggtagatcatgaggtcagcagttagagaccagcctgaannnnnnnnnnnnnnnnnnnatgnnnnnnnnnnnnnnnnnnaatagctggatctggtggcggnnnnnnnnnnnnnnnnnnnnnnnagaggctgaggcaagagaatcacttgaaaccannnnnnnnnnnnnnnnnnaagccaagattgtgccactgcactctagcctgggcaataagcaaannnnnnnnnnnnnnnnnnnnnnnnnnnnnnnnnnnnnnnnnnnnnnnnnnnnnnnnnnnnnnnnnnnnnntattacattcactggccgcgnnnnnnnnnnnnnnnnnnnnnnn

SEQ ID NO: 41635 - DNA, 887 bp, Macaca Mulatta
  misc_feature (1)...(887): n = A,T,C or G
gggaggtgccgctgttgctgctcttgttgaatctagaaccgtagccagacatgggactggaggacgagcgaaagatgcttaccgagtccggagatcctgagannnnnnnnnnnnnnnnnnnnnnnttagtggatcccctaacaacagtgagagagcaatgcgagcagttggagaaatgtgtaaaggcccgggagcggctagagctctgtgataagcgtgtatcctctcgatcacgtacagaagaggattgcacggaggagctcttagacttcttgcatgcaagggaccattgcgtggcccacaaactctttaacaacttgaaataaatgtgtggacttattcaccccagccttcatcttctgggcatcagaatatttccttatggttttggatataccatttgtttcttatttgtgtaactgtaagttcacatgaacctcatggattttgggttaagctggtagcttctatgtaattcgcagcggatcccatccgtataaaaagttctgtggatcctgtcaaaccgagaccatcccgaacgcgcggtccaccctgttcgggccgcctccggcccccccagaaaccttttctaaaaccttttcttttggggcccgcgggcccccacctcggtaaagggcaacgtgggtgcctaccctggtttccccagggaaaacccgcggtcaggactaagggggcctgggaatcccccccccaattaaaaaacccccgccgggggggccaaccggaagggcgttctctgaaacaaacccccaaatggggaactcctcgataaggtccacttttccgggcatctttcgcccacgggggaatgtcccagggcgacactcgtcgcctaacagagttcttcccgccccccgcccaccgcc

SEQ ID NO: 41636 - DNA, 779 bp, Macaca Mulatta
  misc_feature (1)...(779): n = A,T,C or G
gggttccccagcctctctcaccaactgctggtgagccctctgggccagctggaagggaaatatcatacgttctcctgtcttctcgtccccaccctgtttaaggccaaatgctgatcaacacagtgttctctcaagccctgataccttgaaaatgccagaaagaattaatccatgaaatgcaattccctcttgggttcattcgtcctcatctcacagtttgggcagaacacacagcaatcagatggctgccaggatacttgcaaatcccattattgttccctggaggtgcccccatattggagccaaaaaatgactcatggatgatcagtttcatggtgctaaaccccaatcccatgacagcatcatacctcatcggctttgacattcttctttgcaactgaatctttaacaggactggattttcatttaccgccactctcaagaagcaatattaactgcatggggtaattctccaactgangtcagaggccttaacttataatctggatagggtactgaaatcaagagacaatatagcactatggattgtggcatgctatagtttatctangaaagtctgagtgggttttcattttttttttcacctaataggttcccttttatgagcagggaaattgactggcttccaaccaacccctcgggaaaaagaaatcccgggttaggtattcctttttaaaaaatgcaagaaaaaccttttaaattagtttttgaaaaccgaaaatttcccgtgaaattttgtgggctcccctcctaaagtt

SEQ ID NO: 41637 - DNA, 793 bp, Macaca Mulatta
  misc_feature (1)...(793): n = A,T,C or G
ggnnnnnnnnnnnnnnnnnnnnnnnnnnnnnnnnnnnnnnngnnnnnnnnnnnnnnnnnnnnnnnnnnnnnnnnnnnnnnnnnnnnnnnnnnnnnnnnnnnnnnnnnnnnnnnnnnnnnnnnnnntaaatttcctcctggcatgggatcaccatcatggcatgcctcccattctgtgcccttctcgccaccagggcctctggcagggctctgatctctcctcttcagggagccctttagctctccctcccgtaggcccagcagctcctccacctccctcctctgaggtgtggtgtggaggccactcctcctgagtctccactgtgaggcctgggccctcctactgggggaccagcatggctcataatatcctagttagggttggttcaacccacgcagagtcccacaaagtcacctttgctccgctgagccagcagctctgagaaaagaggtttctctggagctcttgcgtgatgatactgctgctttgctaggcagggaggagatttctgtgtgtacttctcgcccccggtgggcttccacctgcacccttgcatgagttccctagcactgagaaaagtaatagagaagagaagtcaggcgcacagccaaaatggagaaccctgggggtcatgaatgcccctgaatctaatgaaaaaccaaagttctcctggtagcttccagaaacagaaccacaaaggtgggttttttccccccttttgccaaaaaaaagctcttttgggaaattggccccnnnnnnnnnnnnnnnnnnnngccctgtgggggcaaaccta

SEQ ID NO: 41638 - DNA, 466 bp, Macaca Mulatta
  misc_feature (1)...(466): n = A,T,C or G
gggagtctagcttgtgacgtgtcccaaatttaggagtgtgatgtgggggattgaattttgtgggtttggttggtggtcttttcactcggaggtaacatcttgtgtatatggctgtaaagtctcagttaatggaatcctacggtacatttctggctggctcagttgggagagcctgagtctcttaatggaatccttaattagccagaattttcctgcaaatggctttggatgggggaaattctataaaatgacaatttggatatacttttgtgttaaatgagagcaattttctctatatgcttcgtctctgcatggctgtacaaggcccaaatgacttcactggcacctgtttccaggagggggtcttcagagtctccttaggcccctgtcagtatcataaataattcctcttcttgtagtagatgcgattnnnnnnnnnnnnnnnnnnnnnnnnnnnnnnnnnnnn

SEQ ID NO: 41639 - DNA, 1458 bp, Macaca Mulatta
  misc_feature (1)...(1458): n = A,T,C or G
aggtccgagtccatgactgtgaacaacttcttcaccattgaggatgggcagctggagctcctggcccagggagccctggaaagccctgtgtccagtgtgggcgcctnnnnnnnnnnnnnnnnnnnnnnnnnnnnnnnnnnnnnnnnnnnnnnnnnnnnnnnnnnnnnnnnnnnnnnnnnnnnnnnnnnnnnnnnnnnnnnnnnnnnnnnnnnnnnnnnnnnnnnnnnnnnnnnnnnnnnnnnnnnnnnnnnnnnnnnnnnnnnnnnnnnnnnnnnnnnnnnnnnnnnnnnnnnnnnnnnnnnnnnnnnnnnnnnnnnnnnnnnnnnnnnnnnnnnnnnnnnnnnnnnnnnnnnnnnnnnnnnnnnnnnnnnnnnnnnnnnnnnnnnnnnnnnnnnnnnnnnnnnnnnnnnnnnnnnnnnnnnnnnnnnnnnnnnnnnnnnnnnnnnnnnnnnnnnnnnnnnnnnnnnnnnnnnnnnnnnnnnnnnnnnnnnnnnnnnnnnnnnnnnnnnnnnnnnnnnnnnnnnnnnnnnnnnnnnnnnnnnnnnnnnnnnnnnnnnnnnnnnnnnnnnnnnnnnnnnnnnnnnnnnnnnnnnnnnnnnnnnnnnnnnnnnnnnnnnnnnnnnnnnnnnnnnnnnnnnnnnnnnnnnnnnnnnnnnnnnnnnnnnnnnnnnnnnnnnnnnnnnnnnnnnnnnnnnnnnnnnnnnnnnnnnnnnnnnnnnnnnnnnnnnnnnnnnnnnnnnnnnnnnnnnnnnnnnnnnnnnnnnnnnnnnnnnnnnnnnnnnnnnnnnnnnnnnnnnnnnnnnnnnnnnnnnnnnnnnnnnnnnnnnnnnnnnnnnnnnnnnnnnnnnnnnnnnnnnnnnnnnnnnnnnnnnnnnnnnnnnnnnnnnnnnnnnnnnnnnnnnnnnnncgcaccttttgacaagacagccaacatcaccttctccatcaacgccgacgatgnnnncccaacgccaacctgcttgagatatgctacaaggaccgcatccagcagtttgatgatgatgaggaagaggaggacgaggaagaggcccagggctcaggggagtctgatggagaagatggcgcctggcagggcagccagttggccaggnnnnnnnnnnnnnnnnnnnnnnnnnnnnnngtggaggcagcacagacagtgaggatgaagannnnnnnnnnnnnnnnnnnnnnnnnnnnnnnnnnnnnnnnnnnnnnnnnnnnnnnnnnnnnnnnnnnnnnnnnnnnnnnnnnnnnnnnnnnnnnnnnnnnccaggccccagctggacagccacctttgacccagtgcctacagatgccccgaccagcccccgagtctccagggaggaagagctgcacactgggcctccagccccacagggacccctcagtgtgtcccaggacctccccaccgaggacctggccagccctcctgcccgtgatgccctgcagctcagg

SEQ ID NO: 41640 - DNA, 197 bp, Macaca Mulatta
ggtggcactcggagacacatgggttgaggatgtagcattccaggctgcagtgtcagagaaaatctccacctctctgcaaggcgagggtggccccaagcagctcctccagctggtttaggccgtgtcctccgtgctgaaccaagagcacaaaagccagggctcatgacagccgctgagcatggacgtcagacacaagg

SEQ ID NO: 41641 - DNA, 809 bp, Macaca Mulatta
  misc_feature (1)...(809): n = A,T,C or G
cccaacccctgggcaaaattttaggattttttgaaggagaagggtttctacaaaaaaaccaagttgccccatggtggttccccaacttttggggctcaaggtaatctgcccgttttttcaggttttggtngatactgacacagccaaaattatttctaaagttcaccacgcagagagaactaccattaaacatcgggatctgtagtcctctaatcttttccttgcactttacacatattaagatttttacgtaattggattatatgtactgttttttagtttgctttttctatcttctaatttttttattgctgctgaacaagttatttctcatatttttaatgttactatttttctatacaacttttgaaattttgtaatacgggtatattacaactagttttgttggttttttaaaagtgtaattatatgctttaatattcaggacaaacgttagaacacaaatgtgttcctagatattgaaccgttttnnnnnnnnnnnnnnnnnnnnnnnnnnnnnnnnnnnnnnnnnnnnnnnncnnnnnnnnnnnnnnnnnnnnnnnnnnnnnnnctggtgcannnnnnnnnnnnnnnnnnnnntgcctcccggattcatgcnnnnnnnnnnnnnnnnnnnnnnnnnnnnnnnnnnnngcaggtgggcgccaccatacctggctaattttgtatgnnnnnnnnnnnnnnannnnnnnnnnnnnnnnnnntctgannnnnnnnnnnnnnnnnnnnnnaatccgtctgccttgtcctcctaaagtcctgggattaaagccatgagccaccacacc

SEQ ID NO: 41642 - DNA, 533 bp, Macaca Mulatta
  misc_feature (1)...(533): n = A,T,C or G
cttagttttaaataaattatttcagtgtgctgttagtcctctgcagtcattttggtttaaacagtgactttatttatggtagcatatcaataatttattaatgttaaaaaatacttgtgtatgacattacaaaccggtacagttcctagggggagaggattctaattgataggcagttgtgagagggcaggaagaatggaactttatacttcaaaaggaggctttggttttatgaggtactgcttatgtaaattgtttatttttatttcatcaaagcctggcaggtatatgcattccaatttaccattggcaaagctttatttttatttttaaggttggatgttgaattaattttttgggaaatgagatttgtaagtagtttactttctagattagataacagaagccaaactttcagaagttaaggatgataatgttaaaatgacttgttatatattgtgtttgtaagggttcccttaagtatcataactnacaatttgtggaacttggaaaaggctaaactgtgttatttg

SEQ ID NO: 41643 - DNA, 775 bp, Macaca Mulatta
  misc_feature (1)...(775): n = A,T,C or G
gggaacccttgctctaaccattaaatgaatatgaagtcagtatccacaatttgagtctcaaatactagtgtgcaagatggttaatttctaagtttatcttaatatcttgcaagaagtatcattagagtgtgataacttttagaataatgactccatgcaatggattactttttaaataactacttcagcaaaaggcttagaattttttaaaaacgtataaagtctgtaagaatgtagcagatttttaaaatccacaacccatgtcacaaattactctcccaccccaaactttgtgatagatatctagggaggaaggttttctcaacttaccttaggtattcatttctgaccttaatgaagtctttcttgaatttaacttagacattttctgctgaattttaggtttttaaaatctggataaaatttagtgatgtgatacagatggaatgaattcttctgtaatattccttcattttaccaaaagcatgttaaatcatttctttgtatctataaaaatatattaaaggtttaggaagccctaaatatttttattttggaaatctgttgatatttctaagtatcttaagaaaaataaaacaaaaacangnnnnnnnnnnnnnnnnnncatgtcttggcaaagtaccaccatccctccagacagtaacctgaagtttctattcctctccatcattgtctgtgccattgatcctcactgacatgaagctttgtgtcacctgngggaaagaacatctcttcataaaatacacaacctttt

SEQ ID NO: 41644 - DNA, 771 bp, Macaca Mulatta
  misc_feature (1)...(771): n = A,T,C or G
ggggagctgccagagtaaagcaaagagcaaggaagcaggctcgttggaaggggttgtgacagccccagcaatgtggagaagtctggggcttgccctggctctctgtctccttccatcgggaggaacagagagccaggaccaaagctccttctgtaagcaacccccagcctggagcataagagatcaagatccaatgctagactccaatggttcagtgactgtggtcgctcttcttcaagccagctgatacctgtgcatactgcaggcatctaaattggaagaactgcgagtaaaactggagaaagaaggatattctaatatttcttatattgttgttaatcatcaaggaatctcttctcgattaaaatacacacatcttaagaataaggtttcagagcatattcctgtatatcaacaagaagaaaaccaaacagatgtctggactcttttanatggaagcaaagatgacttcctcatatatgacagatgtggccttcttgtatatcatcttgggttgcctttttccttcctaactttgccgatgtagaagaaccattaagattgtttactgtgaaaagaaatgtggaaaactgctctctccgcgactctcaaagatgaaggatttttggaaaaagggtaatcctttgggctaacggggggaagaaaaacaggttgaaaggctcccccaagcccngcacttaaccctttcgtgggaccaatccttccccaaatcccagggagagaattccggcccaaccctttggggccaac

SEQ ID NO: 41645 - DNA, 792 bp, Macaca Mulatta
  misc_feature (1)...(792): n = A,T,C or G
ggaagcatgcnnnnnnnnnnnnnnnnnnnnnnnnnnnnnnnaggcaggagccccgctctcctgggttgggctgcagccgcccaagctgtggctttggatctgggcctccggctccacagagcagtttcaactgcaagaaacaagaggattgggcaaaggtcaagaggccatttgtcaaacagcacgagacaagcaacaggatgtgcaaagcagaaagtgaagcgaccgcaggctgatgcagccaggaaggcagaggccgagaggagggagcgtggcatcagaacagagccggccggggtctggcttcctcctccaggatcaagggaaatgtggggagcatggtgcagaatccggggcagctcatcgccctgctcacttgctggggaacagataaaacgcctttctcaccatcctcacaggcaacacagcaatagcagctgtgagtctcctgtctgcccaagaaagtgccccctcatcagcaagctggctctcctcataccagctggcaagggcctctcccacccctgagctccaagcacacatcgcttccacattccggtgacacctggcacagtccgcctgggcttgcggtgtccgaacacctgtccttgcctccgtgctggaatcaggccctgtggagaacgaagaaccgggccccgggggaatttggggttcccacctgggcaccctgggccagggttgcccctgtgcattggggaaaagggcctcgttttccaacccctgggattggggggcaccttcaaggggaaaaggggggcaagccccaaaaaa

SEQ ID NO: 41646 - DNA, 148 bp, Macaca Mulatta
tgggctctgcttccccacaggctgatgaccaagatatgatggagtctctatctgacactgtcatagttcctttattaaatcccattatctacagcctgagaaataagcaagtaatagattcactcacaaaaatggtcaaaagaaatga

SEQ ID NO: 41647 - DNA, 623 bp, Macaca Mulatta
  misc_feature (1)...(623): n = A,T,C or G
ggggaaaaaatgtaatcagaattcttcttggaggcacactccactagtttgacagaaatacagaaatactttgataagctgctgggggtaaggggtgagtcctctcaggcatatgcttaggaaacaaagtagtttccaaaatctatgcgtatgacagagaagaattagatggcctttgagagacccagaagaaaatgcaaaaaggaatagggggaaaaaaggcaaagcaacctgctgtgaacctcctaatcttccatggcctgaattcccagtgcttgagaaacaagccttgtgaaaaacaagctgctgtccctgctagaggaatccctgcatccttggatgtttatcccnagccatttgtaacatgagatgatgtgtatcgtaaattattacccatcccatgtttccccctttaaaaaaccccaaacaatccccttgcccagtgaactttccgttaccaaaattcccccggggtttccccccccgaatgcattgttcccctgggggaaattagaagaggaggttcaaacccccctggaggtcttttcaaaaccaaattaggggggccacaaggggggggattccccccccgaacccccctcaaggggaaacccaaaatcttt

SEQ ID NO: 41648 - DNA, 754 bp, Macaca Mulatta
gggtgtcaatctggcagtatttagtgatgtagttttcatttgcctgtttgtattattgaatttagcctttaaataatccttgatcacttttctgcctttcagctaagatgaagtataataatgtaatctctgggcttattcagtatcacatttgtaatctacaagttcatcattttgctaaaatagaacacatatattccttttaaaaatgtcactgagtcactgagtcaggatgcattctaaagtctcttttgacaaatagtgaatcatgtcatcagtacaaagtactgcaggaaacatggcaaacaagctaactggaagtttatgtaaatttggaggaatttttgccatgcctaggccttccagctcaccagattcccaaactttccaactgtattagaggggcaatcaactcgatttcttatatttttaatgtaactaaacacaattgctaaaaatgaaaatagattagctgcctgctgataagctccatgactaaaattccttggtgtgaacaggaggctaatagaagtcatgtgctcggtggtctggaaatgttcttattagtatattctgttaacttcagtctcatgtagaaacagaaaaagtcagtttgctggaggtaaactgaaattctggttttaaaatgtctttcctgccctccttttttggttttccttcttaaaacctggccccttgcttgggcttggtgaaaaaccctggggtaacttgaaaaaacctgggttaaagtttc

SEQ ID NO: 41649 - DNA, 455 bp, Macaca Mulatta
tgccaggtacacagtaaaatgcttcattgaaggcttgctgtgaggagagctcctgcaatggaagtcctctacatgtctcagcgggtaccattcgctccgctaaaccacagaacaggccgactccatctaccttcctggagagatgcctccttatttccaaactcatgcagagcctccgcgtgacagccacgctcccgctgcctgatctgatctctccatcaggaatctgacaaaagactagaaacaaacacaagagaccacagaatccctcagagagaggggggctgtctcttgggttatttctgtgcttagcctcagggccctgagatgggctgaaattgctgggatcctgcaaaaactgcataacagacacatcctaggactgccacttagggactcattaaaaaaccgcttagggcgaggaaggtagaaggtaagaatcccatcacctgcgg

SEQ ID NO: 41650 - DNA, 313 bp, Macaca Mulatta
gaaaccagaccgctttctggaagggagtcttttggggcttccttcaatgaacagactggagtgtaatcagttatttgatagcaaatgggttctctcaagacataaatacaatttaaagcagtttgttctagggtctacagtttcaacatggcccactgcattcatgtttctacccttaacttgccaagtaaacccatagtttgttagttcaaacactaatctctgatcagtctcatttattctaaatttgttttcacacagtggcttccacaactcaaggtattttctattctttgctctctggagactgaga

SEQ ID NO: 41651 - DNA, 216 bp, Macaca Mulatta
tggctgcctacacgctggtgctgatccaccacagagagagcacgtggaacctggagaactgcttcagtggctggtacaatgccaacctgagcccggtaggccacgaggaagcaaagtaccgcaggcaggcactgggagatgctggctccaaatctgatatctgcttctcctcagtgcagaagagagtggtcttgacaatctggacagtgctagatg

SEQ ID NO: 41652 - DNA, 366 bp, Macaca Mulatta
gcacaacatgtaaacatattagtataaaagcagatgaaacaaccacatgttctgaagtctagggattgtgctataatccctatttagttcaaaattaaccaggattcttccatgtgaaatggaccaaactcatattattgttatgtaaatgcagagttttaatgcagtatgacatcccacaggggagaagaatgtctgtagtgggtgactggtatcaaatattttacagaatacaatgaacggtgaacagactggtaacttgtttgagtttccatgacagatttgagacttgtcaatagcaaatcatttctgtatttaaatttttgtactgatttcaaaaccatcattaaatatctttaaaagtgt

SEQ ID NO: 41653 - DNA, 779 bp, Macaca Mulatta
ggtattgaatctttctcggtttttaaaatatatttctccaaatgcttccagttggtctgtgtatattagtctgtgtaagtgtttatatacatgcagttgttctttatttataatgagcaagtgataatttgctcatagttattttcttaagcaacaattaaatttagctacttattacattttatcatccttgaaactcactgatgggcccttctatctccctctccactctgccggttattgttcctcaataggaaacagattctctcgaccttgttttttgagtttccaaaccccaggtttttgtaatggtttccctttctatttttgaaagtcattatatattgaaagaattgccaaaaatataattaataaaaagacaaaatgacatctgactgaaaaccttggtcattgacccatttccgggccaagttgaaaaaaaacataattaggataatcttgccacatctggttcttaattcagagcctcatctgtgggcttatgaacctatagtggagggttgagaccaatcgagctctaattgtgctttgttaatgtaattatttaaatgtttctttttctaacatattattttcaatagccattaaatctttttatgttatgggataaatcgttctattttttcctctctgcctttggaaaaggatgttaaaattttcaaaaagggacataaaaactattggtttaaaaaaaagtcctgaaataatgtgttacatcgtcttaccaagctttgaaattaggttgtttgacagaacct

SEQ ID NO: 41654 - DNA, 782 bp, Macaca Mulatta
  misc_feature (1)...(782): n = A,T,C or G
ggagtagagacagggtttcaccattnnnnnnnnnnnnnnnnnnnnttcctgacctcaagtgatccaggcannnnnnnnnnnnnnnnnnnnnnngttataggttnnnnnnnnnnnnnnnnnncgggtcttcccagttttaacaaagagacactgagccatagggagagttaagaactaaattgtctcctcctccaaattcatatgtttgaagtcctaaaccaaaatgtggctgtatttagagatggaccctttgggaggtaattagggttgaatgaggccatagggtaaggttcttgcccaatggaattgacctccttataagaggaggaggaaatacaagaggacctccccacccctgctgcacacctgcactgaaggaaagctatttgtaagacacagcaagaaagcagccacctgcaaggcagaataagagagccctcaccaggaactgaatgaatcagcagctcattctgggacttctagccctctgggaactgttgaaacaatacatttccgtggatgtaaaccaactcaatctaatataaattagttacaattttggtaatactaacctgaaaaaagacttaacccaagggaagtttatgtcacttcgccaagggaccttaaaactgggttgtggctgnnnnnnnnnnnnnnnnnnaaaacagggtaaattcacagatccatccgtatatttttacacaaaactctcccgtttctgggaagcttaatgaagtcctaaagtcacggggaacataacataattaccaaatccgaggggg

SEQ ID NO: 41655 - DNA, 1198 bp, Macaca Mulatta
atgctcctatcctgagcgtgccctatacctaaaccccagatcaggtagaagtttcccatactgatctctcagtgaaccaattccagcctctgcagcatcactgcaacgccccctaatatcaccttaaaggctccatcaggcatattctactggtgtaatggaaccttatctaagaacctacctagtccttctgttaataacctactatgtctccctgtcaccattagttccccggttgactctactaactgctggcgagttcctagggtataccggtaactggactagtgctattattcacccagaccttagaccaagacctgcacgagccatatttctccccctcatcgcaggaatctccctcaccgcatccttcattgcggacggactggcggggggagccctaggtcacaccctcatagaacgtaacaggttataccaaacaatttgccgttgctatggaggagtcggctgagtcccttgcctcccttcagcggcagctcacgtccctagctcaggtaaccttgcaaaaccggagggccctagacctactcactgcaaaaaaaggtggtacatgtatatttctaaaagaagactgttgtttctacataaatgaatcaggacttgtagaggaccgggtccaacagttacgcaagttaagcactgaagtaaaaacacggcagtttgcttcagctgcagaccaatggtggaattcctctatgttttctctgttagcccccttccttggacccctgctaagtctactatttctgcttaccgtaggaccttgtgttgttaacagaattttacaatttgttagggagagatttgacaccgtacaactcatggtcctcagagcccaataccaacctataaacgctgaaacagaatcagacttataagacccaagattggctctaaagatacctgaaaaaaaggggggaaagaaaagagctgggcacattcctcagccccgggctcaaaactccctgagcctagcacaaacacatcccatcctccccatcccaccaccatatatctctcaaactccctgaactccgtaacaacaccgacctggaaaagtcctccgataaaggagacagcccgtttcaaggttactgaaagccgcagggaattttcttttgttccccctacaaattttccgggctataaaaaagccaaacgcttcgccaattgg

SEQ ID NO: 41656 - DNA, 102 bp, Macaca Mulatta
tccccaggcccgggcgagcgctgttgtggacgggaagctcccggcccggcgaactaactggagcacggacgctgcagccggttgggccggtgtactttcccg

SEQ ID NO: 41657 - DNA, 331 bp, Macaca Mulatta
  misc_feature (1)...(331): n = A,T,C or G
ggaattaggattatatgggcttgaagccactctgatccctgttttatcatttgaatttttgtctcttcccagtttctctgagaannnnnnnnnnnnnnnnnnnnnnnnnnnnnnnnnnnnnnnnnnnnnnnnnnnnnnnnnnnnnnnnnnnnnnnnnnnnnnnnnnnnnnnnnnnnnnnnnnnnnnnnnnnnnnnnnnnnnnnnnnnnnnnnnnnnnnnnnnnnnnnnnnnnnnnnnnnnnnnnnnnnnnnnnngtgagtaaaattggcctggatacagaaggagaaacctgtggaaatgcagaaaagcttgcagaatatatttgttccag

SEQ ID NO: 41658 - DNA, 529 bp, Macaca Mulatta
atggagccccaaaatacctccactgtgactaactttcagctgttaggattccagaaccttcttgaatggcagaccctgctctttgtcattttcctgctcatctactgcctgaccattacagggaatgtcatcatcgttactgtggtgagccaggaccagcgactgcactcccctatgtacatgttcctccagcatctctcctttctggaggtctggtacacatccaccactgtgccccttctcctagccaacctgctgtcctggggccaagccatctccttctccgcctgcatggcacagctctacttctttgtgttcctcagcgctaccgagtgctttttcctggccgtgatggcctatgaccgttacctggccatctgcagcccgctccgctaccctttcctcatgcatcgtgagctctgcaccaggttggtggcggtctcctggtggacagggattggcacaggctttctgccttccctgatgatttccaggttggacttctgtgggcccaatgagattaaccatt

SEQ ID NO: 41659 - DNA, 765 bp, Macaca Mulatta
  misc_feature (1)...(765): n = A,T,C or G
ggtcaactgaggctcatgaagattttatcatatatgttattttatacattttataattttaagctgggcattatggcatatgcctannnnnnnnnnnnnngnnnnnnnnnnnnnaaaaggattgcctaagatgagaggatcacttgagccaaagtgtttcagaccaacttgggcaatattagtaagaccctgaccctaagacaaaaaaagttttctagcttagtttttacatatagatctaggatgcaagtgctgggcatannnnnnnnnnnnnnnnnnnnnnnnattttaggaggacgaggcaggaagatagctcaaagcctggagctcaaaaccagcctgggcaacaaagcaagacccctgtctctacnnnnnnnnnnnnnnnnnnnnnnnnnnnnccaggtgtggtgcatacacctgtcgtctcatgnnnnnnnnnnnnnnnnnnnnnnngatcctttgagcccaaaagttcacagctgcagtgagctacgatggcaccactgtactccaacctggataacagagtgagaccctgcctctaaaaaagtaaaaacattaaaaacgtaggatttatttaatttttgtttataatatgaggtaagagtccatgnggtttttcgtttgttttctagacaaatatccagttgttgtattttactgaaaagacttgngcttttcctgttgaatctcttttggactttttncttaanaataaaatgaccaggctcccatatatnattgcattattatttacaatagccc

SEQ ID NO: 41660 - DNA, 835 bp, Macaca Mulatta
  misc_feature (1)...(835): n = A,T,C or G
ggcagatttcattttgatgaagtccagtttaccttgtttttactttaagcatatgctttttgtgtcctagctaagaaatctttgcctaactcaaaggcacaaagattttctcctgtgtattcttccagttgtatagttttagctctcacttaagtgttagatccacattcattttcttgtgtaagatgaagatggcnnnnnnnnnnnnnnnnnnnnnnnnnnnnnnnnnnnnnnnnnnnnnnngttgctnnnnnnnnnnnnnnnnnnnnnnnnnnnnnnnnnnnnnnnnnnnnnnnnnnnnnnnnnnnnnnnnnnnnnnnnnnnnnnnnnnnnnnnnannnnnnnnnnnnnnnnnnnngcccgccactgtnnnnnnnnnnnnnnnnnnnnnnnnnnnnnnnnnnnnnnnnnnnnnnnngtgtcagccaggatgctctcaatctcctgacctcatgacccacctnnnnnnnnnnnnnnnnnnnnnnnnnattacanggcgtganccaccacgcccggccgggtcttttatttttaatgaaaatcatttcacaccatttgttgaaaagattaaccattttcccattgaattactttggcacctctggtaaaattatttgacccttataaggttaaattctaattcggggaaattaatcccggttcaactggaagggctaattcaaccaaaattcaggccccccgcgaagtatatgagaaaaattttggaatttttttaaatcttaattgnnnnnnnnnnnnnnnnnnnnnnnnnnnnngaggcccaaaacaaatccaaaaggttgggccaaaccaaattggttcgggggggctttta

SEQ ID NO: 41661 - DNA, 196 bp, Macaca Mulatta
  misc_feature (1)...(196): n = A,T,C or G
gtactccgggttccagcagacggccgacaagtgcagcgtgtgtggacatctcatcatggannngatcctgcaggccctgggcaagtcctaccacccaggctgcttccggtgctccgtgtgcaatgaatgcctggacggggttcccttcaccgtggacgtggagaacaacatctactgcgtgcgagactatcacacg

SEQ ID NO: 41662 - DNA, 840 bp, Macaca Mulatta
  misc_feature (1)...(840): n = A,T,C or G
ggnnnnnnnnnnnnnnnnnnnnnnnnnnnnnnnnnnnnnnnnnnnnnnnnnnnnnnnnnnnnnnnnnnnnnnnnnnnnnnnnnnnnnnnnnnnnnnnnnnnnnnnnnnnnnnnnnnnnnnnnnnnnnnnnnnnnnnnnnnnnnnnnnnnnnnnnnnnnnnnnnnnnnnnnnnnnnnnnnnnnnnnnnnnnnnnnnnnnnnnnnnnnnnnnnnnnnnnnnnnnnnnnnnnnnnnnnnnnnnnnnnnnnnnnnnnnnnnnnnnnnnnnnnnnnnnnnnnnnnnnnnnnnnnnnnnnnnnnnnnnnnnnnnnnnnnnnnnnnnnnnnnnnnnnnnnnnnnnnnnnnnnnnnnnnnnnnnnnnnnnnnnnnnnnnnnnnnnnnnnnnnnnnnnnnnnnnnnnnnnnnnnnnnnnnnnnnnnnnnnnnnnnnnnnnnnnnnnnnnnnnnnnnnnnnnnnnnnnnnnnnnnnnnnnnnnnnnnnnnnnnnnnnnnnnnnnnnnnnnnnnnatcctgcctccggcaatctattttacacccattactaacaaaatctccagtaataactttttgaaagccacccctattaacccattctaccgaatggggcaatcataccgggcttacaaacatttcctatccttaaaaccaacgagggcctttccctatgggaacatccccatggtttaattttattcgggaattccaatccaatggcccctctattatatgcgtgggctatacaataccccgncacaaaaaacaaccttattaatcttgactctttacccaaaatccactataaatctaattctcatacttttccgaggccaattattgaaagag

SEQ ID NO: 41663 - DNA, 699 bp, Macaca Mulatta
  misc_feature (1)...(699): n = A,T,C or G
cgagctgttagagagtggccgggagttgcctcggctacgcgactacttctccaatccaggcaacttcgagaggcaaagtggaaccccgccggggatgggggcgccaggggtcccaggagcagccggcgttgggggcgctggaggtcgggaaccgagtacaacgtcgggcgggggacagctcagtaagtggacgcagcctgtcacactccggcagggttgttgggattgtaaggagttactgtaggggagtggggtatttctgcgtgggtcccgaggataggggcattttaaggaacgagagtattggggtgggggcgctcttttgcggtggaagccaaaggatcaggcagtgactgttctctcttcctgccttcaacccttggctggtgttgcacttggctcctggctcccctgttggtgtcaatatctataaaatatcaagagtttctagttcactggctattacgggactccagaaggttcccttttatactagtttattgctttaagcattttttccttttctccagttacctgaatcacactaccaggaaatagtgttacctgaattgcctgcagtagttctttgagtctgagccaggagagaaagaataggacgcgttgctgctgtctccganaagtcagatgtacttaagaccctttgtctttgggacgactttttcaccgccaaaactgggt

SEQ ID NO: 41664 - DNA, 398 bp, Macaca Mulatta
tgcaatcaagatgttggcatggctggggtctcatctgaaggctggactggagaagaatctacttccaaacttatgtgctagttggaagaatttagttcatcaaggctgctaagctgatggcctgttccttgcctatgggcctgtctgggatggtagcttgtttcatcaaagtgttcaagcaatgaaggcagagagagtctgctagcaagatagaagccacaatctcttgtaatttatcacttttgctgtattctactggttaaaaataactcattaggttaacctactggctctcaaggggaagagattatacaaaggcatgaatttctggaggagtgaatgagggcaaagaattctgagaagtctggcttccacaatctttagaacttctagaaagt

SEQ ID NO: 41665 - DNA, 853 bp, Macaca Mulatta
  misc_feature (1)...(853): n = A,T,C or G
gnnnnnnnnnnnnnnnnnnnnnnnnnnnnnnnnnnnnnnnnnnnnnnnnnnnnnnnnnnnnnnnnnnnnnnnnnnnnnnnnnnnnnnnnnnnnnnnnnnnnnnnnnnnnnnnnnnnnnnnnnnnnnnnnnnnnnnnnnnnnnnnnnnnnnnnnnnnnnnnnnnnnnnnnnnnnnnnnnnnnnnnnnnnnnnnnnnnnnnnnnnnnnnnnnnnnnnnnnnnnnnnnnnnnnnnnnnnnnnnnnnnnnnnnnnnnnnnnnnnnnnnnnnnnnnnnnnnnnnnnnnnnnnnnnnnnnnnnnnnnnnnnnnnnnnnnnnnnnnnnnnnnnnnnnnnnnnnnnnnnnnnnnnnnnnnnnnnnnnnnnnnnnnnnnnnnnnnnnnnnnnnnnnnnnnnnnnnnnnnnnnnnnnnnnnnnnnnnnnnnnnnnnnnnnnnnnnnnnnnnnnnnnnnnnnnnnnnnnnnnnnnnnnnnnnnnnnnnnnnnnnnnnnnnnnnnnnnnnnnnnnnnnnnnnnnnnnnnnnnnnnnnnnnnnnnnnnnnnnnnnnnnnnnnnnnnnnnnnnnnnnnnnngaattccgccatttatggggggggctttataccactgaattcccttttattcctcaggcctaccacactggaaaccaaaaccctgtgcccaaagcgcccacttgcatcctttaaacttcatgggggccgtataatttttaacccttccttttcccccaaaacacctttcccttgggccctcggtaccgggaaaatacaccccgaaaccgcttaccttcgtgaattttattccccgaaatggccttccgccctacctgttggaaaacataccgccctatctacgccc

SEQ ID NO: 41666 - DNA, 759 bp, Macaca Mulatta
  misc_feature (1)...(759): n = A,T,C or G
gggcttagtactgttttgtcatttgtacttttcttaataatttaagaaaattgttctagaatgatctttaggcagtgtttttaatatggattacaaccctttattgggtcatgaagtcaactgtgtacagaccnnnnnnnnnnnnnnnnnnngagtgaaagacaataggacatgaacatgaaaatagaagacagagtagtgttcactgcagatataagagtaaggaggagtaagagtcaagtgctattttatgaaactttcagtggtttcatattttagtgtttttttgtgtttcacttttttgttttatctcttaaagttacccaaatatgtaacttcgtttgccagccattaagatgcattccagtaggatcaatttggacatatgtaaacctgattgtattccaaagtaattgatcaatgtcaagaagtgttcattgagtgcctattacttgcttggcaaacaggagggaggttccaaatgaagtactgtaagtaaaagatgaggctcctgctttttttaaaagggtttatctttcatttatccctttaaacatttatcaggcacttactcaatcagctgtatacagtgctagatcctctgttcaagtgtaattgggaaggtaaaacttatatgaaaccacaaaaataattaaatgccgcctgcataatgatatgcattctaaattctgtangagtttagggtagagagtgagcagagttggctgggatactggnagacgangangtagagttctg

SEQ ID NO: 41667 - DNA, 558 bp, Macaca Mulatta
gggatctttggttctggtgattgtatatttctggaccatttggaaccccagcatattaccctaccccacatctccacatccccaaaatataaccatacttcaagggcagttcaaatactgtctccttctatcctccatgaagtcattatctcttccattggaattatcgccccttctcctgaacagtactatttcatgtgaatctcctccaagacttcttttcactttacatctcacgctgtaattcttggagagtatgctgtagctcgagtgcagaattctcatcagttttatctttgtatctctcctaaacactttaccgggtgaagagcctggcacacacataaatatatattgaatgaatcagtgatggaatgaaaagagaaatgatggatctcctaaattttaacttttataaaatattttgatatattcatgaccttactttagcaagcaatgtactgaacatgatgtaaactattgttgatgtagtgcttatattggaagtgtaagtagtttgtggcatgggattgtgacatatcctaggtttcctcatct

SEQ ID NO: 41668 - DNA, 783 bp, Macaca Mulatta
ccccttaacggggctgtcttcactaaaggggggtccaattcggctttcttcccgggtgtttcggctccaagggggtacatattggatttacctcacgttggggggggggaacggaacaccaaacccagtcccgtttagcgggtttagggtatcagtgtttatttaagcccaagggaatgaaacccctgaaatccactaaccttgggatggcttatctcccttaggcgggaaattcgtctttctctcctgggaactgggcttatgaccaagtgaactttgatccacctgcaaagagttctggggcatggcagggtaaatggcgtgagaccagtgggccaaggacaaccctagaaaacacttaccttaaaggtggtcaggggaagagaaacccacaaaggatatagaatagaagtaatcaagatagacgtcttcaaggaagtgcaggatcacagaagaaaaggagacgaagaaagtagtcagaagagagccaacctttggggaggtttaggaaggagaagctggatttggaaataagtatatttttaacagcagagaaagacaaaatttttccattgattttgatttgagactttgcccccatggtgtcaggaaaaggacaagcatgtaagggagaggatgggttggagccaggcagggcccatgttctataccagggattggcacatttttttctgtaaacatccagacagtaacaagttcaggcttcacaccacggcagcctctgttgcaactaatcaactctgctaccggagtgcaaaggcc

SEQ ID NO: 41669 - DNA, 679 bp, Macaca Mulatta
cagctttgtggggcaaaaccttcttcaccacagagggcccgtagccatgctgatcagaccataagcgtttatgagaaacttagtttcctcctgtggctgaggaggggccagctttttcctcttttgcctgctgttctccctcccaatctatgatatgatgtgacctggtttggggttctctttggcgtttagaatatttgttttctgtcccaggatatttcttataagaacctaacttcaagagtagtgtgcgagtactgatctgagtttaaattaaaattggcttatattaggcagtcaaagacaggaaaaataagagctatgcaaagaaaaggggatttaaagtagtaggttctgtcatctcaattcatttttttccatgaaacccccttcttccaagattcattccttctctcagacatgtgccagcatgggtattatcgttgagaaagcacagctacagcaaagccacccgaatagcaatttgtgattggaagcattcttgagggatccctcatctagagtagtttacttgtgtaaggatcccaaatgtgttgcacctttcatgataagtttcttctctgaagagggtacgtggggtgtgtgtatttaaatccattcgtgtgtattactgattgtctttgtagaaagatggcagttattctgtctctttctccaa

SEQ ID NO: 41670 - DNA, 705 bp, Macaca Mulatta
  misc_feature (1)...(705): n = A,T,C or G
ctgtcctccacagctttgttagtggtgtctcaggatcacatgtttttcagcccattttaccagggagagcactgactgacaggtacaatgcatatgaaatcaatgccataacaggtgtaaaacctttattcactgatgttcttctccagacaaaaaggaatccgaacacaaaagctcaggtggctttagagagctaccccttaaacaatgcctttcccggacagtcttttcaaatgaccagtggnnnnnnnnnnnnnnnntacctccagacctcagggctcctgttgtttttgtgctattgcctctcagggacttaccaccaatgcatatgggccaagacccaaataaacccaggaatatcataaggcacttaaatatgcctcaaatgtcattccaggaaaccgaggaccttgaaaggcttcccactagaaggtcagtggagacagtggaaatcacagaacggtttgcaagtagcaaacaggcagatgaaaagacgaagaagaagaaagggaagaaataaaatctaccttcccacagcatgaaaccaattcccagcggacttattagatagacaacaaaaatctggaaactttctctcttagggctgagccaagaaggagataaactgatgcactaaaagcaaaccttgaattatttaccatatgaactgttataaagtcacactcttttaaacataatctaaaa

SEQ ID NO: 41671 - DNA, 892 bp, Macaca Mulatta
  misc_feature (1)...(892): n = A,T,C or G
nnnnnnnnnnnnnnnnnnnnnnnnnnnnnnnnnnnnnnnnnnnnnnnnnnnnnnnnnnnnnnnnnnnnnnnnnnnnnnnnnnnnnnnnnnnnnnnnnnnnnnnnnnnnnnnnnnnnnnnnnnnnnnnnnnnnnnnnnnnnnnnnnnnnnnnnnnnnnnnnnnnnnnnnnnnnnnnnnnnnnnnnnnnnnnnnnnnnnnnnnnnnnnnnnnnnnnnnnnnnnnnnnnnnnnnnnnnnnnnnnnnnnnnnnnnnnnnnnnnccgaggagtcagagggtgaggtcactcagccgtgcacagagtnnnnnnnnnnnnnnnnnnnnnnnnnnnncaaacaaatttaccttaggttcacctaagtgtggccagataccatgccttccttgattatccatagaattatgttgaagtaaagatctcattttttcttgttttttaatgtaatttttattcttgcatgatgtgagtgaataatctactcaaaattatttttaaaagaaaaatactgttgctactaaccccactcccactcttcattattgttgttcaaaatagccttggaaaataactttttgataaccattttctggacatattattattttcccctactattgaaattatgtctctacccactttattgagattttggtgaatataaaaatctttacatatttattatatatgtcttgggggaactatttcctttttctgtcagaattaaatccagagagtaagttattgcatttattattctactttctgaaaattatcatccttctcaaattaacttgtgtatttcttatgaggtactccctgaaaattatgatccttctcaaattaatttgtgtgtttcttatgaggtaagagtcaagatgtagtcttaatttagcc

SEQ ID NO: 41672 - DNA, 655 bp, Macaca Mulatta
  misc_feature (1)...(655): n = A,T,C or G
gggactgcagcctcaacctcctgggctcaagagatgctnnnnnnnnnnnnnnnnnnnaagcatggatcgccacactgcacctggctaatttaaagatatatacatttttgtagagatgggatcttgccatgttgannnnnnnnnnnnnnnnnnnnnntctcaagcagtcctcccgcctcagtgtgaaccacagtgcccagcccctacttcttgaaatcatgggtgacagcttgcataagtatcctgaagtatttcttacacagtatcttctaaggagaccaacatttatttgagaaggaaagcacctgttcttcccacagcagtggcagtagtacatcaacggtgcacagctgaattgggacggggccaggacaaagcagaaatctgctgcagagaccaggaaagataaaggatgttctgtagcaggatctgggcaagcagcactcatccatatcctttgcattgcaaacagaggagctacctccttcctttttattttccagtttattaatggctcctagaacctctgagaactaactgattttgacctcttaacagttgcctttcaactgcattcattcactgcaagcctactgtgtaaatgggccctggctaaccacttcagatatattgtctcttgtccagcttcagtgan

SEQ ID NO: 41673 - DNA, 620 bp, Macaca Mulatta
ggtgtatttgtacccctccaatgctggtctttttgtagaaactcagtagagaaagtctagctaagcagtgttgaaaagcctgcaagatttcagtttacatatcgacagcatattcactgatttctaaatgggctggtcccatcatctgaagattctgtatagaattattaaaaaaaatccatctttctttattttcttcacatgcgacaatttcttaagcactttgacattttggtagttccacactattgagagaataatatatttattttgtgacattgcagatgccaaatactgtaaccttctcgtgataacaatacttaggttcaacatcactgttcaaaccctgtcatgctttaaaactgatgcgagatgattttgttttttgcataatcaatacttaagggtgcaatcaactgttagtaattgtgcagtaaagtaaagccctgtggtgtatcaactactagttaagagtctcagttgatttctgtaatgtttgacctaatattaacccattttgtctctgacctaacagaggaagcacagatcatatcaccttggagtggtcaccggggggacagggaggcccgacaatgtatcactgggtgattatgatgcct

SEQ ID NO: 41674 - DNA, 222 bp, Macaca Mulatta
  misc_feature (1)...(222): n = A,T,C or G
ttttaaagcaaattgagtgtaaaatgttttcgccatgaagncattgcaccctctcccccaggaaacagtgcctaaggatgatgtcaagttacagccagtttgcgctgatcccccaggtcctaagaaaactgtgagtgcttcacatgcaaaggtagagctaccagatatggagaataacttggccatttatagcaaactgcctgactttggggtgagaaaccc

SEQ ID NO: 41675 - DNA, 405 bp, Macaca Mulatta
caggtcctccagcacggtcaacctagagccttctccaaagaacagctgcgcggttcctccctgtccgctgctggcacagaggtacatagatgtctggttggtgctggcggaccccagaatcagggagaagcgctccttcttctctctagagacactgtacccctcaggaatatctcctttttcgttcagtttaacatcatatgagaaatagatcagccgtagccccagacctgggtcttgtcgataccagaacattctttcatggtccatatcctggacacattccagaaaaactttctctcctgtccttttgattagatatcttgagctctgggttactttcacatccacgaggcctacagccaggaaacaaaaggccacataacagaggagcctggttcccat

SEQ ID NO: 41676 - DNA, 806 bp, Macaca Mulatta
  misc_feature (1)...(806): n = A,T,C or G
ggaacccagggattttttctcccttggggaaaaaccaggctttgttgacccccaatgttctccacttttacccttaaaggggggcgccccgggggcggcccaaaaaacgaaattggtttctagaaaaaaggttttttcgaaggggcccagaagggcggccccaaaaaatattattntttttttnnntnatntnnntnntttnnnnnttgggaagaaaaattcattttattgggaattcaaggagaattacccttggactttaaaaacctttcctaatcaattagcttatccctatatcaccaatgtgtagaaaactataacctatttaagtaagatagtttttattagttgcataacctaaaaatatgaggaaatttttggaatatatctctaaaaaagacgactgaattgtcactgaaatatatatttcttgagacagtgggcaaagttcccgtttatgggaaatatcttccttttttcacatacatgaaactgagaaaaattacatcaaatgagaaatatttttctctaaaataatcttaaataccccaataatgcaatacttgggaaatgtacattttcaaaactcagacttgaaacaggttattattaaacaaatatacataaatcttattgtttggcatgatttttcaaaaattagagaactatttaaaccccatactgtgcttaaatcatatttcaaacttacatacctagtgcttttatgttctgaatgtagagtcttcaatttaatgacaatctagactgaaccctgtaatatacaagcaagtcacagttcacttccc

SEQ ID NO: 41677 - DNA, 817 bp, Macaca Mulatta
  misc_feature (1)...(817): n = A,T,C or G
gggagctgcagatcggagatgcagccttttcattaaccaaacttcttgaagccacatctgcagtatcagctcaagtggaagaacttgccttcaaatgtacggaaaatgcacgattccttaaaacatggcgagacctcttgaaagaaggctatgattctttgannaaccntgnatgactaatttggcatacttcgttgtttaataatgactgcaatcattcagacttcttatgtcatatttgtacatgtaccacacgtatagaatgacctctgtccaggagttctgtatatactcagaatgaaatttttctttggttttcttggcttttgtgaaagcagaataccgatgctgttttttgttgcggaaccagtaacttgtttggtccttaaatattttatgccctctgaactttcatgaagcctttttttgaaagtttaacttcatcaaaagatgggtaaaaataaatgaaccaccatggcttccctttaccaactagggtagaccattttttggtttttgcaacaaaaaggctaaccctgggcagaattttgaaaattgcgttttaatctctaaagggacccaggggggggaagggaaacattttaaagggtttgnnnnnnnnnnnnnnnnnnnnnnnnnnnnncttaaggggtaaattttgctccaaaaaggaaatgtgggggcccttatttctctaaaaaccccccccggcccccctaaaaaaaagggggtgtctcaacaaggagactctcccccgcaaaaatagtgtttttnnnnnnnnnnnnnnnnnnnnnntgtttatccccaaacccaccct

SEQ ID NO: 41678 - DNA, 810 bp, Macaca Mulatta
  misc_feature (1)...(810): n = A,T,C or G
gggcttgctcgaaccggaaaggcagaannnnnnnnnnnnnnnnnnnatgccactgctnnnnnnnnnnnnnnnnnnnnnnnnnatccggnnnnnnnnnnnnnnnnnnnnnnnnnnnnnaattattcctgaatgtaatattagacagagtatactacagggttttagactgtaacaagatacgatgaggattctatattgctcggtccatgagtatagctttgtaaaaaatatgccttaagaaacactcttggccaggcaccgtgagctaccgcgcccggccaagatggagtttcttannnnnnnnnnnnnnnnnnnnnnnnnnatgnnnnnnnnnnnnnnnnnnnnnnnnnnnnnnnnngaagtattttgaatctccagtgttagtgttacattttaaagtcatccagttttgtatatcttatttttaaaatagtgttattattttgtccaaataatttttcattctctttgttcctatgtcactgactttaaaattattaggagctccagaatctctgtctctagcttttttgatttaagctctggttctcataaaatcagaatgaagtcccagggttttacaataaaactagaaaaaagaaagagtagtaacattagtcattccaaattcanggaaaagtaatatgcccatgaatacttattttcagcatttgtttatattggtacaacatatcaaaaagttttgggagaatttgataagaaaattnattactgaantggnaggccggggccccggttggctcacgccctgttaatctccagccactttggggaaggctgaaagtgtta

SEQ ID NO: 41679 - DNA, 400 bp, Macaca Mulatta
  misc_feature (1)...(400): n = A,T,C or G
ccaggtgaccttcccccaaccccaggaagctatgacagaggccaggaagccgcccccactgctacccccacggctggactggttcgtgcacacccaggtgggccagctggcccaagacggggtccccgagtggttccatggtgcaatctcaagagagnnnnnnnnnnnnnnnnnnnnnnnnnnnnnnnnnnnnnnnnnnnnnnnnnnnnnnnnnnnnnnnnnnnnnnnnnnnnnnnnnnnnnnnnnagcccaaagcagctgctgccatttcatggtgaagctcttggatgatggaactttcataatccccggggagaaggtggcccacacctcactggacgccctggtcaccttccaccagcagaatccaattgagccacgcagggagctgctgacacag

SEQ ID NO: 41680 - DNA, 579 bp, Macaca Mulatta
gcttaccattttaataagtgcacagtccagtgacgttaagtccagtcacactgtcgtgctgccatcaccactatcatctccagagctgctccatcttctagtctgaatctctatccccactgagccctgactccccacaccccagcttggcccagcacccccttctgcctgctctcctgctggagtcggtcttctgtggcccctcctcccactagtgaggcctcgtctccccaggctcagcaggtgctccagagcttccactgtgcagagggcagcagctgagcatggtctgtgcatcgggcggggtcacttctctgacacacatgagtgtgtcctgttttggccacagttttcctaatgtgtataatggggggaatcgtgctgacctcaggacgtgtcatgggttatgtgaagccctcaacaaaacataccccttccttccagggaaggcctcatgactgtgccgtggaggagtgactttctctaactaagtggagggaaacggtcctgtttgctcagtgttagctgtggaagggaacagtcctctctgctcagtgttacttttccattagttcatga

SEQ ID NO: 41681 - DNA, 762 bp, Macaca Mulatta
  misc_feature (1)...(762): n = A,T,C or G
nnnnnnnnnnnnnnnnnnnnnnnnnnnnnnnnnnnnnnnnnnnnnnnngggcgnnnnnnnnnnnnnnnnnnnnnnnnnnnnnnnnnntaacacgnnnnnnnnnnnnnnnnnnnnnnnnnnnnnnnnnctagccgggcgcggtggcgggcnnnnnnnnnnnnnnnnnnnnnnnnnnnnnnnnnnnnnnnnnngcgtaaacccgggaggcgnnnnnnnnnnnnnnnnnnnnnncggccacttnnnnnnnnnnnnnnnnnnnnnnnnnnnnnnnnnnnnnnnnnnnnnnnnnnnnnnnnnnnnnnngcgaggccacaacccacctggaagccgaagaacagggtcggctttctgcacccagctctgtctgggtaccaaacccaactattttgaatcagagacgaacaggaccaaaggagggaagtttcaacacccaacctaagaagccccaagaggcgcagggtccgttaaccctgcccaactccacgctccttggaaaacgaaaacaaactctggtttctcttcagcgttcacctctctgagcccaaacggatctgtaagtccaactctataccttaatcatcaatctttcccacttgaaccccgtcccagcctagcccatcctttcagcgcgccgactaccccataggtcatcccagctctgtctctttttccaatttcgagagcggaaagaaacccctccctcttctccgttacctgccgcgggcactccccttcttgggtaccggggtcgatcggaaacta

SEQ ID NO: 41682 - DNA, 733 bp, Macaca Mulatta
ggctcttgaatgagcaagctctactgacgccatatgttctgtttacttcttattcaaagcagtggcatgatcattgcagaagcgtctctatgttcagttatcctttcaaaatgaatctacttttcaaatctaaactaaatttttgttcatcttctgatagataattttctattttaaagaccctaatttccaagttcaccattttcattttacctcttttattgtatgattattttcagcacctaaaatggtgcccggcaaatagtaggcacttatgaatgaatgagtgaattttttcattataattgacaccttttatgcctattcataatcttttataccaataaaaatttgctatagtaattgcttcatccttataaatttattgtaacattttatgttaaggagttgtttaattttaccctaatttaatacctttaggaaaaatcattttttgccaatatgaagtgtgcacttacttcttaccacccacgcttatgcatggtaggctaaccaacctcaaacagagagtgatggtgagtcgtaatgcattacatcatgtccgcggttatcattattccttctctctttccacaatcacttaaaaataatttaaatggcctgaaaaattacaaaataaagttgctataagaaaatcacttgatttcattaaaatggacctatcagaaaaataaaaaagaatggaatctggtccctaaaaaaatttttggtt

SEQ ID NO: 41683 - DNA, 790 bp, Macaca Mulatta
  misc_feature (1)...(790): n = A,T,C or G
catcctgaggttagcatcacacttctcccagtggagcccatgacttctgatcaggacgctaaggttgtggctgaaccgcagacgcagagagtccaggagggcaaggacagtgctcatctgnnnnnnnnnnnnnnnnnnnnnnnnnnnnnnnnnnnnnnnnnnnnnnnnnnnnnnnnnnnnnnnnnnnnnnnnnnnnnnnnnnnnnnnnnnnnnnnnnnnnnnnnnnnnnnnnnnnnnnnnnnnnnnnnnnnnnnnnnnnnnnnnnnnnnnnnnnnnnnnnnnnnnnnnnnnnnnnnnnnnnnnnnnnnnnnnnnnnnnnnnnnnnnnnnnnnnnnnnnnnnnnnnnnnnnnnnnnnnnnnnnnnnnnnnnnnnnnnnnnnnnnnnnnnnnnnnnnnnnnnnnnnnnnnnnnnnnnnnnnnnnnnnnnnnnnnnnnnnnnnnnnnnnnnnnnnnnnnnnnnnnnnnnnnnnnnnnnnnnnnnnnnnnnnnnnnnnnnnnnnnnnnnnnnnnnnnnnnnnnnnnnnnnnnnnnnnnnnnnnnnnnnnnnnnnnnnnnnnnnnnnnnnnnnnnnnnnnnnnnnnnnnnnnnnnnnnnnnnnnnnnnnnnnnnnnnnnnnnnnnnnnnnnnnnnnnnnnnnnnnnnnnnnnnnnnnnnnnnnnnnnnnnnnnnnnnnnnnnnnnnnnnnctttacctttagtccaagtggatgaaaagggagagaaagtaaggccaaatcagaatcgctgcatagtaatattgcgtgaaatacctgaatctacccctgtggaag

SEQ ID NO: 41684 - DNA, 787 bp, Macaca Mulatta
  misc_feature (1)...(787): n = A,T,C or G
gggctttcccaggcggctgccgaagatggcggaggtgcaggtcctggtgctcgatggtcggagcatagcttggttttacacattttaggcaggcatgagacatcaatcaacatatgtaagatgaacactggtttggttcgtaaaggcaggacaactcgaagcaaaagcaggacaactccaagtgggagggggcttccaggccaatggtagattagagacaaatggttgcattcttgagtttctgattagccttgccaaagaggcaatgagatatgcatttatcttagcgagcagagggatgactttgaatagaatgggaggcaggtttgccctaagcagttcccagcttgagttttccctttagcgtagtgattttggaccccaagatttattttcctttcacannnnnnnnnnnnnnnnnnnnnnnnnnnnncagggaggattgattgatcccccagaagttcaagaccagtctgggcaacatagtgagaccctgggtctaccaaagnnngnnnnccaagaccaataaaaaacatgtcggccgcctccggccctcgaaaagctcgtcagaccatctcgtttggcgcgccgggccccatcggcgtacatgaaacatgggtccatagctgctttccctgggaagatccccgggccatagacccagctgctttgggatttcgccgcccacaataacaaaaaccgccccgcgccgggggaaacaccccagccggttctctggaaccaaatcccccagaaaagggggagtnttcccggcagcgggcactgc

SEQ ID NO: 41685 - DNA, 626 bp, Macaca Mulatta
  misc_feature (1)...(626): n = A,T,C or G
gggggttactgtggtaaaggattcacttttttaccacagtatacttatcagcaagtgaacataaaaacgcctcttctagtcagaaactggccaatcccgacccccggtccatctagagctccgcccaccgccgaggataagccaatctctttgaggcttgtacaggagaacgccgtgcgtttgagcttgaacatgatcagcctggcagtagcctgatgaacccagaatgagtgagatgtggatcctgaagtangaaatctatgaaaaaaatgacaagactctgaagatttactcggcaggaaggactcaactggaagcttgaatctgacctggaaactgaaaacccttgaataaatgagaacagnnnnnnnnnnnnnnnncnnnnnnnnnnnnnnnnnnnnnnatttggtttggtgctttttggggaannnnnnnnnnnnnnnnnncccggaaattccaaagggcttcccacggaaaaaaataaaacgggaaaaaccccccccccacttaaataaaagggggggggtttctaggnnnnnnnnnnnnnnnnnnnnttaaaaggggtccaaacnnnnnnnnnnnnnnnnnnnnnnnnnnnnnnnnnnntgtttcccccttaaaaaacc

SEQ ID NO: 41686 - DNA, 644 bp, Macaca Mulatta
  misc_feature (1)...(644): n = A,T,C or G
ggggaggcaggcgcctgggagctcccagctggcctggacttggggaagcgcgcccaacccagcccgcgggccgactccccggcgaccccaaggatgccagagggcaggaacgccggcctggaccccacgcgatggaggaagcagcagcagcctgtgcgccgcacggtcagccatgtctgcccgcccccgcggcggcccctgaccgtggcggacatccgtcccggcatggagaacgagcggctgggggtcgtgcgggactccatgtttcagaaccccctcatcgtcaaggctgaactcggcaagccccgggaaagaagctacagtctgcccggcattaattttaattacggactctacatccgagggcttgatggaggagtccctgaagccatcggacgctggaacgtgtttaagcagcagcccacctgcccccacgagctgacccggaattacatcgcaatgaaccgtggggcggtgaaagccggcctggtgactgcccaggagaacttgctctaccgtcagctcaacgacatccgcatcagtgaccaggatgaccggcgcctgaagaagagccgcccctctcctccaacatgacattggatccggcacggcttccaaccttcttgatcgctgcacacgtactn

SEQ ID NO: 41687 - DNA, 282 bp, Macaca Mulatta
tgaattgctgcctatactgagaggagaaaatctaataaatcttaaacttggtgcccagctattgcaagaaatacttatttacattgggagcagttcatgatttagtcctcagaaatgggctaggaatagaaaaatcctgcttactcagttacatgttttttgtatttcacaacgttgtgctaaatacaagtatgttacatttttttcccaccaaaaatagaatgcaataaacatcctcaaattattaacaataattatataagaaaagtgtatctttacagc

SEQ ID NO: 41688 - DNA, 796 bp, Macaca Mulatta
gggaagtagggctggcgtagggccgccatgttgcagcaggatagtaatgatgacactgaagatgtttccctgtttgatgcagaagaggagacgactaatagaccaagaaaatccaaaatcagacatccagtagcatcatttttccacttattctttcgagtcagtgcaatcgtcgtctatcttctctgtgagttgctcagcagcagctttattacctgtatggtgacaattatcttgttgttgtcgtgtgacttttgggcagtgaagaatgtcacaggtagactaatggttggcctacgttggtggaatcacattgatgaagatggaaagagccactgggtatttgaatctagaaaggagtcctctcaagagaataaaactgtgtcagaggctgaatcaagaatcttttggttgggacttattgcctgtccagtgctgtgggtgatatttgcctttagtgcactcttctccttcagagtaaaatggttggcggtggttatcatgggtgtggtgctaaaggtgccaacctgtatggttacatcaagtgtaaggtgggcagcagaaagaatttaacagcatggctacttcatattttgggaagcagttcttacgacaaaacactggagatgatcagaccttcctgaataaagaaaacttaatgtgccttgttacattgggggaacaactggaagagatttcttgaactcctgaacctttttaaaagccttaagtcccatgtttgcacaacaaaggaaatgtttgggccttttggtttttttcccaccttaaaaaaacc

SEQ ID NO: 41689 - DNA, 354 bp, Macaca Mulatta
gatctcctgggaggtcgcaacattccaatcacaggccctctccggaccaggtcagtttcatcgctgcttacctccaagaccccttttaccctttagatattttaagataaaataaataatcctcaagaaataataaacagcataaagtgatacgttctttgaactgaaactaatagctttggtatttatttccatcagtcaaggaatctaaatgtttttctttctccttcctctttaaggttttgtcttttcttgtttatgttatgcattttctttcctcccctcctttcttctttcatagatatgtagtctattgctggctcggtatctcatggagggttactttggaatgtc

SEQ ID NO: 41690 - DNA, 685 bp, Macaca Mulatta
gcacgagggtgacaggactagattctagctctgtcatctacaagcagtgagacctagacaacttacttaaccctctttgtgcctcagtttccacgtctttaaaaagggatggtgatggtgccttcctcctagggttgttgtaagaagttcatgaatacaaagtgctgagatttatgcctggcatatggtaagtgctatgtcagctgtctttgaaaaccctcccttctgcctgtcctctttattccttttcttcccagcccatcagctggagcttttcaggaggagatgaaggtcagaggtaaagttggggctcagtgctgaggttgtaaaccgggccccatgtagctgtccccacattagggtttgctttctacttcccaggtgtttctcagcatgagaatttagtttgctttgtgctgctggacaggttcctgcagaatgacctgttgtacatgttttaagaatttaaatcccattatacaggcctgacttctttcttgctagttctttccatcattcatttattttattcacttggagttagtctgtggctgccatgtgtttgttaggtggcagaggatgagagatggatgaaaaggcaacagtctctgcctttaaggaatattgagtctcttaggtaggaaggagcacataggagaggctgaacctgccgtggcagacacat

SEQ ID NO: 41691 - DNA, 1512 bp, Macaca Mulatta
  misc_feature (1)...(1512): n = A,T,C or G
atggtgagtggactgcgcctggcttcccgaagtggggaagaggggctggttaaaacttgctnnnnnnnnnnnnnnnnnnnnnngccatcggctgcggaacctgcggaccgagtcgccgcggcgcagccgggcctcagtccccttctgtgcagggccgggcggggcgggcagcgggacccctgcgtcctgtctgtacctgcgggcgccacttccgccggccggagccctctcgggaaccccgcgcctccccnnnnnaggactccatggcttttgaggatgtggctctgaactttacccaggaggaatggattttgatagattcttctcaaagaacctctacagagaagtgatgcaggaagcctgcaggaatctggcttctgtaggntaggaaacaaatggaaagaccagaatattgaagatcacttcgaaaaacctgggaaagatataaganngaaatcatatggtacagagactgtgtgaaagcaaagaaggtagtcagtatgatggacaagttgtcagccaaattccaaatcttgatctgaatgagaacatttctactggattaaaacaatgtgaatgcagtatttgtggaaaagtctttgtatgtcattccctccttaataggcacatcctagctcactcaggatacaaaccatatggagagaagcaatataaatgtgaacagtgtgggaaattcttcgtttctgttccaggtgttagaagacacatgataatgcacagtggaaatccagcttataaatgtacgatatgtgggaaagcttttcattttctcaattcagttgaaagacatcagagaactctacacaggagaaaaaccctataaatgtaaacagtgtggtaaagcgttcactgtttccggttgttgtgtaatacatgaacgaactgacactggagagaaaccctaggaatgtaaggaatgtgggaaagcattcagattttcttgttattttaagatgcgtgaaaggactctcacctggagaaagaccctatacatgtaccaaatgtgataaagccttcagctgttccacttctcttcgtgaccatggaagcattcatactggagagagaccctatgaatgtaaacaatgtggcaaagcctttagtggtttgagttccctttgtaaccatagaagtactcatactggagagaaagcctatgaatgtaaacaatgtgaccaagccttcagtcgcctcagttcccttcacctccatgaaagaattcatactggagaaaaaccctatgaatgtaagagatgcggtgaagcctacattcgttccagtcatcttacttgccatgaaagaagtcatgatatagaggctgggtgtagtgacacagcctataatcccagcactttgggaggccaaggtgtgtgtattgcttgagcccaggagttcataaccagcccggattaaaacaatgtgaaacaacctgggcaacatggtgaaaccctgtctctagaaaaaataaaataatgccaggcgtggtggctt

SEQ ID NO: 41692 - DNA, 3367 bp, Macaca Mulatta
  misc_feature (1)...(3367): n = A,T,C or G
gttgagtggcagactgtttaagtgagtgacacttaagaatgccagaaacgttgtctagcctggccccagtagacagaatttgttctctcaagtcaaaaattacctttttgtagcttttatattatttagatgaaaaaatgccattaagaacataattccatggtcctttgtgtacaaaacacattttgaatcaaatacctcaaggtccacctagacctctatggataaaatcataagtttatgatttttagctcctgtgagggtttgggggcaaactacaaagaaaagacatgggtggttcaacccattccactaaaatatgtcgccagattctggccgaactcagtattaccttttttcctaaaaatcatttttcacattttgagtaatagggcttattatgctttgatgtgaaaaaatatcaggaaatgagtgacaataccctatgaaacactagctaaatttttatagtgctccatgcctttgtgtaccttccactgatgatcttgcccatctttggtgttaactattttcatatcttctaaggctcttaacccactcttttgaagccgtgcagtcctttaatatgtcttggtttcttcctaaaagttttaagtagagagcaaaaatacaaatacccaaaggatactgttagtatgtaacttttgtgtgctgctttatttctagagtttgcattttttaattgttcattcacagaaaatcctaatattgccctatatggttgttttttttcctaagtggttaatatttaaacccgctagctgtagcatgataatgtctttgactgagctcatgtagtagaaaggatgtgtctattttctgggacttgttagtcttcacttatttttctataacnnnnnnnnnnnnnnnnnnnnnnnnnnnnnnnnnnnnnnnnnnnnnnnnnnnnnnnnnnnnnnnnnnnnnnnnnnnnnnnnnnnnnnnnnnnnnnnnnnnnnnnnnnnnnnnnnnnnnnnnnnnnnnnnnnnnnnnnnnnnnnnnnnnnnnnnnnnnnnnnnnnnnnnnnnnnnnnnnnnnnnnnnnnnnnnnnnnnnnnnnnnnnnnnnnnncagattctacttgtgccctgcacattgtgaggagtcattaaatatttattaaattaatgaatgactaacagaagaagagaaagattgtttgggagtgataagaatgagtgatgattgagaaattgatggattagtgcaatggattgtgaatgaatgatgctttctagtttcgtaatacgtgggaagtgctatcgcctatagaataagttgatttagacttttttttcttcatttcattaccttgtttaaacttgttaaatcccagccaagaaatgcagctctgtaattgtcaattaactgtactataacatatactaaaaattgtagagctgaagaacccacttgcattaagaacaccactttctgttcatttgcggtattagaggacagatcctgcacacagaggcagaactgcttttggtcaactgaagaaattctttgatttcagtgacttactgatctgtacctgtgcacgtatcatcattttatgcttctccttgtttccccacaacttgaactgtgactctttcaggtatttcttaaatctgtgtgagtactttgtaagcttagggatttgatacatattaatgtcccctttgtcttctctaggttttagcattttattacgtcttaagaaactctgggcccagactttcagtcatatttcttattcctatggtacagttctcacttaaaggcttaattattagtagggttaaatacaaagaggttatctctaaaagtacttaagttttcaaataagaacgtatgtgatacaagatatggaaacaaaagtttttggatttttatgcagtagtttgcaggaaagcaaatacatagtagatcatatgccacttaggtatgttcaggtcatgccagtttattcttgttaggccacacacacatgtatgtgcgtgtaaaaagaatttttaatattgaagcaaacaaattatcagtttaataattttctgttatatagcacaagatggcagataccacctactgtataacaatctaataatccctaccctagttcccctgagttatagaagatgctaaagatttagttgtaaagggaagtaacatgatttttttttctaaaaagctgttttaagctaactattatcttgctattggaaaattatattttaaaacttaaagatatttaaagtgtgctagaaaatttgaacctgataacaactgaaccttttgtcttgaataaatttctcaaatagaactgtgcaaaccctagcactttatgtgttgctgcctccccacacctaggtatgctctgtaataagctcccagttaatggagagatgtgtagaggcactgggaagttaatgaagaagaaaaatcaaccccaagaattcctaagtatcacatagtgtcttttaaaaaataactataggactatggtaatttgagtgcctttcttacttttnnnnnnnnnnnnnnnnnnnnnnnnnnnnnnnnnnnnnnnnnnnnnnnnnnnnnnnnnnnnnnnnnnnnnnnnnnnnnnnnnnnnnnnnnnnnnnnnnnnnnnnnnnnnnnnnnnnnnnnnnnnnnnnnnngagactgatataagcaggcaggatgctttgattattccattcgttatcattttaaggaccctaccaatatttagttctttctttctggcaactaatgttttgggggttggaggcatcccatttagaggatggtgtgtgcacaaatagattagtctgaaacctgtgtccaatgggaaacagtggcactctgccctaaaataaaggccagaatgttgtcctaaatgaatcctttgccttactttaggaccttccttccctctcaaattcaggcataatgtaatatagttgaaagggtgaaaacagtacttgctttctttcagatactggaggaaaagaagtaaatgcatagatgaaattttaaatgtatcattttatctgtttgtatctggagaagggagggataggaattccgtatttcaagatagcaactataatttcatagaaatatatagctaaagattccaaagtgcttttacagagaactgttgaataatatattcctaaagggcagcaatatgccatgttcatggtgaagacagaaaaccagtgtatcagttgtggatcttaggtgggagaggaaacctcaggctcccaactttgacttctctactctcaccaggccatgttaacactgtaaaaccaaactctttgctaagaacaatacagggcagtagtttagtctgctgatgaaactttgtgcttcca

SEQ ID NO: 41693 - DNA, 949 bp, Macaca Mulatta
  misc_feature (1)...(949): n = A,T,C or G
ggaagtctattgaggtgagcttgagaaaaaaaagagaggagttttggaacaagtgcccatgatgagagaagaaactttttgtgatatttttctgcttgtaagtattatcaaatcaactgtatacatgcactatttccaaccatgatttcagaaagacatgcatgtcagagaagagtgaaatattcatgtcttaacttaagtagactgtttttaaacagctggtccagttttttttcctaacattgtaccatatctatcatctgtcanttactggtaaacattactttgatggcccagctacattgcagtgatgtgcacctaaaccctgttattaggaagttaaagcttggaatccaatttttactgggaaatactaaatgggcttttaaaaaacttaagatttatgatctccatccccaatcccgttgacttttaaattcccgaagggttttcccaggggggtgaaannnnnnnnnnnnnnnnnnnnccttggtggtaaaaggaaaaaaaagccccctttggnnnnnnnnnnnnnnnnnncaccccttttttctcccacaaaacccccttcccccgtggggccccccccgggaaaacccgggnnnnnnnnnnnnnnnnnnnnnnnnnnntcccgcgcccaaaaaccccccgcgggaggnnnnnnnnnnnnnnnnnnnnnnnnnnnnnnngggaggaagacgaccctcccccctcttggaaaaatannnnnnnnnnnnnnnnnnnnnnnnnnnnnnnnnnnnnnnttctctcccccccccnnnnnnnnnnnnnnnnnnnnnncccccgggcgggattatataaccccccccctctagtgggccccccccctnnnnnnnnnnnnnnnnnnnnnnnnnnnnnnnntcnnnnnnnnnnnnnnnnnnnnnnnnnnnnnnnncttcctcccccgcggggggggtgcgccatcctg

SEQ ID NO: 41694 - DNA, 655 bp, Macaca Mulatta
ttctgctcaggctgagggtacattctgctgggggagcctgacaatcagcatggacccttgtcagtgagcaagaccatttcagtgccgtgaagaaaatcacataggatgatacgaaggtcaggcaagatgtgagagccacttcaggtcgggtgattggaggaaacccctctgaagaggcactatttggggtgattcacaaaggatgagaaagacgtagctgttgtgcctaaggggacaactttccaaacagaaccgcagagccaggaagcaaccttggcaaggcggaaaatcagaatgcaagtgcctgaaaggtgagtgtgtggaccctgattctggtggctttcttccttttctttactcccttctctccttattcattttaaattctgtttcttcccagaaatctcccatctctctgggttccgtttctcagtcatttgtagctcccctcccagcactcacagatgatgtatgttgacttttggttgaggagccctatatggctaaaatgataccaggctcacaataatgggaagatttgtacaaattagagttgtaacactgccaaacagtgctttctgtgctttggaaatgaatctgaagtcagccaaaagcccgttaaaacccacatccaaatcttctactatgtttcaca

SEQ ID NO: 41695 - DNA, 381 bp, Macaca Mulatta
tggccaggcaaaatcagagttgagcctcagcaaaacgtgtagccacttgaaattgatagagctttcctttgtgtttagttttatggttctctctgtatgtcattgttcctcttagttgagtttttgcctgtcaaagagatagaggactgcttttatgctgagatcctcaagccaaaacccacagtaaaagcaaagtaaaactttgaggctttcagcttttactcagtggtggaattacttcctacttccttcccattaggttgaaggtgtgattctctctggagaaagttgttcccaaaattcatgtgtatttcactcaggattgaagtgatacaatttcatcattttcggtagtgtttcctgatggcaacaaccaaatgg

SEQ ID NO: 41696 - DNA, 554 bp, Macaca Mulatta
atcttataccatagagcttaactttctttaaatatgtgtaaactgaaagtaattctgtgctcttttagacatggggaatttctctgcaaagtttgttatatggagtcattgtatttgtatttaaactgaccttagatgtatcaatttattacctattacatagtatttgaaaataattatatttattttgtcttttagcaacagatgaaatttagtcttacacccagacagactattcacctaattaaatatgaagggtctgtgaaggtctccatgacaccctgtaaccagctgcaatttgacattagactggacgttctgattacttacactttttgttttagttcttttcctgagctttaattgtacaaatatgtcctaaaacaccaacttattaagaggcttaatgcctgttaaatgcatcagcgctcttggcagcttaacatgaatgctatctttgcatgggaggtcgcactttagaagcaactttatggatcagttcccaggttgatgttgcatatgttcattttacaacctgtgtgcataatctctca

SEQ ID NO: 41697 - DNA, 615 bp, Macaca Mulatta
  misc_feature (1)...(615): n = A,T,C or G
acagagtaagcctcctgcagggntagatgacaactctccgatcggaagttactgttgaagctaaggcggccataactgataatggcaacaggagtttcctggcttcctgtttccaggntgacgtagatttttttccttcgccagtctcaccgttacccggggcaacagctgagcagtctgggaagggatgcatcttttcttctgtatgcttgagtcaagaactctcagtcatcttggtaataccgggttggatgcttaaagctgcagcaaaaagaccagaactttcaggaaaaaatactgtatccaacaactcagatatggcagaattgaagtcaatgttccgggaagttcttccaaaacaagggccattgtttgtggaagatataaccacaatggtgctgtgtaaacccaaacttttacccttaaaatctctgactctgcaaaaactagagaaaatgcatcaagcagcacagaatacaattcaccaacaagaaatggcagaaaaggatcaacggcaaataacccactgaataactgagcactttacggaacaacctacattatctactatttaacaataactagaaaatatgcttctgtgtgctgaaagtagta

SEQ ID NO: 41698 - DNA, 815 bp, Macaca Mulatta
  misc_feature (1)...(815): n = A,T,C or G
ggnnnnnnnnnnnnnnnnnnnnnnnnnnnnnnnnnnnnnnnnnnnnnnnnnnnnnnnnnnnnnnnnnnnnnnnnnnnnnnnnnnnnnnnnnnnnnnnnnnnnnnnnnnnnnnnnnnnnnnnnnnnnnnnnnnnnnnnnnnnnnnnnnnnnnnnnnnnnnnnnnnnnnnnnnnnnnnnnnnnnnnnnnnnnnnnnnnnnnnnnnnnnnnnnnnnnnnnnnnnnnnnnnnnnnnnnnnnnnnnnnnnnnnnnnnnnnnnnnnnnnnnnnnnnnnnnnnnnnnnnnnnnnnnnnnnnnnnnnnnnnnnnnnnnnnnnnnnnnnnnnnnnnnnnnnnnnnnnnnnnnnnnnnnnnnnnnnnnnnnnnnnnnnnnnnnnnnnnnnnnnnnnnnnnnnnnnnnnnnnnnnnnnnnnnnnnnnnnnnnnnnnnnnnnnnnnnnnnnnnnnnnnnnnnnnnnnnnnnnnnnnnnnnnnnnnnnnnnnnnnnnnnnnnnnnnnnnnnnnnnnnnnnnnnnnnnnnnnnnnnnnnnnnnnnnnnnnnnnnnnnnnnnnnnnnnnnnnnnnnnnnnnnnnnnnnnnnnnnnnnnnnnnnnnnnnnnnnnnnnnnnnnnnnnnnnnnnnnnnnnnnactcccacggttatttattggattccacaattccctcttttggtctggcttcatcccgccaacttactaacccccacttccacattgaaaccatccactttcgggctttcgaaagccggccgccttggaaattgaacccctttcctggggagggttatactggaataacccccccaaaaatttcctggcag

SEQ ID NO: 41699 - DNA, 818 bp, Macaca Mulatta
ggggcccaagtagaaaaatcaattatatgctatgataaattgtttatcaatagttcagtaattctgcatatatttccttgcacatagtagataattgaaaatttttaaaagagtgattcatatagttgttgctgatctggaaattgtagcacatattaccaggattgccatacaaataataatttatatttttcaaatagtaatcaaaataatatggcaattcatatcagttcctaaaaactggctttgcaatttattatgtgattacttttattttaaagcagtcagtaaagttgatctcttttgcactagctgtagagagaggcaagtaggcctccagaatcatcctgaccaatcaaaatgagctacccatggaaaaagtgttgcacagataaatcacagaaaaataaataacatgaaacataactgagaatgttcttagaatcttaactgagctcaattggaaacaaaaagggctttgtttttagcatggtgcaattaactatatccagtcttgcttttcttcagcaagacttttatgaattaggtaaagacatgtctaattcattaaatacagacatcatcttcaaactctagcccaaaggaataaaaagtatagtttggccttgattattcaaatattttccctaagttttctactttacctgactaacatatacatataggttggttttattataattgattaatataaagtatttgttttatttaatactataaatgtttgacacatatatttcctgaaaatactttttgtgattttggaagacctgttaaatgccaatttgtttttcctc

SEQ ID NO: 41700 - DNA, 723 bp, Macaca Mulatta
  misc_feature (1)...(723): n = A,T,C or G
ggactttggtgtcatttcagccaacataacaacattcagtcaaatcccaaagccaaatggataatttcagatggaatggagttagacaggaaccggcttccctttctcctcttactatgaggacaacccacacctgctcagtggcctaaaatattttaaatatgttcatgacaattatgctgcaaatgccagaataacactgatggaacccatgacttcaccaggattgtggtctacatttacaggcctaggactggaactagaccagcttagagagtgggagatatccctccattcttgtccatcgaaggataaaagtacaggctttcagccaggtgtggtggtgcatgcctttggtcccagctactcaggggcctgaggtggggaatcctttgagcccaggagtttgaaaccagcctgggcaacacagtgagagaccgccatcttnnnnnnnnnnnnnnnnnnnggctttcagtatgagtaaaaacttatttttaggccttttatgactttataaataggcaataatgagcaccgagggaagcaaaacattgaaaataattttaaaatttgttgtagaacattcatatgaaatttgaaactgcaaaacaatgtaaaatttaatgtcatgttgtcatttacttttgtgtatattgatgctgtttaattttcaaaagtcctatccaaaaaattgcaaaaaatgtccttaattttccttaaaac

SEQ ID NO: 41701 - DNA, 813 bp, Macaca Mulatta
  misc_feature (1)...(813): n = A,T,C or G
gaggcaggtgttatagctgannnnnnnnnnnnnnnnnnnnnnnnnnnnnnnnnnnnnnnnnnnnnnnnnnnnnnnnnnnnnnnnnnnnnnnnnnnnnngcggtctcaaacttgtgagctcaagtgatctgnnnnnnnnnnnnnnnnnnnnnnnnnnnnnnnnnnnnnnnnntcactgcgcccagcctgagaaattgtatttctaacaggttcccaggcagtgctgatgctgctggtcccaggaccaacactttgagaaccactgcactgagccctgccatgttctatctcccaccttgacactgaatactgcctgaaataagtgactgatcaactgaggcttggtagagtcttggtttaaatgtcagaaaaaaagtttcacttttgattcatgacaatggggcagcaagggccatgaattaagatcttccattcatggcggagagatgctgtttgtcctctatatctcagaggcgcgattagctgtactgcgtgatttctgtggaagtccctgtctcccagcagctggggccgcagcgaataagcaggtggagatgtgctttgcagcttacggaggtattcaaggtcagctctccccatgggtagaatccgtggctgttgatatgatagagtttgggagcctcagaagaatgccattttattgcattcctgctcagtaccctccagaaaggacccttagggctcccttccacatgcccttttgaaatgagagatcccctggacggaccggcaccactggctaacccttatcatgaacactcagtgtaagtttgcccagaagaattcccggggc

SEQ ID NO: 41702 - DNA, 701 bp, Macaca Mulatta
tgcgggatgcgctcggaaaaggagggggtcggaggccctagggcggccgttgccgcgcggggaccgtgcgggagggaaaagctgtcggccctagaagtacagttccaccgcgactcgccgcagcgggaagctgagacgcagccaacctcgtcctccggttgcgggggcggtgcgggcaaacctcgcgaggagaagaggacggcgctgagtaaggtggtcatccgccgcctgcccccgggcctcaccaaggagcagctggaggagcagctgcgcccgctgccagcgcacgactacttcgagttcttcgccgccgacctgagtctttatcctcatctctactcaagagcatacattaattttaggaatcctgatgacatccttctttttagagatcgttttgatggatatatcttccttgacagcaaaggcctagaatatcctgcagtggtagagtttgctccgttccagaagatagccaaaaagaagctgaaaaaaaaagatgccaagactggaagcatcgaagatgatccagaatataagaagtttttagaaacttactgtgtggaggaagagaagaccagcgccaaccctgagactctgctgggggagatggaggcgaagacaagagagctcattgctagaagaacaacacctcttttggaatatattaccaattgaaaattagaaaagccgagaattcg

SEQ ID NO: 41703 - DNA, 772 bp, Macaca Mulatta
ggtgaaatacataaaacatacaaccattctctaatacatttcagaatgtttcactggttaaggagccagtaaataaagttgactctaaacaagaattttaaataaactgaacattttttaatcactgagcatcatttatatattggtttctgatttacatatgtgatatcaaaagaaaatctctgactattcttttttgcttgtattaatttaaagtttatcttatttcatttcccctttcccacaaatcagatatacagtgggggaaaggggaaaggactacatggttttgacacagtgaccttttattatataggttaccaactgctagccttcatatttttagaaagggctgatttgattagacccatctatgaggttctgttttttcttactagaaatttcatgcattaaatgttgggtaggattaagtgatgagacgacgggtccaaatttattaatcattgagaagtgttgaagtattaccaaccatcttactcatttctctatttcttcccctcagtcaccagtcagaacaggtcatcagtagttgtgtaactaagatgaagaggaactttggtgtcagtggatacttagtgatgccagtagtttttccaagcttgaaattatactgtgactatcaggcaatatttagatgggggtaatggagaaattttaaaataaaggaatttttctctttatgttgacataaagtaacatctgatgctatagaagcttaattattcaaatattaattgggacctgaaatagt

SEQ ID NO: 41704 - DNA, 428 bp, Macaca Mulatta
  misc_feature (1)...(428): n = A,T,C or G
ttccctncaagggaaggccatggtgccgacgggcagaaacaccatgatgcgcaaagccacncaaggacacctggaaaacagcccagctctggagaaactgttgcctcctctccaggggaatgtgggctttgcattcaccaaagagtacctcactgagatcagggacctgctgctggccaataaggtgccagctgccgcccgtgctggtgccattggcccatgtgaagtcactgtaccagcccagaacactggtctggggcccgagaagatttcctttttccaggctttaggcattaccactaaaatctccaggggcaccactgaaatcctgagtgatgtgcagctgatcaagactggagacagagtgggagccagcgaagccacactggagaacgtgctgaacatctcttccttctcctttgggctgg

SEQ ID NO: 41705 - DNA, 781 bp, Macaca Mulatta
  misc_feature (1)...(781): n = A,T,C or G
ggtaagctgtagaaaatttttctataacaataacaacaaaaaatgctacagtgaacatccttgtacaccaaaaaagcatgattttatacttttacctccatggagaatacacaaaattccatatgggggaagtgtgtgtggggagaatagctaaaaatgccatactatgttacaattttgtctttatatttactgagttctttggatcgttagtagacctattagctactctagaatcacaataatgaagagctgtttnnnnnnnnnnnnnnnnnnnnnnnnccttattctaatctatacaataattaaagtgaacaacgcattccttttattcagggaaacttcactcaacccacatcttttgtcttctattttctgttctcacttatatgacatgtgaaattatttgtgcttcaaaactgaaatttgaggtaaaaatattttgcattaatgacttctctaacttccaaaatactttcattacctcatttcctcttcatgctatctgagaagtggttttattctctattctctcaatattcagtttacagaacagagcatattcttacagaaggaagtattactgcataattcagaatggttttgaaaaactgtttagctttagtaggcggttttgtgattttatttgaataggggtgtatctgatattcagggaatttccttctagcaaaatgatgaaacaatgaggccataatattaaaaacctaatttaagatgaacccttcctgtttttcacatcctgggaaagcctgtttgagtc

SEQ ID NO: 41706 - DNA, 389 bp, Macaca Mulatta
atagtcctccccacgtaagttaactttaagttttggtcccagccttaacttttcagcaagggctccattctattttgtttattgcaaactgttttaaacagtggggtgtcctacgtcccatggcctggaccttactgtgagacaggccctgctggtcgttagcagcaaccaccctatatggtaggaaatttgtttatggaggaggaaaccgagttaggagtgaaaacaccaaatcatataactaactccaacaaccttgactgtctagatccctccacctcccctaataggtagcaaggggctcctattccactccagtctctcatctccaccccccaccccactcctgtctccccataggtgttctcttagaaagctcaagattttca

SEQ ID NO: 41707 - DNA, 240 bp, Macaca Mulatta
cgggaagctgggctgggacggcttagttctgcttccagctcctctggcgccaagtgcatccccgccccctcgttgccgttggtagccatggagaccttctgtgagacggtgcagttttatctgaagcacctggaggagagcgtgtaccccgtgatgaccgaggagcaatttgccctgaaggtgtttcccatgtatcgctactttgtgacggtgtggctgaggcaccacaaccctgaggtg

SEQ ID NO: 41708 - DNA, 270 bp, Macaca Mulatta
ggaggaggccgctataaggagtacctgggcagctcgcccgacgcctacggtgggggccgcaacagttccagcaacagttacggccggagcgatagctactcgagaggtcgagatcgggtaggcagaccggatcttgggctccctctgcccatggaaaggagcagccctcccctgcatgattcttacagccggtcgagctgcagggtgcccagggatggaggccgtcaaggaggccgcttggagagaggggaaggctggagcagatactaa

SEQ ID NO: 41709 - DNA, 910 bp, Macaca Mulatta
tccagaacccactacggaagctgaacattctacacccctgaagcagactctagttcctccaaagtaccatcaggtgacacttccacatccagaccaggttcagactcagcattcacacctgactcaagccacagttcaacctttggacctagggtttaccatcactccagaatccacgacagaggttgaaccttctacagccctgactacagctcctcctccaaaacaccctgaggtgacacttccaccttccgacaagggtcaggctcagcattcaaacctgactcaagtcacagttcaacctctggccctgaagcttaccataactacagaacttcctatagaggttaaacagtctccaaccacggaggagacctcaactcagcctccagacctgggacttgccatcactccagaaccttctacagagattggacattctatagccctggaggagactacagctcctcgtccagaccaggttcagactctgcatcgaagcctgactgaagtcacaggttcacctactgaactagaacctactcaggattcactggtgcagtctgaaagttacacccaaaataaggctttaactgcacgagaggaacagaaggcctccgcaagcaccaacatatgtgagctctgtacctgcggagatgagacactgtcatgtattaatctcagcccaaagcagaggctccaccaagtgcctgtgccagagcccaacacctacaatggcaccttcaccatcttgtaagaatcacctttcctcgattgtcctctgtgtcctgcctgacatggcagccttttcctggaggccttcctgggccttctttatctccccaagccatacgggcaactgactttctgctttcacctttgcttgtcaactctcccttctctttattct

SEQ ID NO: 41710 - DNA, 913 bp, Macaca Mulatta
  misc_feature (1)...(913): n = A,T,C or G
ggaagnnnnnnnnnnnnnnnnnnnnnnnnnnnnnnnnnnnngggggtagtggcttcgtcctccgcttttctgttcctccgctgacgtctcctagctctcgtcagcctcccgccggcagtctccttaacaccgaacaccatgccttcaattaagttgcagagttctgatggagagatatttgaagttgatgtggaaattgccaaacaatctgtgactattaagaccatgttggaagatttgggaatggatgatgaaggagatgatgacccagttcctctaccaaatgtgaatgcagcaatattaaaaaaggtcattcagtggtgcacccaccacaaggatgaccctcctcctcctgaagatgatgagaacaaagaaaagcgaacagacgatatccctgtttgggaccaagaattcctgaaagttgaccaaggaacactttttgaactcattctggctgcaaactacttagacatcaaaggtttgcttgatgttacatgcaagactgttgccaatatgatcaagggggaagactcctgaaggagattcgcaagaccttcaatatcaaaaatgactttactgaaagaggaggaagcccaggtacgcaaaagagaaccagtgggtgtggaagagaagttgaaatgtttgtgcctgaacactattaacacttgttaagggattggttcccaaataactaagtttggcacctggctcctgtttttaaaaattggtttaaataatttagaaccaaacccggttatgaaccaaattggccagccacgcccaagttccaatattggtttatttaccaaaaaaattggcccccctttggcaagtgggaaattttgaaataaaaattcccaaaacctagggggggagatttcctttataaagaaacccaaaagattttttttta

SEQ ID NO: 41711 - DNA, 782 bp, Macaca Mulatta
  misc_feature (1)...(782): n = A,T,C or G
ggggggcggggcgtctcgggcgctgagaggacgtgaccccgcaaaagggtctagctnnnnnnnnnnnnnnnnnnnnngannnnnnnnnnnnnncagtacttctacctcttcctcccaaaatagtgggattaaggcatgagccacctcgcccagcctgaatggtgttttaaatgctgatgaaacagatgttcttgttaccttatcatatgcttcatgccaaaggtagactttgcaaaggaaataaacagattgatgattggtgtattctactgtaatgcattctggaacaattgtctttggcaagtcagctaactatcagtacttcagaaatgttccccccgtgattaccaagccaatacacatgcctgagtaatgagaaatgtgttactgaatgactgataaagattgacaagggaatgcaaggagcaatccacagtatcctcttgctgatagacaattgctctgcccacaacatactcccacacttggatcatgtaggagttgagcttttcccattgaactacacagccattctgcagccattggatgagggtgtaattggcacagagaaagctcacttctgaaagcagtttctaaatatagagaatgaagagaaaatggagaaaaagcacatgaaataagccattgacatgattgcagaaaattgggtgggtctacaaagttatcctgtaatcatgaaaatgttagcaaaaacaccggccttgattccctgtgggaaatcccccgaagggccctcccggtaagggaaggctgccaaccca

SEQ ID NO: 41712 - DNA, 250 bp, Macaca Mulatta
ctttcactgagttttctgattcatgggggtgaggtgggaatgcagtagaaggggattctcaaagcatgattccaaagtaagacttcaggtgtgaactcatagtgccaaactgctccaatgtcacagatcaactacaataaaatagaagcttttcactgtttcaatttgataaatggaatgctttcggatcggtaaagcccccagtattgctgtttataagttcatccatgattttagaacttaggatatc

SEQ ID NO: 41713 - DNA, 244 bp, Macaca Mulatta
gctccaggaacactcggaggaggtgtctggctttctcctggagtgtgacagctccgtgcagggcgcactgcagaagcacctcgcgctatacaggatccggcggaaggtcacggtggagccgcacccggagctgcgagtgtgggcagtgttgcccagttcccctgaggcctacgggaatgcaccgttgcaggagagtgcaggggctgctgccatcctcatccgcgacccgcgaacagcacgcatg

SEQ ID NO: 41714 - DNA, 1058 bp, Macaca Mulatta
  misc_feature (1)...(1058): n = A,T,C or G
tggaggcacctcctctcatggttgtgttagaatataagcacaactttaaaatagtatccacgtgtttgtatgaggtgctatttgtaatgccgaggttgtccctcaaaagcattgattcaatcattttgacttccatgggagtgaacaataaacatatgcctagggccccaataggagccaatgaagtcatctttgcttcagagctaaaccagtttttcttctctccacagcaaatatcttgacagtgatcatcctctcccagctggtggcaagaaggcagaaatcctcctacaactatctcttggcactcgctgctgctgacatcttagtcctctttttcatagtgtttgtggacttcctgttggaagatttcatcttgaacatgcagatgcctcaagtccccgataagatcatagaagtgctggaattctcatccatccacacctccatatggattactgttccattgaccattgacaggtatatcgctgtctgccatccactcaagtaccacacggtctcatacccagcacgcacccggaaagtcattgtaagtgtttacatcacctgcttcctgaccagcatcccctattactggtggcnnnnnnnnnnnnnnnnnnnnnnnnnnnnnnnnnnnnnnnnnnnnnnnnnnnnnnnnnnnnnnnnnnnnnnnnnnnnnnnnnnnnnnnnnnnnnnnnnnnnnnnnnnnnnnnnnnnnnnnnnnnnnnnnnnnnnnnnnnnnnnnnnnnnnnnnnnnnnnnnnnnnnnnnnnnnnnnnnnnnnnnnnnnnnnnnnnnnnnnnnnnnnnnnnnnngccacactttgggccccccgcatcatcatgattctttaccacctctatggggcgcccatccagaaccgctggctggtgcacatcatgtcggacattgccaacatgctagcccttctgaacacagccatcaacttcttcctctattgcttcatcagcaagcggttccgcaccatggcagccgccacgctcaaggccttcttcaagtgccagaagcaacctgtacagttccacaccaatcataact

SEQ ID NO: 41715 - DNA, 790 bp, Macaca Mulatta
  misc_feature (1)...(790): n = A,T,C or G
ggtgnnnnnnnnnnnnnnnnnnnnnnnncnnnnnnnnnnnnnnnnnnaggannnnnnnnnnnnnnnnnnnnnnnnnnnnntatcctggtnnnnnnnnnnnnnnnnnnnnnnnnnnnnnnnnnnnnnnnnnnnnnnnntgtgnnnnnnnnnnnnnnnnnnnnnnnnnnnnnnnnnnnnncagnnnnnnnnnnnnnnnnnnnnnnnnnnnnnnnnnnnnnnnnnnnnnnnnnntataccaccgtnnnnnnnnnnnnnnnnnnnnnnnnnnnnnnnnnnnngaaagagtttaaaattttgcatatggaagctgggtgcataggctcacacctatcacacctatgatcacacctgtcacatctgtcacacctataaccacaagtgctttgggaggccaaggtgggagggtcaactgagcacaannnnnnnnnnnnnnnnnnnnnnnnnnngtaagaccccatctctacaaaaaggaaaacattagcttggtgtggtggagcaaaccggtggtcccagataactcagaggctgagacaggaggatcacctgagcccaaggagtttttgaggctgcaatgagctctgatcatgccactgcattccagcttgagtaacagagtaagacctgatctccaatacatacataaattttcatagaactaaccccgaagaaggagaggcggccttttgaacccccccgggtctgaagagagcccttaaggggtttccgggacagctttcgttcaaggggttcaagccggaaaggaagttaaaaattttttccaccccagttc

SEQ ID NO: 41716 - DNA, 592 bp, Macaca Mulatta
tgtcctttaaaaaagaaaagtgcatatttatcccaaatgtgtatttcttatacgcttttctttgggataccatttcctcagcttatctcttttatatttgtaggagaaactcccatgtatggaatcccactgtatgacttacaaacagacaatatgtgagtgccttttgcagaagagggtgtgtttgaaatcatcagagtcagccaggagctgtcaccaaggaaacgctacctctctgtcccttgctgtatgctaatcatcgccagaggtgcttcaccctgagttttgttttgtgtatgttttctgacagtttctgtgttttgtttggcaaggaaaggggagaaaggaatcctcctccagggtgatttcatgatcagtgttgttgctctcggaagacatttttcagtttgcttttgttccaatgtcaatgtgaatgtccacatgaaacctacaaacctgtcacgcttcctcattccctctcatctcaggtagaaggttgacacggttgtagggttacagagacctatgtaagaattcagaagacccctgactcatccatttgtgggtggcagtcccttgtaattggtgcata

SEQ ID NO: 41717 - DNA, 634 bp, Macaca Mulatta
aggtgtgttcaatactaccttcactgtagtttccctatttatgctggaaagggcaggaagaaggactctgcatatgataggtcttggagggatggctttttgttccatgctcatgactgtttgatattaaaggatgagtataatgggatgagttttgtctttatcagggctatcttggtctttgtggcctttgaaattggaccaggtcccattccctggtttattgtggccaaactcttcagccagggcccctgcccagctgcgatggcaatggtcagatgctccaactgtacctccaacttcctagtgggactgctcttcccctctgctgcttactgtttaagagcatatgttttttatcttcatcggcttcctcatcaccttcttgacctttaccttcttcaaagtccctgatacccgtggcaggacttttgaggatatcacatgggcctttcaagggcaggcacatggtgcaaatagatctgggaaggacggcatcatggagatgaacggcacccaggctgctaaggagaccaccaccaatgtctaagtcatgcctccttccacgtccctcccagcatgggaaaggcacctctccctgaacgaaggagacacgtcatcaggatgaacccag

SEQ ID NO: 41718 - DNA, 914 bp, Macaca Mulatta
  misc_feature (1)...(914): n = A,T,C or G
ggnnnnnnnnnnnnnnnnnnnnnnnnnnnnnnnnnnnnnnnnnnnnnnnnnnnnnnnnnnnnnnnnnnnnnnnnnnnnnnnnnnnnnnnnnnnnnnnnnnnnnnnnnnnnnnnnnnnnnnnnnnnnnnnnnnnnnnnnnnnnnnnnnnnnnnnnnnnnnnnnnnnnnnnnnnnnnnnnnnnnnnnnnnnnnnnnnnnnnnnnnnnnnnnnnnnnnnnnnnnnnnnnnnnnnnnnnnnnnnnnnnnnnnnnnnnnnnnnnnnnnnnnnnnnnnnnnnnnnnnnnnnnnnnnnnnnnnnnnnnnnnnnnnnnnnnnnnnnnnnnnnnnnnnnnnnnnnnnnnnnnnnnnnnnnnnnnnnnnnnnnnnnnnnnnnnnnnnnnnnnnnnnnnnnnnnnnnnnnnnnnnnnnnnnnnnnnnnnnnnnnnnnnnnnnnnnnnngcatctacttgggcaaaccccatccccaaaaaatcatacctacacgaaaacaaaactatcattttctcccccctttttcctttttgtttcatgtcaattaagaacctgtattttcgccacattacaagggggggccttgtatttcaaactgaatttcccctttaatttcctgaagggcttacaacccatgtagatcaaacaatcttgtgggcgaacggccccgtctttatatcaacttaaaatttccttagggtgagcattagaatatatacccattccattttatcccagtaaccatttcccctgtgcgccacgtccccacgaaaataaccatcccagcagctctacaattattgaaatattataccttatactgcttgtgagtggcctaaaagggaaaaaaaacttgcggtattagcactctcaccagagaaattcccaactctacacacatcacaccatgcgaaagctatgggg

SEQ ID NO: 41719 - DNA, 853 bp, Macaca Mulatta
  misc_feature (1)...(853): n = A,T,C or G
ggtgtttccattaatatggtaaaacatgtttgtgtgttaaaagttagaaagtgatgatgttgttgcaataaatgttgattgagagggactacaagggggtctctggtgtgttgataatcttctatttattacagtttaacctgttcaggcacaacccttacagacataagtttactttnnnnnnnnnnnnnnnnnnnngatattgaaattcattgatttactgttacatttccatggaatcattcttaagtaacctgaatttcaacagtaaaattctaaatgaatcacaataagtttggaaaaattcctggagaatttccaaactgctaaatataggaatattgattaatgcaattccagaaatagcgatattttcatgaacaattccctttatgcaagattttttgaagccaggattaaacttttattatcagtcaaaattaatctttggcataaaagccacttgggaatccgctttatttataaaatggacaatcccggtattttataatttcataattcgcatttcaaaattttattccaatagccatgtttatactatgctaaaaatttcatcctttaaagttaatttacctttaacattcatttggtttcctcctccaaatcacatttgggttctacttaagccaaaaaaaaccctttgattatttaagcgaaaaacccccttattgcaaatttaaaatgtagataaatctggctaaaaatattggtcttgaaaaatattttttccaacaccatttgtgttgtacccccctaagtacttggtaaaaaatattcccccggttgttaaccacaccatttttaccctccccgaaaattctacacaggatag

SEQ ID NO: 41720 - DNA, 847 bp, Macaca Mulatta
  misc_feature (1)...(847): n = A,T,C or G
gggaaaacagtgaaaaacaactgatgtcatactgaaaatctgatgactttaaacccaggtgcttgcgacttgttcagcgttgttgtggaaattctaatcaatgcataaagacgtggtttagaaataaagaatacacctattgcaaataaagagggaaaattagtgtagagatatttataaacatttacaaaatacaagataattaatgggaagatgagagtttattaggagagagagaaagaggctaggaagtgctacagtctttaaaacaaccagatcttgcatgaactcacagcgagaactctgtcattaccatggggagggcaccaagccattcatgagggatccacctccatgatccaaacacctcccaccaggccctacctccagcgctagggttatgtgttttcttgggacagggtctcactctgtcacttagactggagtgtggtggcacaatcatagcttactgcagcctccacctcccgggctcagtcagtcctcagcctgnnnnnnnnnnnnnnnnnnnagcatgtgcccacatggttgggcagaatttttctatttttttgtagagactgaagtcttcaatgttgccccaggctaacccttggaactcctggggtttaaccttcaccccaaaattggcctccccaaaattgctggggaattgcagggaatgaacctgcccatggcctgggcctctggggggttaacattttccattccacccatggaaaaatttggaagggggaccaaataaccccccaaatcattattcccccaacccatttttctaagaaaaaatgggaaattttttacccaaaaaaagataagccctcttttc

SEQ ID NO: 41721 - DNA, 741 bp, Macaca Mulatta
ggtgcagagggaatgatgggtaaatttcctaagtttatgtgaatttggggagtgtatgcattttgaaacaatctactaacagatggtgctgaaatctattacctacatgttatctagttgtttagcattatgttaatgaaacctccttgtaaggagtgtttctttggcacagttggtaggttgactgctaacttcatttaaatgtgttactggatatgcaatatactgagattattaatccgttttttgtgtatgggaaaagagaactgggttaaaagaagcaaattaacttgttctgaaaagaaagtatagattaattttgttttctgtttaaattttatctctttggtaaagatttttttttcctaggcagaaagcttggcatttttaggcatagataccttaccttacaatgccaaaatgaatttaattccagtactcaggtttttccctttaacagactctatgtgtatcagggctttctaatgggtttttcttctgtttttaaaatgtgagcagcatttgaccaatttccagtgctcttagcattttacttaacgaacaaccactacaaaagaaaatatttgtaatttgattgtgttttgctttgcttcatcaatgcctaagaacttaagaatactcctacttcattagctactcaagatgctgtgacaatcacatctattctacataatgtgtttagaaaccaagaattggggtgaaaaatgaaataagtatatt

SEQ ID NO: 41722 - DNA, 784 bp, Macaca Mulatta
gggaaaagggctatggcaaggatgctgctggcattgctatggaagccattgcttttgcacgtaaccaaggctttgacgtggtgctggtggacacggcgggccgcatgcaagacaatgcccctctgatgactgccctggccaaactcattactgtcaatacacccgacttggtgctgtttgtaggagaagccttagtaggcaatgaagccgtggaccagctggtcaagttcaatagagccttggctgaccattctatggctcagacacctcggctcattgatggcattgttcttaccaaatttgataccattgatgacaaggtgggagctgctatttctatgacgtacatcacaagcaaacccatcgtctttgtgggcaccggccagacctactgtgacctacgcagcctcaatgccaaggctgtggtggctgccctcatgaaggcttaacatggctcttgcccaataccaaattgccgctttccccacaagcccttcttcctgtatcaagaatgtgctttagagtatgtgagcaacttgtcttcagtgtagtacaaaggcagagcgagggggcttgtggctccttcccaccccattccccgttcagcacagccgccatctgccaagaaggccctaatcatgtttaaaatcactggcccactggacccttctccccaacaaggtctccccccttttcttacttcagggcaccccccccttcacctctgtccctaacataactccaagtcttcatttacaagcctctttgaaccaaaatggggttt

SEQ ID NO: 41723 - DNA, 570 bp, Macaca Mulatta
  misc_feature (1)...(570): n = A,T,C or G
gatgaaatgggcggaattccaaagattaggaagtgctttccaacaggtgtatccaagaagtaggtcttcaagaggatcccctctcacggtctgctctgggtttcccttctccatgtccttcaatatgggatgtcccccaacagcactcaagtccaagatggaggaagaattctccagaaccttcagaaagactaatccaggagagttcaggggcaccacccccagaagcaaattcactgcaaggtgccttgtatttatgttctgaagaagaagctggaagcaagggtgtacttactggggccatctgaatggaagcattcctccacatcaatttaaaagaacgcttagtagtaacatttgggctctaatgccagctcacctgtacctcatcagtgcttacagcctaacaactttggagcgatatatgaactaatgctttagganactcactccagtgttctcttgtttggccctagactcaggcttaatttgtaagtggagtagaatctcccaggaagtatgatggaactganaagaaggacagcaatagctggctcggtccctgctctt

SEQ ID NO: 41724 - DNA, 556 bp, Macaca Mulatta
ttctatctgcctctccaggatgtctacaaaattggtggtactgatatcatccctgtgggctgagtggagacatgttctcaagcccagcatggtggtcatctttgctccagtcaatgttacaactcaagtaaagtctgctaaactgcaacatgaagttttgagtgaagctctttctggggaaaatatgggcttcaatgtcaagaatgtgtctgtcaaatatatttgttgtgacaatgttgctggtggcagcaaaaatgacccacaaatggaagcagctgcattcactgctcaggtgattatcctgaaccagccaaatcaaatcgttggtggctatgtccctgtactggattgccacacagctcacattgcttgcaagtctgctgagctgaacgaaaagattgcatattattctggtaataagctggaagatggccttaaattcttgaaatctgatggtgctgccattgttgatgtggtttctgacaagtccacatgtgttgagagactctctgactattctcctctgggtcgtttttctgttcatgatatgagatag

SEQ ID NO: 41725 - DNA, 577 bp, Macaca Mulatta
  misc_feature (1)...(577): n = A,T,C or G
caccgcttgtgtgagcatttttgtggctcgtacagaaagtacacttttaaattgtttcttgcatcacnnnnnnnnnnnnnnnnnnngcataacagcgaaaggcatccagctgactttttgattccaagattgttggttggattgacttttttgcattaaaattttcccagcaaaataaatcatatggcgagtcagagaataaaaagtcaaaagaaacaaatagaannnnnnnnnnnnnnnnnnnnnnnnnnnnntattgcttctgaacttttttctgccactgctccccggccctgtttagtttgttattgctgctcttcttttttctttctgtatctatgcctttttttcacagtagtccttggctctgcacggaataaatgataccctcaaatctaattggatgtgctttcgcctttgcatgtaagtacagtagtaagaaacctttgagatctttctgacttttcaaaattagagaaagcaagtgggatggatggattttttttcttttcaaggggggcaggaaggtaatggtttgagtagccnnnnnnnnnnnnnnnnnnnnnnnnnnnnnnna

SEQ ID NO: 41726 - DNA, 216 bp, Macaca Mulatta
agaaacaagcagcagtatctcaagaacagttagcacagttaagggaggataatactacttcagtaaaaactcagatggaactcacaatcaaaaatctggaatctgaaatctccagaataaacacttcatcagccgactttaataaaaccgaattggaaagatataaggaactctacctagaagaagtaaaagttagagaatccttgtcaaatgaac

SEQ ID NO: 41727 - DNA, 1083 bp, Macaca Mulatta
  misc_feature (1)...(1083): n = A,T,C or G
tattatgacgatgcttcccacactattcttatcatgcagctaaagctactaaacacaaatcaccaccaaccaccccttacaaaaacccccacccttcagtctcacaatgtccgnnnnnnnnnnnnnnnnnnnnnnnnnnnnnnnnnnnnnnnnnnnnnnnnnnnnnnnnnnnnnnnnnnnnnnnnnnnnnnnnnnnnnnnnnnnnnnnnnnnnnnnnnnnnnnnnnnnnnnnnnnnnnnnnnnnnnnnnnnnnnnnnnnnnnnnnnnnnnnnnnnnnnnnnnnnnnnnnnnnnnnnnnnnnnnnnnnnnnnnnnnnnnnnnnnnnnnnnnnnnnnnnnnnnnnnnnnnnnnnnnnnnnnnnnnnnnnnnnnnnnnnnnnnnnnnnnnnnnnnnnnnnnnnnnnnnnnnnnnnnnnnnnnnnnnnnnnnnnnnnnnnnnnnnnnnnnnnnnnnnnnnnnnnnnnnnnnnnnnnnnnnnnnnnnnnnnnnnnnnnnnnnnnnnnnnnnnnnnnnnnnnnnnnnnnnnnnnnnnnnnnnnnnnnnnnnnnnnnnnnnnnnnnnnnnnnnnnnnnnnnnnnnnnnnnnnnnnnnnnnnnnnnnnnnnnnnnnnnnnnnnnnnnnnnnnnnnnnnnnnnnnnnnnnnnnnnnnnnnnnnnnnnnnnnnnnnnnnnnnnnnnnnnnnnnnnnnnnnnnnnnnnnnnnnnnactatcaaccacaaacctctcaagctcaactagccctaacaccggtatactaatatctaaaatgcagagcccaatcaactagttccacccaaatacctactaagacaccctacaacaaacacgccaggggccggacaaacgcaaagcacacacaaccggccaaacgacagaaacggcacaccccgacccgcgcacgaaccacacacaacacaccccnnnnnnnnnnnnnnnnnntacaaacaccgataccgcnnnnnnnnnnnnnnnnnnnnnnnnccnnnnnnnnnnnnnnnnnnnnnnnnnnnnnnnnnnnnnnnnnnnnnnnnnnncaacacnnnnnnnnnnnnnnnnnnnnnnnnnnnnnnntacacaagaaaaa

SEQ ID NO: 41728 - DNA, 176 bp, Macaca Mulatta
gggatgagccatggaagctttgtcgcctgcaccaggctcccacggctcgtggtgcggtgcgcttctggtgttcgctgcctacagccgacacgtcgagcttcgtgcccctagagttgcgcgtcacagcagcctccggcgctacgcgatatcaccgtatcatccacatcaatgaagta

SEQ ID NO: 41729 - DNA, 1213 bp, Macaca Mulatta
  misc_feature (1)...(1213): n = A,T,C or G
tgagcagtttctcaccattttacccgagaagattcaggcttgggcacagaagcagtgtccgcaaagtggagaggaagcggtggccctggtagtgcatttggaaaaagagactggaagactaaggcagcagncagaagagttaccgcaaggtgaaaaatggccacatgctagagtcctgcgcgttctacaaggagatggatgccctgatgaactctcgggcacctgctcctttccccagcaccccagaagaagtctcatcaccttcaaggcaagaaagagggggtattgaggttgaaccccaggaacctacaggctgggaacctgaagagacctcacaggaggcagtaatagaagactcctgcanattttgaatttggaaatagcatcaaggaggatccagcacaggtagtttataaggacatggaacagcgtagggcattaatagaaaagtctaaaagagttgtttcccagaataccgcccccagcaaatatcacaaaagggaatgcatctcaggaagacaatgggagaatcttcaaggaattagacaggaaagccgagtctcagcntcagcctagagatttagggaaaggcgttgtgcatcagaggccttttgtggggaagagaccctacagacctctcaaatacggagaaagctttggaaggagcgctcgtctgatgtgccggatgacccaccacaaggagaatccttacaagtgtggtgtctgtgggaagtgctttggtaggagcaggagcctgatcagacaccaaagaatccacacaggtgaaaaaccttttaaatgtcttgactgtggaaaaagctttaatgactcctcaaattttggtgcccaccagagaatccacacaggagagaaaccctacagatgcggagagtgtggaaaatgctttagtcagagctctagtcttattatacatcagagaacccacaccggtgagaagccctatcagtgtggagagtgtgggaaaagcttcaccaacagttctcatttcagcgcccaccggagagttcacactggggagaatccctacaaatgtgtggactgtgaaaaaagtttcagtaactgtacaagatttcgagaacatcggagaatacacactggagagaaaccctatggatgtgcccagtgtggcaaacgtttcaataagagttctgttcttaccaaacatcgggaagttcatgtgagagaaaagcct

SEQ ID NO: 41730 - DNA, 617 bp, Macaca Mulatta
  misc_feature (1)...(617): n = A,T,C or G
aaaaaagagaaggaaagagaaacggggtttnccctactaggtggncagcacagtttaatggtgcttaggctatctgtgtgtagttggggaaatcgacctgctgtattgtctttggaagtgttaacactttttgaaaacgcttctgaaaggtgggccgtatgtgtcttttctctgaaaggatcaaatcagatttgtgacttttgggttatggtactaaagtgagactcagcttttaatgcttcctagctctaggaaatgtttaggctttgactaaatcgggattggcatgagatactcatatacataggacttacttacacgcttgcaatagtgccagatggagccacggaccacttcccagcgcagcatttcaggctgctactcccagtccttggaactcagaaacaatttaccaactctgaacaagtggcttccagcttgaaaatctatcccactctggttgcggtggctcatgtctgtaatcccaggacttgggaggccaaggtgggatgatgcctgagcctnnnnnnnnnnnnnnnnnnnnnnnnnnnnngtaagaccctgnnnnnnnnnnnnnnnnnnnnnnnnnnnnnccgggcgcagtgctatgtgcctgt

SEQ ID NO: 41731 - DNA, 226 bp, Macaca Mulatta
gaaccccaaaagacacacatgacccaccaccccatctccaaccatgaggccaccctgaggtgctgggtcctgggcttctgccctgtggagatcacactgacccagtagcgggatggggaggaccaaatgtaggatgcagtttatggagaccaaacctgcagggtacagaaccttccagaattgggccgctgtggtggtgtctactggagaggagcagagatacaca

SEQ ID NO: 41732 - DNA, 1268 bp, Macaca Mulatta
  misc_feature (1)...(1268): n = A,T,C or G
tggggcatcgagtttcatgcgggttgaagaagatgggttttaaatgccctgcaccgcgtcataccccggagtgtacgttgattcgcttccgaattcgaagatattaaattccaatattcgtttggataaaattctctttctagtgtcgatagtagataggcatctaccagtcagggttgaaatatatagtatgtgaactactgttctatatatttcagaattcatgttttctagttgtcctaggaaaacttagccttctatgaagtgaatcacttaatgatattgctttggatataaaattggcctcagagtattatagcctataagtaaatgcttcattccccacatacccctaacctgccagaaaaaaacatttatcaaaccaaaaaaacctaccagtagtctagtacagtagtgagcaatcttaaattaaaagctattgtttacacagagcagaggaagacaattttcatgttaaagcagttttcaacatcaaacatctaaggagttctaaactgtaaatgaattacctttaaacctggtcttcacagttacattgctttctgaatgtagcataatgtgacattatgctaccacatttttaaacagtttaaatgataattattttacatttcatgaatgatagatgaacaagtttaattatatatgtattagttcccttagtctgcgaactaaaatgctgtagggttgttctgttgcaaagtaaatgctaaataaagtttatctcagaatgaagattacccaaataattatagcctgaaaagggtgatataccttcagatgagcttaaatcatggcccaaataaagataacttagtgtagaatctagcctactgaataaacctcgccgnnnnnnnnnnnnnnnnnnnnnttcnnnnnnnnnnnnnnannnnnnnnnnnnnnntcagnnnnnnnnnnnnnnnnnnnnntcctctcannnnnnnnnnnnnannnnnnnnnnnnnnnnnnnatagctaggattacaggcatgtaccaccatnnnnnnnnnnnnnnnnnnnnnnnnatagagacagcgtttcannnnnnnnnnnnnnnnncnnnnnnnnnnnnnnnnnnnctgatctgcccgccttgacattnnnnnnnnnnnnnnnnnnnnnnnnnnnntaccacacccagccaacaattattttttacatatagcaagtaatacaagcaatagaaaatgtttcaattaatagaaattaagagaattataaataaatctaatgtataattctcaatat

SEQ ID NO: 41733 - DNA, 586 bp, Macaca Mulatta
  misc_feature (1)...(586): n = A,T,C or G
gtagctacaactttaggtggcggtatattttcttctcctaagagaatagacagtttttccagattcatcatcattgactgtcaagaaaggacccttcagcaggctgtaccctcagtgcagttgatggcctgtcttcatggattcatagactcggcctgatgccacatgtaaattcaagctttggcttgacaattatacggtaacaaccacaagaagacaagcatctgtggtgcggagacaagcaggctaactagaagttgacatgctaagaaagtgaaactgttctttcttaattaatggtctttctctggaactctgttactttgagtataatatttccatgacacttagtaaatgcaagctaaaatgnnnnnnnnnnnnnnnnnnnnnnttgtactggagaaannnnnnnnnnnnnnnnnnnnnnnnnnnnnnnnnnnnnnnnnnnnnnnnnnnnnnnnnnnnnnnnnnnnnnnnnnnnnnnnnnnnnnnnnnnnannnnnnnnnnnnnnnnnnnnnnncaagnnnnnnnnnnnnnnnnnnnnnnnnnnnnnnnnnnnnnnnnnnnnnnnnnnnnnnnnnnnnn

SEQ ID NO: 41734 - DNA, 515 bp, Macaca Mulatta
cggagactggacccaaaactcttcctgttctgcctgcagagctgagccccgtccgggtcctggacccgcgcggtagtgaccctggatccctgttcactgcgttctcgcttcccgcgctgccttctggaccgcgggatgccgggtatctccgcccgaggcctctctcacgaggggaggaggcagctagctgttaaccttacccgtgtcctggcgctctaccgttccatcctggatgcctacatcatcgaatttttcacagacaacctatgggacacactcccttgctcatggcaggaagcactggatggactgaacccaccacagctggccacattgctgctggggatgcctggggaaggggaggtcatcaggtacaggtcagtgtggccactcaccctgctggccctgaagtccacagcctgtgccctggcctttacccggacgcctggctttcagaccccctcagagttcctggagaaccccagcctgagctcccgactaacagctccattccg

SEQ ID NO: 41735 - DNA, 1145 bp, Macaca Mulatta
  misc_feature (1)...(1145): n = A,T,C or G
ggnnnnnnnnnnnnnnnnnnnnnnnnnnnnnnnnnnnnnnnnnnnnnnnnnnnnnnnnnnnnnnnnnnnnnnnnnnnnnnnnnnnnnnnnnnnnnnnnnnnnnnnnnnnnnnnnnnnnnnnnnnnnnnnnnnnnnnnnnnnnnnnnnnnnnnnnnnnnnnnnnnnnnnnnnnnnnnnnnnnnnnnnnnnnnnnnnnnnnnnnnnnnnnnnnnnnnnnnnnnnnnnnnnnnnnnnnnnnnnnnnnnnnnnnnnnnnnnnnnnnnnnnnnnnnnnnnnnnnnnnnnnnnnnnnnnnnnnnnnnnnnnnnnnnnnnnnnnnnnnnnnnnnnnnnnnnnnnnnnnnnnnnnnnnnnnnnnnnnnnnnnnnnnnnnnnnnnnnnnnnnnnnnnnnnnnnnnnnnnnnnnnnnnnnnnnnnnnnnattgccatccccgagtttaacaatttaccatgaagcctcaataataaagtccttcaataagaaccaactgcattcgataaaaaccaaatacaagattccataaggcccccttaaccttcaattccgacctatattccccgtaaacatttccagggcaatagacttaaaatatttctctacctccanctcttctccctctaatcccatattacattttccttcctataagcaaaaaataataagagtcttgagttaatagaaaagaagagccagacaacaacctctataattaagacatactcatgattactactctccccggtataaaaaatagggacccacaaaatccgtgattaactagagagagttgtgtcacgaagacacataattcttcacaacattgctaagttttaaaacactacatgctctggagcgtgccttttttctccccatagcaggagatcactcttccctcctcggtttatacacaanattagtagaggggggatatatcctcgaaaccattttatacacgaccactctgtagtgggttaagtggacagcattaccgtttcgatgcagactaattaattatatgtctatgaaccgacccatggatcttctcagactaagatttagatataatcaccacaatatacagtatactctgagatgtagtttcattgaaatacaccacactcacacggcgccacgtgtatgataaaa

SEQ ID NO: 41736 - DNA, 100 bp, Macaca Mulatta
agtgccacacccccctgtccccatgcactggggctgcatcccctcaaggctaagattgcctgtctgtggtctccagtgttaagcacagtcgttagctcag

SEQ ID NO: 41737 - DNA, 212 bp, Macaca Mulatta
gtagctggtgtctgagtgtcgcagggatgcggtgtgacggccagcctggggcttgagtcacagctcagctctgcttctcgattctcattccgtccgtgttctctggcgtcctgtgggagaggctgttgctggatgttgtctcttctttagtagctgtcacaagagattcatgaaaaaagcgagtaggtaaatggcccaactatctcactgac

SEQ ID NO: 41738 - DNA, 801 bp, Macaca Mulatta
  misc_feature (1)...(801): n = A,T,C or G
ggttaattttaatagccatatagagtaccattgtttggatatatcatattatttgcccaatcctcttttatcttaacatttacttgtttctagtatctatgtgttataaattacatgtatttatcttgtaggtatttaaattttaaataggctaaattggaccctttatgtagtatgtagatatttcataaaaggtacattttgttgggaaagataactgtagcttcaaatgctttttgaaagatgatttttccccttaaagaaaattgaaaacaatttnnnnnnnnnnnnnnnnnnntgaagcatgtgtgtgtcatttgttgtaagaaggatatggccctgacatcttcatactcgattattctctgtgaagttatttattcacttactgaactcatttattgaacaccatttgtatgccaggtgctttgttccagatctgaggatgtagagatggagacctggtttctgctttcacaacctggcaacacaatggatagcagggtttgggatgttgtcggtccatagactcttgaagttatggatccagctgtttttgcttagattactttgctgggatttttattaattaaacaggggatttaggaaccttaggtaccacaaaaagccggctactttttccctctctccccaggccctttcaccccccaaaaagacgggtcccccctttaggggtggagtcctcgggaattcccgaaccttggtggaagcaagaacctgtagttaaaaccggaaaatgggaaatgagccctttttcttggcccgaccatggaccctggt

SEQ ID NO: 41739 - DNA, 622 bp, Macaca Mulatta
atatgaaatgtgacatttgaattttatacacttttctggttatcatttcgtttgtgttctcaattaattttttgaaaacagaaaattagttgagcttttgacatgcttcatttctaaaacagggagaacaaccttttagcagcagaatctaaggtggtgttctaggctatcagactgtaaaatacttaattcttaagttgttgagaagttggaaataaattcttgtcttcttgttgtgtaagtttgctttaatgtgtttctggcacctaataggatttgatttgcttttagttctataactttgtgctactatacaattaattaaaaatagcatgattgttataaaatttttaactattttgggtatttacttttttgcatgccacattaattctaccgggtttgaaaaagttacagaatactggatacgtcacagttaaagtgtttgatgtaaaagtaaaaactaagaaccagaaagaatcttaaggcacgcatggccatgacaaatggaaacctatttccaattttgaaaagattttcaacttttgaaaacgttggtagcagcgttatattccagtgatactttcttgtggggttacattgaacctgagccttacaaatt

SEQ ID NO: 41740 - DNA, 621 bp, Macaca Mulatta
  misc_feature (1)...(621): n = A,T,C or G
nnnnnnnnnnnnnnnnnnnnnnnnnnnnnnnnnnnnnnnnnnnnnnnnnnnnnnnnnnnnnnnnnnnnnnnnnnnnnnnnnnnnnnnnnnnnnnnnnnnnnnnnnnnnnnnnnnnnnnnnnnnnnnnnnnnnnnnnnnnnnnnnnnnnnnnnnnnnnnnnnnnnnnnnnnnnnaacagcggctttattaagtgaatgcttgaaagtattcaacattaaattcaatttacttcacattaatgttgcaaacacatcatcaattcttacatatttcaaatcaacttcaggtacagaaggcttgctctcaaataagtcttctaaggtgacgtaaagactgaaagaagcctatgacttgagtccaagtctctaaccaaccaccaccatatcatcactggtgaactcatatggggggacttcaaggttgagaggagcagggcccaatctgatcctgccagatgcatcataatgtgacccatggcaagggcagtaaaaaccaccaaaatctcctgcatttgcaatgggtacacaaccaagatgagtgcaaacacctatcaggataacccattcaggcttctttactcgatctagatcatgctgtgggtccctcaactgggacaattca

SEQ ID NO: 41741 - DNA, 507 bp, Macaca Mulatta
acaccagcatgacagctaagcacccctccctccaggtgaacctgctggagctgcagggacaggtgttgcggcttgtgggcgaccacaacgaggggcatgacaaattcctgaccactgcccagagtcctggtgatcaggccactctaggagccccaatccccctggagcttgggtgtgctgacaagcagggtggtgagtagagcgctcaggcggggtgggcgggcaggagcaggggaggctcacactgacctcagatcccctcctccctctgtctgaagatcttcgtggctgagccccactgacagcgtggagcctgcaccaggagaggccagagagggttctccccacgacaaccccactgcacagcagatcgcgcagctgcttcctctgacgcaggactccccaggagcaccgaggcttgggcagcaacccctgcatgccattcttttcaccgtgccgagatcagggagataaacatcaccatcatctaagagctggtcaagaaat

SEQ ID NO: 41742 - DNA, 133 bp, Macaca Mulatta
ggtgtatggctgcagccgccaggagcctgtggtggaagtcctggcatcgggggccatcatggcggtggtctggaagaagggcctgcacagctactacgacccctttatgctctccgtgcagtcggtggtcttc

SEQ ID NO: 41743 - DNA, 1391 bp, Macaca Mulatta
  misc_feature (1)...(1391): n = A,T,C or G
cattttcttctggttttctacttcagattcagctttgagaatgagaaggcatagtttgggcaaaatagatgtttgtaacattttttattaacctgaagagtgggtgatcaatatgtttacctattgcatagcagccaactgtacaccaaagcttctttgaagtgaagcaccacattgagtggctaaaaccagggaggtggagagaatatgtaaacatctttggtaaaatacagttaaatttactgttactttgaagcaaccctttgaagtaccccttagcaactggttccttaagacagagattattataagtgacagatcctaattattacggagacataaggtttcatcatttctgtttaatgtacgaaccacctgcatttgctctcattcattgagtcaatcaggaggagaagacatgaaatatatttaacatctacttattaaaatgatgttcccctgcccactgaattttatacaacaatgttcactccaaagagttaactgtatttccctttttttctgcagaactttttgatgactttgcaaaccagtcaacaattcagcacaaagacatccggagtcacgttggcatgttgtgacaaaatcgcacaattacatgggatccatcccattctaaaaatgccccgaacagcaaacagaacaggtaaatggaatcaaacgtcagagccagcacagcctgagagcgccttgaaactcagactccacaatctatgtggaaagtgtcctgctgtggcatgaaataaatgaaacagaaaatgatggcaagactgctaagaacatcctttgctttggtcttccttggcctctttggggtgctggggacagcaacaatttcatgcagaaatgaagaagggaaagctgtggactggtaggtaaatgaaatggaaggattgccgcatgcaaacagcctcagtctgggagttggcctggctcgctgcgaagttcctaagggaatatccattctctttcctccctttacaaataaaggaagttaaagtgtgcaaatgggccacattcccaagcaggggtaggcttctgagtgagggagtttccccctgaagaagagctgagcagcccctcttgggcctgattcactgttctcagcagggcaaggctggtagccacagaagtgggattgaactggcggcttctggcagctggcagcttcttttaattacatcatggtttttcctaacagaacatttccaacatccatttaaagactgacagagtaaagaagccagattatttttttttnctgaaaatggagcatgtgcttctccttatgagaaggagaagggggatctggtcacacacagcactctttgcctaacctcggtttgtttgacagcagaggcagctgatgc

SEQ ID NO: 41744 - DNA, 768 bp, Macaca Mulatta
  misc_feature (1)...(768): n = A,T,C or G
gnnnnnnnnnnnnnnnnnnnnnnnnnnnnngnnnnnnnnnnnnnnnnnnnnnnnnnnnntccaaattagctggacacagtggtgnnnnnnnnnnnnnnnnnnnnnnnnnnnnnnnnnnnnnnnnnnnnnnnnnnngcccnnnnnnnnnnnnnnnnnnnnnnnnnnnnnnatgccgnnnnnnnnnnnnnnnnnnnnnnntnnnnnnnnnnnnnnnnnnnnnnnnnnnnnnnnnnnntaaaaatgatggaaagccttcagatggtttataaacaaggcagtgacttgatctgatttgtgttataaaaatttcagtctggctgcaatgtagataatagtttggaatgaggaagagaagatgttgggaagctaactctcccagcaagaatgatagaatagcttacagtaaggtcgtggcagtagtggaggagacagagtaatgaaggagattcaggggcttgaatttgttaaccattagttcaacaatatttattgattggcttctctgttgtgagcataaaatgagccaggataatccccaggtttctggtgtgtaaatgttggtactacttactgagatggaagggaaaaagacttgacgccctgagaactgaaccattttttaggagtcttggaaaatcatnnnnnnnnnnnnnnnnnnnnnnnnnnnnnnnnnnnnnnnnnnnnnnnnnnnnnnnnnnnnnnnnnnnnnnnnnnnnnnnnnnnnnnnnnnnnnnnnnnnnnnnnnnnnnnnnnnnnnnnnnnnnnnnn

SEQ ID NO: 41745 - DNA, 164 bp, Macaca Mulatta
gcaccaggacctctgctgtccatgagatcaaagctccaggccaacgtgagcacccccctccatcctagagaggattctgtgagaatcattgagagggagtcactctctcctggcaatcacggggatgagaaagaaaaaagaagagagagggagttactcatgta

SEQ ID NO: 41746 - DNA, 290 bp, Macaca Mulatta
agaaatataatgtatggggaaggtcttagtaaacagtaataatacaaatatccttgtagcttttatacaaaatcctgtgactcattcaattacataatcatccattcaataagcatattgatcacctactcaataaatgagtgacactgtttttgacactgtggaccattccaagatacaaaaaatctagctttggctgtttgggaaccaaaggagatattttttcctaatatatgtaaatatttataatatgaacccgtatgtaataacgtccgtagaattagtacaga

SEQ ID NO: 41747 - DNA, 1090 bp, Macaca Mulatta
ggacgagaaagagtatatccaatgcatccctgctgatccagagtgtgaaccagaaggacgcaggatcctacaccgtaaaaatcataaagcgaggttacaggactgaaggagtaactggacatttcaccttatatgtggagactcccaagccctacatctacagcagcaacttaaaccccagggagggcatggagactgtgaccttatcctgtgatcctgacactccgaacgcaagctacctgtggtggataaatggtcagatcctccctatcagtcccaggttgcagctgtccgaaaacaacaggaccctcattctatttggtgtcacaaagcgtactgcaggaccctacgaatgtgaaatgaagagcccagtgagttccagccgcagtgacccagtcaccctgaatcctgtctatggtccagacaaacccagcgttttgtctccagtcaagtattactactatacaggagaaaacatccacttgtactgcttcgcgcactctaacccaccggcagagtattcttggacgattaatgggaagtttctgcaatcaggacaagagctctatatcccctatattactacagagcatagtgggatctatggttgctctgctcgtaactcagtcactggcagcgaacgttccacatacaagaggatcaaagtctctgccatctgatctttgacaaacctgacaaaaacaagaaatggggaaaggattccctatttaataaatggtgctgggaaaattggctagccataagtagaaagctgaaaatggatcctttccttactccttatacgaaaattaattcaagatggattaaagacttaaatgttagacctaataccataaaaaccctagaagaaaacctaggtaataccattcaggacatcggcatgggcaaggacttcactaaaagcaacagcaacaaaatccaaagttgacaaatgggatctcattaaactaaagagcttctgcacagcaaaagaaactaccatcagcgtgaacaggcaacctacagaatgggagaaaatttttgcaatctactcatctgacaaagggctaatatccagaacctacaaaga

SEQ ID NO: 41748 - DNA, 659 bp, Macaca Mulatta
  misc_feature (1)...(659): n = A,T,C or G
accaatgttaacacataaatgaatctatatattgctagtcagagcagcttacaaaatgccagaatgcatcatagaactggacagccacaatgaataattacaatgtgcatagtggctaagctcaacacctcgatatagctttatgatttgcagaaaatttttaataatgattcctaaaacaatcaattgtaattttacctaaaacttttacaaaaccaggccacaatctcnnnnnnnnnnnnnnnnnnnnnnnnnnnnnnnnnnncacagttttcacgctgtagtaacttggaaatgtgcaaccgtgtcaacagagacaaaaaagccaaagtaacacgaatctcactttcatgcagctatcagttaaatattacatactctggaatgattttacaccaaaaatatttccacaattacttgctctcataggggtggatcgaagtcttaaaacttgaaaaacaatcaaagaaggttaagtgttctcggttctgacacgtccatcagtgccacacactgtggcaactccaattacacagcaacaaggagggagcgatgatgccaagtcactgcgtaatttaggaacattgtatgaaatggggctaactgggtactttttacaaaatattgtgcaccatttggcagtagtttgtccattaact

SEQ ID NO: 41749 - DNA, 755 bp, Macaca Mulatta
  misc_feature (1)...(755): n = A,T,C or G
ggcattgagactatactaagttaaataacgctcctccagatttatgtccacctggaacctgtgaatatgatcatatttggaagcagggtctttgtagatgtaatcaaattaagatgaggtaagaccagattagagtgggccctaagccagtgatgggtattattctaagaagacagggataggacacagggagaataccatgggaagatgcagacaaatgggagaaggtgacgggaagaaggaggcagagattggaagaatgtgtctacaagccagaaatgccaaggattgagacaccagaagcttgaatagacaaggaaagtttttttatttctttttttttctgagacnnnnnnnnnnnnnnnnnnnnnnnnnnnnnnnnnnnnntgatcatagcttactacctcccaggctgaagcagttttcccnnnnnnnnnnnnnnnnnnnnnnnntctgcgggaatgtgccaccatttnnnnnnnnnnnnnnnnnnnnnnngtaaagacagggtctcacagtgttgcttaagctggtctgtaactcctggattcaagcagttctcccgccttgccctcccaagtgctggggttataggcatgaaccactgcagcctagcaaaaatttgttcatagcgccctttggggggaagcatagctctgctgatacccttgggaccattccgagaataaatctttgcctctttttgaagccccccagttcctggctactttggttacagcaggccccaggaaaac

SEQ ID NO: 41750 - DNA, 744 bp, Macaca Mulatta
  misc_feature (1)...(744): n = A,T,C or G
gggctctttcccatcttgcaagatggcgggtgaaaaagttgagaagccagatactaaagagaagaaacccgaagccaagaaggctgatgctggtggcaaggtgaaaaagggtaacctcaaggctaagaagcccaagaaggggaagccccattgcagccgcaacccctgtccttggtcagagggaattggcagggtattccccgaatcccgccgtgctatttgcagaaaagggcccgtgtaccaagagggaagtacctcaagccccgcttaaattcgcaaggtttgggaaaacgaaaataacgaaggggagagaagggtttctttggaaaacttcctttgacaaaaacccagtgttggcgtgggtggaaccaaaaaagaacggggggggggttannnnnnnnnnnnnnnnnnnnnaaaaacttttttcgccaaaaaaaatgggccctttaaagaacataatttttatccccccctaaacctgggaaaaaaaaaaggtgggcccctcccggaaaaaaaacccctggttttttgtaaaacgccgcccaccccgggnnnnnnnnnnnnnngcccccctttttcgaggttcaccgcgcggctttccacaaaaccccccacgggggtggnnnnnnnnnnnnnnnnnnnnnnnngtnnnnnnnnnnnnnnnnnnnnnnnnnnnnnnnnnnnnnnnnnnnnccccccccccgcgggggggggaaaaccaacacttttttatttttgggaaag

SEQ ID NO: 41751 - DNA, 822 bp, Macaca Mulatta
  misc_feature (1)...(822): n = A,T,C or G
gggcagtttaatgagtgaattcagcagcaaagtggcaagaaatggttctccagccaggagaggttatgtttatcttccgattgcccattttctctgcacacaataatatcgtattcagtgagaggtgctgttggcacccagcagcgccctgggcacacagcatttcatgtcatgtcacagtgtacaagctaccctctctcatttagaaagaagagcattttgcacagagaaaaagtcaaaagatccatgaatgtcattttttatcttttattttcagttggctgatgttggaatttttgttcttgtcatgaacttgtaaaccaatcttgccaagatacaaggttgttttggtttttcactacgatgacctcttggtccctcctgtcttgactgctgatgtttcctcaaaggatcccattgccaaattttaggggaagcagcccttcctataaggttccctttttaccccctgccaggggttatcttttatannnnnnnnnnnnnnnnnnnnnnnnnnnnntggccactaaacctcaggggggggtttttccttaaaaccccttttcccccaccttttnnnnnnnnnnnnnnnnnntccgggggttggttttttttaagcccccnnnnnnnnnnnnnnnnnnnnnnattttccccttttttgtggcccccccccaaggggtaaaaaaaaggtttttaaggggccctcttttttggccccggagtttgggccctaccccggggtggggaagggaaaaaagagtttttcaaaattggggnnnnnnnnnnnnnnnnnnnnnttctgggggggggaaattttttttt

SEQ ID NO: 41752 - DNA, 1015 bp, Macaca Mulatta
  misc_feature (1)...(1015): n = A,T,C or G
actaaatatgccccccggttgccagcagactattacaacgaaaagcttctgaaggttcgtgtatagcctttgtcaaatgaaagnnnnnnnnnnnnnnnnnnnnnnnnnnnnnnnnnnnnnnnnnnnnnnnnnnnnnnnnnnnnnnnnnnnnnnnnnnnnnnnnnnnnnnnnnnnnnnnnnnnnnnnnnnnnnnnnnnnnnnnnnnnnnnnnnnnnnnnnnnnnnnnnnnnnnnnnnnnnnnnnnnnnnnnnnnnnnnnnnnnnnnnnnnnnnnnnnnnnnnnnnnnnnnnnnnnnnnnnnnnnnnnnnnnnnnnnnnnnnnnnnnnnnnnnnnnnnnnnnnnnnnnnnnnnnnnnnnnnnnnnnnnnnnnnnnnnnnnnnnnnnnnnnnnnnnnnnnnnnnnnnnnnnnnnnnnnnnnnnnnnnnnnnnnnnnnnnnnnnnnnnnnnnnnnnnnnnnnnnnnnnnnnnnnnnnnnnnnnnnnnnnnnnnnnnnnnnnnnnnnnnnnnnnnnnnnnnnnnnnnnnnnnnnnnnnnnnnnnnnnnnnnnnnnnnnnnnnnnnnnnnnnnnnnnnnnnnnnnnnnnnnnnnnnnnnnnnnnnnnnnnnnnnnnnnnnnnnnnnnnnnnnnnnnnnnnnnnnnnnnnnnnnnnnnnnnnnnnnnnnnnnnnnnnnnnnnnnnnnnnnnnnnnnnnnnnnnnnnnnnnnnnnnnnnnnnnnnnnnnnnnnnnnnnnnnnnnnnnnnnnnnnnnnnnnnnnnnnnnnnnnnnnnnnnnnnnnnnnnnnnnnnnnnnnnnnnnnnnnnnnnnnnnnnnnnnnnnttatcatggccacgtactgtcacagagcggctattggatgagatgtttgatagcactgcatcccggtttctggctgtcttggaagctctttctgattcaaacaggcgaatactgcaaactggacccattgttacagatgaagtagagattcatgatgttgtctcagaattgtttatggcaggaagagaacttttgata

SEQ ID NO: 41753 - DNA, 644 bp, Macaca Mulatta
  misc_feature (1)...(644): n = A,T,C or G
caatgcagatcttcgtgaagaccctgactggcaagaccatcaccctcgaggtggagcccagtgacactattgaannnnnnnnnnnnnnnnnnnnnnnnnnnnnnnnnnnnnnnnnnnnnnnnnnnnnnnnnnnnnnnnnnnnnnnnnnnnnnnnnnnnnnnnnnnnnnnnnnnnnnnnnnnnnnnnnnnnnnnnnnnnnnnnnnnnnnnnnnnnnnnnnnnnnnnnnnnnnnnnnnnnnnnnnnnnnnnnnnnnnnnnnnnnnnnnnnnnnnnnnnnnnnnnnnnnnnnnnnnnnnnnnnnnnnnnnnnnnnnnnnnnnnnnnnnnnnnnnnnnnnnnnnnnnnnnnnnnnnnnnnnnnnnnnnnnnnnnnnnnnnnnnnnnnnnnnnnnnnnnnnnnnnnnnnnnnnnnnnnnnnnnnnnnnnnnnnnnnnnnnnnnnnnnnnnnnnnnnnnnnnnnnnnnnnnnnnnnnnnnnnnnnnnnnnnnnnnnnnnnnnnnnnnnnnnnnnnnnnnnnnnnnnnnnnnnnnnnnnnnnnnnnnnnnnnnnnnnnnnnnnnnnnnnnnnnnnnnnnnnnnnnnnnnnnnnnnnnnnnnnnnnnnnnnnnnnnnnnnnnnnncgcaacctgtctgactacaacatcccg

SEQ ID NO: 41754 - DNA, 543 bp, Macaca Mulatta
  misc_feature (1)...(543): n = A,T,C or G
gggtgctttgggcagagcctccttggccatccacagattgaacctagcactgacatactttgaaaaggcaattggcgatgttattgctgccaagggtgacaggacgtcagatctgatcagcctgtatgaggaaactgctcagatcgagcagctaaggaggaaccacaaccaggccatccagtacttgcagcaggagaatgctgcccatggcttcaagcatctcccacagcgacaaacagatcaaaatactggatatcctgtatcatagaaaaggtgcaatgcattctaacagtatatatgaaaacagattcggaagaaaaggcattgcacacaatctgacaatctacgattagaaacatcacacagtggagagatgtcagagaacactgctgtgaaggcagggagtccactgcttacagaaaaagccagtctggtttttgtgttcaagactttcttaaagcagtagtcagatcagaatgaataaaacaataaatatcagtgtttcacaaaananaaattaaatannnnnnnnnnnnnnnnnnn

SEQ ID NO: 41755 - DNA, 761 bp, Macaca Mulatta
  misc_feature (1)...(761): n = A,T,C or G
ggaactcagatttttgatgtataaacagntgtgtgacttggcatctgagagatcgctctgctttgctttgcttcaaagttcttgcacccgcatcctcagaaccgtggggcatggtgggctctgaccagcgctccccttctgttttccttcactacttttgacctacttaagacttcagagagaatgtccttcaggttcttttctccatcaagttctttaagttctttgaaaggaagggactgtgcaaacacaaagtgatattcttttgtatctgcaaatgcatcagctggacataccaattggtatcaaatagaataaaatgaaatataaatttttgagtcttaggttaaaaaggaaagttacttgtatagtttatagataatgaaggaaaaagatttcttctttttcattgcaagaaatcttgtttactggaagatagagtcactgttttcatataagacaaatagtgctttaatgccaacttatttttatctcaacattttcaggatcatgctaggcacactgcctccttgaatagacattatatgcacagctgcaagtcagccaatttttttttattcagaagtattttcccccccattttagtgcctgcctatctgaagtacaaaaagcatttcacacactaccataataagccttcttttggggatgagaaatttgagtctcaacaactcagaaatttgaaatgtcaacgttttttgggtaaccgtaaggtgttagaaggtaaattcttgctttcc

SEQ ID NO: 41756 - DNA, 168 bp, Macaca Mulatta
actttgataattataaaataatagaaaaaggaataaaagagaactatgaacatattctaacagataacatgttataagattaccttcaattttggcatttgattactgcggcataacttaaccttttttaaaaaagaatgaataattttgtctatatgaaatattgcc

SEQ ID NO: 41757 - DNA, 794 bp, Macaca Mulatta
tcatcgaatgaacatattgtccaactggggaaccagaagatcctggatggaaaccaggattcaggccaactttcccaaagccacaaggacagagtctgcaccttggacaacggctccatccagcttttcagtgtgggagtgagggattccggctactatgtcatcaccgtgacggaacgcctggggagcagccagtttggcaccatcgtgctgcacgtctctggtaagacatccccgggccccgggcacccctctgaacggtgagtgtgtgggaggtcgatttcacaatattaaaagaaatgttgtattccccctttccctcaccctcactccatagagatcctctatgaagacctgcactttgtcgctgtcatccttgcttttctcgctactgtggccgcagtgttaatcagcctcatgtgggtttgtaataagtgtgcatataaatttcagaggaagagaagacacaaactcaaaggtaactccctgggccttgtgataatccatgagtggttttgaggccagaggtggcatgtgttaccttgttctcaccaagaaagcgctatgtggcttgatttccaactcattgacttgtctttgctttacagaaagcacaactgaggagattgagctggaagatgttgagtgttagccaaggctgggcctaactgcattcctacctcaagaggaaactattctccaacaaaaagagcaagcacagctattatacccattgtgtgtggtcctgttgcagcccgctcctgacaggagagaaggagattaacaacattgac

SEQ ID NO: 41758 - DNA, 798 bp, Macaca Mulatta
gggttggtggttttgttttcatttatttttgcaagagccactttttatttactgtctctagggacaagagataatttaaaacttgaagtacttttttcaaatcttgtgcagcaaattagtattgttagaatctattcggcttattttagtatttttaagtctagtcacaaaccaaacaaaacttttgaaaatgagctatattttgttcaaaggtgattgatttgatcttatatttatttgtttttaggttaatttttgattttttgtaaactgctttgctcgttaatatctgtgaaaaataaacgaattcattttgttcactttccgattttccctggtaccctattcgtcagagataaccattcatcagaattacagtcagaaaatcctttttctattgaagagttagcagggaaaaataattctgatatttaactgtcataaatctgtagtgctattatagtgaaaaattcagttctataagctagctgtgttgtcacagttttatcatagtttcaaaattattttcatggtgcagtttctatttaaaggcccctgttagacttttaacaatcccatcccatatcctgtaattcccctgatgggcaaaaaatgggaaggaagcattttctggagtttaaacctgtgctgaaaaaataatttgtaactgggggtggtccttaaaacttcctttaatgaaattgggtcaataattaatggtaaaaattggaaaaattcttgggccccaacaaaaactaaatatttggcaggcctttttcacgacaaatataggttttt

SEQ ID NO: 41759 - DNA, 787 bp, Macaca Mulatta
  misc_feature (1)...(787): n = A,T,C or G
agtttttaacattttaaaggtcctttnaaatcctgtccttggagttgggatctttcttatatgggtaataaaaggaaaaggggtcccaggtttccaatttttctataatataacccagccagggttttccccagccacccttttattaaaatgagaaatccctgtccctatttgcttgtttttgtcaggtttgtcaaagatcagatggttgtaggtgtgcagacttacttctgagttctctattctgtgccattggtctatgtttctgttcttctattagtaccatgctgttttggttactgtagcggaaagccaatttcaagccaccaacatcacatcatagaatgcaggtttggaaagaaatgtgcagtagcacctcattatatagtattgtcatcatacagacacaatatatgtaaatagttgcagaagcatagataatggtaaaacatagtacagttattataacatgatgagttttgagtattgccttttctatatactgtaatttattcaaacacagttgctcctcaagttattactgggttacatcccaatgaatccattttaaataagaaaatatcacaagttgaaaatgcatttcatacatctagtctaccaaacatcatagcttagtctagccaaacttaaacatgctcagaacacttacattagactacagttgggcaaaatcatctgacagaaagcctatctgataataaagtcttgaatatcttaggtaattaattgactactgtactgaaagtgaaaaacagaatgtttgtcc

SEQ ID NO: 41760 - DNA, 772 bp, Macaca Mulatta
  misc_feature (1)...(772): n = A,T,C or G
gcagggtggtgaggacggtggccgttggggctcaggaagctcacccaggggccaatgtgggagctttcgggtagtttggtccctgggtcctgagcctcaggggagggaggttgatggctggcggggattttgtatatggcaatagtgtatgtcaaacctcttaataaatacgattttcccagtactttgcagaccaaatggggagtggcggataggaaaacnnnnnnnnnnnnnnttaggtggacctcagagaggatgccaaggcaactccgtgagcacctgagcaccagaacctcagatccaggctcacccatcaccccccagcacacacagagtgtgcccccaggacatggtggggagtgcctaaaggcagaaggtactccaggggcctcttggttctgcaaccagctgaccaaagccggaggagatgaaccccaggggactctgtgcccagcaggagccggttctcagtgagcgcccatcacaggaatgagcgtgggttgggcctccctagccctgcccagcacgggtcccagataggtgagtcccctctgacagtgggaggggcagggctgagagcaagccagggatgggggtctgtcaaggtgcccaagaggcacatcctacaggccagggcccattgagagtgtctgagctgaaaggtccctcgtggatcctggagtctatggaatttcatgttctttttcactgatacaacttccccatcccatactcccccaccccacaaccactcagactttggcaactccca

SEQ ID NO: 41761 - DNA, 650 bp, Macaca Mulatta
  misc_feature (1)...(650): n = A,T,C or G
tgttacagactagaacgaatctgcatcgtttgtttccattaactgtcctgtctggnnnnnnnnnnnnnnnnnnnnataaaatgacagataaatgtaacatttgacttaaagaaagcaaagaaagataaaatttgctgaaaaatattcaaatagtattaaatactagtaaaagatttctgctgctcccagaacttatacaccccaacgactttacttattgtctatgaaaagactggcaaaatggataagtgtgtgtgcgtgtgtgagtgtgtgtgtgtgttgggaaattcacttggaacagttgttgaaatctgtcctctgctgtttatagttcctcacctataatgtaaaggaaatcatccttttgcccaacgatttggagagaggactttgaatttgaagtgaacagtgtatgaaaatagaaaagggcataagagaaaagtaaaatagtctgtgctcaagtactctagaattattcttgagaaagaatttggagcggaaatgatgacatgagactgagatttaaaatgtcctattattttcttctatgttctttcacaaatttagctagagagtgtgggtatggaaaataaagctgcagtagacaatcaattctagatctctctactatttagctatctacccatcta

SEQ ID NO: 41762 - DNA, 491 bp, Macaca Mulatta
ctgcatttctgcccacagcctcccatcccctcccctggtctcccaagactagtccatgtggcaagggctggcacaggaggaatgacagactgctggccctgacactgcctgccacggtgggcatgggcacctgacaggtccgtaccaatgctgactatgccgctgagcccggtttgcccatacacggcatggaccttcgtctctgacttgacagcaaagacttttccagacatgtgtatcctctaggtgtagaaagcggcaggacgctagggattggcctctagggtcacaggtgagaagaatctggtaggaaaggctgaatttggattcagacacctctctggacttcaggtagagcatgagcttagagagctgttaaaggggagctaacgtgctcaagtcatgcctgtggacttgatactacatgaaccctctactcggctctggcctactcagcctttcctgtcttcagaatactggtcaagcatgtg

SEQ ID NO: 41763 - DNA, 449 bp, Macaca Mulatta
  misc_feature (1)...(449): n = A,T,C or G
gatggtagaaatcctattccattatgcagatcgagctctgaaaaagtgcccagaccaaggaaaaatccaagtgatggagcagcattttcagnnnnnnnnnnnnnnnnnnnnnnnnnnnnnnnnnnnnnnnnnnnnnnnnnnnnnnnnnnnnnnnnnnnnnnnnnnnnnnnnnnnnnnnnnnnnnnnnnnnnnnnnnnnnnnnnnnnnnnnnnnnnnnnnnnnnnnnnnnnnnnnnnnnnnnnnnnnnnnnnnnnnnnnnnnnnnnnnnnnnnnnnnnnnnnnnnnnnnnnnnnnnnnnnnnnnnnnnnnnnnnnnnnnnnnnnnnnnnnnnnnnnnnnnnnnnnnnnnnnnnnnnnnnnnnnnnnnnnnnnnnnnnnnnaaaatcgtttatatgatgctatgatctatgtctacaacagaggcatgaatgagtntattagtcccatgga

SEQ ID NO: 41764 - DNA, 92 bp, Macaca Mulatta
catgtgcatcaatgagggcactaatggaagcacccctcgtacatcccacagttacagccagcagcgctcaggctgtgtggctgccgcaagtg

SEQ ID NO: 41765 - DNA, 3650 bp, Macaca Mulatta
  misc_feature (1)...(3650): n = A,T,C or G
gggcgtccggcacaacctttcctgggatgtccaggcgctgggctttctgtctggatcaccacccccaccccctgccctccttcactgcctgagcgcaggtgtgcctctgcccagagctcctcagccctcagcccacatcagcccacgccaacggcgagccatcactgtggaggccctctgtgagaaccactcaggcccagcaccaccctacagcatttccaacttctccatccacttgctctgccaacacaccaagcctgtcactccacagccccctcccagcaccgctgccatctgccagaccgctgtgtggtatgcagtctcatgggcaccaggtgcccaaggctggctacaggcctgtcatgaccagtttcctgatgagtttttgaatgcgatctgtagtaacctctccttttcagccctgtctggctccaaccgccgcctggtgaagcggctctgtgctggcctgctcccaccccctaccagctgccctgaaggcctgccccctgttccgctcaccccagacatcttttggggctgcttcttggagaacgagactctgtgggctgagcgactgtgtggggaagcaagtctacaggctgtgccccccagcaaccaggcttgggtccagcatgtgtgccagggcccctccccagatgtcactgctttcccaccctgccacattggaccctgtggggaatgctgcccagatgggggcagcttcctggtgatggtctgtgccaatgacaccatgtatgaggccctggtgcccttctggccttggctagcaggccagtgccggacaagtcgtgggggcaatgacacttgcttcctagaagggctgctgggcccccttctgccctctctgccaccactgggaccatccccactctgtctgacccctggccccttcctccttggcatgctatcccagttgccacgctgtcagtcctctgtgccagccattgctcaccccacacgcctacactatctcctccgcctgctgaccttcctcttgggtccaggggctgggggcgctgaggcccaggggatgctgggtcgggccctactgctctccagtctcccggacaactgctccttctgggatgcctttcgcccagagggccggcgcagtgtgctacggacaattggggaatacctggaacaagaggaggagcagccaaccccaccaggcttggaacccactgtcaaccccagctctggtataagcaagatggagctgctggcctgctttagnnnnnnnnnnnnnnnnnnnnnnnnnnnnnnnnnnnnnnnnnnnnnnnnnnnnnnnnnnnnncaggcatacctgcatatgcccccagaaaacctccagcagctggtgctttcagcagagagggaggctgcacagggcttcctgacactcatgctgcaggggaagctgcagnnnnnnnnncaggtaccaccatccgaggagcaggccctgggtcgcctgacagccctgctgatccagcggtacccgcacctcacctcccagctcttcattgacctgtcaccactcatccctttcttggctgtctctgacctgatgcgcttcccaccatccctgttagtcaacgacagtgnnnnnnnnnnnnnnnnnnnnnnnnnnnnnnnnnnnnnnnnnnnnnnnnnnnnnnnnnnnnnnnnnnnnnnnnnnnnnnnnnnnnnnnnnnnnnnnnnnnnnnnnnnnnnnnnnnnnnnnnnnnnnnnnnnnnnnnnnnnnnnnnnnnnnnnnnnnnnnnnnnnnnnnnnnnnnnnnnnnnnnnnnnnnnnnnnnnnnnnnnnnnnnnnnnnnnnnnnnnnnnnnnnnnnnnnnnnnnnnnnnnnnnnnnnnnnnnnnnnnnnnnnnnnnnnnnnnnnnnnnnnnnnnnnnnnnnnnnnnnnnnnnnnnnnnnnnnnnnnnnnnnnctgagccctgaggagctgcagagtttactgcccctgagtgatccgatggggccggtagaacgggggctgctggaatgtgcagccaacgggaccctcagcccagaaggacgggtgnggtggcatatgaacttctgggggtgttgcgctcatctggaggtgcggtgctgagcccccaggagctgcaggtctgggccccgctcttccctcagctgggcctccgcttcctgcaggagctgtcagagccccagcttagagccatgcttcctgtcctgcagggagctagtgttacacctgctcaggncaggctgtcctgctgcttggacggctccttcctaggcacgatnctatccctggaggaactctgctccttgcatcttctgctgcctggcctcagcccccagacactccaggccatccctaggcgagtcctggttggggcttgttcctgcctggcccctgaactgtcacgcctctcagcctgccagaccgcagcactgctgcagannnnnnnnnnnnnnnnnnnnnnnnnnnnnnnnnnnnnnnnnnnnnnnnnnnnnnnnnnnnnnnnnnnnnnnnnnnnnnnnnnnnnnnnnnnnnnnnnnnnnnnnnnnnnnnnnnnnnnnnnnnnnnnnnnnnnnnnnnnnnnnnnnnnnnnnnnnnnnnnnnnnnnnnnnnnnnnnnnnnnnnnnnnnnnnnnnnnnnnnnnnnnnnnnnnnnnnnnnnnnnnnnnnnnnnnnnnnnnnnnnnnnnnnnnnnnnnnnnnnnnnnnnnnnnnnnnnnnnnnnnnnnnnnnnnnnnnnnnnnnnnnnnnnnnnnnnnnnnnnnnnnnnnnnnnnnnnnnnnnnnnnnnnnnnnnnnnnnnnnnnnnnnnnnnnnnnnnnnnnnnnnnnnnnnnnnnnnnnnnnnnnnnnnnnnnnnnnnnnnnnnnnnnnnnnnnnnnnnnnnnnnnnnnnnnnnnnnnnnnnnnnnnnnnnnnnnnnnnnnnnnnnnnnnnnnnnnnaatccagttgatggacagactatccaatgaatccattatgttggtggtggagctggtgcaaagagctccagagcagctgctggcactgacccccctccaccaggcagccctggcagagagggcactacaaaacctnnnnnnnnnnnnnnnnnnnnnnnnnnnnnnnnnnnnnnnnnnnnnnnnnnnnnnnnnnnnnnnnnnnnnnnnnnnnnnnnnnnnnnnnnnnnnnnnnnnnnnnnnnnnnnnnnnnnnnnnnnnnnnnnnnnnnnnnnnnnnnnnnnnnnnnnnnnnnnnnnnnnnnnnnnnnnnnnnnnnnnnnnnnnnnnnnnnnnnnnnnnnnnnnnnnnnnnnnnnnnnnnnnnnnnnnnnnnnnnnnnnnnnnnnnnnnnnnnnnnnnnnnnnnnnnnnnnnnnnnnnnnnnnnnnnnnnnnnnnnnnnnnnnnnnnnnnnnnnnnnnnnnnnnnnnnnnnnnnnnnnnnnnnnnnnnnnnnnnnnnnnnnnnnnnnnnnnnnnnnnnnnnnnnnnnnnnnnnnnnnnnnnnnnnnnnnnnnnnnnnnnnnnnnnnnnnnnnnnnnnnnnnnnnnnncagaacctgtgccaaattgtgcagatgtacgagggacattcccagcagcctggtctgcaacccagattgcagagatgaacctctcagactttgaggactgcctgacactatttgtaggagatgcaggacttgggc

SEQ ID NO: 41766 - DNA, 103 bp, Macaca Mulatta
  misc_feature (1)...(103): n = A,T,C or G
ccaacacagaagattcatcctgtgtgactggatcagaccctgagacggaaaataaggcatgccagactctggagaacagctcattaatggccgagctcctgan

SEQ ID NO: 41767 - DNA, 872 bp, Macaca Mulatta
  misc_feature (1)...(872): n = A,T,C or G
ggcttaccggtgcaagtggagtatagaagactcacctccctttaagtctctttactgtcccctgtatatagtataagtgtcttaaatattttctgtatgtgaactggggaccacatcagacaatgctgtggacaaaatgctattaaaaagcgttttaaggctgggcgtgnnnnnnnnnnnnnnnnnnnnnnnaactttgggagaccgaggctggtggtcacttggcattgggagcnnnnnnnnnnnnnnnnnnnnnnnncannnnnnnnnnnnngctaaaaatacaagaattagccaggcatggtggcacgtgcttgtaatctnnnnnnnnnnnnnnnnnnnnnnnnnnnnnnnnnnnnnnntgannnnnnnnnnnnnnnnnnnnnnnnnngttgtgctactannnnnnnnnnnnnnnnnnnnnntgagattctgtctcaaaagaaagcattttgaggtcaggcttggtagcttattgctgtaatccccgcaattttgggaaatcaaggcaagcaagctcaacttgaaccccaggaaattttgaaattcagccctggcccagccatgggggaaaaccncctttctcccactaaaaaaaaacaaattaacctggggtgttggagggccatgtaaggccctgttaaatcccagcctacttcaaagggggcttgagagccatgaaaaaattgcctttgaacccccaggaagagcggaaggttttgccactgggaaccaaaaaattggtgccaactgttaacctcccacaccctggggtgaacaaatatatgggaaactccctgttctcccctacggaagncaacagatccttgcgcagctnctcataatgaagtggacctctgtctcggccgccc

SEQ ID NO: 41768 - DNA, 1036 bp, Macaca Mulatta
  misc_feature (1)...(1036): n = A,T,C or G
tggtgcgccagtgctttagcgccggcgcagccgccatcgccgagctctcgctcctctttccggaaggcccctggcgctacagtcccgctccacagcaggaaaccaaaggttccggcgtccagagggcgcctcccagtcccgggcagcttttcttggcacaccggcggcactcggaagcccagctgctgtctgaaccttgagccgagttggaagctagaaactgtgtttttgaggctcccctatgttgtccgagatagtgggccgcagggcaaatctcaaaataaaatgggaaatttgacgatgagaactcctgaaagtctcgggacagagacttaggccattcagcaagaagggcactagcttcagctgctgcagacccagcctcagaagcagcaaccggcagggagacctctggctctagctgtcgctgaacacagaaagtggtgtttgcttaacgtggagagccagactacccggaataggtgttttcataccggacggaggtcagggtgttagtnnnnnnnnnntagagctatatgcccaagttaccacgacttcctcgattacaggctttactgaacgtatattgctaactcttgcacatcaccagaaactctggagtttgaggtggcagaacagtcatggcattgacgattccaatggaaaaatgtatttcaccatacaggactgtagagtccagggaagtcataataccagaaacagaactccagtttcattctcacccctagtactccactgacagctttgtttttttctcctggggttgccaagagagtgtctataaaatcattaggaacaaannnnnntacacaagattagccctgatattttaatggaaatacggaccaagtttacaacatttcaaatgcaaatcacacggaaaggtgactaagtacagaataccaaatgtgatttaaaataaagataacctgctgctgcatataatacaggttgggtttagagcttggagctcagatgtcagacagcaggaggaatagaaatgctacttgtgaaa

SEQ ID NO: 41769 - DNA, 437 bp, Macaca Mulatta
gtctgcagactacaaaagtaagaaggatcactgtaagcagttaaagagcaaattgtcacacatcaagaagatggttggagactatgatagacagaaaacatagaaggctgatgccaagttgtttgagaaattaagtatctgacatctctgcattcttctcagaaggcaaatgactttggaccataacccaggaagccaaaccttgtgagcatcacaaagttttggttgctttaatatcatcagtattgaagcattttataaatagcttttgataatcaactgggctgaacactccaattaaggattttatgctttaaacattggttcttgtattaagaatgaaatactgtttgaggtttttaagccttaaaggaaggttctggtgtgaactaaactttcacaccccagatgttgtcttaatacctacatgtatttgt

SEQ ID NO: 41770 - DNA, 417 bp, Macaca Mulatta
agccctgctcccctcgtcccctcggcgggcgcagaggctgagccgcagtgtgtcatccccgcagggtgactcgggtgggcccatcgtgtgtggcaaagaccaggtgttggccggagtcctgtccttcagctccagggtctgcaccgacatcttcaggccccctgtggccaccgccgtggcgccttacgtgtcctggatcaggaaggtcaccggctgatccggcctgatgtcctggggtgaccgggactgcctcgctgtctccacaggacccctcccctccagggctgcagtggggtggatgaggacaggtgggagggacagggaggggccaataaatcatgatgaaggaatgctcagagcctgtgtcccagcccgcctctgtccatgctggctgcgcggcctccgacaaacctattt

SEQ ID NO: 41771 - DNA, 815 bp, Macaca Mulatta
  misc_feature (1)...(815): n = A,T,C or G
gggatgtttatcacagtgctgtttgtaatagtgaacattgcaaacattacaccaagggaagtaggtaaattatggttacatctatttcatgtaatcatgatagtacataagaatatttgttaaaatgaaaagtggtttataatacttaagcagaaaaaacaaattacaaaaaaaacagtgatacaatatgatgaccccaagtgtcttttttttatgccttttattggttttgctttctgtaatgaatatgtataattcttccaatgagaaaaaagttttaacaaataaaatcagaaattgtggtcctaaggaaagatgccataggaccataaaaaggagtctacaactttaaaacaatgcatttgaattcctacgaacaaggtttcatacttacagtgggttctatgttgagttcttttctctctctgtctccttgatcaaaaaattcacttgctacaagttctgctatctgaaataaataacagactcagttttgacaatgaaaagcatatcattctttaaaacagggactgtgaatggaggccctgttaggagctatatatctccattttatagcaaataagcagcagcttgatacttgaagacaagtagtccacatccaaagcatgctctcttgactatcccattatactctttttcacttaagtatctctctctctcttttggaagcctcccacatttttccccnnnnnnnnnnnnnnnnnnnccgtttcctcccttcatttattttccccccctaaaaccgtattgtccaaagatttgatttccgggagaaagaaagggtttttagaaga

SEQ ID NO: 41772 - DNA, 773 bp, Macaca Mulatta
  misc_feature (1)...(773): n = A,T,C or G
gggattacaggaatgcgccaccatgctcggctannnnnnnnnnnnnnnnnnnnnnnnnnnnnnnnnnnnnntnnnnnnnnnnnnnnnnattggccagtctggtctcgaactcctgactttgtgatccgnnnnnnnnnnnnnnnnnnnnntctgggattgcaggcatgagccaaccacgcctggcctgaccatgctaattctttcatatattgtctatagctgctttcacactataacagccgagttgtgtagttatgacagaggctatatagcttgcaaagcctaaaatatttactatctgttcctttaccaaaaagtttgctgactactgctgtatatggtatgctgaattgggtttaaatggcttgtaatagccctgaaaatttaagttggctctcctctcccctgccattgaggctggactgcatgagattattgtatctgttggctgtagctgtgactatgagctgagtgccatgtcccgttgggtagcatgtacttggtgacccatgccccacatacagctgactctttaaagcagttccctgccacacagtcaaggacaggaagctatagtgtgacttccctgatggggagttgtgtctgttactaacatcccccaaaagtagtgatgagagatagcattagctaatgggtaaataactggcttaaaagtgttaaccccctaggttttcacactccagtttttatatggtccctgcctatgtggattctttttctgccctggcattcctaaaacactgaattttgcc

SEQ ID NO: 41773 - DNA, 742 bp, Macaca Mulatta
  misc_feature (1)...(742): n = A,T,C or G
gggatttctttgcaattattttagtcattagcaaaagttctttggttctcaggttgttcactcaaattaatttaaagtcactcagaggctgggcacannnnnnnnnnnnnnnnnnnnnnntattttgggaggcaaaggagnnnnnnnnnnnnnnnnnnnnnnnnnnnnnnnnnnnnnnnnnnnnnnnnnnnnnnnnnnnnnnnnnnnnnnnnnnnnnnnnntaggcaggcgtggtagcgcatnnnnnnnnnnnnnnnnnnnnnaggggctgaggcaggagaaacgnnnnnnnnnnnnnnnnnnnnnnnnnnnnnnnnnnnaatcatgnnnnnnnnnnnnnnnnnnnnnnnnnnnnnnnnnnnnnnnnnnnnnnnnnnnnnnnnnnnnnnnnnnnnnactcagtatcattcccttctatgtggttaaaccaccagctggatacaccattaggttcgttttcttaattttgctttcaatttttagcaatctaattttttaatgttataattatgtaaaacatttatgtggttccaaagataaaaccacaaaatagaatgtattggagagatgtctagattccatccctccatccctgaacacccccaagtaattattttaactcatattttattcccttcatttacatatggtatatggtatagaccttcacatatttctataataaaacaaggttccccaactttggtttctttaaataaaagtgggtaaaaacacccacgtc

SEQ ID NO: 41774 - DNA, 1010 bp, Macaca Mulatta
  misc_feature (1)...(1010): n = A,T,C or G
gggagtctctttggaaacttctgcaggggaaaagagctaggaaagagctgcaaagcagtgtgggctttttcctttttttgctccttttcattaccccattacccctcctccgttttcaccctttcttccggactttcgcgtaaaaaccctgcgaaatttcgaaaaaggaggtgggcaaagtgggaagaaaaaaggtgttaggggtttnnnnnnnnnnnnnnnnnnnnnnnnnnnnnnnnnnnnnnnnnnnnncctggattttcaaacgttttttctccccccccccctctcgggaggtggcgggccaaaaaggccccttttttaaccctgggtttcccggggggcccggctctctgaataaaaacgttcgcggggcaccaattatgaagagggggtttttataataacaaaaggtggacacgcggggaggcgggggagtgtttatttgtttataaaaaacatttttttttagtacgcacacaccacaatatatatttgttttttttagaaggaggagtaatacttaccccccctctctttttttttgttgtttatccctcccctcaaagaatatgagatggtattaaataaaggggggggaatatttttaatatccctacagggtatggtgagtgttcctcctcacanaacaaaacgccgcgtctttattttaatatatcctatcaacggcgacgggtgggtagtatcatattattgtggaggggggtgggggannnnnnnnnnnnnnnnnnnntctctttttagtggggaggcgcgagttatttgttatttttccaccgacccaccactcttagtatataatgttttttaacaccaccccctcccctatcacaaataatgagtttagataaagggggaaatgatttatattctctacagccggcgcgtatcaagctccacctgttataatactagaaggataggaggatctccactaatagacacggagaagacgtcgagccaccactcatatgtgcactacctccccc

SEQ ID NO: 41775 - DNA, 729 bp, Macaca Mulatta
acctccctcttccctgaccatgccccctctggagacccagtcttctctagtcccgccctctctgcagacacctcctgcttccctgaccacactccctctggagagcccaccttctctagccccaccccctctgcagacagcttctggttccctgaccacatcccatctggagactccaccttgtccagacccacgccctctgcaagcaccaccttcgccattgatcgcgccccttccggagaccccctcttccatagccacgcctcctccacaggccccacctgttctggcctcaccccctttgcagggcctgccctctccccctctgtctcctttggccacgccccctccacaggccccacctgccctggccttgcctccactgcaggcccctccctctccacctgcctcacccaccctgcaggctccacgccgccccccgaccccgggtccggatacctctgtctcgggcccacggctgaccctggcgttggcccccggcccgccgccgccgccctcgcgcagcccgtccagcacgctgagcggcccggacctggccggccacagcagcagcgccacgagcacgccagaggagctgcgtggctacgacagtgggcccgagggcggcgccgcagcctccccgccccccgacgcagagctcgctgcttgccacccggctgcctggagtcgaggccccgctccgccgctcgccttccgcggagctccagg

SEQ ID NO: 41776 - DNA, 921 bp, Macaca Mulatta
  misc_feature (1)...(921): n = A,T,C or G
gggaggcattgaggcagccagcgcaggggtttctgctgaagtggcaggcgcagcttgaggaacccgcagataagttttctctctttgaaagacagagattaatacaactacttaagaaatgtagtcagtagcttactaagattttgcttagcattaggttcttannncgnnnnntttgaatannaattttnngaganatatgagaagttnnagtgagcgtgaggaaggagaaggannnncgtttcnnnnnnncgtgacggagggtgagacgagnctncntnnnnaagnnnnnnnnntggtntnnnnnnnannnntgnnagnnaggagnnnnaagccctnnnnnnnnnnnnnnnnnnnnnnnaggcnntgctnttncattncncctgaccgtgatttaatcacaactcacccccttcttctataaatcatacgaaacttaataaattttcaaagccaataatttaaaaatccaaattaaatctaaatgtcatctaatataacttcaaacccccatttacttaataaaataacttcctcctatttaaacacccaaactcaatccctaatactttattccatatcctataacacataactaacccataaaatattactccctaacacccatcaaccaacattcactctcctaccaaaacataaataaatttaaactctgccatatcctcaattactccactatcaactaaacctcatcaaataaaatcaattacatcccaaacaaattacataactaaaacacattacaatnctcatactttttttaacaatcatatactcctatttatattccctaaaaaatccctctatacaaaaactaaaaactcttctatacaaccacttancaaacatacttcacacaacacaataatgtcaacataactctcaatatatacacatcag

SEQ ID NO: 41777 - DNA, 537 bp, Macaca Mulatta
  misc_feature (1)...(537): n = A,T,C or G
ttattctgaaggaggaaatcttgaggaagcacaggacctcatggtcctatcaagtggaccccggtggtgtggatcccaggaattatggtttgggaaaacctgtgaagagaaaagcaggggagattctcaagcttccaggtgctaccatatggagcctgaggattaaagccaataccaaagaagacagtgattaaacagagagaaactaggttcttggtgacatcttttgagccactagaccaagccttacctgaagcagacctacctcagaacttttcagctatgtgagccaataaacatcttctgnnnnnnnnnnnnnnnnnnnnnnnnnnnnnnnnnnnnnnnnnnnnnnnnnnnnnnnnnnnnnnnnnnnnnnnnnnnnnnnnnnnnnnnnnnnnnnnnnnnnnnnnnnnnnnnnnnnnnnnnnnnnnnnnnnnnnnnnnnnnnnnnnnnnnnnnnnnnnnnnnnnnnnnnnnnnnnnnnnnnnnnnnnnnnnnnnnnnnnnnnnnnnnnnnnnnnnnnnnnnnnnnnnnnnnn

SEQ ID NO: 41778 - DNA, 868 bp, Macaca Mulatta
  misc_feature (1)...(868): n = A,T,C or G
ggggccccggtgaagaagctgaggtcaacatcagatttgaaatatttaaagtggatacaaaactatttcagcaatgcagacaattaagtgtgttgttgtgggcgatggtgctgttggtaaaacatgtctcctgatatcctacacaacaaacaaatttccatcggaatatgtaccaactgtttttgacaactatgcagtcacagttatgattggtggagaaccatatactcttggactttttgatactgcagggcaagaggattatgacagattacgaccgctgagttatccacagatagatgtatttctagtctgtttgggagggggctctcaaggagtatttgaagatgtgaaagaaaagtgggtgcctgagataactcaccactggccaaagactcagtttcttgcttgttgggactcaaagatgatcctcaaaaagtaccccataaggtagtaaagagacgtgacaaaaggcgagcgagaaagctaagcagtcccagaaactggttgaaaatctggaccacatgacctgtaagggtgaaaatgagggagggaggggggctgggactttccagaggaaatgggcctaaatagattgttttgagaacgaaaacaaaaatttgggcctgctcttgcgagccacacaaaaaagcgaaaaaacgaaacccgcaagggtgtgtgtggctgggctattgataaaatcctgcttccaggagcccccgttttttgagtaaaatggggggggggggcccttttttaccaaaaacttgtcccgggtttgtcgctgtgtactttctaatgagctgggggggggtggggcgggtaagggtgctgcgcgctnntatgtgggaggataggtggttgttgg

SEQ ID NO: 41779 - DNA, 144 bp, Macaca Mulatta
tcccggtgtttattcccctgcttcccggtgtttattccctgcttcccggtgtttattcccctgcttcccggtgtttattctctgcctcccggtgtttattccctgcttcccggtgtttattccctgcttcccggtgtttattcc

SEQ ID NO: 41780 - DNA, 1305 bp, Macaca Mulatta
  misc_feature (1)...(1305): n = A,T,C or G
ggcttcaccatgccatacaatcatcagactgtgaaaaggcaccgtgaaagaaataattctaaaatcagagggagaaagcgtctagttacctataaaggaacccccatcagactaatagacttatcagcagaaaccttacgacccaaaagagaatgagatgctgttttccacgtgctaaaataaaatgtcacctaagaatgttatatcctgtcagaataagctttcagaatggagaagaaatacagccttttataggcaagcaaacactaaaggaatatgtcaccactagaccaaccaaacaataattgcacaaaggtattcccaaacgcgcaaaatgaaattttcacactcactgatctgtaataagacaatacattcaattgagaacatagaataacacggatactacaataacacaacccttcgaaaacagataatttcccacctcatatatctccccacaagaaccctaatcgaataaaatctaagtcacctcattaccaccgaatatttaacctttcttattccgaactacagcaatacctcttttggccactatttatatcttactttctctaatttaatatatattagtagaggagcaaatcacaacgaagcatttcatccataaatctactttgctcctctctantaattgccaaaaatataacattgaannnnnnnnnnnnnnnnnnngatctttccaaaacataacatcaacctcactcaaggngacacgacttcgaagctcgtagcnnagattaacacatagtgttgaggtgacgaaatattcagatgtttaaatattgtgggtggctttttctttggtctggtcgtcattggactgtgatacccccaagatgccgcaaccttatgcgctcacccggtgataaataactcgggcgagtggaacccctgtgaaaaatcatcacgggagatgcgatttatatataaactgatgttatcctcaaattttagcaaaaatctttacatatttaagattcattnaattataagacgtacgaccttctgaggcccctttttnttatntgtaaaatctcgttaaatcccttctgctcatctgttttctaaatgcattttcgcagcagtatgatanttactaacacgtcacagtggtatatttaatccaaagtctcttggacaataaaatggtatgacatcactggtggagactatggctcacacacaaatataatnatatgatcttcgtcactaaactagcaagataaatgacgatactcgaggcaatatcttaatacttgattcatgtgagtagccgacaca

SEQ ID NO: 41781 - DNA, 776 bp, Macaca Mulatta
  misc_feature (1)...(776): n = A,T,C or G
ggcacannnnnnnnnnnnnnnnnnncnnnnnnnnnnnnnnnnnnnnnnnnnnnnnnnncctaaggtcaggagttcatgaccaacctggccaacatggtaaaaccttgtctttaccnnnnnnnnnnnnnnnnnnnnnnnncatggtggtgggnnnnnnnnnnnnnnnnntnnnnnnnnnnnnnnnnnnnnnnnnnnnnnnnnnnnnnnnnncnnnnnnnnnnnnnnnnnnnnnntgcnnnnnnnnnnnnnnnnnnnnnnnnnnngagcgaaactctnnnnnnnnnnnnnnnnnnnnnnnccctaaaacatggtacatgtcatcaagaagtttatcactaggagactaattgtgcttacatttctgattccctttccaaggctaattgtagagtatgcctttccctccctctctcttctcacatccagcgaatggtgctgagtgtctaatgaaggcagnnnnnnnnnnnnnnnnnnnnnncatcagattatgtgaataaacatcaacagaggtgcaatctcccagttggacaacaactaatggaaaagctgtggctacagtatgagaaggcacaagcaannnnnnnnnnnnnnnnnnnnnnnnnnnnnnnnnnnnnnnnnnnnnnnnnnnaaaactccagtttatgactaggggatataaaagagtttcaacttgtgttatatagaaacagggaaacccggtttatttgttttgggggatgaaaacaaaatatcaggtccaatttttttaaattaaaaaaccccctaccgggtttaac

SEQ ID NO: 41782 - DNA, 641 bp, Macaca Mulatta
gtgagaattaattaccagtaacagttcaatatgggggacattctggctcatgaatctgaattacttggactagtgagagagtatttagattttgctgaatttgaagacaccttgaaaacattttcaaaagaatgcaaaataaaaggaaaaccattgtgtaaaacagtaggtggatctttcagagactccaaatcattgacaattcagaaggatcttgttgctgcatttgacgacggagaccagaaggtgttcttcagtctgtgggaggagcacattcccagttccgtccgagatggggactcctttgcccagaagctggaattctatctccacatccattttgccatctatcttctgaagcactctgtggggagaccggacaaagaggagctggatgaaaagatttcttacttcaaaacctacctggagaccaaaggggcagccttgagccagaccacagagtttcttcctttctatgcccttccttttgttcccaaccctatggtgcacccgtcatttaaagaactcttccaggattcctggactccagagttaaagttgaagttggaaaagtttctagctttaatatttaaagccagcaacacgccaaagcttttaacaatatataaggagaatggaca

SEQ ID NO: 41783 - DNA, 782 bp, Macaca Mulatta
  misc_feature (1)...(782): n = A,T,C or G
gggatgagtattaaaaagaacacacatttcttcacaaaatgtgctaaggggcgtgtaaagaatcaaactattaccagtaatagttttgataatcacccgtaattttgtatttaaaccatttaaacattgaaattattctacagacagtattctctgtgttctgtgaatttcagcagcttcagaatagagtttaactttgaaacttgcagtgaaaaaagctatccatttgttcacaaccataaatcaggagatggagattaattctattggctcttagtcacttggaactgattaattctgactttctgtcactaagcacttggtatttggccatctccattctgagcaccaaacggttaacgtgaatgtcaagtagaactctgctgtgtgtcacccttaaatcagcctaactcttcccgataaaagcaaatggcatttacggatttaagtcattagattttaaactgacattaattaatcccccttgattcattatatcatcaagtatttatattttaaataggaggtaggatttctgtgttaagactcttacttgtaccctataattaaagtaaaatggtttttatgagtatcccttattttcccttcttaaattgttatcaaacaatttttataatgaaatctatcttgggaaaattagaaagaaaaatggccagggtatttattgtttctgtttgcccataatttagaactcaaaacctaagtagnttgtagtttttacattccctttttaaacccattcagtggaaaaatgtccacct

SEQ ID NO: 41784 - DNA, 350 bp, Macaca Mulatta
gaacaaatgattaccagcctgtacaggacttgagagaagttaacaagcagacagtcactgtccatccaactgtccctaacccttatactttactcagcctgcttctgccagaacatatagtatacactgtccgtgacttaaaggatgctttatttgctattcttctggcccccaaaagccaacctatctttgcttttgaatggacagatcctggctcaggagacaccacccaattaacctggactcggttaccccagggttttaaaaattcccccacccttgttggggaagtcctccaacaagatcttataccattctgagccagtcaccctaactgcactcttctccag

SEQ ID NO: 41785 - DNA, 677 bp, Macaca Mulatta
  misc_feature (1)...(677): n = A,T,C or G
tgcactctcttaacgatatctttctacagtccacctttttattgatagaggtcaaatcacacactgacaatttttttatgatgaaattatttcataactctggccagtggtccacttatttcaagcactattagaaaattctagtacacctaagcatttccttcatgtgcttgnnnnnnnnnnnnnnnnnnnngaattcaactatgggtattaaaaccctcttactgtggtattcagtaccttttttgaacgtcccttttgttttagaaacaccatctataatctaagttatatttttcccttatttctcattagttcatacacacacatatatacacatacatatacatatgtgtatattttaagcttaaagatattataaggcacagctgaactatgactattcctattggatatctatgacagccttatttcataataaaatgctaactttccttcctttagtaatagttccatgttgctatagtaatcatggtaattgcttaacaaaagtggcaaataggatcttctaagaagttttgaatctatttgcctagtaatataattaattgatttgagcaatcattttttaaattgtcaacttgaatgctggaatatgattctctggttctagatcacggcagtgctaatgttcacattgaaccatctaaattgga

SEQ ID NO: 41786 - DNA, 886 bp, Macaca Mulatta
  misc_feature (1)...(886): n = A,T,C or G
ggggcttttttctttgctgcgtctactgcaagaatgaagaccattctcagcaatcagactgtcgacattccagaaaatgtcgacattaccctgaagggacgcacagttatcgtgaagggccccagaggaactctgcggagggacttcaatcacatcaatgtagaactcagtcttcttnnnnnnnnnnnnnnnnnnnttcgggttgacaaatggtggggtaacagaaaggaactggctaccgttcggactatttgtagtcatgtacagaacatgatcaagggtgttacactgggcttccgttacaagatgaggtctgtgtatgctcacttccccatcaacgttgttatccaggagaatgggtctcttgttgaaatccgaaatttcttgggtgaaaaatacatccgcagggttcggatgagaccaggtgttgcttgttcagtatctcaagcccagaaagatgaattaatccttgaaggaaatgacattgaacttgtttcaaattcagcggctttgattcagcaagccacaaagttaaaacaggatatcaggaaattttggatgtgtcttgtctctgaaaagaactgtcccagctgagatagactagagtaccctctaaaaatgcggagtctaaaactctaattttggaaaaaatttttctcctcctctnnnnnnnnnnnnnnnnnnnnnnnnnnnnnnacttngctccctccaaaaaaacgctactttggtggacttttttaaaatgggggctccnnnnnnnnnnnnnngnnnnnnnnnnnnnacaaaaacattgatttacaacnctatactattatattatcctttgttgtggggccgcccccagtggccccttaggggaaattctttttcagaacactttgtttgg

SEQ ID NO: 41787 - DNA, 650 bp, Macaca Mulatta
  misc_feature (1)...(650): n = A,T,C or G
gggggctatttagggtccaggcaagggaagggccagaggaagaaacaccaaaaagaaaaaagagggtcctctcaaatgcatcccgaactgctccttggtagacaagataaaccttggctggcatctgagccaggtcatggatagcaaaatgccagccctgctaagtcccttcacaacatttctcaccaactgcacgaatgcctggcatcatgagactgggtgcaccagaccacatacttcaaagagaagagaagaaagtatcaggataggatcaagatcgtaacagtttggaggtaagttaaggattctgaggctgtaaatcagaaatcagaaaacaaggtcatttattccggaatgtgatgtggttgagttatcacaatgggattcggtggagatggaaaagggcccacccagttacaaggcactgacagattgaatgagaaaatggacagaggctaaaacacccaatcaaggaagatggacagtcttttggcaggagaagaatgggcctcaaaaatgaatttggggtatggggtgattttcagtcttttgcatcgataaaaaagacagccgcctccatttaatcttgagatcaatggccatccttataaactgcatnnnnnnnnnnnnnnnnnnnnnnnnnnnnnaaa

SEQ ID NO: 41788 - DNA, 515 bp, Macaca Mulatta
cacaattccatactattatacactattactgatcttatcatgggtgtatgtttggacaaaaataagaccattttccatttattttgcatcctctacggcacctggtagacactgtatgttaggcacataatcagcacgcatggactgaatttgcccacttgtttcctagtgcctttcataggcaacctggttttgccttttcctttccattccggagctaattccatcctcacatctctgtcctaccaatacagccctctctccctatggaggctccagagcccccatttatcatgttctctttgtagcacttggtagcagatcagccgtgtttccacttctgctctattcgttgttttcttacagtgggctagttaaatagtccaggacttctgcttcatacaggcacggtctgcacaacaagagccctgttggaattgccataatcaaagagattgtatatattgtgggggctggggagggggtggaaactcacagaaagcagtacggtgaag

SEQ ID NO: 41789 - DNA, 402 bp, Macaca Mulatta
atggagaccctcttgggcctgctcatcctttggctgcggttgcaatgggtgagcggtaaacaggaggtgacacagattcctgcagctctgagtgttccagaaggagacaacttggttctcaactgcagtttcactgatagcgctgtttacaacctccagtggtttaggcaggaccctgggaaaggtctcacatctctgttgttaattcagtcaaatcagagagcgcaaacaagtggaagacttaatgcctcgctggataaatcatcaggacgtagtactttatacattacagcttctcagcctagtgactcagccacctacctctgtgctgtgagtaccgattctggctggcaactgacctttggatctgggacacaattgaccgttgtacctgatatccag

SEQ ID NO: 41790 - DNA, 3716 bp, Macaca Mulatta
  misc_feature (1)...(3716): n = A,T,C or G
cagggagatgttaatctctgtggccctgggccaggtgttatccctccttatttgtggaattggcttgactagcaagtatctgtcagaagatttccatgccaacacaccagtcttccagagtttcctcaattacattcttctcttcttggtctataccaccacactagccgtcagacaagnnnnnnnnnnnnnnnnnnnnnnnnnnnnnnnnnnnnnnnnnnnnnnnnnnnnnnnnnnnnnnnnnnnnnnnnnnnnnnnnnnnnnnnnnnnnnnnnnnnnnnnnnnnnnnnnnnnnnnnnnnnnngctcctggactgttttgtgatcccagtcgtgattttgctctcctggttcttcctgctgatccggtacaaggctgtgcatttcatcggcatcgtcgtctgcatcctgggaatgggctgcatggtgggagcagatgtgcttgtgggaagacatcagggagcaggnnnnnnnnnnnnnnnnnnnnnnnnnnnnnnnnnnnnnnnnnnnnnnnnnnnnnnnnnnnnnnnnnnnnnnnnnnnnnnnnnnnnnnnnnnnnnnnnnnnnnnnnnnnnnnnnnnnnnnnnnnnnnnnnnnnnnnnnnnnnnnnnnnnnnnnnnnnnnnnnnnnnnnnnnnnnnnnnnnnnnnnnnnnnnnnnnnnnnnnnnnnnnnnaggactgctctacgttggctttagtgcctgcatgtttggtctctacagctttatgccagtcgtcataaagaaaaccagcgccacttcagtcaacctctctctgctcacagcagacttgtacagcctgttctgtggattgtttctcttccactacaannnnnnnnnnnnnnnnnnnnnnnnnnnnnnnnnnnnnnnnnnnnnnnnnnnnnnnnnnnnnnnnnnnnnnnnnnnnnnnnnnnnnnnnnnnnnnnnnnnnnnnnnnnnnnnnnnnnnnnnnnnnnnnnnnnnnnnnnnnnnnnnnnnnnnnnnnnnnnnnnnnnnnnnnnnnnnnnnnnnnnnnnnnnnnnnnnnnnnnnnnnnnnnnnnnnnnnnnnnnnnnnnnnnnnnnnnnnnnnnnnnnnnnnnnnnnnnnnnnnnnnnnnnnnnnnnnnnnnnnnnnnnnnnnnnnnnnnnnnnnnnnnnnnnnnnnnnnnnnnnnnnnnnnnnnnnnnnnnnnnnnnnnnnnnnnnnnnnnnnnnnnnnnnnnnnnnnnnnnnnnnnnnnnnnnnnnnnnnnnnnnnnnnnnnnnnnnnnnnnnnnnnnnnnnnnnnnnnnnnnnnnnnnnnnnnnnnnnnnnnnnnnnnnnnnnnnnnnnnnnnnnnnnnnnnnnnnnnnnnnnnnnnnnnnnnnnnnnnnnnnnnnnnnnnnnnnnnnnnnnnnnnnnnnnnnnnnnnnnnnnnnnnnnnnnnnnnnnnnnnnnnnnnnnnnnnnnnnnnnnnnnnnnnnnnnnnnnnnnnnnnnnnnnnnnnnnnnnnnnnnnnnnnnnnnnnnnnnnnnnnnnnnnnnnnnnncacagactatatgagtgatgcatgccacaggagctccacccctgagaagtttccttatcctagggacctggtggctcatggtttcctctgttacctgttggattgcctgctcaataagtattttgtgctgtgacctttgtagggaggggcaactgaccatataattctctattctaggaatagatataaaagaaacattttagcctttttatattttgatctctgattactccaggccattgcctttctgttgtgccacatgattctgctaatcaagtccctgtaataacaagataaggactgttccatttctgtggcttttgggagcccccagaaatcatatcatttgtgtttagggcaatatataattataaaatctttctgcccttccctgtagcctctcttcaaaaactatcttttcttttttttctagatttccttagtgataatatggaaattaatcaaggcgctggaaaaagccatggttctctgcccttttaattctgtgacacctttttaaaaatacaccagcatggaaattacctttattgtggaaaatcattggttgtgccacctcctaacaaagtcaaggtgctgatgtggagcagtctttgaaaatggcttaattgatctggccactttgcagtggtaacgaagtcatcattgaaaaagtctggcattttggtcatatttggcatccattcaataacaggtatattgacacaacattcttnnnnnnnnnnnnnnnnnnnnnnnnnnnnnnnnnnnnnnnnnnnnnnnnnnnnnnnnnnnnnnnnnnnnnnnnnnnnnnnnnnnnnnnnnnnnnnnnnnnnnnnnnnnnnnnnnnnnnnnnnnnnnnnnnnnnnnnnnnnnnnnnnnnnnnnnnnnnnnnnnnnnnnnnnnnnnnnnnnnnnnnnnnnnnnnnnnnnnnnnnnnnnnnnnnnnnnnnnnnnnnnnnnnnnnnnnnnnnnnnnnnnnnnnnnnnnnnnnnnnnnnnnnnnnnnnnnnnnnnnnnnnnnnnnnnnnnnnnnnnnnnnnnnnnnnnnnnnnnnnnnnnnnnnnnnnnnnnnnnnnnnnnnnnnnnnnnnnnnnnnnnnnnnnnnnnnnnnnnnnnnnnnnnnnnnnnnnnnnnnnnnnnnnnnnnnnnnnnnnnnnnnnnnnnnnnnnnnnnnnnnnnnnnnnnnnnnnnnnnnnnnnnnnnnnnnnnnnnnnnnnnnnnnnnnnnnnnnnnnnnnnnnnnnnnnnnnnnnnnnnnnnnnnnnnnnnnnnnnnnnnnnnnnnnnnnnnnnnnnnnnnnnnnnnnnnnnnnnnnnnnnnnnnnnnnnnnnnnnnnnnnnnnnnnnnnnnnnnnnnnnnnnnnnnnnnnnnnnnnnnnnnnnnnnnnnnnnnnnnnnnnnnnnnnnnnnnnnnnnnnnnnnnnnnnnnnnnnnnnnnnnnnnnnnnnnnnnnnnnnnnnnnnnnnnnnnnnnnnnnnnnnnnnnnnnnnnnnnnnnnnnnnnnnnnnnnnnnnnnnnnnnnnnnnnnnnnnnnnnnnnnnnnnnnnnnnnnnnnnnnnnnnnnnnnnnnnnnnnnnnnnnnnnnnnnnnnnnnnnnnnnnnnnnnnnnnnnnnnnnnnnnnnnnnnnnnnnnnnnnnnnnnnnnnnnnnnnnnnnnnnnnnnnnnnnnnnnnnnnnnnnnnnnnnnnnnnnnnnnnnnnnnnnnnnnnnnnnnnnnnnnnnnnnnnnnnnnnnnnnnnnnnnnnnnnnnnnnnnnnnnnnnnnnnnnnnnnnnnttggtttgaataatttgcttgatttattgcatttttagtatttattttaagccagatgttttcgtctttgattcatttttatgacattgatttgtagacacttagtaaagtcttatgagaagcaagtggatgaaattatttccaagtccactcagtagactgaagttttttaaaaatataaatttccaaaaagtttgcaatcaacagatggctaaaggttgccatctgaattattttataggatattttaattgactccattgtatggaaaccaagtgtgaatgttaaaatgaattcgctgtataccctttatcattcagtgtccttgtactgagactttcatgtccctgggtgacctcaatgtgttggtttgtctccatttagaaaggctgataatatattgaattgttcaagatcaggagttccagactgacccttcagg

SEQ ID NO: 41791 - DNA, 142 bp, Macaca Mulatta
ttgcctgagaaaatgccaaaacgcccgggacaagctgaatagaatcaagaacatggccatgacgacaccgagaaagaccatctttcccaatctgatctcacccaattctatggccaaggactcctgggaagactggaggtga

SEQ ID NO: 41792 - DNA, 274 bp, Macaca Mulatta
aggcctacccgggatagcgatgacgaggacgatgaggagaagaagggacgaggctgctccctgcagtaccagcacgccacggtgcgcgtcctcacccagtttgtggccgagtcgcctgacttagggcagctcacctacatgctgggccccgactggcagtttgacatcactgaccttgtgaccgagttcatgaaggtggaggagccgaaaatcgctcagttacaggacggcaggaccctggctggtcgggagccgggaataaccacggtgcagg

SEQ ID NO: 41793 - DNA, 1061 bp, Macaca Mulatta
  misc_feature (1)...(1061): n = A,T,C or G
ggnnnnnnnnnnnnnnnnnnnnnnnncnnnnnnnnnnnnnnnnnnnnnnnncatgccacccgcccggctaannnnnnnnnnnnnnnnnnnnnnnnnnnnnnnnnnnnnnnnnnagccaggatgatctcgatctcctgaccttgtgatctgnnnnnnnnnnnnnnnnnnnncnnnnnnnnnnnnnnnnnnnnnnnnnnnnnntggccatgtttttgtttgagatggaagtcttgcnnnnnnnnnnnnnnnnnnnnncatggcctagttcttgtctcactgcaacctccagcccctgggctcgagcgattttgcgtggctaatacatcttgagtaatttggatattatccggcgttcccccgtgtgtgccagatttattgaaattcttatatagaagaacgcgtgtttttcaatcaatgttttgggcccgagcgatgggtctccacaaaatcccttgatccttcagggtttattctcttcgaaacatttcagtctgcgcaaccaacggggaacttggtggcattcatctacgggggttgaattcttctgatcgtcacaccttgaggattntatggtaaaggcgaagccaataggtgtttttctttgaagacggcgtgatattctttccttcataaacccttggatgttttattcataaagtgttcaatttatgtggtctagtgatacaagccacccaagaatgggtccatgattatctcagccaccnaaattttatatcctagaatgaaaatctcttgcggctaacggggaatttgtaagttntaatttttcaccccggttaaggtccccttgtataactatatgtttcaatcacacctcttacttttttaccacaagaataacacatgaatccgccggtttatttcagcgttaacctcttccaccgcggacagtaccagatatagcgcgacgcaactactatacctcccttgagaataacgtaaaccaacgcgtaaaggcggcgtacttctcagcgctccatcacacggntgaactaaaatctaatttgcctaaaaataggtcactaattttgacataaacg

SEQ ID NO: 41794 - DNA, 775 bp, Macaca Mulatta
gggaaactttaaactgaatgaacaatttttcttctctcagtgaatatatcttaacgccaaattctgagtgcttttttgtcacccatcctcatatgtccagctagaaagaatcctgggttaggagctactgcatgttgatggttttgtttttccttttggctgttcattttggtggctactatcaggaaatctaacacaaacagcaactgttttttgttgttttcttttgcatctttacctgtggagctgcgacaagtcctcatatcaaatacagaacatgatcttcctcctgctaatgttgagcctggaactgcagcttcaccagacagcagctttattcacggtgacagtccctaaggaactgtacataatagagcatggcagcaatgcgacactggaatgcaactttgacactggaagtcatgtgaaccttggagcaataacagccagtttgcaaaaggtggaaaatgatacatccccacaccgtgaaagagccactttgctggaggagcagctgtccctagggaaggccttgttccacatacctcaagtccaagtgagggacgaaggacagtaccaatgcataatcatctatggggttgcctgggactacaagtacctgactctgaaagtcaaaaccttcctacaggaaaaataaacactcacatcctaaaggttcccggaaacagatgaggttaaacctcacatgcccagggctacagggttatccctctgggcaagaagtatccctgggccaaacattcagcggttcccg

SEQ ID NO: 41795 - DNA, 259 bp, Macaca Mulatta
  misc_feature (1)...(259): n = A,T,C or G
tgagtagcaaagccgcgctccccacaggacttggacagagtgcccacagggggatgggctggctgtggccaggttcagggcagggggtatttgtcacctccatgctataagccagtggtggattcataaagtcctgtggtcagtgccttaccgtnnnnnnnnnnnnnnnnnnnnnncgtgcgcgcgtgtgtgtctgggggcacaaagcattgcttatttggtcaaatgtcttgtgttataaatatattctgatgtttcc

SEQ ID NO: 41796 - DNA, 574 bp, Macaca Mulatta
tatggagggccagtccaccaccaccttgcactcaactgacatctggaagcacatccgggaggacactgagggctcagaaagtgcctgggcccctgtgttcaggggaggaatcaaatctctgaggccccagagcagagccatcgtccctctgcccccactggactgagactcacatgcccagaactgcactcgtgggtgacggtggtacatccagggcagaatacacagcagatgggtcagctgatgacagtgcctgccggccagggtcagtccctgactctcttgtataatgtgtaacgcaacagcttgtgcccaggggtccagggcactccggataccggcccaggccctagcttgactcagacctaacccttaggaacccgagcaaatgtctcggagccaggtcctggatccaaatgcccctaatacttcggccaccggccaccatgctgcttcctgagccatctacttcccagtaaaagtgaccgaatcactccaggttgttgtccggagcatcctctggtacacaccaaaggaagtgacccctgggtcccactcagctcctccactcaca

SEQ ID NO: 41797 - DNA, 768 bp, Macaca Mulatta
ggattgttccagtatgtaacatggagggccaggtcataaataatgacattataatgggcttttgcactgttactatttttcctttggaatgtgaaggtctgaatgagggttttgattttgaatgtttcaatgtttttgagaagccttgcttacattttatggtgtagtcattggaaatggaaaaatggcattatatatattatatatataaatatatattatacatactctccttactttatttcagttaccatccccatagaatttgacaagaattgctatgactgaaaggttttcgagtcctaattaaacctttatttatggcagtattcataattagcctgaaatgcattctgtaggtaatctctgagtttctggaatgttttcttagactttttggatgtgcagcagcttacatgtctgaagttacttgaaggcatcacttttaagaaagcttacaattgggccctgtaccatcccaagtcctttgtagctcctcttgaacatgtttgccatacttttaaaagggtagttgaataaatagcgtcaccattctttgctgtggcacaggttataaacttaagtggagtttaccggcagcatcaaatgtttcagctttaaaaaattagggtacaagtttaatgtttagttatagaaattttgtgcaatatgttcataacgatggctgtggttgccacaaagtgcctcgttttacttttaaatactgttaatgtgtcatgcatgcaaatgggaaagggtggaactgtg

SEQ ID NO: 41798 - DNA, 799 bp, Macaca Mulatta
ggtattcagcaatgatcattttaaacatcttccactcagaattctatcacatcattttctcattctcatcaggtgacattgcctcatacttcacagagtaaacaggaattgtcaggtggaaactagctcaactacctgctgtgaaaactgtaagtttataagttatctgtacttgtaattctttgtcttgcaatgaaaggcggggaggggtccctttagattaaaacaattccttttcccgtgcgtcagatccagttctgcatttctagtgtgtgctagtgctctgagaatgtgtgtacatagtgaatgggcaagtttggtttctggctgaatggtgaatcagcatcaacctacagttgctgtcttgccatagccttcatagatgttcaatttagtgatgtgtttccagtcctcagtcaccccagggctgatggatcctcctacagccacacaaagcttcagactcttaaatctgtagctgcagaggcatcaaaagttgttcttagccttagtgagtatttctacccatagcaggtctgttgtgaaaaagaaaacttgcaaaaatgatacaaatattgcccagtatgtaggaaggtactccttaaatggaaagttaaggtccttaattacaagcctttaaaatattccaaaccccccagttacattcaatctcctagaaaaaactcatttaccctctcctggaaaaataagaattcctgggttaaaagtaaaaccaataaagtaattaaactgtatgggccaggaaaccccaccccttccggtagaaaaccccttctgg

SEQ ID NO: 41799 - DNA, 766 bp, Macaca Mulatta
  misc_feature (1)...(766): n = A,T,C or G
ggnnnnnnnnnnnnnncannnnnnnnnnnnnnnnngctccgcctcctgggttcatgccattctcctgcctccgcctcccgagtaactgggactacaggtgcctgccaccacacccnnnnnnnnnnnnnnnnnnnnnnnnnnnnncgggtgtttcagtcaacaatggatgacatatatgatggtggtcctacaaaataatggagctgaaaagtttctatagcctagtgaccttgtaacgtaccataacatgttactcctgttggtggtggtgctggtgtaaacaaacgctgctgccagggatatgaaagtggacggtaatgtcttaagctttcacgctcactaaccactcactcacccaaagcaacttcagtcttgccagctccattcatggtaagtgccctttatgggtgtaccattttttatcttttataccatattttgactgtaccttttctgtgcttagatgctcaagtacttaccgttgttgtgcagttgcctacggtattccctgcagtaactgcgtgggtttgtagtttaggaacggtaggctacaccacatagcttaagtgtgtagtanggcacaccatctaggagtgtggaagtacactttatgatcgtacaaaacaaaactgcctaacgacacatttctcagagcatgttcctgtcgctaactgtgcatatctacagatgcctccagttctaaaccaactccagtgggtttcttcttagcccttccctcgggggtttggattttctcttcccgcaa

SEQ ID NO: 41800 - DNA, 884 bp, Macaca Mulatta
  misc_feature (1)...(884): n = A,T,C or G
ggatggaagaggagtttgtcaacacgcagcaggtggttggttaggcaatcataaatggtgaggggtctggcatgtcattgtgcagacgcagtgatctagtaagtttcagctccttgatactgtcagggaggcctgatggtttgtttcttgagaagggttctcagataaaacaaatgtaattttctcaagtttcaagactggaaaggtaaatttctatgtttattcaaaataaaccgtaaacatcagttctgtgagacaattgggccagtttcactttgattcatccctgaattattactgtgacctgcatgaaaattcagttcttagtcatggactcagcatttttttatagatttccacatgtttgagtaagtggaacgttcaattgcagcaccagagttccaactccctgagagctcatttcaccattgatcatnnnnnnnnnnnnnnnnnnnnnnnccnnnagnaagannnnaannngaagaggaaaaaaacagccaagcacgggcaaagaagcaagagaagcaaaccgagacacacacaccaacaaagacacggaccaaaaaccggcgaagaccacaaaaagaagaaggcacacccacacacgccacaccccgaaaacagaccaaagacaacgcccacacacgacacggacaaagaaaacaacaaaacaacgaaagagaacaaggaacaaaccgcnacgagacacaagcagacacagagaaagaaacaggaaacaagacgganaacaaaccngacagcaaagncncgaacacagaaccaagagaagacgnanagacngacaanacaacacgaccgcgagaaanagcgacagacagcgagaacgacacgcggagacgaggacacacagaccagcgacgaag

SEQ ID NO: 41801 - DNA, 1924 bp, Macaca Mulatta
  misc_feature (1)...(1924): n = A,T,C or G
tctctgacatttctggtgtttttgagatgccctgcctcccagccatgcctagtgtccccgacacccccagtctttctagcactcccaccctcccctgtgactcctggctccaggggcctctgcaggaaccagttgaggctccagccaccaggagagaactgttctctggaagcaatcctgggaaactgggagagtcgccctcaggaggcaaggcagggccagaggaggatgaagaaggggtatcattcccagacttccagccccaggatgtcacccaacatcagggattcccagatgagctggcattccgctcttgctcagaagtccggagtgcctggcaggcattggagcaggggcagctggcccggccgggcttcccagagccactgctgatcctggaggattcagatctgggtggagacagcgggagtgggaaggctggagccccgagttcggaaaggacagcatcccgagtgcgagagcttgcccggctttacagtgagcggatccagcagatgcagcgggcggagactcgggcatcagccaatgccccccgccgccggcctcgggttctggcccaaccccagccgtccccctgtctgccccaggagcaggtggagccagnnnnnnnnnnnnnnnnnnnnnnnnnnnnnnnnnnnnnnnnnnnnnnnnnnnnnnnnnnnnnnnnnnnnnnnnnnnnnnnnnnnnnnnnnnnnnnnnnnnnnnnnnnnnnnnnnnnnnnnnnnnnnnnnnnnnnnnnnnnnnnnnnnnnnnnnnnnnnnnnnnnnnnnnnnnnnnnnnnnnnnnnnnnnnnnnnnnnnnnnnnnnnnnnnnnnnnnnnnnnnnnnnnnnnnnnnnnnnnnnnnnnnnnnnnnnnnnnnnnnnnnnnnnnnnnnnnnnnnnnnnnnnnnnnnnnnnnnnnnnnnnnnnnnnnnnnnnnnnnnnnnnnnnnnnnnnnnnnnnnnnnnnnnnnnnnnnnnnnnnnnnnnnnnnnnnnnnnnnnnnnnnnnnnnnnnnnnnnnnnnnnnnnnnnnnnnnnnnnnnnnnnnnnnnnnnnnnnnnnnnnnnnnnnnnnnnnnnnnnnnnnnnnnnnnnnnnnnnnnnnnnnnnnnnnnnnnnnnnnnnnnnnnnnnnnnnnnnnnnnnnnnnnnnnnnnnnnnnnnnnnnnnnnnnnnnnnnnnnnnnnnnnnnnnnnnnnnnnnnnnnnnnnnnnnnnnnnnnnnnnnnnnnntctgcagtcaacccatcccgcctttgtctttgcatggaagcagcctggacccccagggcccaggcgacaccccaccgcccttgccatgttatctcccagaccttcagattccaggcacctcacctttgcctgcacacggaagccacctagaccatcggatcccagccaacgccccactgtctctgtcccaggacctcccagacactcgggttccagctaccacacctttgcccctgccacaaggcctcacagacatctgggtccaagccctcccaacttcacccaagcagggaagcctcccagacatccagggtccagcggctacacctccacttcaggagccaagccttacagacacacaggtccaaaaactcacacctttattggagcagaagagcctcacagatgcccatgatccagctaccacacctttacctgagagaggaggctctctagacattccgggcctcttacccaccccatttcagaccaccatggttttgtccaacccaggaggctccttagcctctcatgttgccaggttggagtcttcagacttgaccccacctcatagtcccccaccttccagccgtcagctcctgggccccaatgcagctgccctctccagatacctggcagcctcatatatcagccagagcctggctcggcggcaggggcctgggggaggggccc

SEQ ID NO: 41802 - DNA, 332 bp, Macaca Mulatta
  misc_feature (1)...(332): n = A,T,C or G
ggcactagaaaaaagaaacgttagtatctcaattacattaacggtgcaaatggactttgataaaatagaaataatctacattggtatttgtgaaatctgtggaagagctttagggtttctagtagaaggatactgaatactcaggcccacttaaattattaatgtatacattgtgtttttgtctttatgctatgtacagagaaatgtgataattttttataataaatattttttatgataannnnnnnnnnnnnnnnnnnnnnnnnnnnnnnnnnnnnnnnnnnnnnnnnnnnnnnnnnnnnnnnnnnnnnnnnnnnnnnnnnnnnnnnnnc

SEQ ID NO: 41803 - DNA, 848 bp, Macaca Mulatta
  misc_feature (1)...(848): n = A,T,C or G
gggactgggcaagggagagcaacgccatggactgctggggacaaaatgggctgtttccaaggagaagacatttgtttgctccttttttgaatctcatatccagtgtttttcttcacaggttttgcacactagggaccaagaagccctcggggacactgctgagaaaagactgccgaaaggaagaccagcggggatcatggaatctattccagaggaaactaaccaacagtgagcatcttcaactaaaactacccctggatgtaatggttgcatgcatcattcctttaattgagcagagttaactggatcaaattatttatgggagagagaggaaaagttataaagaattttagtaatttttaatttccaccactatactctttgtaagtgaatcactctataattactttctgttgcactgaatgcagcaacagtaacacaatagtattttaaggcactgggtttttggcatactctaacctttgtagctattttaaataacagacaaagtttactcaatgtttattattctgnnnnnnnnnnnnnnnnnnnncctttactccggaagtggatggcccagaaacagaattcagaaaatttacttttcttggaaatttacttaaggtaccacagaaaaattggcaccttatcaagcctttttgttaaaaaacattaccccttaatctaaatcactggcataaaaagtcccaagatttgtagaaaattgtcattttctcagtatctaaaaactatttttgcttccattaaagttctatttgctattttctcagaaattttacaattaaggataaatcacaaactatttggtttttccctaaaagtctttg

SEQ ID NO: 41804 - DNA, 463 bp, Macaca Mulatta
  misc_feature (1)...(463): n = A,T,C or G
atggagtcattcctgggaggtgttttgctgattttgtggcttcaagtggattgggtgaagagccaaaagatagaacagaattccgaggccctgaacattcaggagggcaaaacggccaccctgacctgcaactacacaaactattctccatcatacttacagtggtaccgacaagatccaggaagaggccctgttttcttgctactcatacgtgaaaatgagaaagaaaaatggaaagaaagactgaaggtcacctttgataccactcttaaacagagtttgtttcatatcacagcctcccagcctgcagactcagctacctacctctgtgctctagcggaggctggaactgcactgatctttgggaagggaaccaccttatcagtgagttccnnnnnnnnnnnnnnnnnnnnnnnnnnnnnnccagctgagaggctctaaatccaatgacacctctgtctgc

SEQ ID NO: 41805 - DNA, 1211 bp, Macaca Mulatta
  misc_feature (1)...(1211): n = A,T,C or G
gggagaggtataatcatcctcaaaagcctgtttttactacatgatgtggactgattattttttctatcacagtattaacagatagattttattgtaaatacaaagaaaatatattgattattatagtattcttatgtcagctggccatttgtgtgagattattatttctagcaaggctttcttcctttcttattgcccaaaaactgataaatcctttgttatttttacacataaattaaaacataggcctttttggacagattcactaaatattactagtataaaatgtaattgaggtaatttttatcagaattttaaaaatgaacttaaactccggaagcttcccttaatttactcccagcgctggtgcaaaatggtaacttacttctaaatctccagaaatagaaatttacctgggtcccttgatcaaattgaattttcttattcccctatttggcataaatttttattatttctatttgaagaaaattgggggtagcccttaccagtacatctgttaatgggtagggggggaaaaataattattattgcggaatagcgctcacttaaacatcacgggaataatatacgtatccaagcactgtttctaaactaccccattagaaatatcttacctcatgcccgcnttacccaaccttttaaagaaagccactgggggaacagccggaagaaatgtaaaaaaatgaagggggaaatcactaccctcttntatgtataaaaaagacccaatagaggggaanatagtccattgaaacgacccacctggacccatagattatcgctacacagcgttttatccgaataaggggcaggatcaaattagagatactcccaatcgcaacccggggcgggacatagtatacgcnaaaaaaaaaaacaataatgagagcccctccggcgataaacgcacactaccgaaactgagaaggtcaagatatatccaaaaataggactatatatatggggtcccttataggacccaaaacctctaatacagaaaacaagaaaaaaaacgaatagacaatatcacaataaagaagaaagagacaaatatactacgatttaatgttattaaggtcctgaccggtaaaaaaaccccatagcgtgccaagtgaatcaaaaaatattgaatataaatttagagagcaattgtgtgcgctaggagaaacaagtcggataacagacacgcg

SEQ ID NO: 41806 - DNA, 436 bp, Macaca Mulatta
  misc_feature (1)...(436): n = A,T,C or G
tctccggaggcggatgggggcggggaccctctctctccggatgcggatgcgggggtagtcccagctgggaggagcggtgggaaggggccgggtgcggacccagtgcttcccgtggaagtaggtgaccttgcagttctcctggacctgggggctgaggaagggnnnnnnnnnnnnnnnnnnnnnnnnnnnnnnnnnnnnnnnnnnnnnnnnnnnnnnnnnggcctttcagtagacactggggtgccagaaatttccaaaatctgcggtcacggtccgagatcaaatgtcagtgctcagtgaccagcgacccttggcatcaaaatgtccgaaagagcaagaggcgccgtgtgctgggtatggtctggccagcaagtgtcgcatggggcaggcggccacggccaggccagagctttgcggcgcgcagctgcagaacggg

SEQ ID NO: 41807 - DNA, 784 bp, Macaca Mulatta
ggggatggaagtgaggatttgtatgagactgtcagctattttaaggaaatcttaaaatttacatttacatcagttaatgaagatgacaatgtgtatatatgtgatatagtgaaacaaaaaagacagttctggtattcataacatgaaagaaaggggttttattctttctgtgtctgtgatttaaaactctgtgaccatgctctgacttttgtatttcaacctgagttcaaacaaataaacaagatattttttaaagaaagcataacatagtgtgtcttggcaaggacatgattcatatggcagcagaatgtgagaagttgtaaggtccttggtactcactgtaaaatcacagacagagaattggtaggggttgtgaatacactagtaccacttaaagttcagtgatacagtatcagaaatagggtccttaagtattttgaaagagtttactcttcagtcagcttagatgagagctctctccctgctcccctcttccctctcaaaagttgagagtaaacagaatttggtttgattccagggagggggaaaatgagcagagaataggacttttatactttccaataccaggaataaaatgtttgtgatatatatgggggtacagcaaaactatctagataatgtgaatacgattaactttcctaattgcaagatatttcactcttcaatcctgaagtttcccgggtccttggccaaattgagacttcagcctgttactggttttgaaacccgcctgtaaatttactggcttttcccccgaattccc

SEQ ID NO: 41808 - DNA, 801 bp, Macaca Mulatta
  misc_feature (1)...(801): n = A,T,C or G
ggtatggaaaatcaaaggttggtcttaggaccacatgagtaaacaagttatttaggtaaactcccccacattcccttgttatttgctcttttgctatcaactctaggtaaagaggattaggctgctttcagccaaatcttttactgaagctatgcaacgcccccggccttccaagaaggtttgtgactatttcctataactatcttttaatttttcttctacaatttttcccaccaccctgactgaactcccactccagatccctggagaattatctaccaacacagacatttatgtttatataaattatatgtacatgtatatgtatgcatatttatgaatgaagatgaataaagaaatgtttaggtgtagaagagaagtcaaggaagatcacttggaatatatccccgctctcgtgttctgaaacactggattgagtcaatatgatgggatctgtgtcttacctatcattttccctcagagactagtacagtgccttgagcttagtaggtgttcagtgaatgttgaatgatgaatgatttgagatctttaaaaattctcctccctccttgagagagaatgtcaactctctagatgattactaaaaagtttattccagcctaaatggtcatatggttgcctggcgttctggtttgaaatggctggttttaccatattgaaatgtactcctttaaacataggcagccctacctttatacaatnnnnnnnnnnnnnnnnnnnnngataagtacctttgggcttgggggggggggggcctcatggcccaataatcccccccat

SEQ ID NO: 41809 - DNA, 1360 bp, Macaca Mulatta
  misc_feature (1)...(1360): n = A,T,C or G
ggatgccccagttagatacatcaacatgattcaccactattatgacgatgcttcccacactatatcttatcatgcagctgaagctactgaacacaaatcaccgccaaccaccccttacaaaaacccccacccttcagtctcacaatgtccgctgacaaccaaaatgaacgaaaacttgtttacccctttctcagccccaacaattctaaacgaacccgctacaatccccattatcctattcccgcacccgactaatcttaacccccaaacatcccatgtataagctactaacctaccgttcaacaaaatccagactcggattcagctctaaaaacaaataatgaataaacgtcacaatggctagaggtgacaaaaccttggatcctttgaataccgaagcagtcccgctaaatccaccctcttgagttgcgctaagaacaaaaaagcaacgcgttagggaacttctattgaacccaattaaccgcggatttacaacaccccacaagggagataggaacaagacaatattgcccaaccaaagaaccgccttaaacgctgattattatgcgctgtcatatctcccccgatactttgataagacagagaacttggggggtactaaatctaaggacagaaaacaatataanngaagcatatganggcaggagaggacccgattgtatccacgaatatcagtgctttctggtgtgaaggtaataaaatacgggcgcagcattggaaatggttggcaaatgcgctttgttccacggcngcttctacggaagggccgcgcccatcgacataaaggtcacctctatcgcaatccgcattaaaggaagacgacaaacacaaatgtaagaagcagcgcagccaggtattcattaccaccaccgcccacaggtgacgagacttacagatgtctcttgggtgcaagatgatatagaacaccggttataaaattaagcacacattgaaaaaaagaataaacaaacatggaagacaagatgcgaggcggggacgngaggaacaacaaaagactgangaacgagacgcccgccacacaagaaacactgtcggtggcagacacaggcacacagcgccacccagagtatgtttacaacatcgttcgccgtaatataaaagacttagtacggcacggcanaaaaagaggtgatgaaaaagtcgcggcggggnatatgggataaatttgcgaaggatgaggtagtcgtctgagagactgcattggaattattcgattctagatacgcctcgggacgccgcactaagtacaagatcaggatgaaagatgaaagaacaagcggatgatatacgttcgtagacagactcatatgctacacaa

SEQ ID NO: 41810 - DNA, 604 bp, Macaca Mulatta
gtcatctcttgtagcggctggctcatggtaccagtttgttgagatcatttctatcctgatctgttaccccaaatattttattggccccagttccaggtaattgataaatttattccgcatactttcataaatttcaccaagtcgtcaacacaaagtcttagactgggagacatcagctccctgccttaccataaatgacctatgggttgtcattctttcatggattggctctagatatggatgtataactcattacaaatccatctaaaaaaggtggctagtaacatcatggattctgtgggccagcaaaccttgatttcaaaatttcattcttcccctcattaaccttccctgggacaagttcattaaactttctcgtgaacagatcccctcatctgcaacaatacttcctttctagggctgttgggtggattaaatgaggtaatgcctaagaagtctggatcagtgcctaacacatgtatatcccacatcagtctctccccaaaacctcacctcacatcaaatgtccacatttcgtatagtaggatattgcagactccatgttcatcactaaaactaaaaattcagtgctctattaacgtat

SEQ ID NO: 41811 - DNA, 616 bp, Macaca Mulatta
  misc_feature (1)...(616): n = A,T,C or G
agtctcgccatgttgtccatgctgtctcaaactcctaagcgcaacgacctgnnnnnnnnnnnnnnnnnnnctattgggattacaggtgtgaaccaccacactcggcctatggctgtgaagttttgcactttgagaaatgctggcttgaaggcagaagggacttgccttgtctcagaagtgatgcttgaaaccacagcagtcattttggggccatgaggcaataagcacaaggattaaaaagccaagacccaaagatggagaatcacgggtgtaatgaacctggatgatatgatatggcagagtcctgaactgctagacttcttattagcatttctttctgaagtgccatactgcaaccttcctgacagcccaggatctctgctaaggtaccactgaagaacatggtattagctggacttaatgcatgatttcatcaatgagcacttgcattttaacaagtaattactggagacaaaggcctaaaactatgatggttgaatgacagatcttggggttagtaccttgcagagggtcaggcgccttgatgtctgcctcttcatccctgcatgttactactagctggtctactatacattttccccagaaccttcttact

SEQ ID NO: 41812 - DNA, 408 bp, Macaca Mulatta
  misc_feature (1)...(408): n = A,T,C or G
gggggctctaagctgcagcaggagaaactgtgtgtgaggggaagaggcctgtttagctgtcgggtctctagttcttgcacgctctttaagagtctgcactggaggaattcttgccattaccagctcccttcttgcagaagggagggagaaacatacatttattcatgccagtctgttgcatgcaggcttttggcttcctaccttgcaacaaaataattgcacaaactccttagtgccgattccgcccacagacagtcctggagccagagtcttttttgctttgcattgtaggagagggactaagtgctagagactatgtcgctttcctgagctaccgagagcgctcgtgaactggaatcaactgcttcnnnnnnnnnnnnnnnnnnnnnnnnnnnnnnnnnnnnnnnc

SEQ ID NO: 41813 - DNA, 817 bp, Macaca Mulatta
  misc_feature (1)...(817): n = A,T,C or G
ggannnnnnnnnnnnnnnnnnnnnnnnnnnnnnnnnnnnnnnnnnnnnnnnnnnnnnnnnnnnnnnnnnnnnnnnnnnnnnnnnnnnnnnnnnnnnnnnnnnnnnnnnnnnnnnnnnnnnnnnnnnnnnnnnnnnnnnnnnnnnnnnnnnnnnnnnnnnnnnnnnnnnnnnnnnnnnnnnnnnnnnnnnnnnnnnnnnnnnnnnnnnnnnnnnnnnnnnnnnnnnnnnnnnnnnnnnnnnnnnnnnnnnnnnnnnnnnnnnnnnnnnnnnnnnnnnnnnnnnnnnnnnnnnnnnnnnnnnnnnnnnnnnnnnnnnnnnnnnnnnnnnnnnnnnnnnnnnnnnnnnnnnnnnnnnnnnnnnnnnnnnnnnnnnnnnnnnnnnnnnnnnnnnnnnnnnnnnnnnnnnnnnnnnnnnnnnnnnnnnnnnnnnnnnnnnnnnnnnnnnnnnnnnnnnnnnnnnnnnnnnnnnnnnnnnnnnnnnnnnnnnnnnnnnnnnnnnnnnnnnnnnnnnnnnnnnnnnnnnnnnnnnnnnnnnnnnnnnnnnnnnnnnnnnnnnnnnnnnnnnnnnnnnnnnnnnnnnnnnnnnnnnnnnnnnnnnnnnnnnnnnnnnnnnnnnnnnnnnnnnnnnnnnnnnnnnnnnnnnnnnnnnaaccggcttctctacccctaattcatcatactaaagcccacacctacaacaaacacagggctcctttaaatattaaatttactaaccactccccgaaccaaaaaactaaccacccaccctgatcttcacaacttttacctggaataaccatggcataaataagccctta

SEQ ID NO: 41814 - DNA, 673 bp, Macaca Mulatta
  misc_feature (1)...(673): n = A,T,C or G
agaattacaaatgcatttacttattgctgaacaatcttcatttaaaaatttatcccagttattttgacaaataggtatatgtctgagaactctgaatgatgctgaaaactagaagaaaaccaggtactcatcaattggggactggttgaagattttatggatgaggagttagcaaaatatctatatatgtgtatctttggactcccaggatacataagaaatacagggcctagaacagtatgaataaacatatatacaaacatcacagaagatactaaagatattaaaaatgtttacctgtagagggatggagggaacagaggggtggacagttgtggagataatatttatgtaaatatacctgttatatagttttgatcttggaccatgtaagtatttgacataattcataatcaaaattaaataaaaaagaaaaagcatttccttaaacattcnnnnnnnnnnnnnnnnnnnnnnnnnnnnnnnnnnnnnnnnnnnnnnnnnnnnnnnnnnnnnnnnnnnnnnnnnnnnnnnnnnnnnnnnnnnnnnnnnnnnnnnnnnnnnnnnnnnnnnnnnnnnnnnnnnnnnnnnnnnnnnnnnnnnnnnnnnnnnnnnnnnnnnnnnnnnnnnnnnnnnnnnnnnnnnnnnnnnnnnnnnnnnnnnnnnnnnnnnn

SEQ ID NO: 41815 - DNA, 599 bp, Macaca Mulatta
tatttaatatatttgttggccagaagatctatttttatatcaatgtgccttgcgtgtatattaaaaaaaagaattggaaaggccatgtagtaatgcctgagatagttgatggttcttaccacctcactaatttttatgcagtatgaaatgctcattctattgcccaactggtgctctctgtttaaagttatagatcttgtcaaactggaactattttataagctggggaagtgatttactttttttgttgtatcttttttgttcttaatctattagtggctgtcctgtagtgggaaataattaaaggattcttcactcttttcttctcccctcagcaccttcttcaagtaaacatttcttgtgtgctttgaaaaaagtttcagcttgctgtctcttttagtgttttaaagaagtgttatacaaagcattgtttgcaaaatgtagggagataatggagtccactttaatttggaattctgcgtgagctatgatccaagttaccagctctttccaactttaaaaattttgttaaaagcaccttgcttagaaaatttaaaatatctatgtctgcaacaattgtctcaaaataataaactgtg

SEQ ID NO: 41816 - DNA, 3467 bp, Macaca Mulatta
  misc_feature (1)...(3467): n = A,T,C or G
ttgccttgactacggcgggcgctatgggagtggagaagccgcaagtgctgaggcaaggtggaggaaggcatgggagccaagagcatgaggagctggtgtctgtgtcagatttgtacctgcgggtnggtcggattatcgtccttatgaaatagttaaacagcctcaccatgtgccagaagaatataaaccaaaacaagagaagattgatcttggtactacctacaaacgggattttaattcatacaaagtgcagcctgtggcaatagtccggcctttggagagacaacaagttaaaaaaggaaggttggacactgtcccaacttataaagnaagatgattatagagcttgggaccttcataaaagtgaactttataagccagaacaaacttatcaactccctactgtgaaatttggaaattcaactacatttcaggatgactttgttcctcaggagataaagcctaggcaaagtgggcaaagctttaaaccctcctctgtggtcaaacgttctacagccccttttaatggcattacaagtcatcgccttgattatatacctcatcagcttgaactcaagtttgaaaggccaaaagaagtttacaaaccaactgagcaacgctttgaggatctcacaactcaccggtatgactttcagggtcttattggtgaaactgcaaaaatctgcagacctgtacacaccagagtgacccagaatgctcggattgcaggaagcactgaatgtcgtgaatgttttctactatgggaaatccaccagctgaggtcaagaaagtgccagactatgtgccagctacatgtagcatgctattaaacagcacacgccatcttgactatgttccgtatcannnnnnnnnnnnnnnnnnnnnnnnnnnnnnnnnnnnnnnnnnnnnnnnnnnnnnnnnnnnnnnnnnnnnnnnnnnnnnnnnnnnnnnnnnnnnnnnnnnnnnnnnnnnnnnnnnnnnnnnnnnnnnnnnnnnnnnnnnnnnnnnnnnnnnnnnnnnnnnnnnnnnnnnnnnnnnnnnnnnnnnnnnnnnnnnnnnnnnnnnnnnnnnnnnnnnnnnnnnnnnnnnnnnnnnnnnnnnnnnnnnnnnnnnnnnnnnnnnnnnnnnnnnnnnnnnnnnnnnnnnnnnnnnnnnnnnnnnnnnnnnnnnnnnnnnnnnnnnnnnnnnnnnnnnnnnnnnnnnnnnnnnnnnnnnnnnnnnnnnnnnnnnnnnnnnnnnnnnnnnnnnnnngggaaaattgtcgtcaggacttattaagaagcaggagcagattcccaaccccatctggaaaatttgatggtttgagcactttcagatctcactatgtgccacacaaattgattccaacagagttgcaaacctttaaatattgcttttaagagttctgttccatttgatgatgtgaccatctactctgtaaacaccgaaaaaacaggaaatttgtccagcgagttactcgtctcctccaggttatatttttgaaaatgccagttcccaaggtcataaattctttcgcaagatttctcctgcagtgaaggccttctaataacgaaaatatgcttaaaaggaagctactagcaagtaattgtttttccaagagaaaactcaatttttggagtgaaaaaaattatgatataataaatcattttttatatttttaaacaagaaaattggaaaatgtattataaaaactcagaatcttaaaaccattttgtattgatactttaatcaagatcgttctttaatatgcatttcagaaggttcaataatatacattcccatgtgaactcttttaatattcaacatactgcttagtagcttgtccccagtctattatcatttgtaattctgtttataattatggcaattgtatggttattcacataccagttgtcatttatcaagcacatcaagattatctagaacgacactgaaaatgatacatggattcctcttccaagataataggattcattttactcagactttgtgcatctacatagcatctactgagtcaagttttggttggtggtatagactgctgcactgctcctcaccatgttcaggttagcaagaggcactgtggtgtggcaaggaaaggctctgtgtgctgggaatcaaaggacttgagttcaagttctaactaattatcattatttttagagacaaggtctcactgtcacccatgctggagtccagtgacgtgatcactgcttactgcagcctcagcctcctgagctcaagtgatcctcctacctcagcctcccaagtagctgggactacaagggtgtgccaccacatctggctatttttttaaaaatatactttgtagagacaggttcttgctatattggccaggctgttcaatatattatccaggctgctcttgaatcccgccttggcttcccaaagcactggtattacagggatgagccnnnnnnnnnnnnnnnnnnnnnnnnnnnnnnnnnnnnnnnnnnnnnnnnnnnnnnnnnnnntattggccaggctgcttttgaatcctgccttggcttcccaaagcactagggattacaggcatgagccactatacccagccagagttcaagttctaataatatagatttctacttgtattaccttagacaatgactcatatctctgagactcagtgtctttgtttgtaaaatgatgtctgttctcaaaaagagttggttttgagcatcagactatatggtacattttagtccttaaagtacaagtgtagaggantagatttctatttttattaccttagacagtgactcatatctctgagcctcagtatctttatttgtaaaatgatgtctgttctcaaaaagagtttgttttgagcatcagactatatggtacattttagtccttaaagtacaannnnnnnnnnnnnnnnnnnaaaatcgctcaatctctttttgtacttgttttctccttttcaaatgaggaaaattacttactcaatcctcattttctggcctgtagcaaggattgtaaactaacctaatttgctttgagcttctgagtagtatgtgcttctgagaggagtcttgtcctttaaaacttcatgagcacctgagaaattgttaacagagaatggaaagcttggaatggggtaaatacagtggtttgagtaacagtatttgcagaaaggaaaaagtatttgctagggtagttttaggaagtttcaggaagactgacagctctgaagaaatctttagggtaaatgtaggtaattttgaacctaattgtcatgccaagtcactgttcagaggcagaaccagcccccacagggggcataatcacctggttcacctcttccagtgtgaagataagtgctaaggaaaggaatgatgccaggaagtatagtagaaacactctattgcattgagaaatgctgaaaatttcctagtgaattaaactcttattgggtggtt

SEQ ID NO: 41817 - DNA, 843 bp, Macaca Mulatta
ggataaataaataaatatactttaaagcagacttaagcctcagaaagaatcagtgagttcaaatgtaggacatttgaaattatccaatcaaagcagtaaaaatcaaaaatgtaaaagagtgaagaaggcctgtgaaaattatagaacaccagtaagtggactagccttttcataatacaaattcctgaaggatgaggttgtgtaaaagtcttagacagcatatttaagaaaataatggctgaaaaattcccaaatctggagaaagatgatatcatctaggtacaggaagctcagaggttgccaatcaaattcaacctaaagaggagtttactagtacacataataatcaaattattaaaatttaagacaaagaatacagaaagtagctagagaaaataagcatatcacattcaaggcagccccagtacctttcagcttacttctcaacagaaatcccacccagccatgagagagtgggatgatatactcaaaatactgggggaaaagaaagactatccacccaaaaatacttttacctgggtaaagcctgtttcttccataaaattaggggacaaaagttaaaactttttccccagaacaaaaccaaaagtcctaaagggaaatttttatcaccccacctaaggcgcccgggctttttacagggaaattggcccttaaatggggttttctcttttaagaccttgaaaagagaacaaggggcctttttttaaatttaacccaaacaagcgattattgttgtgaaatgtgctaaaaaaaacaatcctccctctgtggggccaatttaagagataaaataacacttggggggtccaataacactca

SEQ ID NO: 41818 - DNA, 593 bp, Macaca Mulatta
tgtggatcaataaatccttcccctgatgcaaccattacaaatggaagctgtgttctcactgcttttggttgtacatggtctttgatcacctagtttcttgacttctgaccagtctctgtgttacccgaggccacagcagatgaactttacctactcccccctgagaaggtgtttactaatgttgttgagtctgggggtgttggagccacgaggggctctgtttcgagaaggtggaagggcagctgagtggacacgtggagaggccctgcaaccctaaatttctagggggaggggcctttaaggagcctgcttagaggtcttgatttgtctcccttgaagtttgggggagagcgtgggtaaaaattgaaatcaaataaatttaaagagagtggcttgcagagtggggagagaattctcgcaagagatatacttctttaattgagaaaaaaagaaagggagctaaagaggtaatcagaaaagctcaggaaataaagaatggtctttcaagtgttgatgcaaaataactttgaacctacaattctacttctagccagacattcaagtgtgaggataaattagcatacaaggtgttc

SEQ ID NO: 41819 - DNA, 701 bp, Macaca Mulatta
tgcatggaatatcagcgaaacctgatccaacactatgctggtttgagacttggactaatgttcatgaaatcatggtgtcttttggaagaagggtgctgtgttacccactctatcgccatttcaagctggtggtgaaggcctgcagcgacactataaagatattgcaactaggtaaaagtgcagttttaaagtgtctcttggatattcacaaaatttttcaggaaaacgacccagcatacatactgaatgatctctacatctcagactactgtgtgtggattcagaaagtcaaatccaaaaagttggcagctcttgcagaagccttaaaggaagtctcccttacaaaggcccagctggggttagaactggaagaactagaagcagcagcactgcttgtccaggaggaggaaactgcattaaaagcagcccattcagtttctgggcagcagacactttgctccagctctgaggcaagtgattcggaggactcagacagcaccgtgtcatctggaaacgaagactcagactcagattcagaacaagatgaactcaaagacagtccatctgagacagtcaattctttgcaagggtcctttcttgaagaaagcagtgcccttcttattgttgatggtggagcatgcaaaaacacaggcatcccaggagtctgatgccaatcaggggaaagcccctttgctcttccc

SEQ ID NO: 41820 - DNA, 4818 bp, Macaca Mulatta
  misc_feature (1)...(4818): n = A,T,C or G
gatgtcggccatgaagcagcaccagaacaccacctacttcctggcccagcacctcaacaaggacagcctccttgcccgcaaggacctgcccttccggatccagagctgtgcagcccaggccgttcttacggccccttactctctcgggcgcccggatcccaacccatctctccaacccattgccacaggccagagtactggccccactggcgctcggaggaagctgccccagtcagagggccaggtacagggagaacgaacatactccttggcagtgcacccagcactgtccccacagcttagtgaacagaagaatctgagcctgctgtccccagttcctgaggacaaagggcctggccacactagggcaggcctagaaatgtcactgagggcagccacatcatccctcagtgaagagcaggtctctgagctgagggacaacctgcccaaggaggtcaggttgagccccaagcttatcctggacccaaagggcagtgtgaccccggccatcatctcggctgccctacagcaagtggttcacannnnnnnnnnnnnnnnnnnnnnnnnnnnnnnnnnnnnnnnnnnnnnnnnnnnnnnnnnnnnnnnnnnnnnnnnnnnnnnnnnnnnnnnnnnnnnnnnnnnnnnnnnnnnnnnnnnnnnnnnnnnnnnnnnnnnnnnnnnnnnnnnnnnnnnnnnnnnnnnnnnnnnnnnnnnnnnnnnnnnnnnnnnnnnnnnnnnnnnnnnnnnnnnnnnnnnnnnnnnnnnnnnnnnnnnnnnnnnnnnnnnnnnnnnnnnnnnnnnnnnnnnnnnnnnnnnnnnnnnnnnnnnnnnnnnnnnnnnnnnnnnnnnnnnnngagagtcagtggcaaagcaagctacaggggacatggcaggcaaaggtgggccagagggtggtaagcccaccctgcagaagcagggcaccatctccagccaaggagagaaggcgcagctggagagcacacccaaaagaagcaagctcgaagagaccagcctggttccccgagctacctactccatggctctgcagagnnnnnnnnnnnnnnnnnnnnnnnnnnnnnnnnnnnnnnnnnnnnnnnnnnnnnnnnnnnnnnncagtctcgaggccagagccccagttgccaacctcgaggccagagcccactgaggtctcaggctgccagccggcaggtgagcaccatgccctctaggaagcttgaaacaactctcaatggagcccactcgacctctgaaggccctgcaaaacccaagtcatcccgaggtcctttccggctacgcaatttattctctgccaccttcccaacccgccagaagaaggagacagatgagcggcaggcccaactgcagaaggtaaagcagtatgagctggagttccttgaggaacttctaaagccaccaagccagggggagctgccaggcaccgagtacctgcaacctccagcacctggccgctgcagctgccagctccgcagcagccccgtgcagcaggggccgggaatgtcccgcgagcagaggcgcagctgcgactgcaagcgcatctgccgggggggccggccgcaagccacccagacaccagtgcccagcctccgggggagggaaagggacagggtcctccctagccagaggcagccagaggctggcccaggcgtgagcctcagcagcaacagcaatgtccggcgcattcgttctaccagcnnnnnnnnnnnnnnnnnnnnnnnnnnnnnnnnnnnnnnnnnnnnnnnnnnnnnnnnnnnnnnnnnnnnnnnnnnnnnnnnnnnnnnnnnnnnnnnnnnnnnnnnnnnnnnnnnnnnnnnnnnnnnnnnnnnnnnnnnnnnnnnnnnnnnnnnnnnnnnnnnnnngtctacccacatccgcccctgggcatgctgcccagggaggccaaggagttagaggcaagcctgcccatagccttgggtcccaaaagcaggtctctggagtcaccgacgctgggagacccctcctacgtccaggttgccccagagaccaaaggccccagacagatggccgtgttctcactgcccgcggaggtgtaccggaagcctgccgagctagacgaggacagtgagagcagcaagtgctgctccatccgctactgcttctactaccgcaagtgtgacatggcagatgatgccagtgatggcaaggatgagctctcttactctatccccatgaagattctgcctggcatgaagctggatgagcaggtggtgcctgtggtgagcaggaccctgcaggtgctagatgctgctacctgcagcagcagcagccctgaggcctcccgcactcaggagattgacctccgtgtgtccaccttcgaggggagcctggccaagatcaatgccctgcgggctcatgcctatggcctccctgatggcttcctggctgcccggctggacaccaacgagctgctgacataagtgcggcagtgtgtggccagccccgaggcccgtgcccccaagccctatgtctctcagatctccgannnnnnnnnnnnnnnnnnnnnnnnnnnnnnnnnnnnnnnnnnnnnnnnnnnnnnnnnnnnnnnnnnnnnnnnnnnnnnnnnnnnnnnnnnnnnnnnnnnnnnnnnnnnnnnnnnnnnnnnnnnnnnnnnnnnnnnnnnnnnnnnnnnnnnnnnnnnnnnnnnnnnnnnnnnnnnnnnnnnnnnnnnnnnnnnnnnnnnnnnnnnnnnnnnnnnnnnnnnnnnnnnnnnnnnnnnnnnnnnnnnnnnnnnnnnnnnnnnnnnnnnnnnnnnnnnnnnnnnnnnnnnnnnnnnnnnnnnnnnnnnnnnnnnnnnnnnnnnnnnnnnnnnnnnnnnnnnnnnnnnnnnnnnnnnnnnnnnnnnnnnnnnnnnnnnnnnnnnnnnnnnnnnnnnnnnnnnnnnnnnnnnnnnnnnnnnnnnnnnnnnnnnnnnnnnnnnnnnnnnnnnnnnnnnnnnnnnnnnnnnnnnnnnnnnnnnnnnnnnnnnnnnnnnnnnnnnnnnnnnnnnnnnnnnnnnnnnnnnnnnnnnnnnnnnnnnnnnnnnnnnnnnnnnnnnnnnnnnnnnnnnnnnnnnnnnnnnnnnnnnnnnnnnnnnnnnnnnnnnnnnnnnnnnnnnnntctcttaagggctgcagacttagctgccgccctgggtgtcctcaccccttccctggcctctggccctcagtgtgaggaaaaaggaccctcgtcactctgctcacagcagggctgtattttatctcttctctcgggatgagaagtgacatcatgctcacttcctgctcaatccacgttgggcgctgggggagccagagcctgaatcaagcggaccctcaagccttgagctcctcgtggcattggctcccctgctgggagcaatggaagtagcagcaggccnnnnnnnnnnnnnnnnnnnnnnnnnnnnnnnnnnnnnnnnnnnnnnnnnnnnnnnnnnnnnnnnnnnnnnnnnnnnnnnnnnnnnnnnnnnnnnnnnnnnnnnnnnnnnnnnnnnnnnnnnnnnnnnnnnnnnnnnnnnnnnnnnnnnnnnnnnnnnnnnnnnnnnnnnnnnnnnnnnnnnnnnnnnnnnnnnnnnnnnnnnnnnnnnnnnnnnnnnnnnnnnnnnnnnnnnnnnnnnnnnnnnnnnnnnnnnnnnnnnnnnnnnnnnnnnnnnnnnnnnnnnnnnnnnnnnnnnnnnnnnnnnnnnnnnnnnnnnnnnnnnnnnnnnnnnnnnnnnnnnnnnnnnnnnnnnnnnnnnnnnnnnnnnnnnnnnnnnnnnnnnnnnnnnnnnnnnnnnnnnnnnnnnnnnnnnnnnnnnnnnnnnnnnnnnnnnnnnnnnnnnnnnnnnnnnnnnnnnnnnnnnnnnnnnnnnnnnnnnnnnnnnnnnnnnnnnnnnnnnnnnnnnnnnnnnnnnnnnnnnnnnnnnnnnnnnnnnnnnnnnnnnnnnnnnnnnnnnnnnnnnnnnnnnnnnnnnnnnnnnnnnnnnnnnnnnnnnnnnnnnnnnnnnnnnnnnnnnnnnnnnnnnnnnnnnnnnnnnnnnnnnnnnnnnnnnnnnnnnnnnnnnnnnnnnnnnnnnnnnnnnnnnnnnnnnnnnnnnnnnnnnnnnnnnnnnnnnnnnnnnnnnnnnnnnnnnnnnnnnnnnnnnnnnnnnnnnnnnnnnnnnnnnnnnnnnnnnnnnnnnnnnnnnnnnnnnnnnnnnnnnnnnnnnnnnnnnnnnnnnnnnnnnnnnnnnnnnnnnnnnnnnnnnnnnnnnnnnnnnnnnnnnnnnnnnnnnnnnnnnnnnnnnnnncctctccatatctccccatttcccacacccttgtgccctgtgtctgcctctgtttcatcgctgtgtcagaggtccatgtgaaatctttcattctgatgtgagttttataaagatgtacactgtgcttaacccctgcccatccttggtagcctatagtacaataaagtctccctgagtggtgagttctcccagcaaggaggaggggagtttcttctgcagaatccagcccctcccttccttgcttctcctcccccaggaccaagttgttgaatgggccagagatgcagccagcggggaatccttttcccctcagccactgcaagctggagtgctgacatggtcttctttttctcccaacttcgccactcagcccctgcctgtgtcattccactgccatccttcacctctccctcagcctcatggagaggaaacattttctaatgtctnnnnnnnnnnnnnnnnnnnnnnnnnnnnnnnnnnnnnnnnnnnnntaatttatgtcttgtttttcaaac

SEQ ID NO: 41821 - DNA, 649 bp, Macaca Mulatta
  misc_feature (1)...(649): n = A,T,C or G
cacccatcttncaaaatgatagattgccttccattaaatactgtcacgccagttattagcagcagtgagcttcactttttatactgtagaccttaatctaaggagtgatttctagttgccaattaaatccagagccaagttctttggagaatccaggagcctaactagggcatctgtcaggataaaatacccatccacttccagtagaaggtgagcttgtacttatggcttcctgatggctgttgcatcaagtctaaagcagtctccttcatatacaacgtcttctctaagtggtagaagaaagcaaaaatactagaagttaatagggctacataaaatttgctaatttcttttttgccctagccatttattccttcctgaaatcttgtctttctttctcttgcnnnnnnnnnnnnnnnnnnnnnnnccnnnnnnnnnnnnnnnnnnnnnnnnnnnnncttccctttcnnnnnnnnnnnnnnnnnngcnnnnnnnnnnnnnnnnnnnnnnaacaattatggctcactgcagcctcgacctttctgggcccaggtgatcctcccacctcagtcnnnnnnnnnnnnnannnnnnnnnnnnnnnnnnnnnnnnnnnnnnnnnnnnnnnnnnnntacagtgagcggagatcat

SEQ ID NO: 41822 - DNA, 199 bp, Macaca Mulatta
cttcctagagactgtcagttgcttcctgatccgacagcacagactcgagtcaggccattttcctggacttgagtctaatcttgtcatcttggctgtttttgtcattttgttatttgaagctttgttttagaatcctaggacactgggccttgggtcccattaagatgagacatggtagccgagtgaaactgcaagtcat

SEQ ID NO: 41823 - DNA, 583 bp, Macaca Mulatta
gcagcgtccccaccacccagccccggctctgccgcggtgaggacctgcgggttggggtggactggacactgtcccacccatcaaattgtgatttaggaggcgtgacatccgaatgccatcctccactgacgaggccctcagagcagccactcccctagcgactgtcccagtggccgggggtcgcgctactcacccaaggactggtgtttcaggcgctccacggagcaagttgtttgtcagccgctaggtgccgtccggttcccggctggggcgtccgtgggcggctacgggaagcgacaggagtcagtcctcgttcacttcctggctctcccgctgtggtctccccaccctacccgcgctgcgccgtctgtgtatggagcgtccctggcggctctgctggattttggacagggacccgccactgatcgccacccagctcggcctcctgcacagcctctggggccttggaccgcgactggcttgctgtgggagagcacagaagataaggacaaagaatgtgtcctgggtggatctggctgcctttgccccgaaggcggagtgggtgggagaaggtaggaaaatg

SEQ ID NO: 41824 - DNA, 126 bp, Macaca Mulatta
ggatattttgatgatgctttggaagatttcaagaaggtcttagacttaaatcctggatttcaagatgctactttgagcttaaaacagactattctagacaaagaagaaaaacaaagaagaaatgtt

SEQ ID NO: 41825 - DNA, 634 bp, Macaca Mulatta
ttgacttggagcaggtttgggagctggattccctggagtacctggaggccctggagtgtgtgacggagcgcctggagagccgtgtcaacttctgcaaggcccatctcatgatgatcacctgctttgacatcacctccaggcgccggtagaggagccagccccttgtcctagcggttccccgctccccaggacttcagagacagtgcacgcccctaggccctctgtgccggggcatcaaagacaatgaatgaggatgaaggttggtggcaagtctggagcgagcgttgagcgaaggcgagttttcttttcttttgttttctgtaggaaaggcgcaaacgtcaaacacccatggaaggagaaaaggatgggaagcccgaggggtgtccgccctgcgagactgaaaaagcactttgaggaaccttaccttgtttgtacataagaactgctagtgaacgagacctcactcttctcttactttcgtgagagaggagcggggcggatgtaggattgctgtggaaagtgaacacaacaacaaaaagacccagaatgactgattaagtgccttgcaaatctttattattatccaaacatttatgttcatactttcttgtgtacagatggtgctagtcaagat

SEQ ID NO: 41826 - DNA, 777 bp, Macaca Mulatta
  misc_feature (1)...(777): n = A,T,C or G
gggttctccagccctgcacctactagttttgggacttgctcattcgtaattgggataagtctacatatcgcatatagttgttttgactattaaatgagataatatgttttattatgtatcatatagataggaattcctcagaaaataaaagcttttatttaaaattatttcaagctattctgaataacaagataaatcataagatcatacagtgaaagcagttactggaaatgacatcatttcattgaaagaagtatgaagctagagtttctaaggtgaaggtgtttctgaagaacactgtttcttcaaatatgcaatctgagaacaattcatctgtgtattctaaccaactgacaatagaaagagtatgaagttagaaagaccttgaatttgtaggctattgtgtaccagttccttggcatacatgtattagggggaactgaattttagatctttaaaaaagaagataggctatagaatgcctaagacattttttgaagaggtccaatattacaagacactactctaagagttttaagctacatgtgataagtcaatagtgagctcaccaggcatctgggtgatgactcacagatgtacattggttggaagctttcttctttccnnnnnnnnnnnnnnnnnnnngggaagtgtccnnnnnnnnnnnnnnnnnnnnngtgacaaagtaaataacagcaaaagcaaaaagaaattttcttaatgccccatttgtgtcaccttgaagcaaataaaaggggaataattgtcctgacactg

SEQ ID NO: 41827 - DNA, 564 bp, Macaca Mulatta
ggtcgggattaaaacaaaacaaaacaagctgtggaacaaatgcctcagggactaagaatctgactcatccccaatacttgattatattctttctcattagagaaaacaaaacaatgaaatcttggggatgcttaaaaaaacacatcaagatgccacaataaaatataaagaattgctctacagcgtggtccccaacatttctggcaccagagaccagttttgtggaagacgatttttccacagacggggtcggtgggttggttttgggatgaaactgttccatttcagatcatcaggcattaccagattccaataagaggcgcacagcctacatcccttgcatgcacagttcatgaaagagtccccgctcctatgagaatctcgtgctgctgttgatctgacatgaggcagagctcaggtggtaatgcttgccagctgtgtggtctgttcctaatgggccatgggacctatgccctaaagagtgcaatgtaatcagagtagattaggaattttcactaagcccaagtataaccaatcaaacttccaggttttgctgccattgtg

SEQ ID NO: 41828 - DNA, 575 bp, Macaca Mulatta
gatatttgataccttgattgagtgtagaatcaagattataagtaattcctctcaggattttgaagataatgttgctttatcctttaccttctaacattgctattgaaattttgatgctattttgatattcttcgtatgtcatcttttcttgccttgtaggatgtttacaaagcttttcttttacgttatgaaatgtcacagtgacatatcttgctgtgagttttgtttcacttcttgtgttgatcactcattgtgtactttcaacctagaaaatcatgacattctgtcttgagaggtgtatatgtattatttcacaatttcctcccgcattttctcttgttcatgagatgttgaaccttttggtttggtcctctacttttcttataatttctattccacttttgtatcttttcgtccactgtgtaactatgattatctcctcaaacttgtcttatttaaatttacatttatgccatcattttaaattctatggttgatttctatataaattcgttgtgatctaaaagcagaccttgtatgacttctactttttacaaatgtgttaaaatatgcct

SEQ ID NO: 41829 - DNA, 1699 bp, Macaca Mulatta
  misc_feature (1)...(1699): n = A,T,C or G
cccaggcttcctgccggtgaacagcgacaccaggcttgtggctgtgccagggccggtgcccagccagcgcccctgctgtgaagaagccacccagctgcctgcagcgttcacctccgaggtcacacacttcaagcccatcgtcctcgcgcaggacgcnnnnnnnnnagggaccagcctgccttggcccaggaggagtcccagaagaggggcagccagagggagggagacggtgagaagctctcctcagaggccctcgctgggtcccccagcctgaagacgcctgacgggccggcgcctggtccaggaaaccagggagcagccccagagcctcctggggagtcggcgcagagtgacccagnnnnnnnnnnnnnnnnnnnnnnnnnnnnnnnnnnnnnnnnnnnnnnnnnnnnnnnnnnnnnnnnnnnnnnnnnnnnnnnnnnnnnnnnnnnnnnnnnnnnnnnnnnnnnnnnnnnnnnnnnnnnnnnnnnnnnnnnnnnnnnnnnnnnnnnnnnnnnnnnnnnnnnnnnnnnnnnnnnnnnnnnnnnnnnnnnnnnnnnnnnnnnnnnnnnnnnnnnnnnnnnnnnnnnnnnnnnnnnnnnnnnnnnnnnnnnnnnnnnnnnnnnnnnnnnnnnnnnnnnnnnnnnnnnnnnnnnnnnnnnnnnnnnnnnnnnnnnnnnnnnnnnnnnnnnnnnnnnnnnnnnnnnnnnnnnnnnnnnnnnnnnnnnnnnnnnnnnnnnnnnnnnnnnnnnnnnnnnnnnnnnnnnnnnnnnnnnnnnnnnnnnnnnnnnnnnnnnnnnnnnnnnnnnnnnnnnnnnnnnnnnnnnnnnnnnnnnnnnnnnnnnnnnnnnnnnnnnnnnnnnnnnnnnnnnnnnnnnnnnnnnnnnnnnnnnnnnnnnnnnnnnnnnnnnnnnnnnnnnnnnnnnnnnnnnnnnnnnnnnnnnnnnnnnnnnnnnnnnnnnnnnnnnnnnnnnnnnnnnnnnnnnnnnnnnnnnnnnnnnnnnnnnnnnnnnnnnnnnnnnnnnnnnnnnnnnnnnnnnnnnnnnnnnnnnnnnnnnnnnnnnnnnnnnnnnnnnnnnnnnnnnnnnnnnnnnnnnnnnnnnnnnnnnnnnnnnnnnnnnnnnnnnnnnnnnnnnnnnnnnnnnnnnnnnnnnnnnnnnnnnnnnnnnnnnnnnnnnnnnnnnnnnnnnnnnnnnnnnnnnnnnnnnnnnnnnnnnnnnnnnnnnnnnnnnnnnnnnnnnnnnnnnnnnnnnnnnnnnnnnnnnnnnnnnnnnnnnnnnnnnnnnnnnnnnnnnnnnnnnnnnnnnnnnnnnnnnnnnnnnnnnnnnnnnnnnnnnnnnnnnnnnnnnnnnnnnnnnnnnnnnnnnnnnnnnnnnnnnnnnnnnnnnnnnnnnnnnnnnnnnnnnnnnnnnnnnnnnnnnnnnnnnnnnnnnnnnnnnnnnnnnnnnnnnnnnnnnnnnnnnnnnnnnnnnnnnnnnnnnnnnnnnnnnnnnnnnnnnnnnnnnnnnnnnnnnnnnnnnnnnnnnnnnnnnnnnnnnnnnnnnnnnnnnnnnnnnnnnnnnnnnnnnnnnnnnnnnnnntccgacgtcaagaccatgctgtccaagctgaaagggcagctggaagaaatgaaatccagggtgcagttcctcagcttggtcaagaagtatctgcaggcaagtgggctccgggccccgctctg

SEQ ID NO: 41830 - DNA, 608 bp, Macaca Mulatta
  misc_feature (1)...(608): n = A,T,C or G
ccaagttttctatttcctgggacagaaaattgcatgtgacggtgggataatcgagtttcagtgacccacatcacttacacgttaaagccaggccccataataaaattccacaaaatggaaataaaactcaaatttctttagcattgtgtaaataaatctgaatgtgnnnnnnnnnnnnnnnnnnnnnnnnnnnnnnnnnnnnnnnnnnnnnnnnnnnnnnnnnnnnnnnnnnnnnnnnnnnnnnnnnnnnnnnnnnnnnnnnnnnnnnnnnnnnnnnnnnnnnnnnnnnnnnnnnnnnnnnnnnnnnnnnnnnnnnnnnnnnnnnnnnnnnnnnnnnnnnnnnnnnnnnnnnnnnnnnnnnnnnnnnnnnnnnnnnnnnnnnnnnnnnnnnnnnnnnnnnnnnnnnnnnnnnnnnnnnnnnnnnnnnnnnnnnnnnnnnnnnnnnnnnnnnnnnnnnnnnnnnnnnnnnnnnnnnnnnnnnnnnnnnnnnnnnnnnnnnnnnnnnnnnnnnnnnnnnnnnnnnnnnnnnnnnnnnnnnnnnnnnnnnnnnnnnnnnnnnnnnnnnnnnnnnnnnnnnnnnnnnnnnnnnnnnnnnnnnnnnnnnnnnn

SEQ ID NO: 41831 - DNA, 806 bp, Macaca Mulatta
gggagttgcgtcacatccggcccttgggatcagggcttgaggaacccgcgccatgaagtgcgtgtttgttaccgtagggaccaccagctttgacgacctcattgcgtgtgtgtcggcgcccgacagtctgcaaaaaatcgagagcctcggttacaaccgacttatcctgcaaattggtagaggaacggtggtacctgaacccttcagtactgagtcgtttactctggatgtttacaggtacaaggattccttgagagaagacatccagaaagcagatcttgttattagtcacgcaggtgcaggaagctgtttggaggctctggaaaaaggaaagccactcgtagtggtcataaacgaaaagttgatgaacaatcatcagctggaactggcaaagcagctacacaaagagggtcatctcttttattgtacctgcagcacgcttcctgggctgttacagtcaatggacttatcaacactgaaatgttatcctcctggccagccagaaaaattttctgcatttttggataaagttgttggattacaaaaataaacactaaactctcaacacttttaaagccaacccccaaattcaaccctatggaatgttgatttaaatccaaatttaaatacctaattattattatattttacaaaaataattattaatttaataaaaccttccctacctttctattagaaaatgttataagggaaaaatttttaatgggggggtggccacaatttttgccattttgggggtcccccaaaatcccccctaaattttggcacaggttttttaaataaac

SEQ ID NO: 41832 - DNA, 781 bp, Macaca Mulatta
  misc_feature (1)...(781): n = A,T,C or G
agacttgtttgcaatgattggtgagtgtggataaacttgcttgaatcttatctatttgaaaaggggccagggaaggttaacttcaacacaggtgtgagatgctcaaaaaaaacatccaagccaagcatggtagtgaacgacagtagcctcagctactcaggagactgaggtgggattgnnnnnnnnnnnnnnnnnnnntctagcctgggtaacacagtgagactccatctctaaaaaataataatagtaaatttaattaaactttgaaaaaaggagcatcttttgcatactacttgatgctggctcaattctcctcttttctcttaacagtagataatcaagcctaaacagagacattgtcagtggccaaaggaaactacatcctccaggctgggtgcannnnnnnnnnnnnnnnnnnnnnnnnnnnnnnnnnnnnnnnncgggtggatcacannnnnnnnnnnnnnnnnnnnnnnnnaccaacatgctnnnnnnnnnnnnnnnnnnnnnnnnnnnnnnnnnnnnnnggtgggcatggtagcccgnnnnnnnnnnnnnnnannnnnnnnnnnnnnnnnnnnnnnnnnnnnnnnnnnnnnnnnnntggaagttgcagtgagcacagatcgagccgnnnnnnnnnnnnnnnnnnnnnnnnnggacactctgtctcaaaaataaataagtaaataaagcaagctgcatcttttggactgtcttccatattcagaactaatatcccctctttgggttcactacagggactctctttctatggatg

SEQ ID NO: 41833 - DNA, 157 bp, Macaca Mulatta
gctattgagcctgagtcgagagaaactttgggactccgagctgcatccagaagaaaagattccagactcctacctggggctgggaccccaagacctgctggcagctagcctcactgctgtcctcctgggagggtggattctatttgtgatgaggcag

SEQ ID NO: 41834 - DNA, 441 bp, Macaca Mulatta
tccccgccttcacccaaacctcctataccctgttcgtccgcgagaacaacagccccgccctgcacatcggcagcgtcagcgccacagacagagactcaggcaccaacgcccaggtcacctactcgctgctgccgccccaggacgcgcacctgtccctcacctccttggtctccatcaacgcggacaacggccacctgttcgccctcaggtctctggactacaaggccctgcaggggttcgagttccgcgtgggcgcttcagaccgcggctccccggcgctgagcagcgaggcactggtgcgcgtgctggtgctggatgccaacgacaactcgcctttcgtgctgtacccgccgcagaacggctctgctccatgtatcgagctggtgccccgggcggccgagccgggctacctggtgaccaaggtggtggcggtggacggca

SEQ ID NO: 41835 - DNA, 452 bp, Macaca Mulatta
acattcctaccctccacaacgtgtaaacagctgtccgtgatatccaactttgggggctaaaaatgtctgccacctttgtcggcaacaacatagccttccaggtgctgttcaggtgtatcttagagcagttcacagccatgttcaggtgcaaggccttctcacactggtacatgggtgagggcatggatgagatggagttgactgaggctgtgaccaacatgaaggacctgatgtctgagtcccaacaatatcaggatgctatgggcaaggaggagggagattttgaggagtgggtcgaggacgaggtggcctggagccttctgatactgagtgaagagtggaagaggtgtgaattttttattcactcacaacgtgttctatgatagccatgtctcactccgtgtgcacttgctgtgtgttcacctctattcaatcattttcattttcataga

SEQ ID NO: 41836 - DNA, 187 bp, Macaca Mulatta
  misc_feature (1)...(187): n = A,T,C or G
agtggggttctagcctcctccactccctcctgcaaggnaggcctgatcggggcccttggagtcttggtcctgaacagtctcctgaaagtttacttcttcgtgggctgtgccaantgacccgcagcggtggcctgaaaaggagcggcttcgggcccagtgggcctcgctggaaacagtgcacctggca

SEQ ID NO: 41837 - DNA, 216 bp, Macaca Mulatta
ttatttgattatgtcaatggattatttatccataactcttaaggggttatccatagagaagactcactcccacatgggcctggagatcccatgctaaagcactgaattatacaggttttgttgtagccagatccttataaggcttttagctataaatcacctagactgagtcccggtctaacttaaatcaaattccatgccctaataagattacaa

SEQ ID NO: 41838 - DNA, 660 bp, Macaca Mulatta
tttatgacgttaacggttgttttgaaaaatgcaagttggaggagtgctgctggtattcagaattacgaagacaagtttactgtgtcgtcaaagctgtttaatggaaatagatttgataattacggtgctagctgatgacgtttggttaatgtttattttaccgagtaattacgccaagatcatttgatctcctgatatttaaatattattaaatacactgtttggtactttttgaaaaggtcacaaggcgccgttatctgtaacttctcacacctgaatgttagaacgtacttgggtcaattcctagtcaaaagttcgtaatttaatttttttgagaatgtatattatcacaagccatgatcgaaaaactttcacaaaagaacattctgacaccaaatctcttcctgaagttactttctcgtaatgtaaatatgaataaagtaggactgctctcggtaatgggcgatgaagaggagccatatttgttgcatttgttgcatgtataaaaatctagatatgcttaaaacggaacagtattttaaaagtacaggtttcataaaatttagtagagttctgtgtatagtctctaatctttaaaagatgtttgaagggtaatctttaagtagtggtttgaagaacaaaccagaagcgccaaacctt

SEQ ID NO: 41839 - DNA, 707 bp, Macaca Mulatta
  misc_feature (1)...(707): n = A,T,C or G
agtggaacactgagtcactcttttattaatactagcaacatcttaatttttgtttttcagcagttgctgttttgtactttggtagtaaagtgatttttaccacctgtgtttgcatatttatatatgctgtggatgaaaataacttactagagaatgtatattttatgacaagaatgtgtatctgttggatataatcagagaactgaaaagtaatttatcagtaatttttaagagtccatgttttgtgacaaccatctctaatagccaactctttattaaacacactccnnnnnnnnnnnnnnnnnnnnnnnnnnnnnnnnnnnnnnnnnnnnnnnnnnnnnnnnnnnnnnnnnnnnnnnnnnnnnnnnnnnnnnnnnnnnnnnnnnnnnnnnnnnnnnnnnnnnnnnnnnnnnnnnnnnnnnnnnnnnnnnnnnnnnnnnnnnnnnnnnnnnnnnnnnnnnnnnnnnnnnnnnnnnnnnnnnnnnnnnnnnnnnnnnnnnnnnnnnnnnnnnnnnnnnnnnnnnnnnnnnnnnnnnnnnnnnnnnnnnnnnnnnnnnnnnnnnnnnnnnnnnnnnnnnnnnnnnnnnnnnnnnnnnnnnnnnnnnnnnnnnnnnnnnnnnnnnnnnnnnnnnnnnnnnnnnnnnnnnnnnnnnnnnnnnnnnnnnnnnnnnnnnnnnnnnnnnnnnnnnnnnnnnnnnnnnnnnnnn

SEQ ID NO: 41840 - DNA, 880 bp, Macaca Mulatta
  misc_feature (1)...(880): n = A,T,C or G
ggatgccccagttagacacatcgacatgattcaccactattatggcgatgcttcctacactatatcttatcatacagctaaagctactaaacacgaaccactaccaaccaccccttacaaaaaactccacccttcaactccacaacatccgnnnnnnnnnnnnnnnnnnnnnnnnnnnnnnnnnnnnnnnnnnnnnnnnnnnnntttaaatcaacccgctacgatccccattatcctattccctaccctactaatcttaacccccaagcaccccattaataatcgactagctaccattcaacaagacctgactcgattcaccctaaaacaaataataacaactcacaacgctaaaggacaaacctgatccttaatactaacatccctaatcacctttattaccacaacaaaactcataggacttaccccctactcgttcaccccaactacccaactttccataaaacctagctatagccatccctctatggagcagctacagtaataaatgggaacttcgctttttaaacccaaaaaacttcctaaccccactcttcctaacaacaatgcaacactccctaatcctcttcaatcccccattgtttaattagacaattccaaaaattaattcagccccttatttcttttcaaacaccggtaagcctcttacgccccgtacggaaattaatacctggcagatcgaattactatcatgacccaggctctatgcataactcatgctaaacctcccacactataaaatgactgggaaaacatgcatttgtaaagtataagcccaccntatttcttaatgcatctacgggttttcataccgcagaaaaataaatatatacgtggccctataatatcatttctcgcc

SEQ ID NO: 41841 - DNA, 650 bp, Macaca Mulatta
gaggtcatccatgcaggagcccagtgtgacgatggtaaatattctgaagactcactcgctaccacgatacaaagggacacacagcagagagtccaggagcccatggcagagtgagagcagatgtggaacattccaggccctctgtgagcatgagcaaataaatgaatgttgtgacactttatccccacaagatgcatctgtcagtgacatcactgaatgggccaccagccccaacttctttaagaggaggctgcatctctggcagatgaatcaggcaggactgaactcaactctaatggatctgagatacagatgcacacatgcagaggctccctgggtatttgtttagatattaacaattcatagcaccttctccataacatgccttacgtaggagcctgccaactttatccatctgcacctcagactccaagtatttaaagatgaactcattgtcttactgcaggcgagcttctctgcaaactctctcattcctctcactggtggcttggtgcttctactcctttatgcatacttcaattatcagtgagtaaggagtaggcatctgagaagatgcatgtcaactgcattggtagggatacaggagctgagatgatgccctgagaaatgattatatttgaagctcttcc

SEQ ID NO: 41842 - DNA, 647 bp, Macaca Mulatta
  misc_feature (1)...(647): n = A,T,C or G
gggggccgccattgcaacaaaaactggcagcgaggaaccgcggagaactgctggcctgcacggcttaattttgtgcggccaaaaaggggcagtcacgtaaggacagtccgggcagttgagaaggccaccccgacttcgtgcctgcagcccaggatatgtacgtgtaagcaggattcgaagcagttaagaatgtctctgccaagtcgacaaacagctattattgttaaccctcctccaccagagtatataaataccaagaaaaatgggcgattgacaaatcaacttcagtatctacaaaaagttgtcctaaaggatttatggaagcatagtttttcatggccttttcaacgtcctgtggatgctgtgaaactaaagttgcctgattattataccattataaaaaacccaatggattttaaatacattaagaagcgcttggagaataaatattatgtgaaggcttcagaatgtatagaagacttcaatacaatgttctcaaattgttatttatataacaagcctggagatgacatgntcttatggcacagctctccagaactgttttgcagaaatatctcaatgcacagaaaacaagtggggtggtagaaaatcagaagcctcacaattaactgttttcgcaagaaacc

SEQ ID NO: 41843 - DNA, 88 bp, Macaca Mulatta
tctgcgctggtgctgggctggctgaacctgctttactatacacgtggcttccagcacacaggcatctacagtgtcatgatccagaagg

SEQ ID NO: 41844 - DNA, 692 bp, Macaca Mulatta
  misc_feature (1)...(692): n = A,T,C or G
ggggtcctacggcttctatcccagaaatgtcaccctgaagtggttcaaaaatgggaagaaactctcatccctccagacccacgtggttcagttaaagaacagcaatgcctacaaaatcgtcagtaccacggaggtagtcccagctctagatgacctaaactctcatgttacctgcagtgtgtaccaccggagcttgcattaccctcttcatgggaaggctgatttgtctgagaccataatagttccacccaaggtgtccattcttcagcaccctgcctcaaataacaagatgaatgtcacctgccaggcagagaagttctatccccaggacatgcaactgacctggctgaaagatggaagtgtctcccagagagatgagaccctgacccccaccaagggcaaagacggactgtacagcatgcagagctccatcctggtggaaaacagtgaccatgangaggacactatgctcacctgccaggtggaacaagacggatggcagaagatcactgtaaaatgacattttgggcctctgctcacctggaaagtctcagttgtagccataacaagcctccatgattattaaagagctcctttacttcataaaagttcttttcaattaaaagttaattttnnnnnnnnnnnnnnnnnnnnnnnnnnntcgcccctggctcagaactttaacttcttgg

SEQ ID NO: 41845 - DNA, 604 bp, Macaca Mulatta
gttggcggtttattggtttaaataggaagacgaggctctgcgacttgggacgctcttactaccttcatagagagcttggtgacagtttagcatgacagtttgtgcccctgctgtgtatactttgttacggcctcacagaaagggtattgatttaaacgtgactaatttcttcatgtttatttttgtctttattcctagttacagtcctgataatttttcttcctttaaaaaccttgctaatggctagtgaattagtgatcaactatatttacgtgttctctaaatctagcgatttaattggaggtcattcttcttgcaccatgtgtcagtgctatgtcaggatggctcagttttacattgtcaaaggattaactagagcaggatgcagccttactggaaattgctcgtttgtgaaatacaggcactttattttttgttatactcgaggtgtgttcaaatgtaaacattttgagccgtgttagaaggatatacaagattgtaatgaagaaagcagcaacttgatcaagtactagctaatgaattttgtgttttaagtatatggactgtggaccttggcaatcagttctcatcttgaccttttatt

SEQ ID NO: 41846 - DNA, 777 bp, Macaca Mulatta
  misc_feature (1)...(777): n = A,T,C or G
gggnnnnnnnnnnnnnnnnnnnnnnnnnnnnnnnnnnnnnnnnnnnnnnnnnnnnnntgtgccattgcacttcagcctgggcaacaagagtgaannnnnnnnnnnnnnnnnnnnnnnnnnnnnnnnnnnnnnnnnngccgggaaaaagggaactctgctttttccaattcttatttatttatttagacagggtcttgctctgctgcccagactggagtgcagtggcgtgatcctagcagcctcaaattcatggccttnnnnnnnnnnnnnnnnnnnnnnnnnnnnnnnnnnnnnnnnnnnnnnnnnnnnnnnnnnnnnnnnnnnnnnnnnnnnnnnnnnnnnnnnnnnnnagtcttgtttgttgtgttacccaannnnnnnnnnnnnnnnnnnnnnnnnncagtcatatnnnnnnnnnnnnnnnnnnggttgggattctaggtgtgaggccaccatgctcggcctctttccattctcaggtaaatctcaagttacttaaaagcagagtttcttcaaaagtcataatacatcacccggtaggccctggtggcattacaaaatagataaataatattacttttaaaataaaatgtttaaagggaaaggagacccccaaaggtgggggcttccctttaaagaaaagtttggggtgggggtatggccgaaacattaagggattgggacaacatttttggttggaatcctaggcaagcttggggagggagtgaagggcttggctaaggtttttaggggaggaccaaattgccgaggtcatat

SEQ ID NO: 41847 - DNA, 100 bp, Macaca Mulatta
gtaacaaatttgtaagccaacttgagaaacatgccatttgtaggtgattatttccttaaattatagacaacaataattaaaagccatatattgagttctt

SEQ ID NO: 41848 - DNA, 374 bp, Macaca Mulatta
ctcccgcaaagaagggtggcgagaagaaaaaggaccgttctgccatcaacgaggtggtgacccgagaatacaccatcaacattgacaagcgcatccatggagtgggcttcaagaagcgtgcccctcaggcactcaaagagattcggaaatttgccatgaaggagatgggaactccagatgtgcgcattgataccaggctcaacaaagctgtctgggccaaaggaataaagaatgtcccataccggatccatgtgcggttgtccagaaaacgtaatgaggatgaagattcaccaaataagctctatactttggttacctatgtacctgttaccactttcaaaaatctacagacagtcaatgtggatgagaactaa

SEQ ID NO: 41849 - DNA, 1696 bp, Macaca Mulatta
  misc_feature (1)...(1696): n = A,T,C or G
atgggcctgaaagtcattcagcggaacgtgcgcaagttcctgcagctccgtttctgggggtggtggaagctgtataacaaggnnnnnnnnnnnnnnnnnnnnnnnnnnnnnnnnnnnnnnnnnnnnnnnnnnnnnnnnnnnnnnnnnnnnnnnnnnnnnnnnnnnnnnnnnnnnnnnnnnnnnnnnnnnnnnnnnnnnnnnnnnnnnnnnnnnnnnnnnnnnnnnnnnnnnnnnnnnnnnnnnnnnnnnnnnnnnnnnnnnnnnnnnnnnnnnnnnnnnnnnnnnnnnnnnnnnnnnnnnnnnnnnnnnnnnnnnnnnnnnnnnnnnnnnnnnnnnnnnnnnnnnnnnnnnnnnnnnnnnnnnnnnnnnnnnnnnnnnnnnnnnnnnnnnnnnnnnnnnnnnnnnnnnnnnnnnnnnnnnnnnnnnnnnnnnnnnnnnnnnnnnnnnnnnnnnnnnnnnnnnnnnnnnnnnnnnnnnnnnnnnnnnnnnnnnnnnnnnnnnnnnnnnnnnnnnnnnnnnnnnnnnnnnnnnnnnnnnnnnnnnnnnnnnnnnnnnnnnnnnnnnnnnnnnnnnnnnnnnnnnnnnnnnnnnnnnnnnnnnnnnnnnnnnnnnnnnnnnnnnnnnnnnnnnnnnnnnnnnnnnnnnnnnnnnnnnnnnnnnnnnnnnnnnnnnnnnnnnnnnnnnnnnnnnnnnnnnnnnnnnnnnnnnnnnnnnnnnnnnnnnnnnnnnnnnnnnnnnnnnnnnnnnnnnnnnnnnnnnnnnnnnnnnnnnnnnnnnnnnnnnnnnnnnnnnnnnnnnnnnnnnnnnnnnnnnnnnnnnnagggatttggaaataaactctgtcaactcgaaatatgaggatgagcagtctctgaattccacgctgcaaaggaaactgaaggagcaccaggnnnnnnnnnnnnnnnnnnnnnnnnnnnnnnnnnnnnnnnnnnnnnnnnnnnnnnnnnnnnnnnnnnnnnnnnnnnnnnnnnnnnnnnnnnnnnnnnnnnnnnnnnnnnnnnnnnnnnnnnnnnnnnnnnnnnnnnnnnnnnnnnnnnnnnnnnnnnnnnnnnnnnnnnnnnnnnnnnnnnnnnnnnnnnnnnnnnnnnnnnnnnnnnnnnnnnnnnnnnnnnnnnnnnnnnnnnnnnnnnnnnnnnnnnnnnnnnnnnnnnnnnnnnnnnnnnnnnnnnnnnnnnnnnnnnnnnnnnnnnagatgaatgccgaggcccacgtcagaaagctggaagacagcttatcagaagccaatgcgaaggtggcagagctagagcgaaaccaggcagaaatcaatgccatcaggacccacctccaannnnnnnnnnnnnnnnnnnnnnnnnnnnnnnnnnnnnnnnnnnnnnnnnnnnnnnnnnnnnnnnnnnnnnnnnnnnnnnnnnnnnnnnnnnnnnnnnnnnnnnnnnnnnnnnnnnnnnnnnnnnnnnnnnnnnnnnnnnnnnnnnnnnnnnnnnnnnnnnnnnnnnnnnnnnnnnnnnnnnnnnnnnnnnnnnnnnnnnnnnnnnnnnnnnnnnnnnnnnnnnnnnnnnnnnnnnnnnnnnnnnnnnnnnnnnnnnnnnnnnnnnnnnnnnnnnnnnnnnnnnnnnnnnnnnnnnnnnnnnnnnnnnnnnnnnnnnnnnnnnnnngaggaagctggccgccaggcttcaggaggcagaagaagcag

SEQ ID NO: 41850 - DNA, 1040 bp, Macaca Mulatta
ttgttgctgctggtgttggtgaatttgaagctggtatctccaagaatgggcagacccgagagcatgctcttctggcttacacactgggtgtgaaacaactaattgttggtgttaacaaaatggattccactgagccaccctacagccagaagagatacgaggaaattgttaaggaagtcagcacttacattaagaaaattggctacaaccccgacacagtagcatttgtgccaatttctggttggaatggtgacaacatgctggagccaagtgctaacatgccttggttcaagggatggaaggtcacccgtaaggatggcaatgccagtggaaccacgctgcttgaggctctggactgcatcctaccaccaactcgtccaactgacaagcccttgcgcctgcctctccaggatgtctacaaaattggtggtattggtactgttcctgttggccgagtggagactggtgttctcaaacccggtatggtggtcacctttgctccagtcaacgttacaactgaagtaaaatctgtcgaaatgcaccatgaagctttgagtgaagctcttcctggggacaatgtgggcttcaatgtcaagaatgtgtctgtcaaggatgttcgtcgtggcaacgttgctggtgacagcaaaaacgacccaccaatggaagcagctgggcttcactgcccaaggtgattatcctggaaccgtccagggccaaatacgtgctggctacccccccgggctcgcatcgccctttccgctcaccgtgcgccgccccccttcccgttgcctcccgccctacacttatccccctccccgtgttacccctcctgtcttccgcgccccctatccgtccccccccgcctttccccttcccctccccccctttcgtcgccctcgggccaccccttgtacgcgcccgtcagagtcccttagcggcaccccacacccactccgggtactcacttcgtcgggtcccctcgtatggcggctccgtcgcccaccttcttctcagccgttcgttcctcgccactgtccaat

SEQ ID NO: 41851 - DNA, 1045 bp, Macaca Mulatta
ctcactcctgagctctactgactcccaacagagcacagaggaaaatggccataagtggagtccccgtgctaggattttcatcatagctgtgctgatgagcgctcaggaatcatgggctatcaaagaagaacacgtgatcatccaggctgagttctatctgaaccctgaccaatcaggagagtttatgtttgactttgatggtgatgagatttccacgtggatatggcaaagaaggagacggtctggcggcttgaagaatttggacgatttgccagctttgaggctcaaggtgcattggccaacatagctgtggacaaagccaacctggaaatcatgacaaagcgctccaacaatactccaatcaccaatgtacctccagaggtaactgtgctcacaaacagccctgtggaactgggagagcccaacgtcctcatctgtttcatcgacaagttctctccaccagtggtcaaagttacatggcttaaaaatggaaaacctgtcaccacaggagtgtcagagacagtcttcctgcccagggaagaccaccttttccgcaagttccactatctccccttcctgccctcaactgaggacatttatgactgcaaggtggagcactggggcttggatgcacctcttctcaagcactgggagtttgatgcaccaagccctctcccagagactacagagaacgtggtgtgtgcccctggggcctgattgtggggtctggtgggcatcatcgttgggggactgtgttctctcctccaggggtgtgggcgcaaaaaccattgcttcgaaaacgccaaggggggccctctgttgaaaacactttccccgggggaatgggggtttcccgagatcttgcgaactctgcttggaacaaaacctctcggcctttaatcgaatttccaaagggctggggcaaaatttccagaccccttggaaccccccgtgaaaggggcgggctacccttagcgcgttttccccagccccctttaacgccgcccccccccgggtgggggatatcgccccccctccgcgatgg

SEQ ID NO: 41852 - DNA, 1726 bp, Macaca Mulatta
  misc_feature (1)...(1726): n = A,T,C or G
atactgcactatgggataattgacaaattgaaatctggtatttgtcccaaaagttgttttgagttagttctacctggtacccatgttctgattgcgtgtgggattgcatggtgtcctgattgtatctgggtgaagaggatggcatgtgctgggttgctggtgggtggagagcagcacattcttacagaggagatggagtgttatgggcatagtgtgtggacaggtatcttcacctgcccacccctgagtcagcctgcttgatttgatagcttgaagaatccttttccactgaagtagaggatgattatttgacacatctgaaataatcaatcaatcaagagaaaggcaggaataaaaactccttaacttactgatgcttagcctcctgaaagtctgtttttaagcaaatgggtaatagtagaaaataggttagaatctatggcttgattaaaaatataatgnatataatgttattatattatcatcatgttcaggattagtagtcagagttgctgtagactattttgcacaaacagaaaagaacacggaaacgtttttaacagagcatttagtcatgttggagtacaggatcctagctgtgtctgggaacattagtttacgtgcgccagctacatcagggttttcccatggtggttcagaataaatgagcatagcatggttttgtttttgctttcgattttctcatttggcatggacctatatgtattagctatccttttttctcatatattaataaatgctacatttgtatttgcattactataatactttgagttgaaaaagagtttcattgtggggagaaaaagcaaatggtataccacaagatcactctgatttgagaaaaggaaggaggagaggaagatagtctgaatggaaatctgaaatatggaatgttttagagaaatatatcacttgcatatagaatgttttaattgaggtataaattaatgagacaaagtgaagaagaagttatattcagataggactgcaccacattatttgtcactcatggatctgttaccatcaggtcaattcctagcatgcataaattttttaaccttcggcttttaaaatagacctatnnnnnnnnnnnnnnnnnnnnnnnnnnnnnnnnnnnnnnnnnnnnnnnnnnnnnnnnnnnnnnnnnnnnnnnnnnnnnnnnnnnnnnnnnnnnnnnnnnnnnnnnnnnnnnnnnnnnnnnnnnnnnnnnnnnnnnnnnnnnnnnnnnnnnnnnnnnnntaaacccctgaaaattgactgaagaaaaatcattactctttttctcagtaaatcatatcatctgaaatattacaaatttcaaatttctaggtgctatattaattcaatattataataactcttacnnnnnnnntcttacaagttttaagttgtggtagtgtttagggatttttttttaaagatgtgtgaaatgttctctgcaaaatcaggccactttctccttttatatattaatacaattatgtattatgaagacccagtgaattatagtatttaaagtgagataacataagtatttgcaaaggtaagttacagcttgtttttgagagaatcaaatgagtttactttttctcctgttgtttttaaactagcttttaaagatggaagctaaccaatggaaatgttactatgcttctgacatttattaaataggaccaataaagtattttattatcagaaaaaataa

SEQ ID NO: 41853 - DNA, 649 bp, Macaca Mulatta
  misc_feature (1)...(649): n = A,T,C or G
gggggatgtggctgggccgttgtttctcgctggtgctgagctccaggtctctccactgttctgtgtcctcagcgtgtgtggcttcatgacccgaaggggccgttgacatttagggatgtggccatagaattctctctggaggagtggcaatgcctggacactgctcagcaagatttgtataggaaagtgatgttagagaactacagaaacctggtcttggcaggtattgatgtctctaagccaaatctgatcacctgtctggagcaaggaaaatatccctggaatatgaagagacacagtatggtagtgaaacccccagttatatggtctcattttgctgaagacctttgcccagggccaggcattaaagattcttttcaaaaagtgatactgagagaatatgtaaaatgtggacacaaggatttacagttaagaaaaggctgtaaaagtgtgaatgagtgtaatgtgcacaaagaaggttataatgaactaaacctgtgtttgacaactacccagagaaaaatacttcaatgtgatanatatgtgaaagtcttccacaaatttttaaattcaaatagacataacacaaaacatactagaaagaaacctttcaatgtaaaaatgtggcaatcatttgccgctttacact

SEQ ID NO: 41854 - DNA, 803 bp, Macaca Mulatta
  misc_feature (1)...(803): n = A,T,C or G
gggcgggcagatcacaaggtcatgagttcgagaccagctgggtnnnnnnnnnnnnnnnnnnnnnactaaaaaaatacaaaacttagctgggcatggtggtgtgnnnnnnnnnnnnnnnnnnnaggannnnnnnnnnnnnnnnnnnnnnnnnnnnnnnnnnnnnnnnnnnnnnnnnnnnnnnnnnnacnnnnnnnnnnnnnnnnnnnnnnnnnnnnnnnnnnnntnnnnnnnnnnnnnnnnnnnnnattcatggccaggcacagtgcnnnnnnnnnnnnnnnnnnnannnnnnnnnnnnnnnnntgggagtactgctttagctcaagagttcaaaaccagcctgggcaacatggcannnnnnnnnnnnnnnnnnnnnnnnnnnngttagctgggtgtggtggcacatgcttannnnnnnnnnnnnnnnnnnnnnnnnagtaggatgatcacttgagcctgggaggtcagggctgcaatgaaccaagatcgttctagtgtnnnnnnnnnnnnnnnnnnnnntannnnnnnnnnnnnnnnnnnnnnnnnnnnnnnnnnnnaaatttcctgggaaggaggtcaaaattttaaccttaaacaggagtcctaaagttgaattccaatccctcccggaaagatttttgaagggggttcgagggcttccgtggaaaaaaagaaacctgtttgatggtgggaacaacacagccaaggaaaaactggtaaattaaaaaaggggaaccaccggaacaagttgaacctggcaattgcctgcaaatttccatgggtaaaaccctttaaccaacaat

SEQ ID NO: 41855 - DNA, 520 bp, Macaca Mulatta
tacttaattgtacatatttatgtctctgcccgttttgatttgcttgttttcctgtgcttctcgtttcccttcatcactcagatccagctccttcaactaagcagatctctcttcctcttctacttgtaatcagtaccacccaagttagtatttaattatgtgccatcttatatttttctaatagtcttaagtctcttagtcttaaccccagctaaatgactctgaggaccaacactgcatttcttttgtttttcaaatcctgaaacattaatctttgactagatataacatgctcatgataaaaaagaattgaaatagttgaaaagggtgttcagtgaaaagtaaatttccttgtcattcctatctcttgagttctccccagaggcaatcactgctactggttgtgtatctctgtagatactctttgtatacaagtgttcattagtactgcttttcataactctgtctcactgaaaaccttatttgatggaagcaacattgcagttacattatcaactct

SEQ ID NO: 41856 - DNA, 620 bp, Macaca Mulatta
cccgggatccgcccccacttcttccccatactggcgccctggtggcttcttgggtctgtttcattctaaaacgaagtggctgagttcggctgttatttaagataactccagggcacgattcagcccaggttccgcaaacactgcgtgacagctgtgtatgactgacgcttggcagcaccttttgtgtccggtcaccagttctgctgtgcgatggggtctcctgtggataccagccgttctgtgtattttggacgaagcccgcgcagccgggtcccagccttttcctgattgggcgacatgaatattcaaaattctgcgcctctttctaatttgtagatttcagtttccgtcgttcactttgagactttgaaattcctatttctcgttttgttgataatttttgcatttaatggtctctgctttaaagggtaaggctgcggccccaggtcactgcgaggcacttaccgtgtagatacgggctcaaaagtcacctgtcagagatctacgtcatccactaaggaattcgcgccgctcatacttgcctgtctcattttatcttccttctagcagctgtctgaaattggttcgcctgttttcttgtttatggtattctcaagccc

SEQ ID NO: 41857 - DNA, 885 bp, Macaca Mulatta
  misc_feature (1)...(885): n = A,T,C or G
tggtactccccagagttctcagaaagtctgcttttcctgcattactatcaaagccactcctnggatcaattctgatgggagttccagaagccaggaaaagaaggatccaggtgcctcccaggccctgccagagcccgagtccttgcttggtagcatgctggagaagaaggtggatgagttggtgaaattcctgagtgtcaagtatacaacaaaacagcccatcacagaagcagaaatgctgaagagtgtcatcaaagagcacaaggatcacttccctctgatctttatgccagcccatgaatgcatggagattgtctttggcattgacatgaaggaagtggaccccatcagccagtcctatgtgctcctcaaatcactagacctcacctacgacgggaggctgagtgatgaccagggaatgcccaagaccagcctcctgattcttatctttggtgtgatcttcatggaggccaactgtgcctctgaagagaagatttgggaagtgctgaatattattggggtgtatgctgggtggaaggatttcatctatggggagcccaggaagctcaccaccagagatttggtgcaggaaaaatacctggagtgctgtcaggtacccaacagtgatcctccaagatataaatgccggtggagcccaagagctcatgctgaaaccaccaagataaaagtcctggagtttttctccagagtccgtggaaatgatgccagttcctttccactcctgtatgagaaagcttttaagagatgaggaagagaaagctcaggctataattaccaccatgggtggtaccactgtcatggccagcgcacatccctgggccaagtgcacagcttctcttgccctgagtgaagtcgcaggcagat

SEQ ID NO: 41858 - DNA, 225 bp, Macaca Mulatta
ctgctgctcctgctgccccgtgagctgtgccaagtgtgcccagggctgcatctgtaaaggggcattagagaagtgtagctgctgcgactgatgtcgggaaggccctgctagaagatgtagaaaaagtgacctgcacaaacatggaatttattccatacaaccctgacccatttactgtatttttttttatgaaatatgtgaatgataataaaattgttgacttaa

SEQ ID NO: 41859 - DNA, 792 bp, Macaca Mulatta
  misc_feature (1)...(792): n = A,T,C or G
ggcaccatttcaaacaatgttaacatagtccagcttttgtttttctcatctcttccgagaggagactcactgtttctgtctgaggaagctcataccctcggcaaaacatcaggacaaataaagagaaatgggggtatgcattcccaacagaagcagtgtgttatttgttttaaaactctgaacagagatcttggaaatctttcaaaaagaccattgaattcttcattggctgagaacgacgttttaaaatgtcttaaataaggctttgtttgcattgtttgagttcaaggggccttattattgaatggaattgcacaagcctttctttgtgcaatcaaacctttgttattggtagttctgtaaaggaaactgtggaatcgaattggcattggagtcataaatctatttactgagtgtggcttccaagaaatgttgcaattcaaaatgtactaagtctgtgatttactggagatttggagattcataatnnnnnnnnnnnnnnnnnnnnnnatgcaacttctggtttaatgtttggcaactccacatgataaaaaaaataaaacggcccaaccgagtttcggaattaagtattcttctagtaagtgattcaaacttgtaatatttgcccacggactgacttatttatttactacctagaagctcttaaattcacctggttaatcaggggcaaatacaaaaaggttttgttaaaaactccaatgttaacctttaccacttttcctgacctggtgccatgaattcctcaagaaccggaaattcacggtggttggg

SEQ ID NO: 41860 - DNA, 525 bp, Macaca Mulatta
cttccccctcccagctaatcagacacaggtcccagcctatccactcccgccccctgccagcgccagggaagaggcggacctggcgcacccaggagcttacccctttgggttcgaagagaaagacctcacggaagatgcctccagggtcggcacggggagggggcgttcaggccaaactcgaattcgtacaccttaaaagtggatatttggatgagggatgtgccccggtacggtttcaggtggtgtcagaaaggggacaggtacggagcacctctatctccaagccagcgacgagccaccagcaacacacctgcttcaccgccaggcggggtttcgtgtgctagggggtggtaagggctagaggaccaggatatttgggaatgcgttcggaaatgaccctgcagggcgtccgcggcgccgtctgaacaaatttctggagccaaaagtgtagccctaacgtcgcttcctaaataagcccgggaggcatgcggcccaggcagcgaaggcgaagatggaaacaacgtc

SEQ ID NO: 41861 - DNA, 645 bp, Macaca Mulatta
tactgcctcccccagctgcacagacggcagcctctgggcctgactgccagagagctgggtacactggctaccagcacagcagcccctgcaggcccccagatgggctgccttagtcctcttcagagagctgcagagcctccagctcatcctccggcccctgggccagctgctgcagctccccaggggccagccccgcctctgcgtctgggtctccatcgcaagaccattcaccctccgagtcgtcctcatcctcttccactccatgccgagtgcccaggggccccagcgtctcgtcctcttccaccccatgccgagtgctcaggggccccagtatccctctctccgagtagccctcagtgtcgtcgtcctcttcagagctgttcaggtcaaagaggtctttaaattccttcctgtcctcatccttcctgtccgccaccttccttcgtttgatctcagggaagttcaggtcttccatccgctcttttccactgatctccagctggatctcccggtcacgcagcttgcgccagtggctgtagtaccaggtcaggggggtcccctcttcccggtcagcttctcccaggcttccactgctgctggtcagacacgccaaaggaaccctctgcgacggctgcagatgtgctc

SEQ ID NO: 41862 - DNA, 703 bp, Macaca Mulatta
gcaaatttggtaacttgttcattgtgtaacatattggaaaataatactaagggatatttgggttataggtagctctgggtattaagtaataacttggaaatgtccatattagtttatttagcagtttaaaggatgggaagtagaaataaaaacttcctgagtgattgcaacttgattgactatcttatttatctgacaattcaatactaaacagtctaatacagttagtggaaagaaacttaaaaacataacattaaaatacatgattcagggtggccatgtcctaagcatatctgaaaagaggcttatagacacaaatgcttctctccaggataccaatatctagggaaaaatcacctgcattttatttatttatttaacctatctttattgactgttcactgtatgcaagggtactgagaaagatacagaaatatctctaagaaagtgcttaccactaagtttatagtctagccactgagataggagttgtacccaaataataactatttactgttaaagagattaaaagaaaactgaagtgtagaaactccctagcatgcactttttagaaccaggattgggaccagttgctaccccttgtctctgggctttataccctcctgggaaagaactggaggtctctcatggagtcctctgagtgtttgttctatcttctggccacgttattgaaggaaaactg

SEQ ID NO: 41863 - DNA, 207 bp, Macaca Mulatta
  misc_feature (1)...(207): n = A,T,C or G
ccacacacaacccagtgccctgtgggtcaggccgggggccctgccacctggccaacctcctcagtacattggcacagagcaaccaaaacagagaccagaagcaggggcccccggaagtgacttgccaacttaagaaaaagacacgaaccctataccgctcagntcagatcagctggaggagctagagaggatatccaagaagaccac

SEQ ID NO: 41864 - DNA, 731 bp, Macaca Mulatta
  misc_feature (1)...(731): n = A,T,C or G
tgccttattggctctatgcaccaggtgaaccaaaagattgctgacataaatctgcgtaccgagccatcagccaacagcctgnnnnnnnnnnnnnnnnnnnnnnnnnnnnnnnnnnnnnnnnnnnnnnnnnnnnnnnnnnnnnnnnnnnnnnnnnnnnnnnnnnnnnnnnnnnnnnnnnnnnnnnnnnnnnnnnnnnnnnnnnnnnnnnnnnnnnnnnnnnnnnnnnnnnnnnnnnnnnnnnnnnnnnnnnnnngaaaacagcagataaaaatctgctggcggagctgtaccagtatccctactttaacagctccaagccaaacaagcttccgaatggagtcaacttctgtgacatggtgggcaatgtgatccgggctgagagagactgctttagtggcaannnnnnnnnnnnnnnnnnnnnnnnnnnnnnnnnnnnnnnnnnnnnnnnnnnnnnnnnnnnnnnnnnnnnnnnnnnnnnnnnnnnnnnnnnnnnnnnnnnnnnnnnnnnnnnnnnnnnnnnnnnnnnnnnnnnnnnnnnnnnnnnnnnnnnnnnnnnnnnnnnnnnnnnnnnnnnnnnnnnnnnnnnnnnnnnnnnnnnnnnnnnnnnaggctgccatcacttctgagcaaagccatgtacaccagcttctgttgctgcttcccacagtcctggttcaacacacacgaattcaagtctgacatctgtaacacaatgagcctgtggatttcag

SEQ ID NO: 41865 - DNA, 680 bp, Macaca Mulatta
tgaatctgggtaactgggaagatggagatactattagttaaagaggagtagcaaacagaagataaccacatttaactctgacgagatgtgttgaattcagcttaagatatattccattggaggttccagcatttcattgaggtaggttattcactgatagagcatttattgaggatatactatgtgttaggcatcaaagcaggatatatatatatatgggtttttttgccaaaattgtagcaaaaaaattgtatatgtgtatgtatatatcctgctttgatatataagtatacatttatgtatgaacatatgtatgtattttaacttattttaagttcagaggtatatgtacaggtttgttatataggtaaatttgtgtcacaggggtttattgtcacccaggtattaagcctagtacccgttagttatttttcctgatactctccctcctcccaccctccaccctctggtagaccccagtgtctatagttctcctctgtgggtccatatgttctcatcatttagctcccacttaataagtgagagcatgcggtatttgggtttctattcctgcgatagtttgctaaggataacggcctctagctctatacatgttctgcagagtacatgatcttattcttttttgtgactgcatagtattccatggtgtgtatgtacca

SEQ ID NO: 41866 - DNA, 365 bp, Macaca Mulatta
  misc_feature (1)...(365): n = A,T,C or G
gcatatgttataggtgatatactaaggggataaagactgtttaaaaatcagccgggtattgtggtgcatacctataatcgannnnnnnnnnnnnnnnnnnnnnnnnnnnnntcttgaacccagggaggcnnnnnnnnnnnnnnnnnnnnnnngtnnnnnnnnnnnnnnnnnnnnnnaacagagcaagattccatgnnnnnnnnnnnnnnnnnnnnnnnnnnnnnnnnntttagcattttattattcagggtacacttgggaacttttgtaggagaatcatcccttttcccaaaactctgattgtgagatgaataactgagaataaagttctgccttaaaatacaaagctatacagattaaacaca

SEQ ID NO: 41867 - DNA, 801 bp, Macaca Mulatta
  misc_feature (1)...(801): n = A,T,C or G
gggggtttagaccnnnnnnnnnnnnnnnnnnnnnnnnnnnnnnnnnnnnnnnnngcccgccacctcgcccggctagnnnnnnnnnnnnnnnnnnnnnnnnnnnnnnnnnnnnnnnnagnnnnnnnnnnnnngattnnnnnnnnnnnnnnnnnnnnngtnnnnnnnnnnnnnnnnnnnnnnnnnnnnnnnnnnnnnnnnnnnnnnnggcctacagactttttaatgcctaagatattaagaaataaacctgtaggtattggcagggcatttagattttaattagttttgacttgtagaaatgatttttatctgtaaggctctctctctaccaaaataagtgtattctttgggagtaaactggttggtaagttgggccttgctgatagatatatgcactggtgcgtaagccctatactgctgctgtcactaatgtttttgatagtttacttagggatgactgctgttaatgaagtttgctttgtgaatactccctctttccttagccttggcaacattcttctctgagctatctttatgcttttagaagaacaagaaaaatcagatttaagaactataaagaaataatactagctttgagtttctttaaaaaaatattggaatcccatctctgtatccaaatccctactacgtattttgataataatctgccaaactggagttattggaatatgagctgccttttaaaaaatccctggttctgctaaaagttgttgctttccccaaataaaaaatattttgcaactggtagcccaacaatgagacttttgcaaaacatcctaa

SEQ ID NO: 41868 - DNA, 779 bp, Macaca Mulatta
  misc_feature (1)...(779): n = A,T,C or G
ggttcacaaatatttttaaactgaaatatctgaacataatataatttcgtggaagaatacattgaccattttttttaatgtgcatgaattcaccacaacacatgcagacaactgctgcaatggagagtatgaagaaacctggtctttttgttcatgtcggtggcagtgtggaaattccatccagaaaattacaactccacttgatttagttgatcaccatctcagtcttcaaaagataacatcatgaggtgtgggaagtcctagttttaaggaagccactgaaatatagatgggaaatgtggactatacaagtatatgttatatatacttgcaatgtgacatggttctatagatcattttataataataaatattttaatttatcataacttatataaaagaaacctttgctgtttgttgaaagaaaatgaaggaacaggaagaaaggtgcaaaatgctaaatttctgcaaatggatttggcatgtcttcccgtcagttcaggtcaaaagtgcattgttatgagattnnnnnnnnnnnnnnnnnnnnnntgataacacactattttnnnnnnnnnnnnnnnnnnatttgcacaacttttaaaccagattactggttaaaatccaacagtacacaatttataaagtaaaaagattttttttaagaaaacaaatataattacccagtgctgtgaaaatgccgaaaaaaaagcttgttttgggttggtttttctttttttaggaaaacccttgcctaaaatgtttaatcttgtaaaaaagtt

SEQ ID NO: 41869 - DNA, 594 bp, Macaca Mulatta
gtaataatcaattttaatttatctttgtttaaagttggagtttatttagtggagatatgatgtatctatatagttgctttgttaatgttcagataaggaaactgagattcctagtggttaagagattggcacaggacatttggccagtaaatagagagaggaggattaaaactcacattttataactcattgtcgagtatgcttttcactaaagtagttgattccttttattctcctcgttttatgtaattcttttaaatatccctaaaggtaaaagctgtattttgtatcacaccccttctccaaatatttataacattagtgcatatggtagttctggataaacagattgaattgccatgtagatgtatgtgaatatatcagtcatagtgggataggttatgttgcaataataaacagcccatcccccccaacctcagtggcttacaacactaacatttctttcatgttgcatgtttatcttgggtttattgtggctatgtttcatgttgtctgcaagcggcaacctgggatcactaagcaacttcttgaacacttgtagtggatagaaaaatggcacgataacccatgtac

SEQ ID NO: 41870 - DNA, 808 bp, Macaca Mulatta
gggctttgggctttttcgcaacgggtttgccgccagaacacaggtgtcgtgaaaactacccctaaaagccaaaatgggaaaggaaaagactcatatcaacattgtcgtcattggacacgtagattcgggcaagtccaccactactggccatctgatctacaaatgcggtggcatcgacaaaagaaccattgaaaaatttgagaaggaggctgctgagatgggaaagggctccttcaagtatgcctgggtcttggataaactgaaagctgagcgggaacgtggtatcaccattgatatctccttgtggaaatttgagaccagcaagtattatgtgactatcattgatgccccaggacacagagacttcatcaaaaacatgattacagggacatctcaggctgactgtgctgtcctgattgttgctgctggtgttggtgaatttgaagctggtatctccaagaatgggcagacccgagagcatgctcttctggcttacacactgggtgtgagacaactaattgttgggttaacttaatggatcccgagaccctcccgtaaacagatgtagaccctataattgtaacgctactggtgatttaccctgtaagaaaaatgggcgtaccaacgccccaacacaagtaaggaattttggtggcccaagtttcctggggttggggaatgtggtggaacgaccgtggcctgggagaccccaaggggggcgtaagacatgcgccgctggggtttccaaggggggaatggaaaagaggcccggcccgcgttaagaggaatgggcgaaatgcgccccaag

SEQ ID NO: 41871 - DNA, 770 bp, Macaca Mulatta
ccctgtgaatactgaagccacccacaaccatctcgtgtctttcccggctgctgctcagccctaagcaggaacactgcacaccctggcttgtcgttaccttgctgcaaaatgaatgactggcaccctgaagccgaaaccctggaatgggcctgcacagaaacccccgaccctatactacacaagacccgatgctacgcacatcaacaacttcaacataaacagcaacggtaagacctgcaatggcaggtgtgggaagcacgcgtggataaggcctgtggttctttcacccgtgcattgttgtatttgctatatcacagttagtgaggggtgggggacactggcaaggtctgccttccattctccaggaaatgattcgagtaaacttactttcgtgtttctggaataccaacttttctatgtcataaatagcggatgaccattccttggaaaaagatctgaagatagcccgacgcccgccactctccctccccgccaaacaggcatatcggtgcgttcctgacagtgtacatcgggagtcaggggtctccgctctgtgcgacccgcatgctaagaggcgaggagcttgcctacagtcagtccaggacaggctgcacacagcctcccgtcccaggattcacgttttcacagtaatcagtggtaagaaatctaattgcatctggaaagaatcctcttgaagttaacaataatattctaatttcagacttttacaacgcagaaccaaatgagaaacagttccaacattacttaat

SEQ ID NO: 41872 - DNA, 276 bp, Macaca Mulatta
  misc_feature (1)...(276): n = A,T,C or G
tgctcctgcctgattgcatctacttaacccactctccaagagctagaatcagatttcaaccgtatggaatcatgtacaatgcagcagatgggtttacaagtctcttggtctcttcatgtaattaacagccaagaagtctaaagcttgcattgtttacgtggaagatgtttcttgcccattcccacgccatgccatctgaaatcgctcnnnnnnnnnnnnnnnnnnnnnnnnnnnnnactttgtgggatcctctgcatataaaactccattcaacta

SEQ ID NO: 41873 - DNA, 119 bp, Macaca Mulatta
tatagaacacatgcaaggagtcctaagccgaacacagtgtcaactgaaggacattgagcacatgtaccaaaatgaccaacctattttgaaaaatacggagaaagcagcaatctatagag

SEQ ID NO: 41874 - DNA, 772 bp, Macaca Mulatta
  misc_feature (1)...(772): n = A,T,C or G
ggatgaagactttagggnnnnnnnnnnnnnnnnnnnnnnnnnnnnnnnnnnnnnaaaaatggtctctgaacagcatttgattttaccttggagttgcaaagtcaaagtcttaacttgccaaacaaactcaatgtggaatttacacatttgtctcattccagttttaagcagtttagtatagcagagcttttgtgacctctgaaaaacagttatcgtccatgacaagaattggcttgttcaccctcagtactctcaaaaaaagannnnnnnnnnnnnnnnnnnnnnnnnnnnnnnnnnnnnnnnnnnnnnnnnnnnnnnnnnnnnnnnnnnnnnnnnnttgtgtcttaatnnnnnnnnnnnnnnnnnncacggacatgcaccgccatacccggctaacttttgtagttttggtgnnnnnnnnnnnnnnnnnncnnnnnnnnnnnnnnnnnnnnnnnnnnnnnntgtgatccatctgcccttccctcccaaagtgctgacattagaggcgtgagccatcgtgcctggcccgacnnnnnnnnnnnnnnnnnnnnnnnnnnnnnnnnnnnnnnnnnncagacagatcttgccccccggtttggcccaggnntggnnntgccnttgggtgtgttttcgggcttcccccctncccttccccctttcccgggttcctggcggtttcccccctgccttntgccctccttgggtttgccttggggttttctcgggcgttgggccccccccgtgccccaggctnctttttcgggtgttcctg

SEQ ID NO: 41875 - DNA, 593 bp, Macaca Mulatta
actccatggagcagctggtcctcacatatcagccggagaggaaagactgacagtgggagtggctggtatgttgggggcccgtgcctctcggtgcagggatcagacgaaagcgagaatactcctcttttcagaaagacggcatggcctccttctcctccctgctgtttcctgagatttttcttacatagccacctctgctcccccgccccttggatgtgtgatggtctactgtgggtgggcccctataataagttcctaaagcatgggatctcatcgaataagattaatcatttaatccttgtgagaattctgtgaggtgtacatgttaatgacccatttcacaatgaaaagactaagactctggggatgggaatgatttcctcgagaccgtacagccaggaaatagcagtgatcaagctcacatctaatgatctcaggtccctagacttaaccatggcactgaggtgccatgcgacggtggccttcgaggacccagcactgacccacagagggctcctcccagatgggctgcagcttggagcaggccaggcagggcctggtccattggaggggctggcactgggtttgccttt

SEQ ID NO: 41876 - DNA, 568 bp, Macaca Mulatta
  misc_feature (1)...(568): n = A,T,C or G
gtggatctcgtgnnnnnnnnnnnnnnnnnnnnagaccataggcctgtaacatcatgcccggctaatgtttgtatttttgtagagacaggctttctccatgttgcccagtctgttctcgaactcgtgagctaaagctacctgcccacctggaactcccagagtgctaagattacatgggtgagtcaccatgcttggccgcatttttaatattctaataaatatttggttgtcagaactttaaaatgatagcctacagaaacatacaattttgaatttaacagagtttcagtaaatgtttccagaattaatgaagcatgttagctttaatttttacagattgtgagagaagtacatttataaaacttacgaggttatagttatactggaaaaaactactgtatcgattaactcctaaaatatcagtgccagcatggaactatagcaccaccttgtggttgacatggcagagttaaccttatattaaaacaagtgatctcctatcagaggatatacaaaaccttttgaaaaattcatattaaaaagaaactttacgaagcctaatggaaga

SEQ ID NO: 41877 - DNA, 126 bp, Macaca Mulatta
gtttcttgattttgaaggtggaagtgtgagttttttgaatgtcaccaggagttccctcatatggagttacccggctggctccttaaattttcctgtcaggcctttcttttccactggccacagatg

SEQ ID NO: 41878 - DNA, 723 bp, Macaca Mulatta
  misc_feature (1)...(723): n = A,T,C or G
aatctggcttgtaaacctagaaggtaaattctatttcattagcaagcacatagtgagttgtccaatgtcttccagtgccttccacaagcttgaaaaggatttgaaaactcctttgttctttgtactgaaatcacttagcattcccaggttnnnnnnnnnnnnnnnnnngaaggtgaatttgtgttagctgttattttgctccagaaactcccttgatctttcaaagatgccccttcttgacctaagaaaatctgatgcaagatagacattgtggccttccccttgatccctccatgagtttcagagaattaaggttaacagcagacatttgcttcattctttgatttgtctcatactttgatttcnnnnnnnnnnnnnnnnnnnncatcattctcattcccctgtttgattcactaatgattgcaaaatatcaacatataaaatgtaagccgctggtctaaagaaagaaatcatactagggtcctttctttggccaactcaaagcctgaaaagtagccccacgtgggtcagttccacactgttcttttacacgaaggccactgggcagaggcctgggctttttttctcattactgaggactaatatcttgggattccttatgagaaaagtgatacttgatgtttctggcagtgtcatctgagatgttctgacttgcttatacgtgtagaaaagcagtttctctctttcagaggccaaccctga

SEQ ID NO: 41879 - DNA, 276 bp, Macaca Mulatta
  misc_feature (1)...(276): n = A,T,C or G
cagcccccgggttcttgtcagtgggatttgtgctgctggaagcttcgtcctggttgccttttctcattctgtggggaccggcctgtgtggtgnnnnnnnnnnnnnnnnnnnnnnnnnnnnnnnnnnnnnnnnnnnnnnnnnnnnnnnnnnnnnnnnnnnnagctatttcttgttgctcacatctcctgaggcccaggaccctggaggggaagaagaggcggagagctcagcccggcagcccctcataagaaccgaggccccggagtcgaagccagg

SEQ ID NO: 41880 - DNA, 560 bp, Macaca Mulatta
  misc_feature (1)...(560): n = A,T,C or G
gtaacaagaaatgcatgcatctgtagcaagaaagatggatgctagagagagagagagggacttcctggtgatgagagcaggtggaaaatatgctcagtgtcaggagggtgnnnnnnnnnnnnnnnnnnnnnnnnnnnnnnnnnnnnnnnnnnnnnnnnnnnnnnnnnnnnnnnnnnnnnnnnnnnnnnnnnnnnnnnnnnnnnnnnnnnnnnnnnnnnnnnnnnnnnnnnnnnnnnnnnnnnnnnnnnnnnnnnnnnnnnnnnnnnnnnnnnnnnnnnnnnnnnnnnnnnnnnnnnnnnnnnnnnnnnnnnnnnnnnnnnnnnnnnnnnnnnnnnnnnnnnnnnnnnnnnnnnnnnnnnnnnnnnnnnnnnnnnnnnnnnnnnnnnnnnnnnnnnnnnnnnnnnnnnnnnnnnnnnnnnnnnnnnnnnnnnnnnnnnnnnnnnnnnnnnnnnnngggtcatctggaggcatgagagccctcctgccatcagtgtgggtttccaagctgccttgggctctgtctactgtcgcaaaagctttcaaagatattcattaaacac

SEQ ID NO: 41881 - DNA, 487 bp, Macaca Mulatta
cactctcttatcttttacacagttatctgctgaaatctgtctacagatatggcttgcaaactaggtgttgttttggaggagagagaggataggtctgctaagtgttaatttagaaattatatataatattttaatttcattttgggaatggaacactgggtaagattagcttttaagtggatcagatttactcttcaaggttagaagaatgcctagaaaatagcattatttccctattaattgtcattaatctcaactcacatcagtttttttcaattttattgctttgactcttatctcagaattcaaggtctaaattgacatatttcgggaagagcagggtgtacggggaaacagaactggtaagtagatggttttcccctcccatctgactcagtgttagagaacgctgtttgagacagtgtcgatttcaatatcttgatgcccgattttatcattacagacatcctggtatacagaatagctt

SEQ ID NO: 41882 - DNA, 872 bp, Macaca Mulatta
  misc_feature (1)...(872): n = A,T,C or G
aaaactaaaaataccggtttggttttccccgagggccaattaaaaatattcccttgggccgggggaaaataaaggtgtaaaaatttctggagaaataaattttttcttttggaataaatccccttgaacaagagtgtttttttccaaaaaaccttccagggttacccaggaatttcctttttttggaccctggaaccatttggtttgttgggccccttcttaaacaattggtgaattttcttccctgtntaaataattggccgttccttaacatttaggtagggcgtattctattttcccacacatcttaaagtggaaattttaaccccgggaagccaatatccggtaatttcttcgtaaagaaaaacttgagacccagcttaatttttcagaaaccactgtttgctttagttattcccaaagaacaagtttgcagttttccactttgctttcccccgtgaaattcccagccacaaacagcactgacatctttcttgtagcaacgtgattattctaactatgttcaaaattattgtgnnnnnnnnnnnnnnnnnnnngagaataaaaaagaaaagtaaattgtatatccaagagccatttaaaatatttcttgatttatctgagcctatatgtgcttagataagtttttattttcaagatgattttaaatttctttaaaaatatgaacctatttatttcttctttcaccctgaaaataagcaaaatctgaagggnnnnnnnnnnnnnnnnnnnnnnnntgtattttagatccagggggtacatatgcaggtttgtttcatgggtagtttgcataatggtgaggctcgggcttccagtgaactcaccatccaaattgcgaacattataccccc

SEQ ID NO: 41883 - DNA, 643 bp, Macaca Mulatta
cttcgctactgtcgtgtgctctatcctagaggcgcagcctctgtggccctgtgtcctgcaggtattgggaaatccacagccaagatgacgggactccctgggagcctaggaatggaaccattgcaattcagagatgtggccatagaattctctctggaggagtggcattgcctggacactgcacagcaaaatttatatagggatgtgatgttagagaactacagaaacctggtcttccttggtattgttgtctccaagccagacctgatcacccgtctggagcaaggagaaaaccctttgactgtgaagagacataagatgactgccaacccctcagttatgtgttctcattttgcccaagaccttcagccagagcagagcataaaagattctttccaaaaattgatacttagaaaatttgaaaaatgtggacatggcaatttacagtttaaaaaaggctgtgaaagcgtggatgagtgtgaggtacacaaaagaggtcacaatgggcttaaccaatgtttgacaactacccagagcaaaatgtttcaatgtggcaaatatgggaaagtctttcctcaatttcaaattcaaagagacataagagaagacatactgaacacaaaaccttcgaacatatgtcgaa

SEQ ID NO: 41884 - DNA, 638 bp, Macaca Mulatta
ttcaaaggctacttgaggaaacttgtgattcagatgtcgaagagtcactgtgatttttctcttcatttggctgcaaatttgtctcttttgctgtctgtgctctcaggcaacccatttgttgtcatgggggctgacaaagaaacctttggtcgattaagtggcctaggtgtcccaggcccatttatattagacctctcagtatagcttggtgaatttccaggaaacataacaccattcattcgatttaaactattggaattgtttttctctgaagaaggataaacacagctaacaaccatcacattcttttctactcctctgagaaatttgtctgttcctgtatagtttctccttggatccgttaacaattcacatagtcgctgaatagtaaaagggataccattaaatccagtgacaattttcagtattctttccttcatttcatcaaagggaatatattcgacattagggttgggaggacctcttggctcaggagctgaagttctgaaatcatccatcactttctccagtttgaaaataaaatagcctttaaattgggaccactgaatcattgtttctccagtcttggctacatgacaaagaaactgatccaggacaggacaaacttcctttttccc

SEQ ID NO: 41885 - DNA, 637 bp, Macaca Mulatta
ggggaccggaaaaggctcgagcagaggggtcggaaagggaaaacaacggcggctgcggtgtggttggtggtgaaatgacgaccttggtgctggataacggagcttacaacgccaaaatcggttacagccatgaaaatgtgtcggttattcctaattgtcagttccggtcaaaaacagcacgtcttaaaacttttactgccaaccagatagatgaaataaaagacccttctggactgttttacatccttccttttcaaaagggctacttggtgaattgggatgttcaaagacaagtttgggattacctttttggaaaagaaatgtatcaggttgattttttagatactaatattattatcactgaaccgtactttaacttcacttcaattcaagaatcaatgaatgaaattctatttgaagaataccagttccaagcagtattaagagtaaatgctggggctctcagtgcacataggtatttccgagataatccttccgaattatgctgtatcattgttgatagcggatattcctttacacatatagttccttattgtagaagtaaaaagaaaaagaagcaattattcggataatgtgggaggaaactcttaaccatcatctaaggagatctatcttc

SEQ ID NO: 41886 - DNA, 416 bp, Macaca Mulatta
gctctgcggcctctgttttggcatagccctagtcgacacagcactgctgcccacgctcgccttcttggtggacgtgcgccacgtctcagtgtatggcagcgtctatgccatcgccgacatctcctattctgtggcctacgcgctcgggcccatagtggcgggccacattgtgcactctctgggctttgagcagctcagccttggcatgggtctggccaacctgctctatgctcccgttttgctgctgctccgcaacgtgggtctcctgacgcgctcccggtccgagcgcgatgtgctgcttgatgagccaccgcaaggtctgtacgatgcggtgcgactgcgtgagcgtcctgtgtctggccaggacggcgagcctcgcagcccgcctggcccttttgacgagtgcgaggacgact

SEQ ID NO: 41887 - DNA, 208 bp, Macaca Mulatta
  misc_feature (1)...(208): n = A,T,C or G
ctcaggtggctgaaggcaaaaacgtatttggtgtctgccatatcgttgcatccttcaatgacacttttgtccatgtcactgatctttctggcaaagaaaccctctgccgtgtgactggtgggatgaaggtgaaggcagatgnagatgaatcctcgccatatgctgctatgttggctgcccaggatgtggctcagaggtgcaaggaact

SEQ ID NO: 41888 - DNA, 227 bp, Macaca Mulatta
  misc_feature (1)...(227): n = A,T,C or G
gaagcacatggggcagtgggtggcactgatggagcagcccttccggaacgttccaccctggcttgcgccagccccgcgtgtggccccgggagctcaatttcctgacaactctcagtcctgaggtttcctgtccccgcagaaccatccatgagtgttttgtggnnnnnnnnnnnnnnnnnnnnnnnnnnnnnnnnctgttatttttcccaaggtgagcgtgagcgccc

SEQ ID NO: 41889 - DNA, 865 bp, Macaca Mulatta
ggtatattgcactttcctcatcccttcatcaatggatgaacaggtaggtgtatttcctgtcttagctattgtgagtaccacagtacccagggcaaggcaggtatctcttccacacaggaatttcattggctgtaaatgtatagccaatggcaggatggctagatgaaatggcgtttttactttgaggaacttctggctgtttttcctaatgtgtgtacaaattgacattcctaccaatcgtgtattagaagagtttccccttctgcaaatctataccggttgtttccttttcaaacttttatttttgttttaggtaacattcattctatgagggtggaagtggtatctcagtgtggctttccttgacattctcatgaggattaaagcttttgagaaacttttcttttagctgtgagtcaatgttcggtcctacttttcggaactgcctatttcctgtcccttggtccctaagcttaccttaggggtgttgtgtcttttgcttcgtcgtttttattttttccccccacgatgggaagtggcttagggttccttggcgcggttactttctacagcggaccccccttttgaaaagacccgggattgtttcccgaaaagatgttcctttttaaatcttggccgaaagaaggctggtcttctatcagggggatgacacggcgttctccctttctcccgccgcacctaacaatccgccccaggtcctccccactagcgaacccacacgttctcttgttaacacccccactgtgtctgaacactctattgcgggcgcccacctaggcactacacatgctcgagttacagcctccacactatccgctgttgtgactcctgaggcccatatatg

SEQ ID NO: 41890 - DNA, 506 bp, Macaca Mulatta
aagttatacctggtaacaatcacccatttctccctaaaaggcctagaagagaaaccaagcactaggacacatccactactgccaaaggagcagaagtactgctggaacctggacagatcgaaagcaagggatgactgtatgctgagggctcagcagaggtctgtcctcaccaggtcccagtgcaactagtctagtccagttggccaccatatccgtcctccttttcttcaataaaataaagtgtggttaggtatacagctacctaaaatgaaaattacatttccaggttcagttatcctgaattgcacttcttttgcagctcagggtactcatgtctaaattgcggctaaccagatataagcaggaggtctcatatgacagcttccaggagtcttccttaagatactggccataagcaccctctgcttagctattcatcccttactacctcctgtagcctaggatgtagataatctgcatatgggacagtgaggtcgaagtcatgc

SEQ ID NO: 41891 - DNA, 1087 bp, Macaca Mulatta
agaggctccggacaccgcggctggattggagacgacatgggttcctcaggggacgacggctatcggctcctcaatgagtacaccaacggcttcatggtgtcccaggttctcttcgccgcttgcgagctgggggtgttcgaccttctcgccgaggccccagggcccctggacgtggcagcagtggctgcaggtgtggaggccagctcccacgggacagagctcctgctggacacctgcgtgtccctgaagctgttgaaagtggagacgagggcaggaaaagctttctatcaaaacacagagctgtccagcgcctacctgaccagggtcagcccgacctcacaatgcaacctgctaaagtacatgggcaggaccagttacgggtgctggggccacctggcagatgctgtgagagaaggaaagaaccagtacctgcagacgtttggcgttcccgctgaagacctttttaaagccatctacaggtctgagggtgagcggctgcagttcatgcaagctctgcaggaggtctggagcgtcaacgggagaagcgtgctcaccgcctttgacctttcggggttcccacttatgtgcgaccttggtggtggccctggagctctggcgaaggaatgcctgtctctgtatcctggatgtaaggtcaccgttttcgacgtcccagaagtggtgcggacggcaaagcagcacttctcattcccggaggaggaagagattcacctccaggaaggggatttctttaaagaccctcttccggaagcagatctgtacatcctggccaggatcctccatgactgggcagatggaaaatgttcacacctgctggagagggtctaccatacttgcaagccaggtggtggcattctggtaattgaaagcctcctggatgaagacaggcggggccctctgctcacgcagctctactctctgaacatgcttgtgcagacagaagggcaggagaggacccccacccactaccacatgctcctctcctctgctggcttcagagacttccagtttaagaaaacaggagccatttatgatgccattttagtcaggaaataactttttcttgtga

SEQ ID NO: 41892 - DNA, 733 bp, Macaca Mulatta
  misc_feature (1)...(733): n = A,T,C or G
gggggacaccattcacatagatgacagtgtgaatggctccccctggagttgtgtggttggtggccttagtaataacttgttcactggtgttctgatggcacatgagatctttcttacaacagtgttcatgctctgccttgtatcctgtactcaagtcctatttcctctactaggttataaattccttgaaggaagggaaagtgctttcttcatctttgtgtcccctgccggtaacacacaaaaggattgttgaatggtcagatatcctatctgctggtttactgagtttgaggctctgtgacatgggtttatcaaccatcctgttcctcacataggctttcctccccctgtgctcaccctgcatcattcttgctagttcctgaggaaggcatctcctcttcaaatcacttctctgcagtcaaggcaatgatattcattaggcactagaggcacaatgactaaataatatggtacttttcaggatctaaacaattttagagnnnnnnnnnnnnnnnnnnctttaaaacacaaaaaggcacaggatcgaatataagtgtttgcacaaagataaaaccaaataatttgtcactttctttaaatgttaaatttagcagtcattactgagaaatcatagcaaactgtaaattaaatgaataacccagcaaccaaaataaggttcaaaaaacaaaagattgcaaaaaatttctttcaaaaaaatggtttttggggccaa

SEQ ID NO: 41893 - DNA, 943 bp, Macaca Mulatta
  misc_feature (1)...(943): n = A,T,C or G
agaggcaaatacgaatcgcggcaggaaggtctgaacctacatctggcaactggaaattatcagcaaaacgttatcaagatattctgtccttccgaaatccacaagatgtgtgtgcaatggatattgcaatctcaaaagtttccttctttcttttcttttccttccttccttctcctttttttaaaaactaattataaaggctatattttctaaatgcattggcatatgtttctgtacattttagattggcaagtggaagcgtgatgagaaagaagtggcctgtatggttcaggagaactgggtcacggttgtgctgtaatgaaatgcattatgaaaaaaattgagagcgaatggtgggtcctttgggatttgagatcagcaacagtttgcttcataggcctcttggatgcctttcttccattaagagaaaagaaagaaaaatgggataagagcacggcttgttgctggttttttcaaaattgttgttggccattgccctaaaatttggattggcaaaaaacccattactacttggggatcccaaggcgaaagacaaacgggggccaaaaccccggtgcatattttttttaaataaccccccccattttgtgggcccagagtaaaaaccctgggggcggggggaaaattttccctcccttggttnnnnnnnnnnnnnnnccnnnnnnnnnnnnnnnnnggcctttcgcgctcagacaacactttaccccgggggtctcccttaagattgaagagtttcggagaaagccccctaaccccgtggcccaatttgtttaaaggggtttataaatgggttacccagacgcggtactcttttaaacacgtgtaatccacctttattctccaacaaaaaaattttcccctgagtcgtagatcgtaaaaaaaacctcctttttggttttttgtccccacacccaaagtaacg

SEQ ID NO: 41894 - DNA, 1083 bp, Macaca Mulatta
  misc_feature (1)...(1083): n = A,T,C or G
gnnnnnnnnnnnnnnnnnnnnnnnnnnnnnnnnnnnnnnnnnnnnnnnnnnnnnnnnnnnnnnnnnnnnnnnnnnnnnnnnnnnnnnnnnnnnnnnnnnnnnnnnnnnnnnnnnnnnnnnnnnnnnnnnnnnnnnnnnnnnnnnnnnnnnnnnnnnnnnnnnnnnnnnnnnnnnnnnnnnnnnnnnnnnnnnnnnnnnnnnnnnnnnnnnnnnnnnnnnnnnnnnnnnnnnnnnnnnnnnnnnnnnnnnnnnnnnnnnnnnnnnnnnnnnnnnnnnnnnnnnnnnnnnnnnnnnnnnnnnnnnnnnnnnnnnnnnnnnnnnnnnnnnnnnnnnnnnnnnnnnnnnnnnnnnnnnnnnnnnnnnnnnnnnnnnnnnnnnnnnnnnnnnnnnnnnnnnnnnnnnnnnnnagctttaaccatttccttataataaaaccttggtgggggcataaatccatacacaggcgcttaaaatgtcccgccgaaaaaaacctgaattttaaaaattctccttaatttccgacggtaactccctactcctgggaaaggatccaaccattacacgccccgcattgggaaaaaaatttgagaatagaccctattccctagcctaaaaagtttaccaaacaaggaacccccccacacccacatagaaaaaaaagcccccttattattcaccacggggggggaggcagaccaaaaacccataaagaattttcgcgtattcccaaatgaaaagtatttttgggtcacttcaatagataagggggaanaatgtaccaactcatcctaaaatttttttcacacacataaatttattgattaattccaatgcgcgacattggggccaccgggaacattatatatagacgtttgagtcttaggtagacgctcgaaaaataactgccgataatctcggttaatacctcaatataacgttcaaatctgggtgctccccgggacgaggaaactatatcctaatatacgccctgacaccacttctcccatctatnggagatgtcgcacctctctctgttatcgcggtttttaactaaagactaacgcaccagtgggtcataaaaag

SEQ ID NO: 41895 - DNA, 714 bp, Macaca Mulatta
  misc_feature (1)...(714): n = A,T,C or G
gggagacatcctgtgcatacctgttgccaaattaactttaactatcagcacctaaataaacaagtaagattttatagcaagcttagaaaaggatattttacacgtattatatattttacatatatgtactagacaaatatacatttagaaaaagcataaacccatgaaggagagagaatcattagtaataacaaatgcatattgtatacttattgtgagcttataattgttacatagagacagtaaaatgcatgatttgaagagatttacaatctcataaagctaattttatgtgtattttaaaaatgtataacatataggaaaacagtgggaaagaataccaccccacagaaaaaaggaaaccgggatttcaagcttcaattcacccatctttaactattcaattaaaccattttaaccctcatttgttggaacctggnnnnnnnnnnnnnnnnnnnnnnaaggggaaaaaataccctaaacctttaagggggttacctcctgaaaggctaaaattatcccaaatggggaattttttaaccggcccctttggaaaccaaagtaccattggttaaaaccccttaaaaccttcccgggggccccataacactggaaaaatttagggggccttttgggagaaccccttaaagggtttnggaaaaccccaaaaccccgcaccccccggnnnnnnnnnnnnnnnnnnnnnnnnnnnnn

SEQ ID NO: 41896 - DNA, 773 bp, Macaca Mulatta
  misc_feature (1)...(773): n = A,T,C or G
gggcaaagagcacagctgttggcaagcccagccaagagtacactgacaacgttactctcagagagagagagttctgggactggaaagggcctctagattatctactccaaacccctccatttaagatgaggaaacaggtcgggcacaannnnnnnnnnnnnnnnnnannnnnnnnnnnnnnnccgaggcaggtggatcatgnnnnnnnnnnnnnnnnnnnnnnnnnnntaacatagtgaaactccatccctactnnnnnnnnnnnnnnnnnnnnnnnnnngtggtggcaggcnnnnnnnnnnnnnnnnnnnnnnnnnnnnnnnnnnnnnnnnnngcgnnnnnnnnnnnnntannnnnnnnnnnnnnnnnnnnnngcnnnnnnnnnnnnnnnnnnnnnnnnnggagcaagactgnnnnnnnnnnnnnnnnnnnnnngaggaaacagactcagagagcagagtgacttatcagagctcacctggctaattagtgacaggaccaggtctggaacctaggtttccatactcctagttcagttcttctttcactccataatgctaacaagcattagcaaaataaaatgcatatagcttctattctagactctggatgctgggctgacatatcgatcacctgtccttccagtggtttaatgtccaagacactgagttctcaagaaacatattggaagggggaccatttaagaaaaataagctccatgctttaacagaaacgtgatattggggtaccagtccaaagggaaagttgcccag

SEQ ID NO: 41897 - DNA, 793 bp, Macaca Mulatta
  misc_feature (1)...(793): n = A,T,C or G
gggactcactccttcctgcccccacgttgggggaggtgtctgcttctcttttgccttctgccatgattttaagtttcctgagtcctcccaagccatgtggaactattgttgcaccattagaagctagggtgctctacagacagacagatggctgaaagnnnnnnnnnnnnnnnnnnnnngacaaccaccattattcttagctcatctcttaagagttatgaagttgcaactgccctagaaaatcgaagccacaaagttcgatattcagattcagtggaaaatggatcaattatattttctctttctggagttgcatttttattaatggatactaaggaatgtattctgtcaactgaagaaacattgctagccaaaattgagaaatttattaacattcaccaaaatagttttttggttttgtctgctgccctccatgggcctgaagaatggaaattgatgttcagaattcagcagagattcctgggtcgtaacttacgaatacttccagtacacaacacagtaaatgctattaatcttatgtgcactatagcaaagactacctccaaaccatacatagatagcatttgctacagaatgataacagctaaagcttacatcattgaggcaaagtcctgtttgggaaacacttcagaagatacaaactgaatagtggattcagtttaacccaaattagagtaccaactttatgctcttctcaaaggatgtgaaaataaattagaactgtttaaattataatccaaatatcctatttaaagacatatttaattttgat

SEQ ID NO: 41898 - DNA, 701 bp, Macaca Mulatta
gaatccaaagttgagctttatcgctttaatgactgatgaaataatatccaatgtgccaatccttatcctgggtaacaaaatagacagaacaatgcaatcagtgaagaaaaactctttgagatatttgggctttctggatagaccacaggaaagaggaacgtggccctttaggagctgaacgctcaccccgtggaagtgttcatgtgcagcgtgctcaagaggcaaggcgagggcgagggattctgctggctctcccaatatattggctgatgtttggacagtgaaaataagagtttttcttctctggactgatcctattcacagcttcttcatggacttttctaatagaacgaggaaaggtctccaatcatctccaatcatgtctggcgttgagaagccaagaatctctgtcaactctctcatcacccagtggtgaaatgttctcttctccacactgttggggaggtaatgctgccccacatgctggtgcaggtcagtatcctggggcttggaagctggcagggtttgctgagtgaagctgtgcaccatcatggcgcacctgaaaagaaaaacacatctcatcactctggttgatttcaaaagaaaatgattctatttttaaagaaagtgttgttaatataattgataccccttctaactttctgagtccaaaatttacttagtccagagttttctattct

SEQ ID NO: 41899 - DNA, 401 bp, Macaca Mulatta
agcaaaagaaattcaatggatggattagtatttatccccctttgggatattttaaaactctactaaaatgaggattagtaatataatgacctgctaatatattttaagaacatgttttaaaaagatacactctatcacatatttaagcaaacatcacatttggagaagaggaaatcataaaatcatcctagaagactatcagagaaattctgttgccaccagttacacttgacaatttagttgaagcccagaaaggtatattcatccctcttacctgtagtctatattagggcagtactctagaacgcccacatttccaccaactcagtaaccttgaggggagctggttggcacctcgcgaagaactctttccctgtcatttgcagtaacaaactccagtc

SEQ ID NO: 41900 - DNA, 358 bp, Macaca Mulatta
aggcaccgtgtttgtcctggcggtgggcgttgtgctgtcccccttggtgtttatcctgctctcttacagctacattgtgagggctgtgttacaaattcggtcagcatcaggaaggcagaaggccttcagcacctgcggctcccatctcactgtggtctcccttttctatggaaacatcatctacatgtacatgcaaccaggagccagctcctcccaggaccagggcaagttcctcacgctcttctacaacattgtcacccccctcctcaatcctctcatctacaccctcagaaacagagaggtgaagggggcgctgggaaggttgcttctggggaagagagagctaggaaaggagtaa

SEQ ID NO: 41901 - DNA, 881 bp, Macaca Mulatta
  misc_feature (1)...(881): n = A,T,C or G
gggccttttaaacttgatctccggggtgctctcccttttcggccgcgacgcgtgactgggattatgccaccatgactagaagaccccctaatggagtttatctgcactgcaaggggccagttgtctcggaatcatcctctgttgatnnatctgnnncatcnntccaggaacnnagctccaacaacncaaaattccttggtttttccaaggacaaaagacaaaaatccaggnnnttncnnacaacaaaannnnatatnaaatantaaaatacaaacaaaacnnnnnnnnnnnnnnnnnnnnnnnnnnnnnnnnnnnaaaatatcaannnnnnnnnnnnnnnnnnnnnnnnnnnnnnnnnnnnnnntaaacaaaaaattaaatgaaagacatagtcaaaaaagttattataatcgtcccaattattgacatattaggacaaaangcgagcagaacaaaagaacatgaaaaaaacacggccgccnaatatttactgttcaatgaaattgttacaccctacagaaaaataccattgtgatcacaaacaccacggagaggaaaaataataacaaaaaaagcaactaaaaaaanaaccgcgaagagtataaaaatgaaaagatcataataaccccaccccattaagtaaaaacgcacccaaaaaagaataaacaaaaaaattaaacacataaaaataatgcgcctcaaaaacccccaataaacccatataaaaaatacgagccggtaactcctctaataaaataaaagaaagaaaattagtagcttagacaaacgtaaatatanaaatatagaagnggagaaaataaaaaatatgaataaacatataaagaacaccaccttattaaccgctcgctattacacaaaag

SEQ ID NO: 41902 - DNA, 771 bp, Macaca Mulatta
gggcccccgccccgcccagctccttgccatttctcgttccctatgttgtgttttggagtctggagcaatgaagacctctgtgctcttaggcgggtccttcctcttttctttattgttttggaattcttctggactcaacccagctgtgtaaagtacagagtagcacagcagccaccgccctcaaatggcttttgagcacgtgaagtgtgaccaatctgaattgtgctacaaatataaaacacacatcagttccagaaaattagtataagaaatcaataactgcaacatgctcagatgattggttgttagtcagaatgaaaataaggccctttgataacaacacagaagttagaattggcgacatacatctgggagataactgtcctgtaacaagactgttgtcatttaactacgagttttcttatcctgtcacttcttgtgggatcaagaaaattatgttccaaagaaatgatgatgccatattatcagagatcagttacagaccaaagtcgcatactacttatgaatttccagtggtttgctttgtgaagaggctttaattcccatctgcgatgcattttgggaatgagtgggtttgatgccaacaccttgaaaaaaaaatccctccaaaatcaaaaacaagagtcaccagctcccacacaaagtaaaacatggggcacctaattttaaaagtgtttaataaaggagcgactcctccaagaagtcacctgcattcattaatggccggtgttgaaacccttcttccttcca

SEQ ID NO: 41903 - DNA, 128 bp, Macaca Mulatta
gttgtttggtcacaaataagaacaaaagtcatttcaaatatatatctgactttactgctttctgatagagaattgctttctacagtgaatttcttttcatgttaagaaaaagtaacaaaaattcatgt

SEQ ID NO: 41904 - DNA, 776 bp, Macaca Mulatta
  misc_feature (1)...(776): n = A,T,C or G
gggcgaaaaagccagcccctcttggagactggagaggcagaggactactacggtaggcgaagttctgatggaatcatgcctgtcaaatgagatcttaaagcagatgcccaaataagagagtatattatattttatctaaatcttaagtgggtaacattttatgcaattgaaatgaatggaatattttcctcttgtttagttgtatctgtttatatttttctttgatgaatgattggtcatgaggcctcttgccacactccagaaatacgtgtgcggctgctttgaagaattatgtgtctggtcacttatttctctaaaattatctcattgcctggcaatcagtcttctcttgtatacttgtcctagcacattatgtacatgggaaatgtaaacaaatgtgaaggaggaccagaaaaattagttaatatttaaaaaaatgtattgtgcattttggcttcacatgtttaactttttttaagaaaaaagttgcatgaatggaaaaaaaatctgtatacagtatctgtaaaaactgtcttacctgtttcaattccttgctcataccccatgtaatctagaactaaatatggtgcgtggccatatttaaacacctgagagtcaagcagttcagactttgatttgaagcacctcatccttcttttaatgcgaacactatcatatgggcattccttactgagggattttgtctaaccatatgttgccatgaaattaacctcgtgccgccctttntctaagatcanaacagtttgattttggat

SEQ ID NO: 41905 - DNA, 1093 bp, Macaca Mulatta
  misc_feature (1)...(1093): n = A,T,C or G
ggnnnnnnnnnnnnnnnnnnnnnnnnnnnnnnnnnnnnnnnnnnnnnnnnnnnnnnnnnnnnnnnnnnnnnnnnnnnnnnnnnnnnnnnnnnnnnnnnnnnnnnnnnnnnnnnnnnnnnnnnnnnnnnnnnnnnnnnnnnnnnnnnnnnnnnnnnnnnnnnnnnnnnnnnnnnnnnnnnnnnnnnnnnnnnnnnnnnnnnnnnnnnnnnnnnnnnnnnnnnnnnnnnnnnnnnnnnnnnnnnnnnnnnnnnnnnnnnnnnnnnnnnnnnnnnnnnnnnnnnnnnnnnnnnnnnnnnnnnnnnnnnnnnnnnnnnnnnnatcctttgctccgaaccctcgtgcttagggaggccagttggaccatgcggtcgaggcactcacccccgtcataagaccaccattgcaacggtacccctggtccttgaacctagctcttgctgttataaatttgccaatacctcggaattgtgattaagtctaacctttgtatacatgcaagcaactaagttgctctcacatacgaatatgagcgtagtacgagaaaagaagaggaaacgtattctccagaggcttcaagtaaattaggaaacacaacnggatattcagggacggtcggggtgaagatatgctaggtgtgttttatatgtctgatagattgaacgtgaaaagacgtgtaaaggagaaagtgaaagttgtgatatgagagagaggagaatagcgatatatgcagtcaatagatacgtaacgctgaggaagcggagaaggagtcatagacgcgaggagttgcggaacacgcatgataagtagtatataatgattaaggacaaaatagaggagacgataaccacatgaactgtagaaagaacntagaatataggtctataattatcaattatatggagatatggaatagaaagaattncgatatgcgagtgagaagagatacacagtggcacaggaccgcatcatgtacgcaggcacatatgtatagaggaataatancacgtaatctctgttcgtcgcagttcactctatatatctcttgacgcgcgacagatgataacgtggtagtataagctngtatccgtacacg

SEQ ID NO: 41906 - DNA, 808 bp, Macaca Mulatta
gggcttatgactctctgcaaggtttatagtggaggcagggggagtttctcagttctcctgtctaacctcagtctttggttcttcctgttcttctggggtttgctcagcactcctgctcttcccacagtggcaacagacctctgctttgtaccactgccaggtcctgggcccaagtaaacttcctgacctccccctggggcagatagcattttcttctgctccttttctcaatgatactattcctttgcctggaatctatgacaggaagttttcctgccacttttccagttgcttattatttagttcaaagcctatggttggaacaggtaagtataccaggcccaaggtgttcctaagcttctccaacttgatgtgggattcaatctccaaactctgtcatctgtacatattgtcagcatttggttttaagttttatctagagtaggcctttctgtagggcaaaggcgtctgtttttcctaggctcacaactgaatgccaaaggttgttaacaagaggggtgatgagggctcccactctgggcattggtggaaccttccaaccccccgccactatcctgaccattttctgccccacaccttaaccccccaagtgaagctgcctcttctatgtcacgcttcatggggggtttccctccctgcctggcttttccagggaacagccctcgaaacctgtccccttcactaaggaaaaccccacctggtaaccttcgaagccccacccaacgcccggcccaacttggccccaaccctcccccttttcttctcgcccatacccctccaatcccca

SEQ ID NO: 41907 - DNA, 3237 bp, Macaca Mulatta
  misc_feature (1)...(3237): n = A,T,C or G
tgcagatcggtgaggagacctcagtgtttatcactcagttgctgggaactgtaaactttgagaacatggatactttctacagaagagggatttcttattttggaacnnnnnnnnnnnnnnnnnnnnnnnnnnnnnnnnnnnnnnnnnnnnnnnnnnnnnnnnnnnnnnnnnnnnnnnnnnnnnnnnnnnnnnnnnnnnnnnnnnnnnnnnnnnnnnnnnnnnnnnnnnnnnnnnnnnnnnnnnnnnnnnnnnnnnnnnnnnnnnnnnnnnnnnnnnnnnnnnnnnnnnnnnnnnnnnnnnnnnnnnnnnnnnnnnnnnnnnnnnnnnnnnnnnnnnnnnnnnnnnnnnnnnnnnnnnnnnnnnnnnnnnnnnnnnnnnnnnnnnnnnnnnnnnnnnnnnnnnnnnnnnnnnnnnnnnnnnnnnnnnnnnnnnnnnnnnnnnnnnnnnnnnnnnnnnnnnnnnnnnnnnnnnnnnnnnnnnnnnnnnnnnnnnnnnnnnnnnnnnnnnnnnnnnnnnnnnnnnnnnnnnnnnnnnnnnnnnnnnnnnnnnnnnnnnnnnnnnnnnnnnnnnnnnnnnnnnnnnnnnnnnnnnnnnnnnnnnnnnnnnnnnnnnnnnnnnnnnnnnnnnnnnnnnnnnnnnnnnnnnnnnnnnnnnnnnnnnnnnnnnnnnnnnnnnnnnnnnnnnnnnnnnnnnnnnnnnnnnnnnnnnnnnnnnnnnnnnnnnnnnnnnnnnnnnnnnnnnnnnnnnnnnnnnnnnnnnnnnnnnnnnnnnnnnnnnnnnnnnnnnnnnnnnnnnnnnnnnnnnnnnnnnnnnnnnnnnnnnnnnnnnnnnnnnnnnnnnnnnnnnnnnnnnnnnnnnnnnnnnnnnnnnnnnnnnnnnnnnnnnnnnnnnnnnnnnnnnnnnnnnnnnnnnnnnnnnnnnnnnnnnnnnnnnnnnnnnnnnnnnnnnnnnnnnnnnnnnnnnnnnnnnnnnnnnnnnnnnnnnnnnnnnnnnnnnnnnnnnnnnnnnnnnnnnnnnnnnnnnnnnnnnnnnnnnnnnnnnnnnnnnnnnnnnnnnnnnnnnnnnnnnnnnnnnnnnnnnnnnnnnnnnnnnnnnnnnnnnnnnnnnnnnnnnnnnnnnnnnnnnnnnnnnnnnnnnnnnnnnnnnnnnnnnnnnnnnnnnnnnnnnnnnnnnnnnnnnnnnnnnnnnnnnnnnnnnnnnnnnnnnnnnnnnnnnnnnnnnnnnnnnnnnnnnnnnnnnnnnnnnnnnnnnnnnnnnnnnnnnnnnnnnnnnnnnnnnnnnnnnnnnnnnnnnnnnnnnnnnnnnnnnnnnnnnnnnnnnnnnnnnnnnnnnnnnnnnnnnnnnnnnnnnnnnnnnnnnnnnnnnnnnnnnnnnnnnnnnnnnnnnnnnnnnnnnnnnnnnnnnnnnnnnnnnnnnnnnnnnnnnnnnnnnnnnnnnnnnnnnnnnnnnnnnnnnnnnnnnnnnnnnnnnnnnnnnnnnnnnnnnnnnnnnnnnnnnnnnnnnnnnnnnnnnnnnnnnnnnnnnnnnnnnnnnnnnnnnnnnnnnnnnnnnnnnnnnnnnnnnnnnnnnnnnnnnnnnnnnnnnnnnnnnnnnnnnnnnnnnnnnnnnnnnnnnnnnnnnnnnnnnnnnnnnnnnnnnnnnnnnnnnnnnnnnnnnnnnnnnnnnnnnnnnnnnnnnnnnnnnnnnnnnnnnnnnnnnnnnnnnnnnnnnnnnnnnnnnnnnnnnnnnnnnnnnnnnnnnnnnnnnnnnnnnnnnnnnnnnnnnnnnnnnnnnnnnnnnnnnnnnnnnnnnnnnnnnnnnnnnnnnnnnnnnnnnnnnnnnnnnnnnnnnnnnnnnnnnnnnnnnnnnnnnnnnnnnnnnnnnnnnnnnnnnnnnnnnnnnnnnnnnnnnnnnnnnnnnnnnnnnnnnnnnnnnnnnnnnnnnnnnnnnnnnnnnnnnnnnnnnnnnnnnnnnnnnnnnnnnnnnnnnnnnnnnnnnnnnnnnnnnnnnnnnnnnnnnnnnnnnnnnnnnnnnnnnnnnnnnnnnnnnnnnnnnnnnnnnnnnnnnnnnnnnnnnnnnnnnnnnnnnnnnnnnnnnnnnnnnnnnnnnnnnnnnnnnnnnnnnnnnnnnnnnnnnnnnnnnnnnnnnnnnnnnnnnnnnnnnnnnnnnnnnnnnnnnnnnnnnnnnnnnnnnnnnnnnnnnnnnnnnnnnnnnnnnnnnnnnnnnnnnnnnnnnnnnnnnnnnnnnnnnnnnnnnnnnnnnnnnnnnnnnnnnnnnnnnnnnnnnnnnnnnnnnnnnnnnnnnnnnnnnnnnnnnnnnnnnnnnnnnnnnnnnnnnnnnnnnnnnnnnnnnnnnnnnnnnnnnnnnnnnnnnnnnnnnnnnnnnnnnnnnnnnnnnnnnnnnnnnnnnnnnnnnnnnnnnnnnnnnnnnnnnnnnnnnnnnnnnnnnnnnnnnnnnnnnnnnnnnnnnnnnnnnnnnnnnnnnnnnnnnnnnnnnnnnnnnnnnnnnnnnnnnnnnnnnnnnnnnnnnnnnnnnnnnnnnnnnnnnnnnnnnnnnnnnnnnnnnnnnnnnnnnnnnnnnnnnnnnnnnnnnnnnnnnnnnnnnnnnnnnnnnnnnnnnnnnnnnnnnnnnnnnnnnnnnnnnnnnnnnnnnnnnnnnnnnnnnnnnnnnnnnnnnnnnnnnnnnnnnnnnnnnnnnnnnnnnnnnnnnnnnnnnnnnnnnnnnnnnnnnnnnnnnnnnnnnnnnnnnnnnnnnnnnnnnnnnnnnnnnnnnnnnnnnnnnnnnnnnnnnnnnnnnnnnnnnnnnnnnnnnnnnnnnnnnnnnnnnnnnnnnnnnnnnnnnnnnnnnnnnnnnnnnnnnnnnnnnnnnnnnnnnnnnnnnnnnnnnnnnnnnnnnnnnnnnnnnnnnnnnnnnnnnnnnnnnnnnnnnnnnnnnnnnnnnnnnnnnnnnnnnnnnnnnnnnnnnnnnnnnnnnnnnnnnnnnnnnnnnnnnnnnnnnnnnnnnnnnnnnnnnnnnnnnnnnnnnnnnnnnnnnnnnnnnnnnnnnnnnnnnnnnnnnnnnnnnnnnnnnnnnnnnnnnnnnnnnnnnnnnnnnnnnnnnnnnnnnnnnnnnnnnnnnnnnnnnnnnnnnnnnnnnnnnnnnnnnnnnnnnnnnnnnnnnnnnnnnnnagcttgaaaacaagggccaagtgatgaagactgaagtcaagaacggccatgttcttttctatttggaaaatgtaagtttagcaataatttt

SEQ ID NO: 41908 - DNA, 761 bp, Macaca Mulatta
  misc_feature (1)...(761): n = A,T,C or G
tcactttgtttttaggaagtgtttcactttggaaaccccaaaggaaaaatcttgggcgtttaaaagtgttcaaaatggaaaaatttcggggtttggttacacttaggttaaggcaactttcagagccaggcctttgggggccccttgggaagtttcgaatttcccggtaaaatatgggggagggggtgtttccaccggacttttttttcccccgaaggaagggcacttcattccaacaaaattaacgcacaaatgccccaaaccccctggcacatacatagcaggctctcagtttccctggaatgaaagaaaccaacacaagcaatgatgtgcatgactattactaaaatagtaatggaagaccagcttgcagtataaagcacaggtgaatggctgtccctcagggtttttctgcctctcccctctgcaaagctctgatgctggggccatgttaccaccgtgaggctccctctctctccgaaccgctgctccagcaggtaaggacagagaaactagggggcctcgaggaaagtgttggttcggaagatggaggagacaatctttccggtggcattgatggtgccttcgctgtctgagctggactcggagtcgctcgctcnnnnnnnnnnnnnnnnnnnnngagaggaagaaagaaagaaacaggaaggaacgaatgnnnnnnnnnnnnnnnnnnnnnnnnagcctttgcttttgtattccttttgacccttaaagggcttcctgttcctcaccgccacccc

SEQ ID NO: 41909 - DNA, 172 bp, Macaca Mulatta
cctagacgaggtcccctggactctccaggagctggaggcgctgctgctgcgttcgcgggatccccgggcaggcccggcggtccccggcggcctgcccaaggacgcgctggccaagctgtcgacgctggtgagccgggcgctggtgcgcatcgccaaagaggcgcagcgcctg

SEQ ID NO: 41910 - DNA, 618 bp, Macaca Mulatta
gtccccagaaagagcccagttcccactaaggcgtcacagatctgtctgctgttgtctgaaagcccctggagaaatcccacaccctggggatttcttaaacctttgattaactgggattctgtcctgtacttcaaagaaagaggaatatccaagtaacaacacaagctcaccgccagaaccacgccagctgcagctctcaggaggtagccacgcccgggctagtgctacaggcagctgcaccaaaggtgtacaagcggtcacgtgacaacctgaacgctgaggcccaaggactggcgggtgctcaggtgtcgaaagcacagaatcccattaccaggttctactctcggaaggaacagtcaatcttgaagatcttcactaagcagagcgtctgaggtttactggcttgaagactcagcaaactaagagttcagcaaaccagaacagcctctctggaggggacccgtgcctctgccggtgctggagcctgcaggtccctggtctgtgagcttccccagaaaccctccaatctcatccatgcagctgccagagtgaatgttcaaagaggagaacctgagcacagtagctgggggttttgcacgccctgagactcgaccccaa

SEQ ID NO: 41911 - DNA, 419 bp, Macaca Mulatta
  misc_feature (1)...(419): n = A,T,C or G
aacccctgcccccggagcgcccagcagtgccccctgaggaggagctgcagcacctgaggaaggaactagagagggtgtcagcagagctccaggcccacgtggaaaaccatcagcacgtaagtctcctgaaccagccacaaaaggagaggcttcaggagcaggaggagaagcttcggaagcaggaggagagacttcgagagcaggatgagaagcttcagcagctggccgagccacagagcggcgtcgaggagctgnnnnatgagaaacagagcgcactgcagttggagcagcaagtggaggagctacaggagacgctgggcgaggtgaagtagattgtaccctccccccatccaagaagggctgggaaagcggcacagcctctggggagggggagtgccaggccagaagcagcctccagc

SEQ ID NO: 41912 - DNA, 764 bp, Macaca Mulatta
ggcatgaggtcctgtctaatacctgtttaattatgcttatgttgtgataaactgtggaatcctcctccccgaatgagtggctctaatagtgagtactttgtttgcctcacacttgtaggatcaaagattcatttttaacccatgccagaatatgtttccattttaaaagtggaaactagtcctctgcatacatttgcacctgtcaggaagtgtcccaaaaatgtgaactgcataataatcattggcagtttatttgcagtatgccttcttgagaacattttaaaaatcttaagataaaattccttactttttctattaatgactctttagaagtagtagtcttcccaacaaggtaaaaacctcatttctgatgacttttccattggttttatttacttctaaaaaaattaataaaactcacattttcaatatattttaatgaactttcatctgggattgatgaagcctgtatcaagagatgatatatcagaccagaaataatcgctgcaaccttgaaaagccctgaagatgggttatggcctcgtttaacagaccagttgtagcctttcttcatttgtaccaggtacactaaagttatctgtgcagataatattatctgtgtatttaatatttcacctcattgaagttttgtttttgtaatgaattaataaagaagttatagtttgtctgcatttatattgagtagagtacagttatattttcactcattgaaaggaaccagtttataggggaaaaaaaacttt

SEQ ID NO: 41913 - DNA, 656 bp, Macaca Mulatta
ggggggaggcccgacaggagacatacgactttgctgttggccatgtcttcatcagtggctggagacaaggccagagcggcaagagtgtccagtatgtaaagctgggatcagcagagagaaggttgtcccgctttatgggcgagggagccaaaagccccaggatcccagattaaaaactccaccccgcccccagggccagagaccagctccagagagcagaggggcattccagccatttggtgatactgggggcttccacttctcatttggtgttggtgcttttccctttggctttttcaccaccgtcttcaatgcccatgagcctttccgccggggtacaggtgtggatctgggacagggtcacccggcctccagctggcaggattccctcttcctgtttctcgccatcttcttctttttttggctgctcagtatttgagctatgtctccttcctgcccacctccaagcagaggagaatcagtattggggtccctgctgaccctccttactcatgatccccttgactctctatttctgttgctaagccagcctggacatctcaggaaactggggaggagatgaatctgtctaaagggaagcttcgccaaaccccccatacattattcctcccgggagagatgatgagattttctcc

SEQ ID NO: 41914 - DNA, 939 bp, Macaca Mulatta
  misc_feature (1)...(939): n = A,T,C or G
ggnnnnnnnnnnnnnnnnnnnnnnnnnnnnnnnnnnngggtgtggtgatgtgtgcctgtagtcccatttactcaagagactgagccaggagaatagnnnnnnnnnnnnnnnnnnnnnnnnnnnnnnntcgaggtcgtaccaccgtgctccagcctaggcgnaactagaagntgnnagaaacctcttgnnnnnnnnnnnnnnnnnnnnnnnnnnnnnnnnnagaataacccagccccttacccagggccatctcaaagtagttataccattnnnnnnnnnnnnnnnnnnnnnnnnnnnnnnnnnnnnnnnnnnnnnnnnnnnnttttattnnnnnnnnaatanannnngnnnnnnnnnnnnnnnnnnnnnnnnnnnnnnntatatggnnnnnnnnnnnnnnnnnnnnnnnnnnttttgnnnnntntttnttttnnnnnnnnnnnnnnnnnnngnnnnnnnnnnnnnnnnnnnnnntgttgttatgggaaagtaaaanaatatagagnnngggnaggnagagggtagtatagaaagaagtaggagtggggacttacacagcccngacatacngctagctanngtaaatagngnnnnnnnatacccccatgnnnngtanagagtttccataccaacgaatctagncacccgtgttactcctcnnnnnnnnnnnnnnnnnnnnnnnncgcggtgctcggnggggngnnncctgaatgccgctgggttcgtcggacctggctcggcgctcgcccggggtctgnttaccattgancgtctcctgccacgcttctcgggggngcagngtcattcaccgcgcagcgaccggggggttggttgtctaggccggggatgtgcaacgcgggatcggtggccctctgcggcccgcgncgnnnncngagtactctacgcgccngncccangacggcgctacgtgctcccccg

SEQ ID NO: 41915 - DNA, 1172 bp, Macaca Mulatta
  misc_feature (1)...(1172): n = A,T,C or G
tcatacaggagagaaaccgtataaatgtaaagaatgtgggaaaactttcaatcagagctnnnnnnnnnnnnnnnnnnnnnnnnnnnnnnnnnnnnnnnnnnnnnnnnnnnnnnnnnnnnnnnnnnnnnnnnnnnnnnnnnnnnnnnnnnnnnnnnnnnnnnnnnnnnnnnnnnnnnnnnnnnnnnnnnnnnnnnnnnnnnnnnnnnnnnnnnnnnnnnnnnnnnnnnnnnnnnnnnnnnnnnnnnnnnnnnnnnnnnnnnnnnnnnnnnnnnnnnnnnnnnatgaatgtgggaatgccttcagacggcgttccctccttattcaacatcggagaattcacagtggtgagaagccctatgaatgtaaggaatgtgggaaactcttcatttggtgctcggctttcctcaaacatcagagattgcatgctggagagaaacttgaagaatgtgagaaaaccttcagcaaggatgaggagcttacagaagagcagagacttcaccaggaagaaaaagcttattggtgtaagcagtgtggtaggaatttccagggcagctcagacctcatcacacatcaggtaactcatacaggagagaaaccgtataaatgtaaagaatgtgggaaaactttcaatcagagctcagaccttctgagacatcatagaattcacagtggagaaaaaccttgtgtatgtagcaaatgtgggaaatcttttaggggcatctcagatcttactagacaccatcgtattcatactggagagaaaccccatgaatgtagggaatgtgggaaagccttcagccagcggtcacaccttgttacacaccagaaaatccatactggagagaagccctatcggtgcaatgaatgtgggaatgccttcagacggcgttccctccttattcaacatcggagaattcacagtggtgagaagccctatgaatgtaaggaatgtgggaaactcttcatttggtgctcggctttcctcaaacatcagagattgcatgctggagagaaacttgaatgtgagaaaaccttcagccagggtgaagagcttacggaagagcagagaactcaccaggaagagaaagcttatttgtgtaatcagtgtggtaggaatttccagggcagctcagacctcatcagacatcaggtaactcatacaggagagaaac

SEQ ID NO: 41916 - DNA, 842 bp, Macaca Mulatta
  misc_feature (1)...(842): n = A,T,C or G
nnnnnnnnnnnnnnnnnnnnnnnnnnnnnnnnnnnnnnnnnnnnnnnnnnnnnnnnnnnnnnnnnnnnnnnnnnnnnnnnnnnnnnnnnnnnnnnnnnnnnnnnnnnnnnnnnnnnnnnnnnnnnnnnnnnnnnnnnnnnnnnnnnnnnnnnnnnnnnnnnnnnnnnnnnnnnnnnnnnnnnnnnnnnnnnnnnnnnnnnnnnnnnnnnnnnnnnnnnnnnnnnnnnnnnnnnnnnnnnnnnnnnnnnnnnnnnnnnnnnnnnnnnnnnnnnnnnnnnnnnnnnnnnnnnnnnnnnnnnnnnnnnnnnnnnnnnnnnnnnnnnnnnnnnnnnnnnnnnnnnnnnnnnnnnnnnnnnnnnnnnnnnnnnnnnnnnnnnnnnnnnnnnnnnnnnnnnnnnnnnnnnnnnnnnnnnnnnnnnnnnnnnnnnnnnnnnnnnnnnnnnnnnnnnnnnnnnnnnnnnnnnnnnnnnnnnnnnnnnnnnnnnnnnnnnnnnnnnnnnnnnnnnnnnnnnnnnnnnnnnnnnnnnnnnnnnnnnnnnnnnnnnnnnnnnnnnnnnnnnnnnnnnnnnnnnnnnnnnnnnnnnnnnnnnnnnnnnnnnnnnnnnnnnnnnnnnnnnnnntaaagtttggcataagacgttagataccaccgagccttttttccacctcccgccccctaataaatcatttggcaaatcccccacccgggttgtggaaaaagtttttttaagctgtggctttggttacaacttttcatgggggggggccaaacatcccgaaatggggcccccgnnnnnnnnnnnnnnnnnnnntaagacccccctagaggcgtttttatttcc

SEQ ID NO: 41917 - DNA, 771 bp, Macaca Mulatta
  misc_feature (1)...(771): n = A,T,C or G
ggggcttattcgcttccgggtgagaggtgcccggtcgccccagcaaccaagtcgcacctggagctgtcctagcgcctagttctctcccggctgcagagctggccgcccagggggagtcgcagagtttggaagatctctctaacacctctcggccaacttcagaagtgtataagatcagctttatctttccaaatggagacaagtatgatggcgactgtacaagaacatcttctggaatctatgaaagaaatggaataggtattcataccactcctaatgggattgtctacacaggaagctggaaagatgacaagatgaatggttttggaagacttgagcatttttcaggagcagtatatgaaggacaatttaaggataatatgtttcatggactggggacttacacattcccaactggggcaaagtatattggaaatttcaatgaaaatagggtagaaggtgaaggggaatatactgatgtccgaggactagaatggagtggtaactttcattttacagctgctccagaccctgaaattaaacttcacatgtagatgtgcttcacattgtagatttaatgttaaattaaagtttaaatgtagtaattgaaagcttttagttgtaagggaaagcaacttaaatctggttattttgaaatgaccttcatacacctaacccctaataaagttttgccccaaattaaaacccatcaccttttcccnnnnnnnnnnnnnnnnnnnnnnnnnnnnnnnnnnnnnnnaaaacctgtgc

SEQ ID NO: 41918 - DNA, 232 bp, Macaca Mulatta
gatttcatgtgtgtgtccccgtagcgcctaagccggctcctgaaatgagtactcgtggtttccgcgtgggaaccaacctcgagcgccagtagccctcactctacgggctgaggtggttgctggggctggggctgctcctgaggcttcagggccgcccgctgcacggctttctacctccccaggctaatcgcagtcaatctgccaggcggagcaagaaatcgcattttgtcag

SEQ ID NO: 41919 - DNA, 422 bp, Macaca Mulatta
atggattttggtcactgctatccatgaagagttaagaattttatcctagcacccagggggatgccagccttctagtcagctctttcactgacttgcttcaccaagttatttgatgtctccaagttcagtaaaggcttgggtgacagtcaatcaattcttgttagaattaggtgactatgcatacattcaggctgactccttccccctttcactctcagaagccctgggtctggatggtaacacttgatcttttgttcacgactctgttagaacagcgtgcagggtgaaggcaagcgttaaacacagcgaacagggagaacggtaggaactgaggcagcactgcaggggcagttctatgccccgagcgcccactccctaccgcccactccctaagcctggccttatccacagggttcctgggg

SEQ ID NO: 41920 - DNA, 337 bp, Macaca Mulatta
  misc_feature (1)...(337): n = A,T,C or G
cactgcccaacaaatgagcttctgacagactccacaggcgtgatcctgagccagagttaccctggaagctatccccagttccagacctgctcttggctggtgagagtggagcccgactataacatctccctcacagtggagtacttcctcagcgagaagcagtatgatgagtttgagatttttgatggtnggtccatcaggacagagtcctctgctgaaagccctcagtgggaattactcagctcccctgattgtcaccagctcaagcaactctgtgtacctgcgctggtcatctgatcacgcctacaatcggaagggctttaagattcgctattca

SEQ ID NO: 41921 - DNA, 948 bp, Macaca Mulatta
ggctattgctactggtggtgcactgtttggagaagaggggttgaccctaaatcttgaagacgtcctgcctcatgacttaggaaaagttggagaggtcattgtgaccaaagatgatgccatgctcttaaaaggaaaaggtgacaaggctcaaattgaaaaatgtgttcaaaaaatcattgcgcagttagatgtcacaactagtgaatatgaaaaagaaaacctgaatgaactgctggcaaaactttcagatggagtagctgtgctgaaggttggtgagacaagtgatgctgaagtgaatgaaaagaaagacggagttacagatgcccttcatgctacaagagctgctgttgaagaaggcattgttttgggagggggttgtgccctgctttggtgcaattcagccttggactcattgactccagctaatgaagatcaaaacattggtacagaaattatcaaaagaacactcaaaattctagcaatgaccattgctaagaaagcaggtgttgaagtatctttgatagttgagaaaattatgcaaagttcctcagaagttggttatgatgttatggtcggagattttgtgaatatgctgcaaaaaagaattactgacccaacaaagcttgtgagaactgctttattggatgcttctggtgtggcctctctgttaattacagcagaagttgtagtcacagaaattcctaaagaagagaaggatcctggaatgggtgcaatggatggaatgggaggtggtatgagaggtagcatgttctaactcctaggatagtgctttacctttattaatgaactatgacaggaagcccaaggcagtgttcctcaccagtaacttcagagaagtcagtcggagaaaatgaaggaacggctgactgatgtttaagaaatcactgtaaccatcagttactggtttagttgacaaaatatataatg

SEQ ID NO: 41922 - DNA, 475 bp, Macaca Mulatta
  misc_feature (1)...(475): n = A,T,C or G
agatctgctttgccacggcatggaggcagaagatctttcaaaggctgaagacagaaatgaagatccaggttccaaaagtgaagggcagcttgctgctgtgcagcctgatgtcccacgtggagggcagtcccctggccccacagctctctgggacatgctggaaaggaagtttctggaatatcagtaattgactcacnnnnnnnnnnnnnnnnnnnnnnnnnnnnnnnnnnnnnnnnnnnnnnnnnnnnnnnnnnnnnnnnnnnnnnnnnnnnnnnnnnnnnnnnnnnnnnnnnnnnnnnnnnnnnnnnnnnnnnnnnnnnnnnnnnnnnnnnnnnnnnnnnnnnnnnnnnnnnnnnnnnnnnnnnnngagcaagctcggttggcagctggacagttgctgtggtggaagggggacgtggatcaggatggccacttgctcctgaagtcagtgtacgtgctcacggggacagactcg

SEQ ID NO: 41923 - DNA, 274 bp, Macaca Mulatta
gagagcccggtgcatatcctgagcccccaggacaaggtatcattgaccttcacaacctcagaccgggtggtgctgacctgtgagctctcaagagtagacttcccggcgacctggtacaaggatgggcagaaggtggaggagagcgagttgctggtggtgaagatggatgggcgcaaacaccgtctgatcctgcctgaggccaaagtccaggacagtggcgagtttgagtgcaggacagaaggggtctccgccttcttcggtgtcactgtccaag

SEQ ID NO: 41924 - DNA, 451 bp, Macaca Mulatta
aaggagctgcgaaggctggtttaccggcctgctctcgacctgccccccacccccagctcaggggaccttttgtctgaacgccagagctactgaaggggtcgggggaccgtggtggggagtggaagtgccggtcctgctgtccgccctcccagccccagttgcgaggctcaattgttggagagacaaaagcgatttcttcctactcctgctgggccagaagttcaggctgccccgcccccactgggggatcgcacaaaatgagttacctgaggtatgcatttcccagaaccctgggcgtacccacctggggggcatgttggctctggggggaccatctctccttgcattcaggggccgtgaagctgagtaattttcggtcgcagggcaggcccctgttgaaatttcatttgtcctgctctgggcccaaaggaggtgatggtttgggtcttca

SEQ ID NO: 41925 - DNA, 600 bp, Macaca Mulatta
  misc_feature (1)...(600): n = A,T,C or G
aggacacactgttcccagggcacagacacactgggctttggttgggtcttggcctccaggtagggcctggtgggcagcgggcagcgactcctgagacactactgtgattctcggtggtggctgtggtacaaagcctgcagggctagagtttggagtgagattcagcaggaactgtggcctctcccagtgacggtgtgtcactcccattcccagcacgcatgcccacaggccacagcctccgcatcacacaccccctgccaagtcgcccatccatggagcagcccccatacagcagggtcaggctcttacctccacctccagggcacagacaggggcagttctgtctcactgtaaggcaatggaaggagagctgaggacctggaccaggctgggggccnnnnnnnnnnnnnnnnnnnnnnnnnnnnnnnnnnnnnnnnnnnnnnnnnnnnnnnaggtctcagcccaggagcctgcatagggaagaaaggacagacaaggcctccgtgctggctgacactcaggaggggctggggcaaaggagcagaaggagtacaagatcaggcagggactgctcaggatccatgggggctcgggctgcac

SEQ ID NO: 41926 - DNA, 474 bp, Macaca Mulatta
acctttgcagacggcctagtcaatatgcctttccagaggctcagacttgctgactcaaaaatctgcctcggctcacaacccctggtttaccacactggatccgtgcgtcaccgagcatgcacaatgcccgtggtttaattcaccttcttagtcaacagcgccaccatgcgttcgcttgcagtttcaaaatcttggagaaggtgtttttgttttgctttatcgtttattcttatcaaccctggttgacgctactggaggagtttctcatgttatatgaattaaataaatgcaatctagggaaataaaatgcgctcttatctaagagcagcgattcttcctggtagagtcctcatttacatgatttagcggaagtgtacagacactagcttacccctccacttctgttataattacacacaaacttcaaaagatttttcctctagatgatagcatgctttactatcctatttatgt

SEQ ID NO: 41927 - DNA, 981 bp, Macaca Mulatta
ctgccaaagtggaagcgaagccgaaaaaggcagcagcgaaggataaatcttcagacaaaaaagtgcaaacaaaagggaaaaggggagcaaagggaaaacaggctgaagtggctaaccaagaaactaaagaagatttacctgcagaaaacggggaaacgaaaactgaggcgagtccagcctctgatgaagcaggagaaaaagaagccaagtctgattaataccatataccatgtcttaccagtggtccctgtctcccttcttgtacaatccagaggaatatttttatcaactattttgtaaatgcaagttttgtagtagctctagaaacatttttaagaaggagggaatcccacctcatcccattttttaagtgtaaatgcttttttttaagaggtgaaatcatttggtggttgtttattttttggtacaaccagaaaatagtgtgggatattgaattacgggaggctttgactgtctcgtggtgccagcttaacattccatagatggggagttagtttttatatcctataataccaagcatattaaatggcaatatggagtcagtcctgcattgaatgtcttgaacattttattttacttctattctcaagtgttttagtaaaaatgtttcctaaagcaaaccacccctcgatcatggcgctccctgtcggaattgtgtgcactctgtaacatgtttggttgtggcagacctgttttcgtaataacttcgttactgtgctgtgaaagattacagatttgaatatgtagtgtacatgctattcagttgtgaactggtgggccatatgtaacagctgaccaacatgtgaagatactggtacctgatagcctcttaaggaaaatttgcttccaaattttaagctggaaagtcactggaataactttaaaaagaattacaatacatggctttttagaatttcgttacatatgttaagaaatgtgtacaaattgaaatgtctgtac

SEQ ID NO: 41928 - DNA, 812 bp, Macaca Mulatta
  misc_feature (1)...(812): n = A,T,C or G
attattgatatgtttctgtcttggggataattggtgtgcgtttactgcgtgtcatcgtttcattaagtattaatgaatttcgttcgtgatgttgctgtgctgatttcttcgtttctacttgttaattttatatttgttttattcgttcttttttatattgttttgtgttggttgttggtaattgtgcgtcatttcattgtgtgttatttttgtaatgtgttgttttttatatattaattgtgttttatcgtgtttttatgttatatacatacttttttgttcgtgtttctcttcgttggttgggtttttataattgttgaattagtgttaatttgattcggcttttttttgttgttttttctccggttcctttttttttccgatattaaaattgttggttgtgtttatttttttttctatttattatttatatcgttttgcgcgtggctgtatttttatttatttggtgttatttaatggtagttaattcgtgggtttttgtggtgtcaaaaannnnnnnnnnnnnnnnnnnnnnnctaattatcagtcctcctttctttggggggggttttggtttttaaaatttttngggtttttggattcttttcgtgttagagatcttcttcagttgtctgaaattcttagctgcttattcaatttttattnatttatttatttgagatggagtctggctgtgttgcccaggctgaagtacaatggcatgatcttggctcatctgccttcctnnnnnnnnnnnnnnnnnnnnnnnnnnnnnnnnnnnnnnnnnnnnnnnnnnnnncagccatcatgcc

SEQ ID NO: 41929 - DNA, 628 bp, Macaca Mulatta
cacgagggctacagtattaagagaaagtagagaaggaagaatcgcagacaggagtgatgtcggaaatattaaaacttaattctccaggactcagttttcttattggtaaaacaacgtggaagactgactgtctgtggggttgttgtgaggattaaatgagttaatgcatgtgtgtacctggcatataagtaggcaccaaatgagcatttgttgactgaatcaatgattatcacatttttatctgggagtatattgatggtcatttaattttaatgtatcagcaagaccatactgggtggtttatgcctgttagcatcatgtgatgatactttgttctccaattttttcagcaaaagggcatcacatggtaacattccagaaagtaagacaaggggcaccaatcatctctcacaatgcagaataaataaggctttgagtggaagcaggcatgctgtttccagcaagtcttccaatttcgggtttgacatgtttctggcaacatatgatacaatggaccttgtcaaaggggaggatgaagtatttgaaaaatgccataaaaatccaaccaggagtggagaatgatctaggggtagaggggatagttagaagtgctataggcaaagacact

SEQ ID NO: 41930 - DNA, 781 bp, Macaca Mulatta
  misc_feature (1)...(781): n = A,T,C or G
ggggaaatgtctgataccttgttttgggtgttagttacacagatgtatacaattaccaaaagatatcagaaaccaaaactgaatatgtaaaatatttgtgtttattgtgtcctagctgtacatcaatgggaaaaaaagtatctacatgaatagaaaaactttttaaaattgtgaatataagtttatgtttgtgatgttttcagtttttctcttcctctccattactgcaatctagaaatgggagagaagaatctaattttatagccggggcgtggtggtgggcacctataatcccaggtacctnnnnnnnnnnnnnnnnnnnnnnnnnaaatccgggaannnnnnnnnnnnnnnnnnnaagatcgtgnnnnnnnnnnnnnnnnnnnnnnnnnngagtgaaactctgtnnnnnnnnnnnnnnnnnnntctaattttattttctcttagtgcagttatcccccctttgctctccaaagtgaatgttgtcagttactcagtcgctgattaaacagcctgaaagctcactgtatttttaggtaggctgtttggtcatgatacaactctaattgtcccagttttttcttttattgagcccaaatctgcttccctgaaatatactctcctccttggtctgcctttctctacattttcatgttcctctgggtttggttcaaatcagctgtcatatatttttccccgttgtttcctttcaggcctaaacacctatgaatgttttcatttcttccccgggaaatgtggctcacagaaccacacttcctca

SEQ ID NO: 41931 - DNA, 821 bp, Macaca Mulatta
  misc_feature (1)...(821): n = A,T,C or G
agtcccatagatatatgcatgtgtgtaaaaacatacaaatagtaccgacatatggtggagagaggtaaataatgagtaaattaaagacgagacgcagttgggtggggagttcgctagacgttcacagaaaggttacagggtggagattgtaatagatatttataaccttcgtgggaacgaaatgtttgtgtctatttttaaggccaacaagttgatgttaaaaagcgggaaatgcaatctgaattctagccagaaatagtaaggaaatgggaggttgcttctttcctaaaagataccgtcgatcggggtataatatacagtctggggtctttagtaattacagttctgggtatacatttgatatagggacactgttgatatgttgcccaggctagaggatctcggctcacaacaacatctgccttgtgggttcaagtgatttttgagtnnnnnnnnnnnnnnnnnnnnnnnnnnnnnnnncccaccaccatgctcggctaannnnnnnnnnnnnnnnnnnnnnnnnnnngnnnnnnnnnnnnnnnnnnnnnnnnttcactgttgttgcccaggctggaatgcaatggcgcgacnnnnnnnnnnnnnnnnnnnngcctcatgggttgaagtgattttccttnnnnnnnnnnnnnnnnnnnnnntattacaggcatgcaccaccacgtctggctannnnnnnnnnnnnnnnnnnnnnnnnnnnnntccatgttggtcaggctaatcttgaactcctgatctcaggtgatctgcccgtnnnnnnnnnnnnnnnnnnnnnnnnnnnnnntgtgggccaccatgcc

SEQ ID NO: 41932 - DNA, 685 bp, Macaca Mulatta
  misc_feature (1)...(685): n = A,T,C or G
aaaggcttagaatgagggtaatggcacgntgtgtggatganaagaaaagaacctgtagaacatttagtaaaaaggaaaatgtgctcccactattaataaattctgcatttccaatatgtttgaaattattaaaatatgatactatatttacaaatcagcagaatttcactgtcaataccatacaaaaaaaggcattttcaagaaatttaaaaataaatctcaaggtattttacaaaatataaacataactcttttgatccatatctacaacccagtgaccattcccataaatggccagttcatttcaaataacacaatttgtgagttgcttttataaaaagcttcctatgttatctgtgcccattttaataagttatgttacaccatgacacatagttttgattagcaagaatgccatagcctagcatcatcaaaccaaacaaattcagtaatataaagacttaagttcaccatccataattattagtatcatttagcagttcctggaagattcactagaataaacctctatttatatcctgaaatagaaattgggtttaaggtaaattatgataattaaaatccattatgcttatgctgcccaacaatggccacagagtcatcttaaggatatattttattttgtgattaaatcaataaagttgaatgaaaattatgtcccatc

SEQ ID NO: 41933 - DNA, 784 bp, Macaca Mulatta
  misc_feature (1)...(784): n = A,T,C or G
ggnnnnnnnnnnnnnnnnnnnnnnnnnnnnnnnnnnnnnnnnnnnnnnnnnnnnnnnnnnnnnnnnnnnnnnnnnnnnnnnnnnnnnnnnnnnnnnnnnnnnnnnnnnnnnnnnnnnnnnnnnnnnnnnnnnnnnnnnnnnnnnnnnnnnnnnnnnnnnnnnnnnnnnnnnnnnnnnnnnnnnnnnnnnnnnnnnnnnnnnnnnnnnnnnnnnnnnnnnnnnnnnnnnnnnnnnnnnnnnnnnnnnnnnnnnnnnnnnnnnnnnnnnnnnnnnnnnnnnnnnnnnnnnnnnnnnnnnnnnnnnnnnnnnnnnnnnnnnnnnnnnnnnnnnnnnnnnnnnnnnnnnnnnnnnnnnnnnnnnnnnnnnnnnnnnnnnnnnnnnnnnnnnnnnnnnnnnnnnnnnnnnnnnnnnnnnnnnnnnnnnnnnnnnnnnnnnnnnnnnnnnnnnnnnnnnnnnnnnnnnnnnnnnnnnnnnnnnnnnnnnnnnnnnnnnnnnnnnnnnnnnnnnnnnnnnnnnnnnnnnnnnnnnnnnnnnnnnnnnnnnnnnnnnnnnnnnnnnnnnnnnnnnnnnnnnnnnnnnnnnnnnnnnnnnnnnnnnnnnnnnnnnnnnnnnnnnnnnnnnnnnnnnnnnnnnnnnnnnnnnnnnnnnnnnnnnnnnnnnnnattaccctattcattctataaggctccttttcatcttcactaagtagcaggtaaatttttaattaattctaccatggattcctgaagaaaacccttttgtctttccaaaaaccgttaaaagt

SEQ ID NO: 41934 - DNA, 751 bp, Macaca Mulatta
  misc_feature (1)...(751): n = A,T,C or G
gggatgaggctttaagacgacgccttgagaaacgaatctatattcctttgccatcagcaaaaggcagggaggagctattacgaataagtctacgtgagctggaattggctgatgatgttgaccttgcaagtatagcagaaaacatggaaggttattcaggtgcggacattaccaacgtgtgcagggatgcgtccttgatggcaatgagaaggcgcattgaaggtttgactccagaggaaatccgaaatctttccaaagaagaaatgcacatgcctacaactatggaggattttgagatggctttaaaaaaggtttctaagtcagtgtctgctgcagacattgaaagatatgagaaatggatatttgagtttggatcatgctaaattctcacatgtaaattgtgagaaatgtgccttaagtgtttgaatattaaatgcagtaattcattgcanannanannnnnnnnnnnnnnnnnnnnnnnnnnnnnngccgcnnctcggccctcagagaagcttttctagaccanttcgtttgggnnngcgcgggccccagntagggtaaagtgaaaacatggtccataaggctgtttttccctaagggagaattccctgggntcaatgaacttaaggtgggctttggggaatttccccccaccccaaatataaaaaaaaaggcgccccccgggggcgggggcaaaaacacccggaaaggcgcggttttccttggaaaaacaaatatttcccccgaaaat

SEQ ID NO: 41935 - DNA, 701 bp, Macaca Mulatta
ggcagccagaactcttctgtagaaaggcaagcaagacgatccctgagctctgttgtcatgcctctcaaagaggaattaccagaagttgtactttttcttctctttatgtgattttggcttagagtttggcttctatattggtaacatggatttctcaacactgtggactaaaggacactgacaggtcttattcatgagctattagtgtgaaagtgattgtggtttttaaatggcagaaaccacaatcactttcccactaacctaatatttaaaagacactaagagaaaacattctcataacatttctagtctcattctgatgcatcctctcctcttctgcatttttcccccctgtggtagcacttgtcctcttcctaaagtaaccctccaaagtgaacagtgacactgaggggagagggccccccagcaatattgtacagacttggtcagaaacagatataatacattatttaacatattgcttgttaatagttttaaaaatactattattctgtggtagattattggttatataaaaggtaaaaatgtcataagtattttaatttccagtttgtacaacctgtcagttgagtgctttgaaggtactcaatagctagttaacctaatgtagtttctccacacagtggaggctttaacgctctgtgcttctcagttatgggtaggtttgtacattatgatgt

SEQ ID NO: 41936 - DNA, 789 bp, Macaca Mulatta
  misc_feature (1)...(789): n = A,T,C or G
gctgctgtttcaagctcattcgcccaagtacacctttctacctaccttccctatcatcagagaggtgacctgacctcagcacgtgcgagcttgtcagnnnnnnnnnnnnnnnnnnnnnnnnnnnnnnnnnnnnnnnnnnnnnnnnnnnnnnnnnnnnnnnnnnnnnnnnnnnnnnnnnnnnnnnnnnnnnnnnnnnnnnnnnnnnnnnnnnnnnnnnnnnnnnnnccttttcctccagcggaagccgcacacccacgggagcccacacctcttggtctgggtcggccacgcagagctccaccaccggctcgtccacggagaggggctccatttattcctggagagatgacgnnnnnnnnnnnnnnnnnnnnnnnnnnnnnnnnnnnnnnnnnnnnnnnnnnnnnnnnnnnnnnnnnnnnnnnnnnnnnnnnnnnnnnnnnnnnnnnnnnnnnnnnnnnnnnnnnnnnnnnnnnnnnnnnnnnnnnnnnnnnnnnnnnnnnnnnnnnnnnnnnnnnnnnnnnnnnnnnnnnnnnnnnnnnnnnnnnnnnnnnnnnnnnnnnnnnnnnnnnnnnnnnnnnnnnnnnnnnnnnnnnnnnnnnnnnnnnnnnnnnnnnnnnnngttgtgcatttctggctctcagatagtcccagcagcgctctcagcctctgccctgccaggccctgatgggacgggggttgctgacctaacggcatgttcatccctggaagaagaggtttaccatgtggatggaaagattgaagagtatttcgcttttgacagaaaagagg

SEQ ID NO: 41937 - DNA, 597 bp, Macaca Mulatta
ttcttggcccaaattagaaatgagctaattgatatttaagttctttctgtcccctaactatgtggatgccttggatttgctaactatactgatcgttttcccattttcagagagatctggtggttgataagaatagtactgttgataagaattgtgacttttagttgtcacaggtgacctgtaggtatcaggattgttgttaagccttttctaaatgtctgttctctcttctttctgttggttggatacagccaagcccatccgccccggacactacccggcctcatctccaacggccgtccatgccattcgagggggaggaggcagctcttcaaacgccactcactaccagaaataaatacaaagtgagtcccatgtcaagggtggtttctctatctggaggcagagggttcttgcctttctcaaacccctgcctggcagtggaccttcagtagagaggagttcggctgtattccagcacacgccctgggggttccaggtaaacagagacccgacctaccctcactcagtctagagccctggggtcttctagctgaggctgcctgaggcccctgggacctggagccaggccgggcc

SEQ ID NO: 41938 - DNA, 752 bp, Macaca Mulatta
  misc_feature (1)...(752): n = A,T,C or G
ggcaatgagtggctgccttagacaatgagggttgttctaaattcttctaatactagcatctaccagagaatcaggtaaaaagaaagcaggtcagtaattttcttttttcttctctgcttgtactcatgcatgtctcccttttaagcaggacaaagtcagagatcaggagcagatttaggaagatgctttattttctgggcatctacggcaatatgctcacagttttcctggcacaaagattaggatcacaaaaaatatttccatatatatctgtgctattgaattactttccagatccactgccttattaaaataatgaatacgtttgaaagattaaatatttgctaaccttcagttggttagtttgaccctccatgatgtaatctaaataaataatattaaacatgcatatctggaacagagcgtgtttcttgaatatcttcatgtcctatattatctagattcacttgtctttaagctccctgagaccagggactatgttgtaatttatctttcatgcaaagcctagtccagtgcctggcatgcaataggtcctcagtgaatggtcatttaaatgaaatcgtatgttgtgttattgcagttatagaattgattgcataaaagataccatctctacaagataaacaagaggaggagaatataatattgtggttccccctgaatgggcttaaagtcagacatttccctgcttttgtttttcnagaagagaataaaataaaataatcctagac

SEQ ID NO: 41939 - DNA, 144 bp, Macaca Mulatta
gtggactcctgccgccacctggaccggggacagtaacgcctagggagccccaagacctcttgcgagagcatttcaactctgtggacgaacctcaaccacttcagggacttcgctggaaagaaacgttctagaaagaccaagtgg

SEQ ID NO: 41940 - DNA, 805 bp, Macaca Mulatta
  misc_feature (1)...(805): n = A,T,C or G
ggnnnnnnnnnnnnnnnnnnnnnnnnnnnnnnnnnnnnnnnnnnnnnnnnnnnnnnnnnnnnnnnnnnnnnnnnnnnnnnnnnnnnnnnnnnnnnnnnnnnnnnnnnnnnnnnnnnnnnnnnnnnnnnnnnnnnnnnnnnnnnnnnnnnnnnnnnnnnnnnnnnnnnnnnnnnnnnnnnnnnnnnnnnnnnnnnnnnnnnnnnnnnnnnnnnnnnnnnnnnnnnnnnnnnnnnnnnnnnnnnnnnnnnnnnnnnnnnnnnnnnnnnnnnnnnnnnnnnnnnnnnnnnnnnnnnnnnnnnnnnnnnnnnnnnnnnnnnnnnnnnnnnnnnnnnnnnnnnnnnnnnnnnnnnnnnnnnnnnnnnnnnnnnnnnnnnnnnnnnnnnnnnnnnnnnnnnnnnnnnnnnnnnnnnnnnnnnnnnnnnnnnnnnnnnnnnnnnnnnnnnnnnnnnnnnnnnnnnnnnnnnnnnnnnnnnnnnnnnnnnnnnnnnnnnnnnnnnnnnnnntgaatttgggcgaaaggccttcccctacatggaaatagccctaatcctctaaaaggggtccgtttaatctcgcctgagaaacaagaagttgttaaaaagcccccgacggagcccgagagaaaccgttttgttttgaaaaaagaaaagagggctaccaaatctcggaaaacgcccccttgtcggagcgccaaagggtggccaaagagggggtggccccgcccggcgtgtaaagaacagcgttctgagggaaacaccccccgcccattagaaagggaaagcgcaaaaagaagagggagaagcca

SEQ ID NO: 41941 - DNA, 772 bp, Macaca Mulatta
  misc_feature (1)...(772): n = A,T,C or G
ggggtctctctttaaatgaaagaaaaaagttaacaaattatcttaaacattggcagccatacttgctttaggagaacaccaaagatcgctacccccgattctcctaaggaaatacgatgtaggagaaagcaaattttcggagaaagatgtttgttttcttgctggtttatgtgaagtttgtaggtgtacttgtctacctcaaagctcatttacaatatttttcttaatgtcttcaaagaggatgtcaattaatacgatcttgcaccctgtattctgtgagttttctgaggttggggtattaacgagatgccaaccagtgccattgaacagatggaatagtagctctttgactgcnnnnnnnnnnnnnnnnnnnnnnnnnngagacgctcttannnnnnnnnnnnnnnnnnnnnnnnacgatctcggcttactgtagcctccannnnnnnnnnnnnnnnnnnnnnnnnncttcagcatcctggnnnnnnnnnnnnnnnnnnncccgcccccacnnnnnnnnnnnnnncnnnnnnnnnnnnnnnnnnagtgtttcgtcatannnnnnnnnnnnnnnnnnnnnnnnnnnnnnnnggtgatctgcctgccttgggcctcccaaatggctggggattacaagcggtgagcccaccggttcttaaattttttgtgggcaaaaaaattgggttcgttggtaatcccttgcaattccggtccggggaaaagggggccaaaaaaataaaattttttgggaaatggaaaaggggttttaaat

SEQ ID NO: 41942 - DNA, 559 bp, Macaca Mulatta
  misc_feature (1)...(559): n = A,T,C or G
gtatcacttttggaaaacaaaaatatttgcattcagcatggactcgaccaggcatctatggagattatttttttgcttcattttataaagtggtatttagaaaagtcttaagtattgtgctttgtaaagaagatgattaaaatgaaattttgnnnnnnnnnnnnnnnnnnnnnnnnnnnnnnnnnnnnnnnnnnnnnnnnnnnnnnnnnnnnnnnnnnnnnnnnnnnnnnnnnnnnnnnnnnnnnnnnnnnnnnnnnnnnnnnnnnnnnnnnnnnnnnnnnnnnnnnnnnnnnnnnnnnnnnnnnnnnnnnnnnnnnnnnnnnnnnnnnnnnnnnnnnnnnnnnnnnnnnnnnnnnnnnnnnnnnnnnnnnnnnnnnnnnnnnnnnnnnnnnnnnnnnnnnnnnnnnnnnnnnnnnnnnnnnnnnnnnnnnnnnnnnnnnnnnnnnnnnnnnnnnnnnnnnnnnnnnnnnnnnnnnnnnnnnnnnnnnnnnnnnnnnnnnnnnnnnnnnnnnnnnnnnnnnnnnnnnnnnnnnnnnnnnnnnnnnnnnnnnnnnnnnnn

SEQ ID NO: 41943 - DNA, 754 bp, Macaca Mulatta
aaagaacgggctgaaaacaacagtgtgcccagtcgcttcgtacctgaatgcccagacagctctcacttacaccttcacctacacgccctgcagccagaagactcagccctgtatctctgcgccagcagccaagacacagccttgcagagtcatcgctttcccgtgcagaaaccttcggggcctgccgggaagctgtgggggccacggagggctcgggtgagcatttcctgcaagagccccgacagaagcttcagaacatcacagcacctgctaattcatccatgcggcaactttacatcccgtgcacatatttagagtgtgggttttctttagcgtgtgactctgctctgtcaactgatttgaaaacgataaacacattcagatctagtctttttaaaatccctttttaaattgtaaaataaagcaagcatgctataaggggattgtttagtttaagattttataagaccctctaaacaaccacctgcgtcaccgcagtcataccctgcaatgggccacacagtgtcctgtgaggagccaagctcttctgacactttatgtctggtggtctccaagcctctctttctcaggaaccaaggggtcccttctgtcataagttgctgacacccaaggtcaagcagcactgggtttgggggaatcatagaggtaacttccaggcaagggtcccagggcaggaggcagctggagagcacagtaaagaacccaggttttggggaatggatttgagaaatat

SEQ ID NO: 41944 - DNA, 2558 bp, Macaca Mulatta
  misc_feature (1)...(2558): n = A,T,C or G
ggaccctccacccctcgacacagctgtccagcatgccctggcgggcctctatcctcctttcgaggccacagcacccactgtcctgggtcaggtgttccgtctcctggactctgacttccagggggatggactgagcttccttctggatttcctgatccctgccaagcgcctgtgtgagcaagtgcgagaagcagcctgtnnnnnnnnnnnnnnnnnnnnnnnnnnnnnnnnnnnnnnnnnnnnnnnnnnnnnnnnnnnnnnnnnnnnnnnnnnnnnnnnnnnnnnnnnnnnnnnnnnnnnnnnnnnnnnnnnnnnnnnnnnnnnnnnnnnnnnnnnnnnnnnnnnnnnnnnnnnnnnnnnnnnnnnnnnnnnnnnnnnnnnnnnnnnnnnnnnnnnnnnnnnnnnnnnnnnnnnnnnnnnnnnnnnnnnnnnnnnnnnnnnnnnnnnnnnnnnnnnnnnnnnnnnnnnnnnnnnnnnnnnnnnnnnnnnnnnnnnnnnnnnnnnnnnnnnnnnnnnnnnnnnnnnnnnnnnnnnnnnnnnnnnnnnnnnnnnnnnnnnnnnnnnnnnnnnnnnnnnnnnnnnnnnnnnnnnnnnnnnnnnnnnnnnnnnnnnnnnnnnnnnnnnnnnnnnnnnnnnnnnnnnnnnnnnnnnnnnnnnnnnnnnnnnnnnnnnnnnnnnnnnnnnnnnnnnnnnnnnnnnnnnnnnnnnnnnnnnnnnnnnnnnnnnnnnnnnnnnnnnnnnnnnnnnnnnnnnnnnnnnnnnnnnnnnnnnnnnnnnnnnnnnnnnnnnnnnnnnnnnnnnnnnnnnnnnnnnnnnnnnnnnnnnnnnnnnnnnnnnnnnnnnnnnnnnnnnnnnnnnnnnnnnnnnnnnnnnnnnnnnnnnnnnnnnnnnnnnnnnnnnnnnnnnnnnnnnnnnnnnnnnnnnnnnnnnnnnnnnnnnnnnnnnnnnnnnnnnnnnnnnnnnnnnnnnnnnnnnnnnnnnnnnnnnnnnnnnnnnnnnnnnnnnnnnnnnnnnnnnnnnnnnnnnnnnnnnnnnnnnnnnnnnnnnnnnnnnnnnnnnnnnnnnnnnnnnnnnnnnnnnnnnnnnnnnnnnnnnnnnnnnnnnnnnnnnnnnnnnnnnnnnnnnnnnnnnnnnnnnnnnnnnnnnnnnnnnnnnnnnnnnnnnnnnnnnnnnnnnnnnnnnnnnnnnnnnnnnnnnnnnnnnnnnnnnnnnnnnnnnnnnnnnnnnnnnnnnnnnnnnnnnnnnnnnnnnnnnnnnnnnnnnnnnnnnnnnnnnnnnnnnnnnnnnnnnnnnnnnnnnnnnnnnnnnnnnnnnnnnnnnnnnnnnnnnnnnnnnnnnnnnnnnnnnnnnnnnnnnnnnnnnnnccctagcagaaacacctcctcccctgagtcccccactcctgggctcaagttctcattcttgaaagggcagaggcaaccctctgtgactccagagaaagcctcactccagcacgatgggccctggaaagtcctgtgttccctctactctcctaaacccaaccgagccaaatctttggggaaannnnnnnnnnnnnnnnnnnnnnnnnnnnnnnnnnnnnnnnnnnnnnnnnnnnnnnnnnnnnnnnnnnnnnnnnnnnnnnnnnnnnnnnnnnnnnnnnnnnnnnnnnnnnnnnnnnnnnnnnnnnnnnnnnnnnnnnnnnnnnnnnnnnnnnnnnnnnnnnnnnnnnnnnnnnnnnnnnnnnnnnnnnnnnnnnnnnnnnnnnnnnnnnnnnnnnnnnnnnnnnnnnnnnnnnnnnnnnnnnnnnnnnnnnnnnnnnnnnnnnnnnnnnnnnnnnnnnnnnnnnnnnnnnnnnnnnnnnnnnnnnnctgtttaccacccacaggcctgaagataaagccaaggggctggcggtcctgattgatgccaggaaacagcccccacagcctggtctggtcagtgccctgcaggccacccagnnnaggctcaggtcccagcctccatccgcgctattctcttcctnnnnnnnnnnnnnnnnnnnnnnnnnnnnnnnnnnnnnnnnnnnnnnnnnnnnnnnnnnnnnnnnnnnnnnnnnnnnnnnnnnnnnnnnnnnnnnnnnnnnnnnnnnnnnnnnnnnnnnnnnnnnnnnnnnnnnnnnnnnnnnnnnnnnnnnnnnnnnnnnnnnnnnnnnnnnnnnnnnnnnnnnnnnnnnnnnnnnnnnnnnnnnnnnnnnnnnnnnnnnnnnnnnnnnnnnnnnnnnnnnnnnnnnnnnnnnnnnnnnnnnnnnnnnnnnnnnnnnnnnnnnnnnnnnnnnnnnnnnnnnnnnnnnnnnnnnnnnnnnnnnnnnnnnnnnnnnnnnnnnnnnnnnnnnnnnnnnnnnnnnnnnnnnnnnnnnnnnnnnnnnnnnnnnnnnnnnnnnnnnnnnnnnnnnnnnnnnnnnnnnnnnnnnnnnnnnnnnnnnnngtacagccttgtggatgagcagcttcatgttctggtcaccgcatccaacagcctcctggggaagctggagctccgtgtccgcctgggccgcctggaagctgccattcatcagg

SEQ ID NO: 41945 - DNA, 794 bp, Macaca Mulatta
  misc_feature (1)...(794): n = A,T,C or G
gggggatttcttggtggatcacatcagattgagctcatattgtgttcttgtataatacctgctacccttggttcacagaatgtttcgtgtgatatcaagtagcaaatgcttacatatttctacttccaattatgtttcctttctccttgtatctttggagaagacaataacattattctgtatcaaactgatattaaatgattgaatgaatgggggtttctcctgtacatgggttgtttttagaatannnnnnnnnnnnnnnnnnnnnctaaatgtagtacacaggaaatctcatgtagaaaattcaaataataaagcaaatgataataaagtaaaaaatcatattctcattactcaaaataatttatgttatcacttaaaggtattaattctcagttaacattttggtaatcatcctttcagataactctatacatagagacttacacaagattttaaataaatgagtttataatacgtatataattggataacctgcatttttttcactcaacaatgaaacttggaaaaatttttttcatgtcaatgaacattattatagtttttaacgacctactctgtggtttggatttatgattatttaattggccttataataataaatctaaattccttttttgcttttatttttgaagtcccaaacaaaactgtagtgactacatattcatatatctatatgaattgttgctgggtcaaatgttatattttgtgggtcatgtataatctgacagtttaaatttatacaaaatgtgctgaaagtcttgcgttagntg

SEQ ID NO: 41946 - DNA, 659 bp, Macaca Mulatta
  misc_feature (1)...(659): n = A,T,C or G
tgaaaggtctgagaagacctgcaataagaagcctgtttaccttggtttatatnatcccatgtttctaggtttatttgacacattaaatgcatattcaatcagtgtgtaataaattcacactgttttgaaatgtttcatgggattggaagtatgatttttacactgttttccaaatatcttaatacaaccatcaccaaactggttccttgtctttgtaggtagtgagcgggaagcatatttactctgtaacatttcctcaatatctctactcatttaagccagctgtgctgcgaagcacaggtagcttgtctacgttttcagcctgtttggtggtggtgtctaagtccttaagtgtgaggcctctaggtggcggtgttgtattatttaaacaagcttcttgctttctggcttctgcatgtatgctctgtcctgaaagtatgtattgcccatatcacccaagtgcacacctaacttacagatccaaagaattcctgaagtattttccctgggataatattcaggactgatttgagacattttattggaagtggaacagttgatgattttcactttttagtgagggggttgggtaaaacgaaggtcattaacattatttgctttatggattatgagttacaaaaggcctttagacagctcta

SEQ ID NO: 41947 - DNA, 988 bp, Macaca Mulatta
  misc_feature (1)...(988): n = A,T,C or G
ttacatatgaaatagccccagtttttactgtcatggagacaattcttctcaaaatgtatgaaaattattggctgggnnnnnnnnnnnnnnnnnnnnnnnnnnggtggcaggatatcaaacctctgtggtattttagtagctcactataaacaatatccagagataaaaacaaaaggcatgactgcacttccatgcattgtattatttgtttctgagcaannnnnnnnnnnnnnnnnnnnnnnnnnnnnnnnnnnnnnnnnnnnnnnnnnnnnnnnnnnnnnnnnnnnnnnnnnnnnnnnnnnnnnnnnnnnnnnnnnnnnnnnnnnnnnnnnnnnnnnnnnnnnnnnnnnnnnnnnnnnnnnnnnnnnnnnnnnnnnnnnnnnnnnnnnnnnnnnnnnnnnnnnnnnnnnnnnnnnnnnnnnnnnnnnnnnnnnnnnnnnnnnnnnnnnnnnnnnnnnnnnnnnnnnnnnnnnnnnnnnnnnnnnnnnnnnnnnnnnnnnnnnnnnnnnnnnnnnnnnnnnnnnnnnnnnnnnnnnnnnnnnnnnnnnnnnnnnnnnnnnnnnnnnnnnnnnnnnnnnnnnnnnnnnnnnnnnnnnnnnnnnnnnnnnnnnnnnnnnnnnnnnnnnnnnnnnnnnnnnnnnnnnnnnnnnnnnnnnnnnnnnnnnnnnnnnnnnnnnnnnnnnnnnnnnnnnnnnnnnnnnnnnnnnnnnnnnnnnnnnnnnnnnnnnnnnnnnnnnnnnnnnnnnnnnnnnnnnnnnnnnnnnnnnnnnnnnnnnnnnnnnnnnnnnnnnnnnnnnnnnnnnnnnnnnnnnnnnnnnnnnnnnnnnnnnnnnnnnnnnnnnnnnnnnnnnnnnnnnnnnnnnnnnnnnnnnnnnnnnnnnnnnnnnnnnnnnnnnnagcctgagtccaccaatgtctgcttctggtatttcccagcaaggcttaaacgtattccaaaaggttttcaaagacatcaagaactccaaaa

SEQ ID NO: 41948 - DNA, 629 bp, Macaca Mulatta
tttgcagttctggagcctagaggtcagaggtctaggtgtagcacggttgacttctgagggttgtgagggaaggatcagttccattcctctctcttagcttttggcagccttgagttgtagatggcattctctctgtcttttcacatcatcttccttctgtgcacatctgtctctgtgtccaaatccccccattttaaaaggacaccagtcattttggattagagtctaccttaatggcctcatctcaactggattacttctgtagatgccatctccaaataagatcacattctgagatatttggggttagttcattgcatctttttttgtggggatacaattcaacccatgacactgcctaggagtgccaaaaatatggcacatggtgcgttaactaaatatggataataagtattaggtcagacacataaaattgcagatattcgatcattttacctacaaaatggtaatataacatgatttactgtatttattctttgcttttttttcaaccatctctgtctgggtgctcattgtacctgacacaactcgacattttctgggcagcccatgtgagactggttgtggtataggcaggagaagggtggctgtgctgactcactctgcct

SEQ ID NO: 41949 - DNA, 295 bp, Macaca Mulatta
acaaccgattattttggcatcttcttccatttttaaacattattgatactgctctttgaaattatatttttccctgactttctctagcaatattattatgagttttcttttccttgaccaattttcttttcattatcgcaggtactgtttctcttccaaacccctaattctagctttattcatgctacttatgcttaaagggtcttttgtctctgtacctcaccagggaatatttttacccttcttggattcaactattagttcaatgtcgatagctcccaaatcaacattacca

SEQ ID NO: 41950 - DNA, 613 bp, Macaca Mulatta
ggacgacagtgtttgcaagcagggctaggaggaggagtagggggacagataggggagtcacagaaaagagttctgggaccagagtgttggcaaggagggctaggaggaggaataggggaacagactggggaatcacaaggaagagttctgggaccccaaagttgaccagtagggctaggaggagggctagggtgatggataggggagtttccagaaagagatctgggaccagagcaatgacaaatggatggtttgtaacgaatagcagaagagcagggcaggtagagtattagggtagggtagtggggagggcaggtataagccacagtgggataacagttagggcagaaaactgaaaaatccacatgcttctggagaggaggaaggggcttggcagattgaagaagggggagggatttgtgagcacaagagtaggatggcttaagagagtgggatgtattaggagggcaggatggatcaggagggtgtggaatcataaaaccaggtaccaggcagggtggaaattgagaaattggagggagctttcctgtcaattcttccaatgagaattctagttaatcccttctcccagtgagtccaaatgagtaccccc

SEQ ID NO: 41951 - DNA, 760 bp, Macaca Mulatta
  misc_feature (1)...(760): n = A,T,C or G
ggggcaatatttattaccaatgataaaattcaggctttgaaaagaaagtaagaattttggaaaacttgtatccaccatgagtttcgcaacttcccactacttacaaagacttttctgctagtatctatggtgatactaacaaaaatagtttttagaaagatattagtgaaatgtatcaacacttggaagccctgtataacttagcaaaccannnnnnnnnnnnnnnnnnnnnnntttgctcttgttgcccaggttgtagtgcaatggcgcnnnnnnnnnnnnnnnnnnnnnnnnnnnnnnnngatcaagcaacagnnnnnnnnnnnnnnnnnnggtagctgggatttcagccatgcgccaccacnnnnnnnnnnnnnnnnnnnnnnnnnnnnnnnnnnnnnnnntccaaattggtnnnnnnnnnnnnnnnnnnnaannnnnnnnnnnnnngcctgcgnnnnnnnnnnnnnngnnnnnnnnnnnnnnnnncnnnnnnnnnnnnnggccgcaaaccagtagtttttaaatgaccatacatggatgttacaaaatcatgcatgagtaaaatatccattcaaagtgcgagacaaactaatgtaacggaggatgaaaagttaaatactatggtttcagatttcacactgcattaaagaaactactacttggtgtagagtcaaagaatatccacaatttttaggaaaagctattaaaatattcccatttccagctgtattaatctgtttgtaaatgggcttttctt

SEQ ID NO: 41952 - DNA, 773 bp, Macaca Mulatta
  misc_feature (1)...(773): n = A,T,C or G
gtttttaaaacagttgttaggatggatgaaggattagccaaccaacattcacagtaggatcctttaggttacagtattggttaaagttgacaaggccaaacaatgggctgtaagtagtctatccgtatttttatgctttaagagtttgtgtgtcaaggcttttatatttatttccgtcattctcaaagtcaaaaccgttgtaataccaagatctaattttgcaaattctattaactcttttgaaattttcaattaattttcatgaaacagttttcacatacactaataaaacctggaaaatagtcctttgtgtgatagtttaattctctataaaacataatcatagcaaagtaatgtggatatagttcttaagctgtgaagtgctatacagaagttgttactgatgagaatttcatcacatttctttttagtgagttctatagagaattgactcnnnnnnnnnnnnnnnnnnnnnnnnnnnnnnnnnnnnnnnnnnnnnnnnnnnnnnnnnnnnnnnnnnnnnnnnnnnncgnnnnnnnnnnnnnnnnnnnttctgcatcccgggtttatgccattctcctgcttcagcctccccnnnnnnnnnnnnnnnnnntgcccgccacctcgcccggctagttnnnnnnnnnnnnnnnnnnnnnnnnnacnnnnnnnnnnnnnncgtgttagccaggatggtctccatctcctgacctcgtgatccgcccatttcagnnnnnnnnnnnnnnnnnnnnnnnnnnnnnnnnnnacgcgcc

SEQ ID NO: 41953 - DNA, 635 bp, Macaca Mulatta
ggggaccactctgcaaggactctcgagcagctccatctacagattcacatggagaagaattaaaggctcctgccaatcaccagcacaattttgccagccttacagttggcagctgtgtgaagatgggaatggaggaggcagggtaggcagtgggtgacgcagccacagcttgggttctctgcagccctggcacagaaggttccttagatcctgggatgaggaggttgaccagaaggtgggcttgggaaggtagcctggggtgcaaatcctcttggctcttcagcttggcaggatgtcaccctcagtgtctgaaagctgggtttgatgcgtctggaaaagcgtccctcacaggcgtcgttgctgggagcccctggtgccgccagcagctagcagggagcatgtcctctgcccgctcacttctgacccttctctccctgcacggatgaggaccttaggacagaatggctctaaacccgctcctgtccacggtgtgagcatttcctgatgtgaaagcttcaaccgcagtctcaacattgagctcttccaaggcataaaataatcagttaaaattattacgtgttataaagatgctggccccagagaagagtgagacccggacacagtgcagctgggag

SEQ ID NO: 41954 - DNA, 537 bp, Macaca Mulatta
ggggatagtgtggaccagcgtttgtgtggcatccaacgtaatcctgacctattcgttaccgcgtccggagataaaaccattcgcatctgggatgtcaggactacaaaatgcattgccactgtgaacactaaaggggagaacattaactatctgctggagtcctgatgggcagaccattgctgtaggcaacccagatgatgtggtgacctttattgatgccaagacacaccgttccaaatcagaagagcagatcaagttcgaggtcaacgaaatctcctggaacaatgacgacaacatgttcttcctgacaaatggcaatggttgtatcaacatcctcagctacccagaactgaagcctgtgcagtccatcaacgcccatccttccaactgcatctgtatcaagtttgaaccgatggggaagtaatttgccacaggaagtgcagatgcttaggttagactctgggatgtggatgagttactgtgtgttcggagcatttccaggctggattggactgtaatgaccctcactttcagcca

SEQ ID NO: 41955 - DNA, 383 bp, Macaca Mulatta
gactgacaaacaaccctgcaatgacgtctttctccgccgcctccggatccctccgccctccgccgctaccacagagtgagtgctgagggaggagggggcgggacgggggagcgcgcgttccctgagcccttcagcggggcgtggttcttcctgggcttcctgaagtgatcgacaaatttgtgttctctgtgttcagactagaggttgtggattcagagaccacgaaaccgacacactatcctgtctgcctccccgtctctagtttaggctcggcggggtggagaaagaaggacgtatccgggccagggatttcagggaaaggaggtgggatgatgtaagatcacgtgactgcccgcggccttgtcaacaatccacccctgagg

SEQ ID NO: 41956 - DNA, 622 bp, Macaca Mulatta
  misc_feature (1)...(622): n = A,T,C or G
gccaaatggacanccccttcctaatgtctgtcaagaatggtttgcctttggtagcagggagaggtggaggattgcctgtgagaaacaggggcagccccccaacaagaccatccatctctgtgtctgtcttggtctgatacgtcggaccatgggctgagggaggaggctcgatgctgacatcgcacaggccctgagaggccaaagccccccattcataggcaggcctgtcttgcttgcccttgcatctgggaagcagtgggcagggtgggctagactctccccaggatcctcacagtgggccctgtgggcctggctgctccctccaaaggtcagaggcaaattggtgaccaagtgaatgtaccagagcgggcaatggcattacatgactgctaacagaaacatggcaacaaccatttcttctccaaggaacataaatagaagatgtgcagaccggcaggggctagtggcagggggctggctgtgcattggttttgatgcctctcagctttggcagacccaaggctggggcccaaaaaaaaacgagggctgatgaggtgacctggagtgagggcggtgcttcgccacccctcaggaaccatacttcagcggctctgcctctgca

SEQ ID NO: 41957 - DNA, 613 bp, Macaca Mulatta
ctggcctgtatttcagcatctttaacctgttacctcataagagtagctaacacttctgtcatatttactgtgtggtcactgttttaagcattttgcctttactacctcctttcaacctcacaacaacctgtgaagtaggttccattatcatcccccttttatagatgaggaacacccctggttaaagtaacttgcccaacatatctggtaagttgaagagctagaatctgaatgctggtgtctgtccttgttcccgttattccaaactgattcttttataaaatggagctaattagagcttcctcaggattattacagggattgtcataaaatttgcagataatgcttaacacataataatcactcaacgtttttggaagaagtaggaacttttctttcctttaatgattccattctcttccacagtttccctcactgctttagatagtcactaggtgttattttctttcagtctctgctgtggtgcttctgaaaatcactgtcttctgaagtaggtttggggagtagatcagaacataccttatctgctgtagccaaggacacaaaggcagctttttcatgcagccgtggggtgaggcatgatcatgcatgt

SEQ ID NO: 41958 - DNA, 467 bp, Macaca Mulatta
  misc_feature (1)...(467): n = A,T,C or G
atgaagaagcgtctgaggacctgcttggtgattttgtggctttatttttataggggaagtggcaaaaaccaagtggagcagagtcctcagtccctgatcatcctagagggaaagaactgcactcttcaatgcaattatacagtgagccccttcagcaacttaaggtggtataagcaagatactgggaaaggtcccatttccctgacaatcatgactttcagtgagaacacaaagtcgaatggaaggtacacagcaactctggatgcagacaccaagcaaagctctctgcacatcacagccgcccagctcagtgattcagcctcctacatctgtgtggtgagcgacagaggctcaaccctggggaagctatactttggaagaggaactcagttgactgtctggcctgatatccagaaccctgnnnnnnnnnnnnnccagctgagaggctctaaatccaatgacacgtc

SEQ ID NO: 41959 - DNA, 846 bp, Macaca Mulatta
cagctgagccggccgtgggatcctgactggaggaggaggggaacccataggacgcataaacatggacctggaaaacaaagtgaagaagatgggcgtaggtcacgagcaaggatttggagccccttgtttaaaatgcaaagaaaaatgtgaaggattcgaactgcacttctggagaaaaatatgtcgtaactgcaagtgtggccaagaagaacatgatgtcctcttgagcaatgaagaggatcgaaaagtgggaaaactttttgaagacaccaagtataccaccctgattgcaaaactaaagtcagatggaattcccatgtataaacgcaatgttatgatattgaccaatccagttgctgccaagaagaatgtctccatcaatacagttacctatgagtgggcacctcctgtccagaatcaggcattggccaggcagtacatgcagatgctacccaaggaaaagcagccagtagcaggctcagagggggcacagtaccggaagaagcagctggcaaagcagctccctgcacatgaccaggacccttcaaagtgccatgagttgtctcccagagaggtgaaggagatggagcagtttgtaaagaaatataagagcgaagctctgggagtaggagatgtcaaacttccctgtgagatggatgcccaaggcccgaaacaaatgaacattcctggaggggacagaagcaccccagcagcagtgggggccatggaggacaagtctgctgagcacaaaagaactcagtattcctgctattgctgcaaactgagtatgaaagaaggcgaacccgaccatctatgccgaaagggctggctatgataaactgtggc

SEQ ID NO: 41960 - DNA, 202 bp, Macaca Mulatta
  misc_feature (1)...(202): n = A,T,C or G
tgaaggtctccctgctgtgctgagagaggggcatgctggaagaagagtggtcagagaagcaacattgctggctctaaagacagaggacaggccatgaaccaaggcatgcaggcggcctccgaaagcnngnncaggcaagagaatggactctgccctggagcctccagaacgcgtgcagccctgcccattccttgcttttagc

SEQ ID NO: 41961 - DNA, 383 bp, Macaca Mulatta
ggacctcatggccgtctacacagcagacttggatgtagttctctttcaggatctaatgtctgtctacacagcaggctgaaatccagttccgtcctgggactggaacctaatggctgtctacacagcagactcaaatcgagctccatcccgggacctaatggccgtctacacagcagactcggatgcagctccatcccgggagctaatggctgtctacacagcaagctcaaacccagctctgtcccaggagctaatggccatccacacagcagactcagatgcagctctgtcccgggacctaatgtctgtctacacagcagcctcgaatccagctccatcctgggacctaatagccatctacacagcagactcgaatccagctg

SEQ ID NO: 41962 - DNA, 847 bp, Macaca Mulatta
cgacaggccgagcgggaggcaacgcaaacaattaattaagggcggacgggggagcggagaaagagacagggggaggagacacacactgggggaacacccaaattccgaagtgtgtccgaccatcgtgtgcagtgcgaagtgtaaagcgcgccgcccgcccgcgaaaggtgggagtcgccagcccgaggtatgggggcgaggtatgagggtccgtgcaaagaggagaaggacaacccgccattatttttcccgacccttttttggtaagaaatgggcgcacacgttataaatgacatagggagttctcttgaagaaactcgaccaatgtatataagttacaggtgtgtgcaacagttaccagtgtgatcgttagtatttcccagaatcatctattcaacatgataagttatgttttataatgtggtagcaaatattttactaaatacgttttgggtacagattaatattcaactttccaaaagataggtttattattaacttagtgatgtttcgctttagactgaaatctgatttgcagtacataaaagtacatgaaagtgaataaagtgaacaaatagaaaaatctcctttattttgcttatttaaaaattgctccaggtttatttctggcacacttagttcatacaaagctaaacatttctaatgctgaacttatttgagtgttatataattacatggtataaaatgcatatactaagcagtatacagaatgtgcctttaaaaaactctactcataaaaatactagctcacgtacatactgacaactagccatgtttaaaaataaactctcctcaatgttgggtcgtctcctctctcccccccccc

SEQ ID NO: 41963 - DNA, 762 bp, Macaca Mulatta
  misc_feature (1)...(762): n = A,T,C or G
ggtatgctgaggagagtttgacagattttgaaaacgagtaaaggcaaaatatttttttagcctttattttgcctgttggaattttacagagtcaaagtaggcaaagtaagaaaatagctcttcatgagggctgacccttaaagaactgcaacatagttttggaattgtggggaagagaagagtgactgagctgaggagtaataataggagaataaagtcttgagtaacttagaactgaaaatgtcctcttttaaaaagaaattaaatcagacaccacatggtggtgtccttggatctcactgtacagaattagcagtgtataaccatcttccctttgcatcgtgttccaattctctcctctttcctttccactctgctttaagctcatttgtcaggcagactttcccagagtgtcagacattacgtaaaacacatacgttagccatgctgctggtatggaaaaattccacaccatgattgttagcctcctttaagcttgaaatggaatgggatttaaccattctaggcaacacccctgaagggcatacctaacctcaataatgttggctttttaaacgtaggcttgtatggtggagaaactttgtaaaagaagaatccaggagaagtttgtgaggatcctacaaacccaggcccacttacttttcntcaattctttctagtctcttgtagatctaatgggtctgggaataaaaactnttgaaagnattaatatttccatggtatgcctggctgaaaatgaag

SEQ ID NO: 41964 - DNA, 270 bp, Macaca Mulatta
tcactctttttcatggcagctgtggattttttagttcctttctcttgtccaccagaaaaatagtttcctaggttgggccagttacatgtttggtaagggcaactttgcagccatcatttgcaagagaactctaaatattggatactgtggccagcctcaaaggggaataactcaaatgtgggttatatcatccaaatgttcagatcaacagatttgttagtaaattagcagtcacaccccttttttgatgctttcacattaaaaaattga

SEQ ID NO: 41965 - DNA, 177 bp, Macaca Mulatta
aggtagaagactttttgaatctctccacacagctgtctggatttcatatttgtattgacaaagggacttttgatgccataagccttaatcctgacaatgcaattgagaagaggaagcaatatgtgaaatctctctccagagtgttgaaagtaaaaggcttttttctgataacgtcat

SEQ ID NO: 41966 - DNA, 147 bp, Macaca Mulatta
caggttcatggccaccagcgacctgatgtcggagttgcagaaggactccattcagctggacgaggacagtgagcgcaaggtggtgaagatgctgctccggctcctggaggacaagaacggtgaggtgcagaacctggctgttaagtg

SEQ ID NO: 41967 - DNA, 764 bp, Macaca Mulatta
  misc_feature (1)...(764): n = A,T,C or G
gggaggaagacggggggtttcccaggtgactttgcgaagacatggcggggacactgtgaatgtcagcccagaaggtaatcagagcgtgttgattcaaagaaaacagaagggaaggtagacagcaggttctccctggagatttttcgttttcatttacgctgctgaagccaacgtttttgcctaacacgccatgtaatgtaaacgtataggtttgagtacgtgtccggccagatgtgtagtgaacccgaaaactttcctaattgtagttagcatcgtccctaagcggaacgattttctgtgaacatgatttgtacttttctacgagccatacagtatacggagaagctgcacaggtcctcggcaaagcgattgcttttgccccacattgtgcttaacaaagcgtgcttgaagactgagcccagtttgagatgggggcttcaatatcagaagaaaacagtggcgacctaaatgtattcttgggagtcagctcgaaaaactatctgggacgcgaggaacgaagcccccgggaaagccggaggaagggtagccggccaaccggcggggcttgtgggcgcggaaggccgaaggaaaaggggaagccggcccgttccccaagcgatgcgcaaagaaannnnnnnnnnnnnnnnnnngggaaaagaggagatttttgaccgcacgtgtggaaaggagagggggggggccctcagttttggggaaaatacgcgacacacgtttatgaacgcgcgccgggcctctatgactat

SEQ ID NO: 41968 - DNA, 1606 bp, Macaca Mulatta
  misc_feature (1)...(1606): n = A,T,C or G
gaaaataacgactctgaatggtataaaaataatacaagtttcctgtggacactaccactccctggcattatcaaaannnnnnnnnnnnnnnnnnnnnnnnnnnnnnnnnnnnnnnnnnnnnnnnnnnnnnnnnnnnnnnnnnnnnnnnnnnnnnnnnnnnnnnnnnnnnnnnnnnnnnnnnnnnnnnnnnnnnnnnnnnnnnnnnnnnnnnnnnnnnnnnnnnnnnnnnnnnnnnnnnnnnnnnnnnnnnnnnnnnnnnnnnnnnnnnnnnnnnnnnnnnnnnnnnnnnnnnnnnnnnnnnngtgcaaagcaacaagcctctctcaattggtgcactgaagaatctaggtgtgatttatatcagctgtggtgatgagcacactgcggtgcttatccaggncaggatgggaaagtgttcacatttggagacaatagctctggacagctgggatacagccccactcctgagaagagaggtccacaacttgtggaaagaattgatggcctagtttcgcagatagattgcggaagnnnnnnnnnnnnnnnnnnnnnnnnnnnnnnnnnnnnnnnnnnnnnnnnnnnnnnnnnnnnnnnnnnnnnnnnnnnnnnnnnnnnnnnnnnnnnnnnnnnnnnnnnnnnnnnnnnnnnnnnnnnnnnnnnnnnnnnnnnnnnnnnnnnnnnnnnnnnnnnnnnnnnnnnnnnnnnnnnnnnnnnnnnnnnnnnnnnnnnnnnnnnnnnnnnnnnnnnnnnnnnnnnnnnnnnnnnnnnnnnnnnnnnnnnnnnnnnnnnnnnnnnnnnnnnnnnnnnnnnnnnnnnnnnnnnnnnnnnnnnnnnnnnnnnnnnnnnnnnnnnnnnnnnnnnnnnnnnnnnnnnnnnnnnnnnnnnnnnnnnnnnnnnnnnnnnnnnnnnnnnnnnnnnnnnnnnnnnnnnnnnnnnnnnnnnnnnnnnnnnnnnnnnnnnnnnnnnnnnnnnnnnnnnnnnnnnnnnnnnnnnnnnnnnnnnnnnnnnnnnataactacatgtctcgaggatgatctgctcagagctcttccatgccgttctccacaccaagaagcttttatcagttttcctcctgctcccagaatgtcctgtgatgcatgattctaaaaactggaagaacctggtggttccatttgcaaaggctgtgtgtgaaatgagtaaacaatctttacaagtcctaannnnnnnnnnnnnnnnnnnnnnnnnnnnnnnnnnnnnnnnnnnnnnnnnnnnnnnnnnnnnnnnnnnnnnnnnnnnnnnnnnnnnnnnnnnnnnnnnnnnnnnnnnnnnnnnnnnnnnnnnnnnnnnnnnnnnnnnnnnnnnnnnnnnnnnnnnnnnnnnnnnnnnnnnnnnnnnnnnnnnnnnnnnnnnnnnnnnnnnnnnnnnnnnnnnnnnnnnnnnnnnnnnnnnnnnnnnnnnnnnnnnnnnnnnnnnnnnnnnnnnnnnnnnnnnnnnnnnnnnnnnnnnnnnnnnnnnnnnnnnnnnnnnnnnnnnnnnnnnnnnnnnnnnnnnnnnnnnnnnnnnnnnnnnnnnnnnnnnnnnnnnnnnnnnnnnnagatgtcacaagagaaagcatacatgctta

SEQ ID NO: 41969 - DNA, 644 bp, Macaca Mulatta
acttttgtttttccaactgtcattaatcagagaaaccttcccagaaccaccctgtgtaaaataaagcacctctgctgctgctttattctacttaacactactttttttctgtaacacctgtcaccagttgacaggttaagtttaacaacttctctcctgtagaatattgaggtgctttaaaatacatatatgactgaacctcacccacacctactgaaactcttcattttggttctgaatgcctattttggggaaatatttccaggattatgacagacatttcagtgacaacctgctcaaggtgatttcctgcattgtcgttgttaaatccatctattccttcttttaaaccagaatttctggcctataatttcactgagaaataaagatactatctttacaataggggatattctaaccctctctacagcatgatggctctgcagctatttgaaagcatctgtcagtgtaccccacatatactcttgttaaactgttttgattctggttgtttctgaaatgtgtattggaaatgcagcattgtttgaatgtctattgtgagttacttgctttctaaatttatcttaatccttacaaacccagaggaaacaatgtttttgaccctgttttacaagttcgtgaac

SEQ ID NO: 41970 - DNA, 848 bp, Macaca Mulatta
  misc_feature (1)...(848): n = A,T,C or G
ggnnnnnnnnnnnnnnnnnnnnnnnnnnnnagtggaagttgcagtaagctgagatcacaccactgtaccccagcctgagctnnnnnnnnnnnnnnnnnnnnnnnnnnnnnnnnnnnnnnnnnnnnnnccaggcgcggtggcttnnnnnnnnnnnnnnnnngnnnnnnnnnnnnnnnntaggcggatcacaaggtcagtagttcgagaccagtctgannnnnnnnnnnnnnnnnnnnnnnnnnnnnnnnnnnnnnnnnnnnnnnnnnnnnnnnnngtggtggcatgnnnnnnnnnnnnnnnnnnnnnnnnnnnnnnnnnnnnnnnnnnncannnnnnnnnnnnnnnnnnnnnnnnnnnnngcnnnnnnnnnnnnnnnnnnnnnnnnnnnnnnnnnnnnncatnnnnnnnnnnnnnnnnnnnnnnnnnnnnnnnnncatgttcggcccgccttcggccctcgaaaaagctttctaaaccatttcgtttggggcgcgcgggggcccattaggtaaagtgaaacatggtcaataccgtgtttccaaaggaaaatcccggggcaaagaaaaagtgcttggggaattcccnnnnnnnnnnnnnnnnnnnnncgggggggcaaaccgaagcgttccttgaaaaaaattccaaaatgggagtttctgaaaggtcatttccggggaattctttcaaaccgggaattcccaacccgagcctccaaattccaaatttaggccccgcgcctgtgcccttttttggaaagacacgggtgggaatatccataaaacctatctggcgcgaacatgggaaacccctcccacaaaagggctttagttgaaacccgagaaaccccg

SEQ ID NO: 41971 - DNA, 803 bp, Macaca Mulatta
ggagtttagttatttttaaatgtcaaattgttcatagagttttttaaaaaatacagatccttgggggtcttagacttactaaatcattttccctggaaacacataattttgaaatttttctaggtgattctgaagctcctctctgattaagaaccacagatacaggggaataaaggtcctaatctgcattagacatagtattctagtcctagggaataaatgaggaagatttacttatggtaaaccttacctatggtactctctgtgttcaatggtgaaaataagcatgtaaacacatgaatagtttgtcactttgtacatttacctttcaagaatattagatgtagtaggggaggtatttaaaataaattttctatattttttacactagtattgttacagtgtggtttttcttttattatttctttaatttctttaattttccttgccaaaaccagtattttgaaattagtgaagttaaactcctcattcttggaaatgttgtggtcttgagcttgctaccttagcaacgttatttcataattaaaaatgaatgcattcagatatctaactgtccagtttcccttattaaataaagatttattcaaaattgtatccctcaaccttgttatgtaaggaaagggaaaaagtttaagggaataatttttatacttttgttggaaacatctggttttttatcccccaaactatacttttcaacataaatctgtttgtaaaagaagaattttccaccttttgaaaagctgaaattgtgccaaaatttaaattggtttctccaaatt

SEQ ID NO: 41972 - DNA, 654 bp, Macaca Mulatta
gaatccctggggtgctggactggccccccagagggtaagcccatgtccggagtctcgggcccaatcaacagtttggaggggtgcatgttagggccttccatgttgggcagaaatttggtgggtctgttttctgaacggactctcttgcctctcctgcagcatggagagcctgaccccatcgctctgccaccgctggggcagggttagcagatggcagcccttctctgtggttgactggtcgctgagtgataagtgtggttggttctggtgagtgtagggatggcacgataccagggcagcctcttgaaaatggccttgggagacaggagctgggggcaggtggacagctgcaggccctgtgcccattcaggggtgaagggcgtccgctgaccaatctgcagaggcccctgcaggattccacgcgcctcccatttgtccttgaggactgctggctataaccagggcacaccacccacctcaagacaaacccccacccttgtcagcttagggggagcccagtcctgagggctgcatctctgtcgtaggcccagccatgggcacaaagctggacggatactccccgcccctaccccgccctggcttctcaccctggggcatccaaggagcctagccccctgagggtttgctgtcctc

SEQ ID NO: 41973 - DNA, 305 bp, Macaca Mulatta
gtctgtgtgtcatgattgcggcctccatttatacagacaggcgtgaagatattcacgagaaaaacatgcaattctattacatgaccgaaggcggcagctacggctactcctacatcctggcgtgggtggcgttcgcctgcaccttcgtcagcggcatgatgtacctgatactgaggaagcgcaaatagagcccggagctgggttgctttcactgccgtacagaatccacattcagataaccattttgtatataatcattatttttttgaggtttttctagcaaacgtattgtttcctttaaaagc

SEQ ID NO: 41974 - DNA, 739 bp, Macaca Mulatta
  misc_feature (1)...(739): n = A,T,C or G
ggctacaatatatttattttagataataaaaagtacctattttatattccaagtatatatctgtattataacactgtgtttcttcaagggaatgataaatcaatttacttttaacaatagcatatattaaggtaacatcttaagaataaaaatagagatgttaagtatttgagtaacagttttaaacaatcatattttactcattatgagatttatttttcatgatttattaaacaatgtaagaaatcctctatgttattagagtattgacagttaaaatttctcnnnnnnnnnnnnnnnnnnnnnnnnnatttctagacttacagagagtaaagccaatagatgacagtcaaaattaacaaaagggcttaaattatgcagataagaaaaaagttgcaatattatgataacaaaataagaaagttagcacaagtcattacattatggtgttagtgtaattctaattaatgaaaatatgctgtttttcttagactttctctaatttatgccttgtattatgtattgtttcctccacaattattattatgcaaataaagtaatcattttctaatatcatcatagtcacatgtagactgaaaaattagacaaggcttgttggcttnnnnnnnnnnnnnnnnnnnnnnnnnnnctgagttaggtggnnnnnnnnnnnnnnnnnnnnnnnnnnnnntctgggcaacatggcaagactccatctcttcaaaaaatacaaaaaatt

SEQ ID NO: 41975 - DNA, 865 bp, Macaca Mulatta
agtggtaaaattcacagaagttccaggttcatgatgtcaggatcattccttgtgcaaagtttgatgtagatgaagataaagtggtttcttggtcaataattgtaatttctttcttttaaagtcagtgggtttcttgtatagttctattacaattggcccaggtttaatttcatccatctccatgaaagcaaaacacttggtgctggtaaacctttttttaggcttgtagtgtttgaattcaaagaagatagctgcacctttggttaatttttcaacatgcttctggagctcaatgtccacattaaaatgaacatatgtatcttcttttcttgaagccacaggggtatcttgcacaggagttaagtctatgccattcagatccttttacactaactgtaatatagggatcaatgcactgcccagcatctttcaaaccaattttctcaattctgatagtgagtaacgtcattcctggttctgatggcaaccttggtaataaagtaccgggaactctagcaggaaaagaatcaggagaccctgctccagcaccaccctcttcttcatcttcttcaaattccaaattctcttcttcaccaggtgccaaaattcttcttaatgggacaggctgaacatcaaatgggaattctttattatatgtaagaatattctttaggattggttctagcttcttcaggtcctccagtttaattcttcttgagactgtgtggactgtaaagctgcacttcgcaattccaagcatgttgcaattttgcctatggttttcttttgttcttctgtgaattcagaattattgtgttgagcttgggcctctttttggagattcttggtaatatctgatactcgt

SEQ ID NO: 41976 - DNA, 395 bp, Macaca Mulatta
aacttggcccctacccccgtccccgaggacttggagggaagggcgggacagttggaggccagcagaccccttggggacagctttaatgtttcgaagattcctgagtggtaaatgttgcgggagggcaagctgctcctctttttcaaaaactcattttctctagcaagctgttttggcctctttggtgtccatgagctccccaatggcagtttcctgccatgactttctcctcctggacactcggggagcccaggtggtgcccgcgcacctctcacacactgggggatggggtccaaggcctcatccaagtctgttaacagcttcccactcgaccagtctccccaaaacacactaagttaaacgattctgcttatataggagtgctatgaaactga

SEQ ID NO: 41977 - DNA, 2257 bp, Macaca Mulatta
  misc_feature (1)...(2257): n = A,T,C or G
agactagggtctggagccgaatctgtgtatttctgtctgggaccaggaagctgcagctgtccccacatcccccgcaaatcctagaagtggagtctgggtacttcacggagagaggtgtcggcacgcacagccgtggacccagctgagcagagcagatgctttgcaagctgcccctggctgctttctccctttcccacttctgctctctttatggactggtcagagggtaggtgggaaagaacagacaagccatgtaagttggcagtggggagatttccgctgtggaaactgcctgggaattcaggccagcagcgtcctcattcggccacctggctatgccccttaaataagcccctcaccttgctgcctcaggaccttcaagattccatccgtgggctggctggcgcggcggcaccagtgaggccccacaccctggctgggcggaggtgctgctagcaacctctctttctctgtaggaggaaatggaaaatgcagcgtgtggaattgccgttagggtccttccttaattgaaggnnnnnnnnnnnnnnnnnnnnnnnnnnnnnnnnnnnnnnnnnnnnnnnnnnnnnnnnnnnnnnnnnnnnnnnnnnnnnnnnnnnnnnnnnnnnnnnnnnnnnnnnnnnnnnnnnnnnnnnnnnnnnnnnnnnnnnnnnnnnnnnnnnnnnnnnnnnnnnnnnnnnnnnnnnnnnnnnnnnnnnnnnnnnnnnnnnnnnnnnnnnnnnnnnnnnnnnnnnnnnnnnnnnnnnnnnnnnnnnnnnnnnnnnnnnnnnnnnnnnnnnnnnnnnnnnnnnnnnnnnnnnnnnnnnnnnnnnnnnnnnnnnnnnnnnnnnnnnnnnnnnnnnnnnnnnnnnnnnnnnnnnnnnnnnnnnnnnnnnnnnnnnnnnnnnnnnnnnnnnnnnnnnnnnnnnnnnnnnnnnnnnnnnnnnnnnnnnnnnnnnnnnnnnnnnnnnnnnnnnnnnnnnnnnnnnnnnnnnnnnnnnnnnnnnnnnnnnnnnnnnnnnnnnnnnnnnnnnnnnnnnnnnnnnnnnnnnnnnnnnnnnnnnnnnnnnnnnnnnnnnnnnnnnnnnnnnnnnnnnnnnnnnnnnnnnnnnnnnnnnnnnnnnnnnnnnnnnnnnnnnnnnnnnnnnnnnnnnnnnnnnnnnnnnnnnnnnnnnnnnnnnnnnnnnnnnnnnnnnnnnnnnnnnnnnnnnnnnnnnnnnnnnnnnnnnnnnnnnnnnnnnnnnnnnnnnnnnnnnnnnnnnnnnnnnnnnnnnnnnnnnnnnnnnnnnnnnnnnnnnnnnnnnnnnnnnnnnnnnnnnnnnnnnnnnnnnnnnnnnnnnnnnnnnnnnnnnnnnnnnnnnnnnnnnnnnnnnnnnnnnnnnnnnnnnnnnnnnnnnnnnnnnnnnnnnnnnnnnnnnnnnnnnnnnnnnnnnnnnnnnnnnnnnnnnnnnnnnnnnnnnnnnnnnnnnnnnnnnnnnnnnnnnnnnnnnnnnnnnnnnnnnnnnnnnnnnnnnnnnnnnnnnnnnnnnnnnnnnnnnnnnnnnnnnnnnnnnnnnnnnnnnnnnnnnnnnnnnnnnnnnnnnnnnnnnnnnnnnnnnnnnnnnnnnnnnnnnnnnnnnnnnnnnnnnnnnnnnnnnnnnnnnnnnnnnnnnnnnnnnnnnnnnnnnnnnnnnnnnnnnnnnnnnnnnnnnnnnnnnnnnnnnnnnnnnnnnnnnnnnnnnnnnnnnnnnnnnnnnnnnnnnnnnnnnnnnnnnnnnnnnnnnnnnnnnnnnnnnnnnnnnnnnnnnnnnnnnnnnnnnnnnnnnnnnnnnnnnnnnnnnnnnnnnnnnnnnnnnnnnnnnnnnnnnnaagtttgtgaaatggcgacaatacctatgtatcactggattattggctaaaatgtaatgagattccttgtgtgaaaacagctattctacctgacactcatcgtatgggctctacaaagggatgttccccaacctgttcttcccgacaggaagcacagggcactgcagatggggcagcatgtcaccttggcagtgactctgtggcttcccaagcaggagtgtcaggggaaccattagacagagtctaggagccaaatgcattgccaccctgagcagacatgggagtggggagggggctgtgactcagtgagtgactttcaggggccccaggccctgcgggatgtaggccaagccctacagcttccctgggcagtaagtaaaaacattctcctagcattaaaatggtttccata

SEQ ID NO: 41978 - DNA, 557 bp, Macaca Mulatta
cgggagtcgtttaacccgaaaagttacgaattggacaaaagcttccggctaaccagattcactgaactgaagggcacaggctgcaaagtgccccaagatgtcctgcaaaaattgctggaatctttacaagagaaccacttccaagaagatgagcagtttctgggagccgttatgccaaggcttggcattggaatggatacttgtgtcattcctttgaggcacggtgggctttccttggttcaaaccacagattacatttacccgatcgtagacgacccttacatgatgggcaggatagcatgtgccaatgtcctcagtgacctctacacaacggggggtcacggaatgtgacaatatgctgatgctccttggagtcggtaataaaatgaccgacagggaaagggataaagtgatgcctctgattatcgaaggttttaaagacgcagctgaggaagcagaaacgtctgtaacaggtggccaaacagtactaaacccctggattgtcgtgagaggagttgctaccactgtctgtcagcccaatgaatttatcatgccag

SEQ ID NO: 41979 - DNA, 642 bp, Macaca Mulatta
gtgcgagattattagtactgcagagtataatcaccagctcagaccaacacaaagaagaaaacaaatctgaaaaacttctgagagtgactgtaactaggtaaaggtattacttatattgaccctttttaactctcgatttcacctataatcacttttctctaggttagtaacactgaagaaatcacttttgaagcattgaagaaagcaattgataccagtggaatggaagaacaggaaaaggaaaagaggcgtcttgtgatagagaaatttcagaaagcaccttttgaagaaatagcagcacagtgtgaatccaaagcaaatttgcttcatgatagacttgctcaaatattggaactcaccatacgtcctcctcccagtccatcaggaacactgaccattacttctgggcatgcccaataccaatcggtcccagtctatgagatgcagtttccagatctgtgtgtgtactgattggctcatgaagacctcagcatatgatttgtcaagcctagaaattacagccaagctgagctttcagggtttacataatgtgtattaacatacttcttgaaaataatgatggaacatatctttaaccaaatgcttggcataccatattagaacgtttggagctatatataa

SEQ ID NO: 41980 - DNA, 385 bp, Macaca Mulatta
cccctgggcctctggccaccttgatccccagcctacctgctgatcacccttgtactcgccgaagtggaagactcgggctttgagctccagctcagctgctgtgtcctcctccttggtgatggacatcatcatcgtgctgacccactgcttcagctggttgacctccctgtccctggaggagggagaaaccggcagggcatcagtcactcagcgcagccctgggcacatcgcttctctgagcctgaccgtctgtacagtgctttgcccctaccagctgtcctgagggctgaaggatcatgggtgccaagtctctgcatgcccagggggtcagaaatgctggcagaatgtaggggaaatcttaaaatatttaacagtcaacattaaa

SEQ ID NO: 41981 - DNA, 161 bp, Macaca Mulatta
accacccctgaagaaactgctcaggttgctacaatgtctgcaaatggagacaaagaaattggcaacctaatttctgatgcaatgaaaaaggtcaaaagaaagggtttcatcacagtaaagatggaaaaacactacggatgaattagacattattgaaggca

SEQ ID NO: 41982 - DNA, 642 bp, Macaca Mulatta
  misc_feature (1)...(642): n = A,T,C or G
ttagatgcccacctcctccatgcctcggcgctcgttttcctccacgcactggcgttcgatgtagggccccntggacctctctctcctatggaaggaggaaatgttctcaatgtcctgacagccctgcttgggccataacacaggaaacctgtcccctatctatacacatggaggtggagtgaggacagtgacgaagatgcccaggtctgggactgcacacacagccttctgcatgcctgccctccctctgcaagccctgtcctcattgcatgtactttctcaggacctttctaagaggctgaagcagccagaccctctgcaaatcacacatgatctttgtgggaaggtcaggagtcctaagtaaagtcagcacagaaagggcatctgatagattccaggcctggggttagcagcctgtgcccccagctgggggatcagacccggtgttggtcctgccacccacgtgctgtgtgagaggagaatccctgacccctgccctgggcttggaccttaacacatctgacgaatgaagggttgcctcagcaccagcagctcctgtgctgctaagtgcttttctcctctgaatcttagcgatgaacaattccaataccgccacacaggacactagagtaagaatacttc

SEQ ID NO: 41983 - DNA, 814 bp, Macaca Mulatta
attttaaatccttgtgtaatatcgtatctccatttgcatgatctagtgggatatatggataatgacagtggtagaaaatattgatattaagcattgcagttattaccatggccctcactgattgagtgttcacttggtgttgagcaccgtgctggtcccaaggcccttcctaagattagaatgtgggagagcagggcatgaggccagtaggcaaaatggaggagagcaggtcggtgatagacgtgaagctgatgggtaaggggttacatacactaagttcacttattatagtggttcttgttggaccctcttttatttctcaatctcacctgtatttttctttctctttccagctacaggaagcctttggttgggagccattcatccgtctcttcaccgagtacaggaaccagaccaacttacccacagataatgttgacaaaatgaatctgtgggtcaagatgttctcccaccaagtgcagaagaacctggctccgttctttgaggcctgggcctggcccatccagaaggaagtggctaccagcctggcctatctgcctgaatggaaggaaaatattatgaaattgtacctcctcacacagatgtaaggagtgcccatcgaggtggcaggtagagaggtttggggaggtaggcagaggtggggattcattcctctacctctgcctcccagggtctggccttgtcctcttagttcattgccgtataccttattaccgacttctgtctctaggaagtgggttcagaacacagccaaaagtggaatcagaatttctcaggtgcaagggcttctgtt

SEQ ID NO: 41984 - DNA, 751 bp, Macaca Mulatta
ggcaaaaacctagagaccaatcatatatctgaaaagaaatacccattaaaaattctccctcctgtcattgagaactatgcattgaacattccgaatcattctaagcctctgaagagactgtaatgatccattcatgagctggtatgaaatcagtgggaagcagaacaacaaaagcaactttaaaagcaacaagaaattatgtaccatatatacactgtagcaaatattttatatttgagagtctttacagcttacatttccattccattattacaagtgatgaaaaacaaaaaattgcaagtagtatgcaaattataaatatacagtcttcccacttcactaaccaaattcctactttccagtgtaacttcccaatttatgcaggaaacctcctgcaaggctgaaactgattagaaaattctttatagtttaaaatagctctttctcatttttagagaagtcaaatactcaaccatcaaaattaagaataaattgaattgtcacagtccattacagttattgttgctagatccacctcatttgcagatgtccaaactataaaatgaataattctttctcttcaaattcatctgttcttaaaatgctacttaaaactttggttgttttcctgtaatataaaagaaaaagttaatttatcaattgattgaatacggtttttactaattagtccatccaaccaaatactgtgaatgtacccaggtgttttacagatttaaaatgcatgtttaac

SEQ ID NO: 41985 - DNA, 545 bp, Macaca Mulatta
  misc_feature (1)...(545): n = A,T,C or G
attatattcactcagtatactcttaccattatctcccagatggaaaaagagaactaatgtggaaaccccagacggtgtccagttggaccagggcgacattagacacttaacagtattttcagtctgtctgtctcgttattccaatgagagaaatggaagnnnnnnnnnnnnnnnnnnnnnnnnatttattggctcttcatatttctctacattatttataagttgcagtttcttcagttggttagtatttccatactgtttgcaattttatggcctttaaatataggacatattatatagtagaaattttgactttaaagcatcttgagtagtatattttgagaagaaaagctatactgctcttctggatggtttccatcctttatttaggtcttttctttttgaattcaagtgttttgtatgcttagaaagtggacatgtataatagtgagattggttgtttctgagctggaaattggaaacttttgaaactcaggaaattgctctgacaatgttttaactgctctcaatttaagaaaatgact

SEQ ID NO: 41986 - DNA, 273 bp, Macaca Mulatta
tacatattctaagaccactcccttgctgatgacaattctaagtgatggatcacagggggctctcttgcctgtttttgtctggagagactgcctggattcaggttcctgataggagtgaggacctggagtgcagtgtgagaaacagatggctcattgaagagctgtgatcatccactagagtccctggagacagccatatcattcatatggtgtgggtttgtgtgcaggagggttggaaggtagctaggggtgaatcaatgtgtcgtgattgtg

SEQ ID NO: 41987 - DNA, 784 bp, Macaca Mulatta
  misc_feature (1)...(784): n = A,T,C or G
ggatctcatattgggagagtgaatgttgttaagtatttctgaaatgtttctaaaaaatgaacattaaaaaaataaggtattttctccctagcttctcattgccgtatttctaattgcttcacactttacagttttaatacaaagtacaagctctacttttataacatgttctacaagtttctttaaaagtattgttgtatttcagctgaactcttctatctgcagtcttttgttatttctgcaggctacacccttaatttgcagaggccannnnnnnnnnnnnnnnnnatgctgaagctgttgttgaaatgccctaaactccaaggcagattgtctgtataatacgctatagcttttcaccatgtggtgtttaccagctgttactctgtattttaaaaagccagagatttcttctgtctaaactgtttctatagcattttctnnnnnnnnnnnnnnnnnnnnnnntttccttatcttggaataaagattgtaaatccatttcttgcgtgtgttcttagtgggcaagattgtgtgtgtgtgtggggtgctcacacgcgtgccaatctttttggactgtaactacctcatgggtccaatgattgtactgctggttgtgttaacagaacaccattttgttgggtgaaaaccaaagggaatttttttcaggttgggtttacccggggggggttcatgaaaactgacagatgttttttctaaaaagggactttttttccggtttccaaataacaaactttctccccttcagggtttttccccggaagga

SEQ ID NO: 41988 - DNA, 666 bp, Macaca Mulatta
  misc_feature (1)...(666): n = A,T,C or G
ggggtcaatgatccaagatggcnnnnnnnnnnnnnnnnnnaggtgacagaatgagactcggttaagaannnnnnnnnnnnnnnnnnnnnnnnnnnnnnnnnnnngaaannnnnnnnnnnnnncannnnnnnnnnnnnnnnnnnnnnnnnnnnnnnggaagggatcaaaacttgctttttacaattcctatagcttcattgacaggatttatggtccaatcagttctttcattctcccatccatttggtacctactggaggttaagaacacaacgataaagaaaatagagtcccttcttttcaggttcctttgggaaaacacatttataaatgaataattattactacattgtgattacactctaaaaaattatgggcaaagaggcccaggaaaataagatttcattttttcagttaagaatttgcttttataaaaactcaaactgggtacagaccttcaatttagagttaaaggatatagagtttgataattagaggataaaatgggcaggccaaatgaaaattgacctattcccaaggttccatggagtagttcatttggcgaatgttggcttacgcttttttttcaaaaagtaaacccggcccttaggcttggtaccgtttcccttgaaggatnnnnnnnnnnnnnnnnnncccaccggaaatc

SEQ ID NO: 41989 - DNA, 626 bp, Macaca Mulatta
tccataaaagataaatgggaacatattagagatcagtttaagggttctttttttgtttaacggaagagaaactaattttttgttagtgctttatccaaatgcgaagtcttttatttgtcaatagactacaagctcaagaatcttgttttatcttcctaccccttggacatgcctactatataataagtgttgaattattggaacgttttcagagcagagaaataattagtaattctataatctggatgctgaatcaatcataatgagagaggagaacatgaaaaatcagttgtgtagacagctaaggctagtcttcagagaagcagcctgcctgaaaaatcacagctacaggcaaaaatagagcagcctggggaaaactcagactgcatctgcacagataagcaggcaaggtccagcataggagccttttgttctttgtgtgattagcaggcttccaggaaaatgtttcctcccctctcagacatgaacaagggggactccataggagattgcactgcaaacagaggggcttacctaaaacaaacccacagttattcaaatgagaaaaaaagctatgctttgtgcttacctagagacatctcacagctgtatagacaggtggagtt

SEQ ID NO: 41990 - DNA, 770 bp, Macaca Mulatta
  misc_feature (1)...(770): n = A,T,C or G
gggggagcccctctgctcttgaggtttgaacgtctctgacaaaactggacatgtcttaggaaccataaacaggttggactttaagtcagaagcagtgccgtttcctatcgtagtcttggcattatcgaccacgttagagtcatcaaacagtttggctggaaatctcctctccttccagaaagaacagatttgttctgctgcaaagccacagaatgcctggatactgaagtccagtcctgtgctaggaagacgctgctcctggaaacagactggccttgttttgacagtcccagatggatgattgacaacgaggagtgcacataagggccgagtctctgtatttgattagtatcttcttccagtcatggactcactcagctgctctcagagctgtttcaaaacaggtgctgatgtatagccatggacgtagcaaagaattacataagaactgctaactaggagcatgagcagagatcacatgccacaatcccttctggaggttagtttctcacatgtcttttaatatattgcactgctgcttttgtgaaacattaaatttgacagattttgcttcatcactgcttcctcatggctatttagaaaaattagtcaaaaagaagcttggctttttcctgtcntcactatgggttttgtgagcttgatttccctttgcagaaaaagaaatgggcaaagtgggctctcctgggctcgttcattttggggttggaagacgtttaagggaagttgttggatggggctttacntccccc

SEQ ID NO: 41991 - DNA, 1225 bp, Macaca Mulatta
  misc_feature (1)...(1225): n = A,T,C or G
tactctttcttcaggttgaccctgtattatgttggaataggtgttgctgccttgatttttggttacatacagatttgcttttggattataactgcagcacgacagaccaagaggattcgaaaacagttttttcattcagttttggcacaggacgtcggctggtttgatagctgtgacatcggtgaacttaacactcgcatgacnnntgacattgacaaaatcagcgatggtattggagataagattgctctgttgtttcaaaacatgtctactttttcaattggcctggcagttggtttggtgaagggctggaaactcaccctagtgactctatccacatctcctcttataatggcttcagcggcagcatgttctagnnnnnnnnnnnnnnnnnnnnnnnnnnnnnnnnnnnnnnnnnnnnnnnnnnnnnnnnnnnnnnnnnnnnnnnnnnnnnnnnnnnnnnnnnnnnnnnnnnnnnnnnnnnnnnnnnnnnnnnnnnnnnnnnnnnnnnnnnnnnnnnnnnnnnnnnnnnnnnnnnnnnnnnnnnnnnnnnnnnnnnnnnnnnnnnnnnnnnnnnnnnnnnnnnnnnnnnnnnnnnnnnnnnnnnnnnnnnnnnnnnnnnnnnnnnnnnnnnnnnnnnnnnnnnnnnnnnnnnnnnnnnnnnnnnnnnnnnnnnnnnnnnnnnnnnnnnnnnnnnnnnnnnnnnnnnnnnnnnnnnnnnnnnnnnnnnnnnnnnnnnnnnnnnnnnnnnnnnnnnnnnnnnnnnnnnnnnnnnnnnnnnnnnnnnnnnnnnnnnnnnnnnnnnnnnnnnnnnnnnnnnnnnnnnnnnnnnnnnnnnnnnnnnnnnnnnnnnnnnnnnnnnnnnnnnnnnnnnnnnnnnnnnnnnnnnnnnnnnnnnnnnnnnagattctgaaaggtctgaatctcagaattaagtctggagagacggtcgccttggtcggtcccaatggcagtgggaagagtacggtagtccagcttctgcagaggttatatgatccggatgatggctttnatcacggtagatgagaatgacataagagctctaaatgtgcggcattatcgagaacatattggagtggttagtcaagagcctgttttgtttgggaccaccatcagtaacaatatcaagtatggacgagatgatgtgactgatgaagagatggagagagcagcaggggaagcaaatgcttatgattttatcatg

SEQ ID NO: 41992 - DNA, 771 bp, Macaca Mulatta
  misc_feature (1)...(771): n = A,T,C or G
ggggaaaaaacgtttctaaaacatgacggaggttgagacgaagcttcttcaagaagtaaaaaaatgtatttaaaagaaaattgaaagaagaaaggaaaaatactaccatgggaaccagagcacctcatacttgagtacactaaaagagcagcatcagacaaaggtatgtggaaatagttgaattaagtgtacaaaaggaattttatgtgtaaatcataactgcaatacagtgatttcggtctttaagtctccagaattttcttcctaatatattatttaactcaaaagtaatacagatttattttagaaagattagaaaatgtagataagcnnnnnnnnnnnnnnnnnnnttacttaacattctggtacccagaaataactactgataatactttcacgtatatcagtccacttatatttgcatttaaatgtcatattgagacataaaatgttatatacaagtaaattatttatgtattttaagtaaaattgtgatcagacatttataacctgcttttaagatatttgacagtgtgtaagaatgtctttccagatcaataaatatccctctgtgctatcatttttaatatataactagtgttaatttgtacgaatgtactccaatttaatcatttccccattgttccctttaggatgtttgtgtttttcttattttgcatatcgttgtctatttccttagcgtgtagaattcaagaagtaaattgctgtcttttaaaggatctttaagttttgttaaagatatcatatgag

SEQ ID NO: 41993 - DNA, 773 bp, Macaca Mulatta
  misc_feature (1)...(773): n = A,T,C or G
gggcttttacgtaggccttcgtgatcgtttggttgtgtggtaggtaagcgtcggtgttgcgggcgagtattggagcaaaaggtggaggtgcaggccgagttaagagttttgatagtgtgaaaccatcttagtgtagagcttagggtgctgagagttgaaagcttgcacgtgggaaatgtgcagcccgaccgccacatgtactgagattgagtcgtgacggccacaggctccgagttttggcgtgaggagaacgctgatcggccacgggtgccgcgcttgctggcctctggcatgtgcctgaacggcggcggaaaagccacacttaattggggcagagggttagttttaagagcaaggggcctttactaaaatggcgaagaccttccgtcggcgttgttttaaaacgggcagcctcaaccctgcattgagactgagctgttcgaaggcggcgttgtgtgcaattcggattaatgaaggggaaaggttttgtgtggaaaaacaccttggagtgtgacgtttctgcgagaatgcttatcggtttcccgcaggaacaatggcgctgtcatggcccagcagagcagctctgaagatgcaaagatacatgaaagaattccagaatatgcggggagaatatttaatnggaaaacccgcttggttaaaacctgacactctttcatgggcattctgggggtgtggacgaatcagcccagtgaaagaataatgaaatggtcgggatgttcactgnacttagcaagctttcatttttggaatga

SEQ ID NO: 41994 - DNA, 678 bp, Macaca Mulatta
gcgcggtctttggcgtctggctcctgccaggccttgggttgggggcttcatctctctgcttagtcggttctgggagtcctcagtgatttggccacagcctcagcctccgttgctctgtgacctgcgggtattggatgattcctagctaggactcccggatacccctgaagtggggaaatggaactcttaacattcagggatgtggccatagaattctctccagaagagtggaaatgcctggaccctgcccagcagaatttgtatagagatgtgatgttggagaactacaggaacctggtctccctgggtgttgctatctctaacccagacctggtcacctgcctggaacaaagaaaagagccctacaatgtgaagatacgtaagatcgtagccagacccccagctgtgcgttctcatttcacccaagaccgttggccagtgcagggcatagaagattcattccacaatcttatactgagaagatatgagaaatgtagacatgagaatttacaattaagaaaaggctgtaaaagtttgaatgactgtaagttgcagaaaggaggttacaatgaatttaatgaatgcttgtcaactacccagagcaaaatatttcagtgtaaagcaaacatcaaagttgttagtacatcttcaaaatcaaacaaacgtaagacaagacat

SEQ ID NO: 41995 - DNA, 82 bp, Macaca Mulatta
ctccaagatgagggcgtgcaataactatcaacatggatacctcgcagagcatggcactagcttctggataaaatgcaggcga

SEQ ID NO: 41996 - DNA, 803 bp, Macaca Mulatta
  misc_feature (1)...(803): n = A,T,C or G
ggtgcagtggcccatgnnnnnnnnnnnnnnnnnnnnnnnnaccgaggcgggannnnnnnnnnnnnntgnnnnnnnnnnnnnnnnnnnacgaacacggannnnnnnnnnnnnnnnnnnnnncacaaaattagctgggcatcgtggcannnnnnnnnnnnnnnnnnnnnnnnnnnnnnnnnnnnnnnnngatcgcttgaacctgagcgggtgaggttgtggtgagccaagatcatgnnnnnnnnnnnnnnnnnnnnnnnnnngagcaaaattccgtctcaaaaaccgaaacaaaataaaagatctaaggaagcaacgagtccaagaatagggaacaacaggtccaaaggccctaaggtatgagccagcttagttgctatgtgtgtgcatttgtgttttgttttccttgttcttaactttctaatttatttctattttggagtaccaacacttattttatcattattttactgcctatacactttgtgtccattgttttcgatccattatgaaattaaggaagccagtttaaagatcaaatggttttaacaggatactagtcttcatttgcagctctgtagcattctgcaactttttttttttatctagaagaatttaaattattatatatatggccataattacgcagcattgttctaaccctaactcaaatcaaatgtctcaaagttatttataagtttagatattagctcaaannnnnnnnnnnnnnnnnnnnnnnnnnnnnnnnnnnnnnnnnnnnnnnnnnnnnnnnnnnnnnnnnnnnnnnnnnnnnnnnnnnnnnnnnn

SEQ ID NO: 41997 - DNA, 817 bp, Macaca Mulatta
  misc_feature (1)...(817): n = A,T,C or G
ggnnnnnnnnnnnnnnnnnnnnnnnnnnnnnnnnnnnnnnnnnnnnnnnnnnnnnnnnnnnnnnnnnnnnnnnnnnnnnnnnnnnnnnnnnnnnnnnnnnnnnnnnnnnnnnnnnnnnnnnnnnnnnnnnnnnnnnnnnnnnnnnnnnnnnnnnnnnnnnnnnnnnnnnnnnnnnnnnnnnnnnnnnnnnnnnnnnnnnnnnnnnnnnnnnnnnnnnnnnnnnnnnnnnnnnnnnnnnnnnnnnnnnnnnnnnnnnnnnnnnnnnnnnnnnnnnnnnnnnnnnnnnnnnnnnnnnnnnnnnnnnnnnnnnnnnnnnnnnnnnnnnnnnnnnnnnnnnnnnnnnnnnnnnnnnnnnnnnnnnnnnnnnnnnnnnnnnnnnnnnnnnnnnnnnnnnnnnnnnnnnnnnnnnnnnnnnnnnnnnnnnnnnnnnnnnnnnnnnnnnnnnnnnnnnnnnnnnnnnnnnnnnnnnnnnnnnnnnnnnnnnnnnnnnnnnnnnnnnnnnatcctggctcggagatactattttaacccctaacaacaaaatctcaagaaatacttttgaaacacacccattccccccattcttccgaatggggcattctacatggccttcaaaacattttcttcccatttaccccactagagagtttcccaatgggaccttccaattgttttacttagaccggggaatccccaccatttaccccggcatttttatagcttggcactttacaattccacgcatctaagctttatcgtataccgttcccatagaattgacactcatatgcgtgaacccatcagtttgaatgctgtt

SEQ ID NO: 41998 - DNA, 656 bp, Macaca Mulatta
cgaagtgcacctgccggcttccagtccaagtgatgcaggcgatgctccgctgagtacatttcgatgcagtcctgtaacgggccccgggggcgcaacttgaaccatcgcaagcctcgaaaagtctaggtgcagtccttcaaagggacatacggagcagagggttaaaaggcgtttcattcattcagatgcatcccgcgtgcaaaatgtattccagaattatgtacggcctgcttccaacagagaatccgaagcctcttccaatacaagcattcgaaagtagaggctcgagcattcgatttaggaggcggtgttaaatgtgtggatgagaactttggaatactgaattttatttttcccccaaagatttgcaatgtgggataatggggggaggggcgagagggagattaagttgagactgtaaattcttgaaaaatatttatataatgaccttttctttatatacgaagatgctgctgccgagcagtttgttacctaatttttcaaaagagaaaaggggcttcactggcgggtcgtttctaaccagtggccctagtgacaccattgctgccccctcaggaagtctggtcaggattaggaagtcattcaacagccaataacagtgccctgaactgatagtcagacaccatctgactgat

SEQ ID NO: 41999 - DNA, 169 bp, Macaca Mulatta
attcaagctacttgtctaaagtcatttcttctttttttgatccatacttaattgcagaaactattcttgtcattataacattacctctcatgtatggtaattatatgtaaattaattaaagcaaatatggaaactttacaatataaatcaaggtaagcaaccaggaaaa

SEQ ID NO: 42000 - DNA, 893 bp, Macaca Mulatta
taaatttaaactttgagcatccacagtagggtattcttcataagtttcaggtatgtgggaagctctgaggaggttcattgtaatttctgatctgcccaggcctatagcctgatttatgttactgccagttccagaggctgaagccgtttcacccctaccacctggcaggtgcacaccatgtacgtgagtcacctccccacagtgctcaaagaagcaaacgtctgtactctcttatttgcttggggaaattattaatagcccaagcatgtaaggggtcctcatgtcttttctctgactttatagacttgacccagttgtggtccagagaatctgaattgtgctgtcaagctttctaagaaggattaccttttttaggaacgtcgttggtctcacatgatgcttgtaatgaatttttccggattctgattcaccagcctggaaactggtgcacattgctccgatttataatctttttgtaaaggctttaaaaaaatttatgcgcctttaatcttgggggttctattcattgcgtagaatgacttgtaagcagaacagtgatgtcagcatgaaggggtgaatagattttgtggagatctcaaactttttgtgtgctcagaagggacagtgtgatggcagaagacagctctttgtcctgtattggtttaattggcctgctgcccaaggcctcaaactaaaaactgccaggctttgtgttcctgtattgtggcctggtgccatttttgtcaggtcagaggtcagcatgaaaaagaggcagttgtgacaataagccagtgcttctgtgaacatgaattttgttcagtttctcaaaggagatccacataattccctagcactgttgaggggaatctattctccaggtccgcaaaggagcc

SEQ ID NO: 42001 - DNA, 500 bp, Macaca Mulatta
  misc_feature (1)...(500): n = A,T,C or G
ctctgtaagccccacccaaaccaggacagcagcaattctccccttcccctggtgtgccttcctccgtggtctgtttctttaggacaggaaagcagctgtctggaaggcacccagggaagccattccttgggacatgtcccctgacccaccccggcaaggctgggatgacagaaggacaaacccagccaaacatatggacccgtggcccaggataggcaacagctgggccactgcctgacttttcttctgttccttggaataatctggcaatgagaagacatagtctcagcaacttatagacattttcccaggaaatcctaacctctaagggaacaatttgctccattcccacacatttcagtctacttatttggaagaccaatctttgcgtgnnnnnnnnnnnnnnnnnnnnnnnnnnnnnnnnnnnnnnnnnnnnnnnnnnnnnnnnnnnnnnnnntcatgtggtcttgtgtataattacacaaacctgataacagcaa

SEQ ID NO: 42002 - DNA, 657 bp, Macaca Mulatta
  misc_feature (1)...(657): n = A,T,C or G
cctcccgagttagcctgcggacttaggtgcccgccacaacgcccnnnnnnnnnnnnnnnnnnnnnnnnnnnnnnnnnnnnnnncgctttagccaggatggtgtgnnnnnnnnnnnnnnnnnnntcacccnnnnnnnnnnnnnnnnnnnnnaggattacaggcgagagccactgggccctgccaaaatcacttttaaagtatagggcactgttacataaaggtggagattgctttaaaactgccaatcaaatacaaaaccaaggtttgaagaggataaatcatgagtaaaacacccagcaataaaggcctccgttgttagtttgatgttttcttaagggctttaagattaattcatttttattttcaaaaaaataataataatgggttttacttcattgtttttttactttaagcagtagaaggacaaacgaggaaagtcagtgtaacgacaatgaagaaactgcatgtgtacaggaagtgtagagaaagacttcaaattccagcgggcaatgggtgaggcaataaataagagatcaatacagaaatggtattaacagttaacttttgtattatgtttcacagcctacaaatgcttttgcataccgtgttatttaactcaacacaactctttactttcactaataatttattatctat

SEQ ID NO: 42003 - DNA, 1008 bp, Macaca Mulatta
actagtgatatagacgttaagaatcaggataaaagatacccattgtctgtgtctactgataagattatcccaaaggtaggttggcgtgatggtttccgagtaagaccttaaggacacagccaaatcttaagtactgtgtgaccactcctgttattattacagtcatacttggttgtaatatgtgatggttaacctgtagcttataaatttacttcttattcttttactcgtttactcagtcatttctttacaagaaaatgattgaatctgtttcaggtgacagcataatggacatgaagaatttccatcaataatttatgaatgagtttccagaacaaatttcttaataacataatcagattggttttattcttttattttacaaataaaaaatgtatttttcagtatccttgagatttagaacatctgtgtcacttcagataacattttagttacaagtttgtatggtagtgtttttataggtaagatacgtatattttttcaaaattcatgattgcagtttaaatcatatgacatgtgtgggtgggagcaaccaaagttatttttacagggactttattttttgatctttatttgagattgttttcatatctatctaaattattaggagtgtgtgtatcagaagtaattttttaatgtcttctaaggatagaccaggcttttagtctaaaaagctttattcagatagtagctttaggctgagaagatgaatccaagatattacaagttattcaggtctgatgagcactatttttattatttcattatttcacagaggccttgagattctggataagagaatggagaaaaatactcagagtacttgattattttatttcattttattaaaaaattacttctatgtttagattgtcttgagccttagttaagagtagtgtagaaatgcatgaacttcatcctaataaggatgaaacttaaggaaaaacaccaataaaccatgaagggatatacatcttataacacaga

SEQ ID NO: 42004 - DNA, 1260 bp, Macaca Mulatta
  misc_feature (1)...(1260): n = A,T,C or G
ggggcgggctttttcgcaacgggtttgccgccagaacacaggtgtcgtgaaaactacccctaaaagccaaaatgggaaaggaaaagactcatatcaacattgtcgtcattggacacgtagattcgggcaagtccaccactactggccatctgatctacaaatgcggtggcatcgacaaaagaaccattgaaaaatttgagaaggaggctgctgagatgggaaagggctccttcaagtatgcctgggtcttggataaactgaaagctgagcgggaacgtggtatcaccattgatatctccttgtggaaatttgagaccagcaagtattatgtgactatcattgatgccccaggacacagagacttcatcaaaaacatgattacagggacatctcaggctgactgtgctgtcctgattgttgctgctggtgttggtgaatttgaagctggtatctccaagaatgggcagacccgagagcatgctcttctggcttacacactgggtgtgaaacaactaattgttggtgttaacaaaatggattccactgagccaccctacagccagaagagatacgaggaaattgttaaggaagtcagcacttacattaagaaaattggctacaaccccgacacagtagcatttgtgccaatttctggttggaatggtgacaacatgctggagccaagtgctaacatgccttggttcaagggatggaaggtcacccgtaaggatggcaatgccagtggaaccacgctgcttgaggctctggacatgcatcctaacaccaaatcgtccaactgacaagcccttgtgccttgctctccaggatgtctacaaattggggggatttggcctgtccgttggcccatgtgacgggtctcaaccggaggggtacatcgcccccacgtcacgagaaaatcacagaccaagtgttaaacccggaagaggagatatatggtagatcacagtataagaatacaacagggagagaggctctcctcctcctgtcgtccttaatttctttgtttctatcttcttctcgtgattnaaagaaaacaggaatggcgatagcggattagtagtgaggaatagagagaggtaaggaagaatgaggtgagagattaccagacggaagtcaggaggttgagcgtagagggagagccaggaagacgaagtgaacagtggcaaataaataacgaagcggagaaagacaaacatagcagactgaaaaaccaagcagagcaccaaaagaacaacacag

SEQ ID NO: 42005 - DNA, 747 bp, Macaca Mulatta
ttttatgaaaatgcctcagaaccaaaacagcacatctaaagggtgtgcttgcattgatagagtctgcttcatttgtagatgataaagaagctttacattcctataataaaagggaaattgggggcagagcaaacaggctggagttgcaaggatcacctactgccagaagccggccatctaaaactgtcaaaggtctgacgacaccactgaagagacttcagtcattcgacagctttgttgggcaagggtagtcaccaactaggaaaccggatgctccaaaggctttggctctataaatgtcaacagtgaggaggatgccaaagctgccaaggaggccacggaagatggtgaaattgagggaagcaaaggtaacttggactaggccaaacctaagggcaaaggtggctttgggggttgtgatggagctagaggcggctttggaggatgaggtaggggcagaagccgggaaggctttggagggcgaggcagcttctgaggacgcagaggtgaccacaagccacaaagaaagaagacaaagtttgaacagcttctgtccctctgtctttccccctcccatttgaaagaaaggatgctggggtttttactctgttacctgatcagtgacagagccttctgaggacattccaagacagtctacagtcctgtggtctccttggaaattcgtacagataacatttcaagggtaatactttccatgttggttttgactggatattcatataaact

SEQ ID NO: 42006 - DNA, 739 bp, Macaca Mulatta
ggtgttttggcagaaactgaatttcagtcctaggacagcttcagcacacttgatcctagctcttctctcactgctccccttgtgtgtgacagaaatcatatgccctgaagttgaccagtcccttcatttgaaaatcagttaatgtacgtgatcctcatgagaattttactttttataaaagcaattgcaaagactgggttttgtgaaaccagtgttttatgtgtatattacttgcactcacaatgagctttgtcttctaaatatttcatgtttcagattagccctggaatcatgccctggagtagttttgcttttccgcttttatttttggctaaggtaaagttgagaacattgtgatattaggtgtagtgagcccttttagcttcttctatgtctgttttcctttaagccagaaccagcagacggataccagtttgtgagcacctggcatctcccgggcctttcctgggtcttccctccgctgtctcgtggacagagcagtcactggtgaaaggtgaacctgagaatctgtgcgtggaattaagtaaatgtcatagctctcttctgtgacgaactgaatcacattaggcccagtaaattgtaacagcaggttttgcacatacaaagcattgaacaccaggacaggtaaccaggctgcgacgcttctggtcctgcacaagacctccggtatcacagcacatttaacacatttggctgcattgagtgttttgaaaacgtt

SEQ ID NO: 42007 - DNA, 1046 bp, Macaca Mulatta
  misc_feature (1)...(1046): n = A,T,C or G
ggggctctctctattgggtctcgttattgcatgccactgtgtgttcttctgactgtctgtcgccattagcaaggagcatttcccacaccgtgggaagtgcacctgacaatattatgtacttcttgttgaaatccctgtcttccttatgctgccgtattggtgcttcacactgttttctttttcatgccacatcagcagcttgtagctcctgcctgagctttggaagtgaaagccgaagttccacctcaatgcaagtgataaaacctggggaaaaatgaatgaagtggggagctttgtatgtcggcacctggaagcccaaaccatgggctagactgaaatggtccagcagcgacattaatgtcaccttgtaggtttttagccccttccttgggtttattaatttagtattgggttcgttttagtttgttttccgtattttgttttgttaagaaatataggttcgtcgacgaaatggttgaccactggaggcgtgggaaatgtgcaaatgggactggtggaattcttcgagtctaacaactggcaaacgcctccgtgcgcactaccttgaaaagttagggaagcatgaaatttccctttgcatggcgcctgagaaagccccattcccgcggaaaactatagaggattagcccgaaagtacaaacccagggcgcggatggccacattccaacgccaatgtgcgcccgggcgggcccagaaaatatatattttgtgcgacgaattgtgtatcaaccacagaaaggaagcaaggcggacttgtctaccccacgacttgcgngggatagaagaagacaggagncncttccgcaaaaacgnacccagagagccagaggaagggagtacctagaagacaaggcgaaaggcgcgatcacnaaaagagagcattacgcaggaatacgaaaaacaataaaaaacgcagataanaacgaggaccaccnggtcaagaagacaaggtcgcctagagccacataaggcaaattcacggacaaaaccagacaatgacactgaaggcgcaaaacacagaagac

SEQ ID NO: 42008 - DNA, 777 bp, Macaca Mulatta
  misc_feature (1)...(777): n = A,T,C or G
tggttccctgcggagctgggcatcgtgttctcaagctggcgagaagcatgcaaagaacgtggctctgaggtgctgggcccccgactggtgtgcgcctccctcttcctgcggctcctgtgccccgccatcctggcacccagcctctttggtttagcaccagagcatccagcacctggcccagcccgcaccctcacactgattgccaaggtcatccagaacctcgccaaccgtgccccgtnnnnnnnnnnnnnnnnnnnnnnnnnnnnnnnnnnnnnnnnnnnnnnnnnnnnnnnnnnnnnnnnnnnnnnnnnnnnnnnnnnnnnnnnnnnnnnnnnnnnnnnnnnnnnnnnnnnnnnnnnnnnnnnnnnnnnnnnnnnnnnnnnnnnnnnnnnnnnnnnnnnnnnnnnnnnnnnnnnnnnnnnnnnnnnnnnnnnnnnnnnnnnnnnnnnnnnnnnnnnnnnnnnnnnnnnnnnnnnnnnnnnnnnnnnnnnnnnnnnnnnnnnnnnnnnnnnnnnnnnnnnnnnnnnnnnnnnnnnnnnnnnnnnnnnnnnnnnnnnnnnnnnnnnnnnnnnnnnnnnnnnnnnnnnnnnnnnnnnnnnnnctccccaagcacacccctctcatctccaagagccagtctctgcgcagcgttcgccgctcagagagttgggcccggccacagccggacgaagagcggcccctgcggcggccccggccggtgcagcgcacgcagagtgtcccaacccggcgtcctaaccgccgccgccaatctgcggg

SEQ ID NO: 42009 - DNA, 782 bp, Macaca Mulatta
  misc_feature (1)...(782): n = A,T,C or G
ggctattccccatggcctagaccaagggtgtccagtcttttggcttccctgggccacactagaattgtcttgggccacacataaaatacactaacactaacactaacgatagctgatgannnnnnnnnnnnnnnnnnnaccaaaaaacctcatgctttaagagagttcacaaatttgtgttgggctgcattcaaagccatcctgggtcacatgcaggcatgggttggacaagcttggcctacaccaaacacgccctctcctccatacaaccatgtccaacacccaaatggaagccagtcgtctgcccctcctgcagcttggaccacctgtgacctgagcctctgctgtgggccgggcctggacaactcaattctgcatgggccaggagcactgattaccactctggcagggaaacctttggatcctcctaaagacaattggctaggagtggtggctcacacctggaatctcagcgctttggaggcagaggcannnnnnnnnnnnnnnnnnnnnnnnnnnnaaccagaccgggcaacatagcaagaatcctgtctctacnnnnnnnnnnnnnnnnnnnnnnncatggtgttgtatgcctgcagtctcagttcnnnnnnnnnnnnnnnnnnnnnnnnnnnnnnnnncaaagagtcgaggctgcaatgagctttgattgcacactgcactccagcccgagaataaagcaagatctgtctctaaggnaaaagagagagacaatagcaggctttcatgtcctctctactttatgaacagataagcat

SEQ ID NO: 42010 - DNA, 747 bp, Macaca Mulatta
  misc_feature (1)...(747): n = A,T,C or G
ggtggcctaacaaaaaccaagttatactatatttgagtttataaatgccattagtaccattcattcagtaatctgaattaggcttaacacatgagaaggggagaggagacaagagaaacatggaattgaagacccttagaaggagtggaagagaaagaggggatttggtgataattgataatttggtaaacatttggtgcagtttgcagtcagggggcactgtgtcctcattgcctacgtcagtgaatttatctatataaaaattattttagaaaaattacctaagctagtttaagcaattgtcttttagcctagaaggtttttaatagtannnnnnnnnnnnnnnnnnnggtactgggatgatttatttacttcagaaatactcattcaatatttattgaatgcttgttacgtacctagcactgagcaaagatactaagggtnnnnnnnnnnnnnnnnnnntggttttggtcttcagcagtttcgtctagtacactgaagaagcatcgtaagatcttagcttatcttcttaattatccaaataagtttatattgtgctcagttgttattctgtatatggtatacatgacaggatttctattcaaatgaattgatgcatctggactatcgaagaatgagcatcatgaggtagagtttaatgaacattagtctttgcatcaaatcttgtttctgctacctcttcattgtatgacctttgcaaatgagttcacttttttaaccccaatt

SEQ ID NO: 42011 - DNA, 219 bp, Macaca Mulatta
agcataccctcagtgggagagacagaagaactcatccccctggagagtctggttcctgagatgtgtgctcctctgctcaaggattcccactgctaggatgagaaacctgaaggatacaagggagatacaaggaagctggtgtacaggaaatggaccatgggaatcttcttctttctgagggctggttcaacctcaaataccaatggtctgacactggtt

SEQ ID NO: 42012 - DNA, 191 bp, Macaca Mulatta
aggcgatccaaacctatccctcgtgctgcaggacactccagggcacaggaggacaaggtgctggggggtcaggagtgccgaccccattcgcagccttggcaggcagccttgttccagggcaagcaactactctgtggcggtgtccttataggtggcaactggatccttacggctgcccactgtaaaaaacc

SEQ ID NO: 42013 - DNA, 618 bp, Macaca Mulatta
  misc_feature (1)...(618): n = A,T,C or G
gggggcctccatttcctgccacttcaccagagctgagactactctgtgggctacttgaagtcatgaagccttttttggtaactttggctgtgctgctgctcttcttccaagtcactgcagtaggcagcattgaaaaatgttggaattttcgtggctcctgccgtgacgaatgcctgaagaacgaaaaggtctatgttttctgcatgagtggtaaattgtgctgtttgaagcccaaggaccaaccacatttaccacagcgtacaaagaattagtgctttaagtctgaggccacgaaaatgaagataaacttgccctgactctgatgtcagtagattcctgagctttataaaacatctttnnnnnnnnnnnnnnnnnnnnnnnnnnnnnnccgcctccggccctcaaaaagcttctaaaccttttctttgggcccccggcccacaaagggaaagtgaacagggccataacctttttccaaggaaacccggggccaaaaaagggctggaannnnnnnnnnnnnnnnnnnnnngggaaccaaggtttttaaaaaaccaaaggggttctggggttttttgggtttttacagggagcccccggggcctaatttaatttcccccc

SEQ ID NO: 42014 - DNA, 656 bp, Macaca Mulatta
gccaccacgccggttggccccaaaaactcaatggttgctgggcggggtcgtgacgtccttggcgtggctgcatgggaggccgcggcggggaaaatggcggacgggaaggcgggagaggagaagcctgaatagtcgcagcgagctggagccgccggaggacctgaagaagaagcagaaaaacctgtgaaaactaagactgtttcttccagtaatggaggggaaagttccagtcgcagcgctgagaagcgatcagctgaagaagaagctgccgacctcccaacaaagcctacaaagatctccaagtttggatttgccataggtagtcagacgacaaagaaagcatcagccatatccatcaaacttggatcaagtaagcctaaagaaactgttccaagctcttgctccgaaaactctttcagtagcagcagcttttaatgaagatgaagatagtgaaccagaggaaatgcctccagaagcaaagatgaggatgaagaatattggaagggatacaccaacatcagctggaccaaactccttcaataaaggaaaacatgggttttctgataaccagaagctgtgggagcgaaatataaaatctcatcttggaaatgtccatgaccaagacaattaaatgatgttttgaaattggggtgtgg

SEQ ID NO: 42015 - DNA, 115 bp, Macaca Mulatta
  misc_feature (1)...(115): n = A,T,C or G
gcttataacgccaacaagctcatctttgggactgggaccagattacaagtctttccannnnnnnnnnnnnnnnnnnnnnnnnnnnnccagctgagaggctctaaatccaatgaca

SEQ ID NO: 42016 - DNA, 297 bp, Macaca Mulatta
ggttaatggcagaaacctcctttcggttgactttgatcgaacaacaaagacagaaaagatctatgacgaccaccgtaaatttctactgaggatcgcctacgacacgtctgggcacccgactctctggctgccaagcagcaagctgatggccgtcaatgtcacctattcatccacaggtcaaatcgccagcatccagcgaggcaccactagcgagaaagtagattatgacggacaggggaggattgtatctcgggtctttgctgatggtaaaacatggagttacacatatttagaaaa

SEQ ID NO: 42017 - DNA, 789 bp, Macaca Mulatta
ggctgatagttacaagaaaacgtccattggagcatacttcatagcaccatgacagcagcagaagggagaaaagtgactgtttcgagaggaacttgcttgccccagctcttggttcctttgagtatttagaaagtgttggagtccaaagatttgctagcatttgagagatgttaatggcaggttaaaacaatccaggctgctggaagattagagtgtgttcgatttaagttaataggataatttttcgagctctctaaaagtggatggaagtcaaaccagtgtaagatggcaagctggtagtgcttctgaattcagttgagaacacattttcaccaacttaaattggttttgaacacttcatcggcaatacttaaatattaaatttttaaaatattcagattcctaaaggagaatcataatgggcagcttcttaaaccagcttctctttaaattcaaatgctgtcactgccgataaacaaatgcaatgttttttcctatcggtgagtcatttagtttcactgtaattttcaatcctagtaaccttggtgaaatattaaccacggcttcataggcccccacccctgaaggccccccacctggactggcagggcaagccggaaaagaagaattcccctttcagaatttggtgtggaataggaagacaagtttcacagttctaacatttacaaatggcctcttctaattacacggaattagtgagagcttgtttccctgaacatatttcatacccctttttgcgatatattggaaaaagcccctctttcctgc

SEQ ID NO: 42018 - DNA, 553 bp, Macaca Mulatta
caggtaacactagtatccatacatgtttgcatcctaaatctattaactgtcttgtatatttcaacagtctatcttaaataccttactatttctctgtaactaaatattaatatttcacacaaaatgatcgttgatcatgttgtaaaatcatgagtcaaaacatcatctgaaaagctctgaaaaaaataaaaatgggaacatgtttcttgcttccaaactagctaaaaccatttccaaacttatgtcaattcaagggactcagtaatactcatactatattccaacaccctgaaaccatatgtatttatcgtacactaataaaggtactacatggcaaacatgttaacaggtagacatacaactagaactgcaataaggaccagttttagttactattactttgtcagaaaaatatacttattgcctttatatttccgtggttatttataacttttttattcagatataaagtatctctttagggttggtatattatataaaacacaacgcaattatagccaaaactgttcacatacataagaactggattaaa

SEQ ID NO: 42019 - DNA, 125 bp, Macaca Mulatta
ggcctgtccccgaaatagccaggtgtatggtgctgtggctgaatggttgcgagaatgtggcttccttcgaaccccagaacagtgtcgaaccaagttcaaaagtctccagaaaagctatcgaaagg

SEQ ID NO: 42020 - DNA, 692 bp, Macaca Mulatta
  misc_feature (1)...(692): n = A,T,C or G
ggagctctggctgaaacaccggccacactcatcacactgatagggtttttctccagtatgaattctctggtgctgaatgagatttgagctctgtttaaagctttctccacactcatcacatttgtagggcttttccccagtatggatccgtcgatgctgaatgagattagaactctgaaagaaacttttcccacaatcagcacatttatgggatttctttccagtatggatcttctggtgttgaaaaagagttgaactctgactgaaactcttttcacattcagtacatttatagggtttgtcatccaagcttcttctgagtctactcaagcttgagtcaaatcgaatagtcatgccccacttctgccgtggccggcctgttttgcgcttgttctcataggcctttccttggcttgagctccgagaaatacccgctttaggctttgctaacctcatggtgaataaccaaatgtatttgtaagagagtttacaggcttcttctgaactactgtttcatttcctagcggtgcacagctcagaattttcgcgcgggatcagccacgaccctggctcgctgggcgcctcccgcgccgccggaagtgagggcctcgccgcgctctggcgccgccgcggtcgctctanggaatgaggcggagcgacccactatggtcgccggacccaacccgaaagcg

SEQ ID NO: 42021 - DNA, 332 bp, Macaca Mulatta
  misc_feature (1)...(332): n = A,T,C or G
gcggtttcctaagcggttggttcttagagctgcggtcctttgctaacctgacccgcagcttcagcctccgccgcctcctcagccctcgnnnnnnnnnnnnnnnnnnnnnnnnnnnnnnnnnnnnnnnngggccgcagagcccatgagggcgcgggcaccgccgccgcttccgcggcgtcgccgtcgtcccggagcgcctcgagctggcgcgggcatggccgcggcatgagcgtggagccgccgccggagccagaggagaaggcggcgtcggagcctgaggcgggagccatgccggagaagcgcgcgggcgcgcaggccgcggggagcagctg

SEQ ID NO: 42022 - DNA, 601 bp, Macaca Mulatta
tcacaagcaccatatgatcagtctgaagggattatcagtgccagccagccagtctgctgtgtagttagtgctctttgtagccagagatgtgggacttgggaggctcctgagaacaacatcactctatttgcaagtatgagtgtagagtctgagactttcttcaggaaatgtaatgtcaaaatataatatatcatttcccaggaaccatccttgacataaaatagcaggttgagcaggttggcaattctagtatttgtggaaaattgaggaaagaatggtaactgtccactggaggtcgagaaaggttcaaagaaagaagtgagaattgagttgtagggaggcaggcgtaggatgtgccttctaggtactgggatcaggcaacaaaggcatattcaagacttttgtctagtcctctgccacaaccttgcctccactaactttccctgaaagggcgccgtctgctactgtcacagacacaaaggctgactatggcttggaaacttgagtacagagacaagagtgcttttctgtacacagataggtatctgcttgctacccaactgtaaaactaattccttcaagatacctacatgctctgtaa

SEQ ID NO: 42023 - DNA, 557 bp, Macaca Mulatta
ccccaggaggagcgcaaacctcgttgtttgagcaggttgggacccccggccggaagtaacgtgcttgtcagaggaacagggcggggtgcgtctagtaaaaggcctggagacgggtcggctctctgcattggggaagatgaaatcgacttgactttgtgaaattgaccagccccctctataaaacttacagtcccccattgggaaactgaccaccacccacaactccggcagtgaaactgcccagcccttctctgccaagcaaactgaactactctctcccttgactgttaagagggccggagttaccgccgcggctgccccactacccccacccccaataaagcctcttctttcagggcactgcagcctatttttttctgggtcctcttcgtctggggtggggcgggagcacggcgggccgagggaggcccgagaaaaccccaagaggtgcgggccagaatgcgggaatgcgcccttaccgccctcttctggggctgcccgcctcccccacacgaccagacacggcctggcccaggtcctaccgccccctggcggct

SEQ ID NO: 42024 - DNA, 781 bp, Macaca Mulatta
gggtttgtgccagaacacgtttttagatgctgggatggtgcccataagcataacagttccgttctctgccttacagaaacttcaggttctggggactttcccccagaacctcacctccgtagattacctttgaaagccaagtttttttcacaaccttttccccaagcctggagatggacgaagattagggacatttcttcttgagttatctcagtccaaaaagacataacagcgctccgggaaagtcggctgtctgggtggattttggttggcgctgccgtcatggtgtctctgaggatcccttggcgcttctctctctgcaggtgacaatggatcctgggccggaagagatgcggcttcccctctgtatataagcaaaacagaagagtcttgttccaacagaaactccggagctccgtgggtctttcttttctcttgtatgaagttccttttgttattgccatcttcgctttgcagaaatgtgctgccagcaagctgatggaaactatcattcttctataattaattttattaaagttggtgaagcaatttcccctgggtcaccccctgttgtcacagtctgtaggcgcagggtagctacctcgagagatccacattttgttcctgtatgggtctgcacgtgacagtaactggaatttcaggcagatgagctgaggcagctttgagcaaggagtccaagggttcgggccactgttgaccactgcctgcccctataaatatataaccactcaagggagttgcataaatattctggtctccc

SEQ ID NO: 42025 - DNA, 783 bp, Macaca Mulatta
  misc_feature (1)...(783): n = A,T,C or G
ggcaaagagtagagtatgcaaaataaatttgtggagaaacatgaaaactactacattggccaggcaatcaaagtgaacattataattgataagtcaagtaaataacatgtacttctatgctataccatggatgcttcacttctatgatattctttctaaaaacctgtggccctagcctaaccatgagaaaaacaccaaatcatcccaaattaagtgcctgtccaatactcaaaaccatcaagttggtgaaaaacaaagtctgagaaactgtcacagtcaaaaggagctaaaagaaatttgagtgctaaatgttatgtgctaccttggatgatgggatcctggnnnnnnnnnnnnnnnnnnnnnnnnnnnnaaaaactgagcaaatctcaatagaatatagacatttgttaataataatgtatcaatattggcttatgaatgctaacagatggaccacactaatataatatgttaataatataagaaattgggtatgctgtactcaattatatcttctcattttttctgtaagtctataaaattccaaaaagtaaactttactaaaatatcatttataataaaaaataatgttgccttaataataaatctagctaaaaataagcatgacactcattaatataattgtttaaattcactgacttaaaagggtgaaattttctacaataattatagatgaacatattacttcttaagttctatcaaaggttattccattaattcctttacaaccctaaaacctccagggttttttcataaaatttc

SEQ ID NO: 42026 - DNA, 626 bp, Macaca Mulatta
gcggagaggcagcgcgccttggcttgctggccttggctgcggctcctcgggagagctggggcgcccacgagaggatccctcacctgggtctctcctcagggatgacatcatacgtccacctccttgtcttcaaggaccacctcctcttcatgccgagctgctaccaaggggcctgctgcccatctacgccttacgagggcactaggagcacggattcctggatcccaccagcatacaaagcagccactgactgaccctcaggaccaggatggcaaaggatgaagaggaccggaactgaccagccagctgtccctcttgcctaaagacttaaaccaatgccctagtgagggggcattgggcattaagccttgacctttgctatgctcatgctgtgactctatgagtactttcctataagtctttgtgttcacctgctagcaaactggagtgtttccctccccaagggggtgtcagtctttgttgactgactctgtcatcacccttacgatgtcttgaatggaaggatccctttgggaacttctcaggagggggacctgggccaagggcttgaccagcatcctgctggcaactccaaggccctgggtgggcttctggaatgagcatgc

SEQ ID NO: 42027 - DNA, 190 bp, Macaca Mulatta
tctcttatttgacttcattatttggctttcaattaacaacatgaaaactatacagaaattagcctgtgccctataagatagagatttagataatttgctcaaaacattacatgagatgttccgattttctctcaaaggcaggactccaacacggcaggtggaaaaccaacaaaaggaagaagacagaaag

SEQ ID NO: 42028 - DNA, 776 bp, Macaca Mulatta
  misc_feature (1)...(776): n = A,T,C or G
ttcttagctcaattcaaaccttcngnttntnngattcaagtgattcttttactttcagcctnnnnnnnnnnnnnnnnnnnnnnnnnnntgcccacaacannnnnnnnnnnnnnnnnnnnnnnngcnnnnnnnnnnnnnnnnnnnnnnnnnnnnnnnannnnnnnnnnnnnaacctcacgtgatccgcccacntannnnnnnnnnnnnnnnnnnnnnnnnnnnnnnnnnnnnnactcccagnccagagttattaattttacaagtactgtctgagccctcctttgctggaggtacaacctcgttttagcctgtttttagatatttgagggctgatgactgatgttctcctagcacctgttgtttaactagcagtctgggcaacagcaatcaaggtcaggttgtctaagttattttagcagcagctgctttggttctctccttgcaccttgaaaaaaatatttatggtatttagctgatcagaatagcctaaacataccctttggctttactgtgaataatactgagaagccttgccatagctattagttaaaacttagtttgatttgcatgatgttggctaagataaagctttttactgctctgtgtgctttgctatgtggcatctccttttttcctgtcttcctaaggcttagtggcataaaaccatggcaatctctgctttccacgttagactgcatttgatgtaacacagaagccactgattttgcaggtccaggtgtttgtgtttcattacatatgctgaaccctgggtttcc

SEQ ID NO: 42029 - DNA, 199 bp, Macaca Mulatta
  misc_feature (1)...(199): n = A,T,C or G
agggaaacctggggcatctcgcgcatacgtccgtaactgaaagtggctaaggcatcccagccggaggaagtgagctctccngggtcaaggcttgggtcttgccccgcagactcttgggacgacccggccccagcgcagctatgaacctggagcgagtgtcctatgaggagaagttgaacttgtgccggaagtactacct

SEQ ID NO: 42030 - DNA, 1804 bp, Macaca Mulatta
  misc_feature (1)...(1804): n = A,T,C or G
cntgttgagagagggggtttcttcaaaagatcggcgcaaaaaaggttataaagagaacggcccatccccgttgttctccaaaacgaagtgcacagggcggggggggcataaatttgattatgaggactagcgttggaaaccgcccgcttggaaaagaatcccagggaaagggcccccgcaaaactcccacttgggggtttggtttaaaaaaaggctttgggtggcccccccgnnnnnnnnnnnnnnnnnnnngaaattccaaacccctagttgcgggccccaggattttcctcgggaaacacgcgttggccccagtttccctttccctacaggggccccggggcccaaaagaannnnnnnnnnnnnnnnnnncaagggcccaaggcggcccaccaaattttttcttcctttccggacgcgttggtaggaaacgttggccgcggtgttggtggtgcttcgtctgtgccgtggctttttttggtttcggttgttttaaatttatactcagattctaattgtaatagggaaggaagaagatacagctcagtgcaccatgaagttgagacagagatagagacatcccagccccacctctctggaacaggaaagataaatgaggagggaacacaggtcagcgtggggaagagggtcatggtggacacggggatggggtgttctccgcacctcctcacattatgccaacaggaacacagacacattcagatgcctttgcagaaagaaatgccagagttcttcaactcacaaagagaaggcctgaacaaatcctgcctctcagttccacacaagacagttgtctcaggcttttcaagccatgagagactcatcagagccctggggactgtccttggacgcagcctgaaagtagctccctccttttccacctgagctcttcctcctgcacatcatagcagcgaccacagctccggtgacaacccatctcagggtgaggggctccggcaatccctcgtgctgtacgtggcatgtgtatctctgctcttctccagaaggcaccaccacagctccccacttttggaaggttccatctcctcctggcctggtctccacaagttcggtgtcctgagtttgatcctccccatcccgctgccaggtcagcgtgatctccgcagggtagaagcccagagcccagcacctcagggtggcctcatggtcagagacggggtggtgggtcacgtgtgtctttgggggatccgcgcgctgcagcgtctccttcccgttctccaggtgtctgcggagccactccaggcactcgccctccaggtaggctctcatctgctctgcctcaccggccgcctcccacttgcgctgggtgaaccgagccgccatgtccgcggcggtccaggagcgcaggtcctcgttcagggcgatgtaatccttgccgtcgtaggcgtactggtgatacccacggaggaggcgcccgtcgggccccaggtcgcacccatacatccactggactgtgtgagaccccccctcgctctggttgtagtagcggagcagggtccccaggtccactcggtcagtctgtgcgcgggccttggcgagctctgtctgctcttcccaatactccggcccctcctgctccacccacggcgcccgcggctccgccctcggactcgcggcgtcgctgtcgaaccgcgcgaactgcgtgtcgtccacgtagcccacgtagatgaagcggggctccccgtggccgggccgggacacggcggtgccgaaatacctcaaggagtgcgagccggcccgggtctcggtcagggccagggcc

SEQ ID NO: 42031 - DNA, 866 bp, Macaca Mulatta
  misc_feature (1)...(866): n = A,T,C or G
gggctttgcctggtgtgattccgtcctgcgcggctgttctctggagcagcgttggtttatctccgtccgccttctctcccacctaagtgcgtgccgccacctgatggaagattcgatggacatggacatgagccccctgaggccccagaactatcttttcggttgtgaactaaaggccgacaaagattatcactttaaggtggataatgatgaaaatgagcaccagttatctttaagaacggtcagtttaggggctggtgcaaaggatgaattgcacattgttgaagcagaggcaatgaattacgaaggcagtccaattaaagtaacactggcaactttgaaaatgtctgtacagccaacggtttcccttgggggctttgaaataacaccaccagtggtcttaaggttgaagtgtggttcagggccagtgcatattagtggacagcacttagtagctgtggaggaagatgcagagtcagaagatgaagaggaggaggatgtgaaactcttaagtatatctgggaaagcggtctgcccctggaggtggtatcaaaggtttcacataaaaagtaaacttgcctgcctgatgaagatgatgaatgatggaggatgaaagatgaatgatgaatgaaaaatgattgatgaaggatgaattttttaatgaatgaaggaaaannnnnnnnnnnnnnnnnncaggtggaaaaaaacctttaacaaaaatacttcccagcccaaaaatgcccccaaaaattccatatctcgaatagggaaaagaacttcaaaaacacctttcatctacactcctaaggatttaaaaggggacacaagaaatacctttctaanaaaaaacgcgggaataaaaaccc

SEQ ID NO: 42032 - DNA, 787 bp, Macaca Mulatta
  misc_feature (1)...(787): n = A,T,C or G
gnnnnnnnnnnnnnnnnnnnnnnnnnnnnnnnnnnnnnnnnnnnnnnnnnnnnnnnnnnnnnnnnnnnnnnnnnnnnnnnnnnnnnnnnnnnnnnnnnnnnnnnnnnnnnnnnnnnnnnnnnnnnnnnnnnnnnnnnnnnnnnnnnnnnnnnnnnnnnnnnnnnnnnnnnnnnnnnnnnnnnnnnnnnnnnnnnnnnnnnnnnnnnnnnnnnnnnnnnnnnnnnnnnnnnnnnnnnnnnnnnnnnnnnnnnnnnnnnnnnnnnnnnnnnnnnnnnnnnnnnnnnnnnnnnnnnnnnnnnnnnnnnnnnnnnnnnnnnnnnnnnnnnnnnnnnnnnnnnnnnnnnnnnnnnnnnnnnnnnnnnnnnnnnnnnnnnnnnnnnnnnnnnnnnnnnnnnnnnnnnnnnnnnnnnnnnnnnnnnnnnnnnnnnnnnnnnnnnnnnnnnnnnnnnnnnnnnnnnnnnnnnnnnnnnnnnnnnnnnnnnnnnnnnnnnnnnnnnnnnnnnnnnnnnnnnnnnnnnnnnnnnnnnnnnnnnnnnnnnnnnnnnnnnnnnnnnnnnnnnnnnnnnnnnnnnnnnnnnnnnnnnnnnnnnnnnnnnnnnnnnnnnnctatttaatattcctaacacctcggctcccaattaatccttccaacctccttaacccccaacattcatcccgggggggttttcttttccccgcgaatagtataagtataaaatgaacaaaaaatttgccatgtttcggcccgcctccggccccttttagaaaaccttttcctaaaaaccta

SEQ ID NO: 42033 - DNA, 822 bp, Macaca Mulatta
  misc_feature (1)...(822): n = A,T,C or G
ggnnnnnnnnnnnnnnnnnnnnnnnnnnnnnnnnnnnnnnnnnnnnnnnnnnnnnnnnnnnnnnnnnnnnnnnnnnnnnnnnnnnnnnnnnnnnnnnnnnnnnnnnnnnnnnnnnnnnnnnnnnnnnnnnnnnnnnnnnnnnnnnnnnnnnnnnnnnnnnnnnnnnnnnnnnnnnnnnnnnnnnnnnnnnnnnnnnnnnnnnnnnnnnnnnnnnnnnnnnnnnnnnnnnnnnnnnnnnnnnnnnnnnnnnnnnnnnnnnnnnnnnnnnnnnnnnnnnnnnnnnnnnnnnnnnnnnnnnnnnnnnnnnnnnnnnnnnnnnnnnnnnnnnnnnnnnnnnnnnnnnnnnnnnnnnnnnnnnnnnnnnnnnnnnnnnnnnnnnnnnnnnagcaatcccttctactccttcttctctaccaagtttctaggccggccggccatttacccatgcttacttaaaaggatcggcaaacctcaaataactacctttcttttgaaccctgtttggaaggaaggaaacccttatccctataacaaaccaccctaattctgaattcttttgggtccaccccggaaagttcctaaatctctttatttctcgcccgggtctttaggaaatagttactccaccaattggtaaaacctacttacttctgnnnnnnnnnnnnnnnnnnnnngggtgaaaatgggggtataattttgaaacctcttaaatattccacttggggggttctttaagcgtttataattggaaaagaaagccccacacactgaggatttaacagtttgggagataaaaaaccgtaaaaataatcccctagacca

SEQ ID NO: 42034 - DNA, 766 bp, Macaca Mulatta
gggataatctgactcagaaatataaacactttcaatgaaagggaggaacagaaggacaatttccagtgcacagaatcacttggatgaaataagaccagctctctacccttatttttggacatgccttttttggaagagacttggactttatccttattgttgttagtgttgttaatattctttgcttcagcccatggtgccttggtctctctacaatcaaatggaggatcccccacccagcttcattacagagtgatattgggcaagtgagatcatctcaccattttgccaagatactctaaaattacatccaagtttaccagtagaaagacagaggatgcaccgaatgggtgtgaccttcagcttaccagcacacctggagaagttcagaaccaggttctgaatcatcaggattgccttttgcatgaaaacattggctggtgacatgacttctcttcaggccatgagcctaacaccctgccagttttcatggccactgcagtaatggacgtttgtgtgaagaaatgaactgtggaatacaaaatgctttgagtctttccaattgttcattagttcactttttgttacttctttccaaaatggaagtgctgaagccatggtctttctgcccttccaaactgatgaaagagagtctttgccaatggtccatgggaagacacttgggtttggagaaaccctgcccacttcccaagaccaaagagattagggaaaagcctgggcaatattctccaactccaagcaagcc

SEQ ID NO: 42035 - DNA, 483 bp, Macaca Mulatta
caggtcctctatgactgtgagcctggtgcccggcgccgaagtactgattgttgttgccccctgtcccttgaactgctggcacagaggtacagagaggtctggctggggctgggcgactccaggatcagggggaaattcctcttctcttttcgagagacgttgtacccttcaggaatatctcccttatcaaccatctcaacattaactgaatagtagatctgcctcaggcccagtcctgggtcttgtcgataccaggacatatactcatggttcatattctgagaacaagtgactgtcaacttctttccagtcactgtgatgaggtatcttgggttctgggtcacttgggcttccaaggggctgtggtcctatgaaggcaaaggaccacatagccaaggagctgggggcccatggcaggcatcaggcaggtgtctgccagttctggggactccagttggtttctgtaatgtctccacctcttcc

SEQ ID NO: 42036 - DNA, 669 bp, Macaca Mulatta
gcttttgcagattgctttttgtttcatacaagtataagatcatattttctttttcaacttagtaataggcaggcttcttggaaaaatcagtagattgatacagtctctccccaaatcaaattatattgtatatcttttatattagatgtttgcagaaattctgtggcctttaagatcagttattcagcctttgtaattatgttatctagctatgttgaaaagataagtgcttactatataagcactctttgaaaaataattaactgattactctttcagaaaacagcaggtgtctcaatgcttttatttccataattataaagaccattgtcaaaatctttggtttactaagtatttcagtgagcatatatagagatacattgcttgtagcataaaaagtcttgtaaataacttattcacatttggcttttttttaattcatacatttttatttgcttttgaaaattatgaagttaaaatttaattctaaggtagtatttttcatgtataaaactaagaatgcagtttagcatactgtttgaataaaattataataaatggcacaattccttaaaccctgaaaataccaagttatattggaaagtagtagaaacaaacaaactagtggagaacatcttagaaaattctattgtggaaattaaagatgat

SEQ ID NO: 42037 - DNA, 176 bp, Macaca Mulatta
tggacacccggaaggacattcaaatcccaaagcagcagccaatggcatataactgtagagaatgtcacagataaaatgacatgaagtccagggatccagtcaaatgtgcagaacatggttacagaataatatataagaaaaggactgaaatattggtgggttttgatactcagtga

SEQ ID NO: 42038 - DNA, 602 bp, Macaca Mulatta
  misc_feature (1)...(602): n = A,T,C or G
gggggagcaccttctcctttgtttggtgcatttaggctgatgaacgtgaaattttttgctcgctttccacgcactccgtggagctgtgttttcgaggaagggtcgggttatctttattgagtgaatgtcacctaaggatttcatctaaggagattattaagataaaggaacacataggtcacacatccccgttcctaaacctgggatttagatacctaaccgtaaacgactgtattttactctttatttttaggattttttttaaaaagtaggctttcagaactcaattggtgaaaatattgcaattttatcttcaaagttttttcttaaaatgtttccccacgcccccctaaaaaaattaaggatttgttgtagttctctcctgttttctatctcccaggccctgaaaaggagcctttaaaagtcaatcctactccatttggcaaagagggaactgaaatctggaaagtaaggacttgcccaaggtcactggcttagtggcagactagagacttgaactcangtctcaattcccaggtgagtgggaattcatgccatgtcatcacatcatgtgcgcctggaagaactatattccatangtg

SEQ ID NO: 42039 - DNA, 782 bp, Macaca Mulatta
  misc_feature (1)...(782): n = A,T,C or G
tttcaagtagtctgacttgagggcagttcatgaccagtagagcaaattctgcccctggttttcanaggggtaaatcaatcttttaaaaagtaaaaattgtttgccccttatttactttagaaatggttcctaatctaaagctttttgcctgaaaagtgttatgataattctagctgaagatattttaaaattctctgattttagactgcttggttcaatgttcttcattttcatggagcaaatgcaaatataacgtattcaagaaggagaaggagtaaatacataagagaatgtggcatgaaaggaaggtctgtttgccccttttcactgaaatttgggaaccagggccattgattggaaaggacgggggaatagccaagtagttgttgccagtaaaaatgccgagccaaagactcaccaataggtaattaaaagaacagggagactcataatgtgcacagaagttttgctgtggctgccagctccagctcttctctcctccatcccagctcttactcagatcaccatcacacaccatgtcctttgattactggggcaggtaacagccttcctgctgaattgagtttgatacaattccagcagggaaaagtactacagtccagtggctgaacaaggagaaatctacaaaagtcgttttgtttaaaatgggtccaggcattttgaggacacttttattggataaagttggtgtctgatatagaacttattcttggacaggaaagagtagaaattaggagaagatactgctttgccagccaacc

SEQ ID NO: 42040 - DNA, 754 bp, Macaca Mulatta
gggggtacaaactgggtctgactttgttatttggtttatttgtgaaccatgtacttgctcttcctcccagaaacatagcttgtaggcaaggttaatccagtgttggcgatccatgtcctagcacagcatctgtaagttaatgcacaatcattccttccaaggatggatttatcattgtaaatatattttcattgtcttacaggcataatgggcataagtgtattgcttttaaatattttaaatgaaactattacagttacatatattttgcttgaagtgagtgattttcaaactttttgtatttggtgggctgtccatcttgtaatggtgggagtaaatgtttccatagataataaagcagttcttggctgaattcagcttgtgtttcttttggagggtgggcaaatcagagggcagagattatttagttgcattataggtattcttctgtaccacttgccctttgaaaccctcaacttgaggtaatgcgcagtctggggttttaattattattaatcatcttgtggatttacggaaatccataatggacagagttgagtttttaacccaatgatagtatttatagaaaatatttcgaacccccacattcttcagggtcattttagttagtacatagtcattgaagtggccagccacacctggacacaatctcccaacatccaaagaatgggagaatcctgggtctgtgtaaagtataatggtttttgcaccaaaatccttccaagttccttgg

SEQ ID NO: 42041 - DNA, 631 bp, Macaca Mulatta
  misc_feature (1)...(631): n = A,T,C or G
ggacctccaggatataatggctaccctgggccccaggttggctacccacccccaccagctggccattcaggtcctggcccagctggctttcctgtcccaaatcagccaatgtataatcagccagtatataatcagccaggtggagctgcagggataccatggatgccagcaccaccgcctccattaaactgtccacctggattagaatatttaagtcaggtaatttcaaagacacaaaatactcataaaaaacagaactgtgcttccagcttgcttaaccagattaacaaatgaataattcaccaaagtctgaaatggcaaaactatatattctgctaagagattactctcattcttttaggtcaggttcagttttaaagcaaaacacaaatgccttagaaaattgtactttctgtgatcttaaatacaatctatgataatggccaataacaaacatttaattaacactgttttcctgtctttgttgtatgcctgatacatgtattaactcatttaatccttatagaaagtctatgatgtataggtgctacagttatctccatttttcanaagaagaaactgaggtccagagaagttatatagctccctctggggtgagaacctaaagagt

SEQ ID NO: 42042 - DNA, 1011 bp, Macaca Mulatta
  misc_feature (1)...(1011): n = A,T,C or G
cctggagagcatccgtcagtgtggagtggccctctgcatcgtgctgggattctccatcctgtctgcatccatcggcagctccgtggtgagggacagagtgattggagccaaaaggttgcagcacataagtggccttggctacagaatgtactggttcacaaacttcctatatgacatgnnnnnnnnnnnnnnnnnnnnnnnnnnnnnnnnnnnnnnnnnnnnnnnnnnnnnnnnnnnnnnnnnnnnnnnnnnnnnnnnnnnnnnnnnnnnnnnnnnnnnnnnnnnnnnnnnnnnnnnnnnnnnnnnnnnnnnnnnnnnnnnnnnnnnnnnnnnnnnnnnnnnnnnnnnnnnnnnnnnnnnnnnnnnnnnnnnnnnnnnnnnnnnnnnnnnnnnnnnnnnnnnnnnnnnnnnnnnnnnnnnnnnnnnnnnnnnnnnnnnnnnnnnnnnnnnnnnnnnnnnnnnnnnnnnnnnnnnnnnnnnnnnnnnnnnnnnnnnnnnnnnnnnnnnnnnnnnnnnnnnnnnnnnnnnnnnnnnnnnnnnnnnnnnnnnnnnnnnnnnnnnnnnnnnnnnnnnnnnnnnnnnnnnnnnnnnnnnnnnnnnnnnnnnnnnnnnnnnnnnnnnnnnnnnnnnnnnnnnnnnnnnnnnnnnnnnnnnnnnnnnnnnnnnnnnnnnnnnnnnnnnnnnnnnnnnnnnnnnnnnnnnnaggggtcaatctactctccaaggcatagtcaaatcttccaaggatatagatgttgaaaaagaggaaatgagggtgtttgaaggaaggaccagtggagacattcttgtgttatacaacctcagtaaacactatcgacgctctttccagaagattattgctgtgcaagatattagtttgggcataccaaaaggagagnagtgctttggacttctaggggtgaatggagctgggaagagcaccactttcaaaatgctgaatggtgaagtttctccaacttcaggacatgctatcatcaggactcccatggg

SEQ ID NO: 42043 - DNA, 3268 bp, Macaca Mulatta
  misc_feature (1)...(3268): n = A,T,C or G
cattccagtgattaatggaagagatttacagaaccctattattgttcaactttgtgatcagtgggataatccagcaccggtacaacatgttaaaataagtcttacaaaagctagcaatttaaannnnnnnnnnnnnnnnnnnnnnnnnnnnnnnnnnnnnnnnnnnnnnnnnnnnnnnnnnnnnnnnnnnnnnnnnnnnnnnnnnnnnnnnnnnnnnnnnnnnnnnnnnnnnnnnnnnnnnnnnnnnnnnnnnnnnnnnnnnnnnnnnnnnnnnnnnnnnnnnnnnnnnnnnnnnnnnnnnnnnnnnnnnnnnnnnnnnnnnnnnnnnnnnnnnnnnnnnnnnnnnnnnnnnnnnnnnnnattttatgattagtgttatttctgaagatgacagtatcattaaaaacattaatccagcacgtatttccatgaaaatgtggaagctatctaccagtgggaaccgacccccagcaaatgnnnnnnnnnnnnnnnnnnnnnnnnnnnnnnnnnnnnnnnnnnnnnnnnnnnnnnnnnnnnnnnnnnnnnnnnnnnnnnnnnnnnnnnnnnnnnnnnnnnnnnnnnnnnnnnnnnnnnnnnnnnnnnnnnnnnnnnnnnnnnnnnnnnnnnnnnnnnnnnnnnnnnnnnnnnnnnnnnnnnnnnnnnnnnnnnnnnnnnnnnnnnnnnnnnnnnnnnnnnnnnnnnnnnnnnnnnnnnnnnnnnnnnnnnnnnnnnnnnnnnnnnnnnnnnnnnnnnnnnnnnnnnnnnnnnnnnnnnnnnnnnnnnnnnnnnnnnnnnnnnnnnnnnnnnnnnnnnnnnnnnnnnnnnnnnnnnnnnnnnnnnnnnnnnnnnnnnnnnnnnnnnnnnnnnnnnnnnnnnnnnnnnnnnnnnnnnnnnnnnnnnnnnnnnnnnnnnnnnnnnnnnnnnnnnnnnnnnnnnnnnnnnnnnnnnnnnnnnnnnnnnnnnnnnnnnnnnnnnnnnnnnnnnnnnnnnnnnnnnnnnnnnnnnnnnnnnnnnnnnnnnnnnnnnnnnnnnnnnnnnnnnnnnnnnnnnnnnnnnnnnnnnnnnnnnnnnnnnnnnnnnnnnnnnnnnnnnnnnnnnnnnnnnnnnnnnnnnnnnnnnnnnnnnnnnnnnnnnnnnnnnnnnnnnnnnnnnnnnnnnnnnnnnnnnnnnnnnnnnnnnnnnnnnnnnnnnnnnnnnnnnnnnnnnnnnnnnnnnnnnnnnnnnnnnnnnnnnnnnnnnnnnnnnnnnnnnnnnnnnnnnnnnnnnnnnnnnnnnnnnnnnnnnnnnnnnnnnnnnnnnnnnnnnnnnnnnnnnnnnnnnnnnnnnnnnnnnnnnnnnnnnnnnnnnnnnnnnnnnnnnnnnnnnnnnnnnnnnnnnnnnnnnnnnnnnnnnnnnnnnnnnnnnnnnnnnnnnnnnnnnnnnnnnnnnnnnnnnnnnnnnnnnnnnnnnnnnnnnnnnnnnnnnnnnnnnnnnnnnnnnnnnnnnnnnnnnnnnnnnnnnnnnnnnnnnnnnnnnnnnnnnnnnnnnnnnnnnnnnnnnnnnnnnnnnnnnnnnnnnnnnnnntctacctcatttccgaaatggaaaattgtattttaaacctattggagatccagtctttgctcgagacttgttaacatttccagataatgtagaacattgtgaaacagnnnnnnnnnnnnnnnnnnnnnnnnnnnnnnnnnnnnnnnnnnnnnnnnnnnnnnnnnnnnnnnnnnnnnnnnnnnnnnnnnnnnnnnnnnnnnnnnnnnnnnnnnnnnnnnnnnnnnnnnnnnnnnnnnnnnnnnnnnnnnnnnnnnnnnnnnnnnnnnnnnnnnnnnnnnnnnnnnnnnnnnnnnnnnnnnnnnnnnnnnnnnnnnnnnnnnnnnnnnnnnnnnnnnnnnnnnnnnnnnnnnnnnnnnnnnnnnnnnnnnnnnnnnnnnnnnnnnnnnnnnnnnnnnnnnnnnnnnnnnnnnnnnnnnnnnnnnnnnnnnnnnnnnnnnnnnnnnnnnnnnnnnnnnnnnnnnnnnnnnnnnnnnnnnnnnnnnnnnnnnnnnnnnnnnnnnnnnnnnnnnnnnnnnnnnnnnnnnnnnnnnnnnnnnnnnnnnnnnnnnnnnnnnnnnnnnnnnnnnnnnnnnnnnnnnnnnnnnnnnnnnnnnnnnnnnnnnnnnnnnnnnnnnnnnnnnnnnnnnnnnnnnnnnnnnnnnnnnnnnnnnnnnnnnnnnnnnnnnnnnnnnnnnnnnnnnnnnnnnnnnnnnnnnnnnnnnnnnnnnnnnnnnnnnnnnnnnnnnnnnnnnnnnnnnnnnnnnnnnnnnnnnnnnnnnnnnnnnnnnnnnnnnnnnnnnnnnnnnnnnnnnnnnnnnnnnnnnnnnnnnnnnnnnnnnnnnnnnnnnnnnnnnnnnnnnnnnnnnnnnnnnnnnnnnnnnnnnnnnnnnnnnnnnnnnnnnnnnnnnnnnnnnnnnnnnnnnnnnnnnnnnnnnnnnnnnnnnnnnnnnnnnnnnnnnnnnnnnnnnnnnnnnnnnnnnnnnnnnnnnnnnnnnnnnnnnnnnnnnnnnnnnnnnnnnnnnnnnnnnnnnnnnnnnnnnnnnnnnnnnnnnnnnnnnnnnnnnnnnnnnnnnnnnnnnnnnnnnnnnnnnnnnnnnnnnnnnnnnnnnnnnnnnnnnnnnnnnnnnnnnnnnnnnnnnnnnnnnnnnnnnnnnnnnnnnnnnnnnnnnnnnnnnnnnnnnnnnnnnnnnnnnnnnnnnnnnnnnnnnnnnnnnnnnnnnnnnnnnnnnnnnnnnnnnnnnnnnnnnnnnnnnnnnnnnnnnnnnnnnnnnnnnnnnnnnnnnnnnnnnnnnnnnnnnnnnnnnnnnnnnnnnnnnnnnnnnnnnnnnnnnnnnnnnnnnnnnnnnnnnnnnnnnnnnnnnnnnnnnnnnnnnnnnnnnnnnnnnnnnnnnnnnnnnnnnnnnnnnnnnnnnnnnnnnnnnnnnnnnnnnnnnnnnnnnnnnnnnnnnnnnnnnnnnnnnnnnnnnnnnnnnnnnnntaaagagaacatacattctcacattaatgtactttctggtagaaagttgctgcaaaaacatttcaaatgtatattaactcaacctaatgtatgtcatatatatgtctttgtgtaagttcaagactattaatctgtgaagttattttgtaaggacatacatttggtaagtttgtctcccaggaaatgtatgtgtttttaaaccctttctaaatatgcaggctgttaataaataagattgtttcttcccta

SEQ ID NO: 42044 - DNA, 786 bp, Macaca Mulatta
  misc_feature (1)...(786): n = A,T,C or G
ggtataaatttaattaaaaatatcattttgagacataaatgtaacatgtaaaattatacaatttctggaaaaaaatgagaaaatatttgttatcttcatttaggtaaagattttttagatatgacatcaaaaatacagtccataaaagaacattttgataagttggagtgcatcaaaacataaaactttggtttcttcaaaagacaggattaagagaatgaaaagacagcttacatactgggagaaaatatttgcaaatcacagtccagtaaagagctttatctccaatatataaagaactgttggaactcaataggaagattgacttctggcataacagcatgaggagttctgctgacacattccccagtgaaactagtgaaagttactatttttttctgtctatgctgcttgaaggagaaaaaaagtattaaaatctccaaccgtttagagtctctggaaatggtcctgaggacaaagagcaaatgaagaaacatctcttttagaaaatttagtaagaaaggtgagattctgtgatatttgaaccaagacttcttctaccctctcatcccccagctcagtgaggtagtgactccactctagataactgcagccaagaacacaagggnnnnnnnnnnnnnnnnnnnnnnnggagagataggactttagcagttctcatcctgccacttgtttgcctgttgctgaggttaaatcccagggtgaatgtgaattgaagaggtgggaaaactcccctttcttctacccaaactctttactcttgggaaa

SEQ ID NO: 42045 - DNA, 641 bp, Macaca Mulatta
  misc_feature (1)...(641): n = A,T,C or G
gggccagtattcttaaccttttttggaaggtttatttgaatatccactaacaaatcaaagaccaattctataattcctcattgccccaatccaatctgatttttttaaatgcactattaagaatagtcaacaaactactgggaaaccaaggtgggtggatcacctaaggtcaannnnnnnnnnnnnnnnnnnnnnnnnnnnnnnnnnnttgtcactactgaagatacaaaaattatccaggcatggtagcgtgcannnnnnnnnnnnnnnnncnnnnnnnnnnnnnnnnnnnnnnnnnnnnnnnnnnnnnnatagaannnnnnnnnnnnnnnnnnnatgccacannnnnnnnnnnnnnnnnnnnagagtgnnnnnnnnnnnnnnnnnnnnnnnnnnnnnnnnnnnnnntggtcaacaaactaaaaacaagggcatgtttccttgacttggaaatcccattttaaattattatttaaaatatactgataaaaattaattagtcctatattaaaatatcttcgctaaattaggaagtgttatctttcttacagtcttttcaatcaagtacaaggtacaacttttctgttatttttccctttactttatattatacctgaaattcaactactgtatgtatgttc

SEQ ID NO: 42046 - DNA, 404 bp, Macaca Mulatta
  misc_feature (1)...(404): n = A,T,C or G
tttgcaagccctctcagctgccgcccggtcggccatggtcacctgggaggagccacagacacatcaggggctgccgtgagggaaaccaggggcaaaaggggcagagggctccgccctggcaccggatgctgccacccctctcttcccttcctctgagggtgcctgtaacctagggtccttgagccaaagcccctctgannnnnnnnnnnnnnntcccacaaagatgcctcctggattccagctcctctcctcaaagttcaaggcctgggaaatgtggccttcaaggacaaaaataatcccctgcggggacagggcaaaaacgaaccccgaagggaggtgggggggctgcctggactgcccaccagtgagggccaagacttccctctgggaaggagtttgcgacg

SEQ ID NO: 42047 - DNA, 846 bp, Macaca Mulatta
  misc_feature (1)...(846): n = A,T,C or G
ggnnnnnnnnnnnnnnnnnnnnnnnnnnnnnnnnnnnnnnnnnnnnnnnnnnnnnnnnnnnnnnnnnnnnnnnnnnnnnnnnnnnnnnnnnnnnnnnnnnnnnnnnnnnnnnnnnnnnnnnnnnnnnnnnnnnnnnnnnnnnnnnnnnnnnnnnnnnnnnnnnnnnnnnnnnnnnnnnnnnnnnnnnnnnnnnnnnnnnnnnnnnnnnnnnnnnnnnnnnnnnnnnnnnnnnnnnnnnnnnnnnnnnnnnnnnnnnnnnnnnnnnnnnnnnnnnnnnnnnnnnnnnnnnnnnnnnnnnnnnnnnnnnnnnnnnnnnnnnnnnnnnnnnnnnnnnnnnnnnnnnnnnnnnnnnnnnnnnnnnnnnnnnnnnnnnnnnnnnnnnnnnnnnnnnnnnnnnnnnnnnnnnnnnnnnnnnnnnnnnnnnnnnnnnnnnnnnnnnnnnnnnnnnnnnnnnnnnnnnnnnnnnnnnnnnnnnnnnnnnnnnnnnnnnnnnnnnnnnnnnnnnnnnnnnnnnnnnnnnnnnnnnnnnnnnnnnnnnnnnnnnnnnnnnnnnnnnnnnnnnnnnnnnnnnnnnnnnnnnnnnnnnnnnnnnnnnnnnnnnnnnnnnnnnnnnnnnnnnnnnnnnnnngtttttttaggttttattgggatgagccgcaccccctggtttaacggttgggcataaaacgttagaataccggagccctatttttacccccccccgccctaataatcatttggcaattccccgaccggggtgtggaaaaatttttttaagcgggggcttgtgctaccactttcaagtggggggccgacaattccaaaatggggggccccccaagaaat

SEQ ID NO: 42048 - DNA, 1336 bp, Macaca Mulatta
  misc_feature (1)...(1336): n = A,T,C or G
ctcgctatcgatggtacagtagttcatcaaattttttactaatttagtgtagagtaagtgtacattacttataaagtctacagtagtgtacagtaatatccaggtcttcacatttatttgccactcacttactgactcacctagagcaacgtgtagttgtgtaagcagcgctcatggtaagtgctctacacatgtataccacgtataacctgtatttttaaaatcttttatatcatctatgtttaaatatgtttagaaacacaaagaccattatgttacagttgtctacactattcagtacagtaacattctgtatagatttttattctaggagcaataggctatgccatacagcctatgtgtagtaggctataccgtctaggaagtatcgtctgtaagtacactctataatattgatatcgcttatttgatattttttcacaccatatgcccactgttttttactctatcatgatttttaatttttttttttataacaatccctcccctttcattcctcattttttatgcccagacttaattttatatttcccattaatgattataacttgtttcttcgcccccacccacttttttcccctctctcttatgcctctatctttcttcttctcacctttatctctattcttatatcataacattcctacttattattatcctctcattttttttctatattccttttacattccctcgttatattttactttattccctgtactgccgggccttacttacctcctcctcgatatctatcagctaaggatcaccatacatagtgtgttatatgcttttttttttatatctanactttatgataattggaatatttggcccagtattattttgtctgctatggtgtgtgaagttatattctttttttggcttgccaccgtangttttttcacccttttcctaggttttactctttctttatgtcttttactcatggacttatttttcctactgtaattctttcttctctctgcttcttctctcgcattcttaatatattattcctacacgcctttctgttgtatttttcacttctttattattccatctatttaatcttaaacttctactgtgatcatcactttagcagctgactttaagatcggaatgattttatatagatcgtttattgataaaacttttcatagtcaacctatctacgtactgcttttttcccctctgtggttatgcggcctcacaatacatgatttatatgtgtgttcttttctctcatttttttactatatacgcttttttttaatcagaccttttgtatctttatcctttgtgtttcttcttg

SEQ ID NO: 42049 - DNA, 665 bp, Macaca Mulatta
  misc_feature (1)...(665): n = A,T,C or G
gatctcatgatccgctcgctgagccttnnnnnnnnnnnnnnnnnnnnacatgagccaccgtgcccggctgggaagtgctttttaactctgttccctgatactctttatgcactagtaacgttgtggttgtcattggttgtttttgaattaagacagatttttacgtgtcttgggctgtgtgtgtgtccatgcatgctgtagagctaagatcctacactattaagaagaagatgttctcttttctatggcattggcttgttttacagtgaaagaatggatttctcagaactttatgctaaaaacatataggctggtgagctgtaatttaaaaaaacacggaagagaacttctgaaatcataataaatattcagcattataaactgatgtagtgcttttaagttagagtcattgtctttttgttgggtaggcatgagctgttagcatcacttttgaaataaaagaagtcttgtggcatttgccacttgagtgagacttatgtctctgaagtcattgaatcaccgagccagcccttgaccagtcactggggcaacctcttttgtgtgtgctctgagctgccctgctagttaaagctatttgtngactcaaattgaagttaatgcatgtttataacggtcaaaacttttgagtcccttttctcgacaac

SEQ ID NO: 42050 - DNA, 1703 bp, Macaca Mulatta
  misc_feature (1)...(1703): n = A,T,C or G
aagaagaagaagccaaagccaccggcacccccgacgcccagcatctatgatgacatcaactgacttgggtgcaagggatagcctttggctgagcagagccctctctcctgacccccacccaggtggcatagcctggcaaatggacggctgctgggggttggggcttgggaagcttggtgggccaggcaggcagaggatccgattatgcgcccctggggggtgtcaaagtcctctgcaatggagcacgactcctcagcgtgcaggactcagacctggacatattatgccttggacataagtttggtggggaggcagttttcctatttattctgtgagttactggatgtccagctaggccaggggcctgacctgggcgctgtgccagggcactgcctgccccccaccccaggaactggactaagccctgctgaggggcaatgtggtgacccgggaggctgtgggttggaagctgaacaaaaaaagggcctgccttggccgccctcagcaatgtgaatgggtccggtgcttggagctgaggggcaaggctgggcatgtcctgtctgtgtgcagaatcctatcaaatgcccccagtcccaggggtaggcaggcacagagtgctgtctgctgaggtgggcgtccagaactgccgccaccttcccnnnnnnnnnnnnnnnnnnnnnnnnnnnnnnnnnnnnnnnnnnnnnnnnnnnnnnnnnnnnnnnnnnnnnnnnnnnnnnnnnnnnnnnnnnnnnnnnnnnnnnnnnnnnnnnnnnnnnnnnnnnnnnnnnnnnnnnnnnnnnnnnnnnnnnnnnnnnnnnnnnnnnnnnnnnnnnnnnnnnnnnnnnnnnnnnnnnnnnnnnnnnnnnnnnnnnnnnnnnnnnnnnnnnnnnnnnnnnnnnnnnnnnnnnnnnnnnnnnnnnnnnnnnnnnnnnnnnnnnnnnnnnnnnnnnnnnnnnnnnnnnnnnnnnnnnnnnnnnnnnnnnnnnnnnnnnnnnnnnnnnnnnnnnnnnnnnnnnnnnnnnnnnnnnnnnnnnttcaccttgaccggcttcagtttctctcggcgctcctgcctccaaagcctgccctgtttcccttccttagcgcttntaagttatttattctgtacttgtggtttggggctctgaggaaaatcctaatctcgtgcctctccccctttgctaggagtcgggtgggaagagagggtggcctctgtgctccgggttgtcagtggaggggaaggggtgtcattgcccctctctgggactgtcatgccagtgtgcccacctgcctggtctacatcctgaagagatgtaccgtcccccctccatgcgggcaccaccactcccaggagccaagctggaggaccgcgacctgggctgggagcagagctgactgacacgggtggaggtgaccctgagccaagttctctggcacttcctggacatgtcccctgccctcatcccaagaggagccatcccacatttgggtagctagtacccaggactggttggactgatcgggttagggaccctagagggttaagggaacaacagagatggggctgcaatgccctgtctggaactccgctctccccctggggtggttctgattgtggctcatgcctggttgcaaattggtttttaacccaccaaattgtgattattttttaaaaagccgaaacattttggcaggagttagaa

SEQ ID NO: 42051 - DNA, 640 bp, Macaca Mulatta
acttggtcagctttggtacgatagtgcagcttcaggtgatcttgaaaatcaaatactatcctatactccagctgcttaacttcattttattaatttaatgtgtacctgaaagctcctggcaatgctggaaaatttttatcccagaggggtgggggtgaggggaagccagagtccacttttgtcacaattcatttttattaatagaaaataaacacttattccagtttcaaagttgttatacttgaagttgctaattttaaaaaatgaattttaaataatcacttaatcctgctttgactaagacaatgaaatgtggctttaaaaaaaaagtgttcagcaccatttgctcataggtctttcagagtttgttcttaaagtttctggaactttcctgtctgtaaagtataggaatgactgagctacattggaaagcctctctgggacaggcagtggggagttaagcagtcatcataaaggaatcagtgtacattcagcatggtgacttggactacacaacaatcccttcccctctacagtagctcaagagaaacatgcttctaagtactgaggtatgaggagtctcagactgttatttgctgttcgaattggtcttcccagctaataacagtaaatatctggc

SEQ ID NO: 42052 - DNA, 981 bp, Macaca Mulatta
  misc_feature (1)...(981): n = A,T,C or G
taaaaactaaaaactgttctgtaaggaaatgagattttttttaaaacaacaaaaaatgccttgctgactcactattaaataaaaatctccccaattttttgatagactacttcaagccatttgttacatggtattcctttgcaagtcaatttaggttttgtgttataacttttccnnnnnnnnnnnnnnnnnnnnnnnnnntaattcttttgtctgaaggggaaaggcattctnnnnnnnnnnnnnnnnnnnnnnnnnnnnnnnnnnnnnnnngacttgcaggcacaatatctagtactgcaactgccagaacttggtattgtagctgctgcccgctgactagcagctggactgattttgaataaaaatgaaagcattaaagggtttccctacaaaacatttttctttaaaatacttgtgaagtggctataagcagttgactttcacccttggagagcatcacactgtgtgagattcagtgattgttggccctccccagcccctcctgcttctttaagttatctgtgtgcgtgcgcttcctctcagtcttctttgcacgctcatttctttttctctgacccatgagaaaggaaaacttactgatgataatttttaaataatgtaatttattcatttatagcatgtcaggataaattaaaagaacatttgtctggaaatgctgccaggagcctattatgtaaatgttaggtattttgtaaaataaccttgaaattgtaaaattgacacgtgtttggtcagattgtgtcaagtttaatttggnnnnnnnnnnnnnnnnnnnnnngaaaactacttttgcaataattaattccctgattatcacatttcgccatttaagggatattaattaccctaaaaactgaaaaaaatcttactaaaatctgaaacttttgggggtaagcaaccttccttggtttcctttcccaaccacccctttgttcgttgaagttattttgttttctt

SEQ ID NO: 42053 - DNA, 3825 bp, Macaca Mulatta
  misc_feature (1)...(3825): n = A,T,C or G
ggagcctgctcagccccccagagaggaggtgcggaagtcttttgtggagagcgtggaggagatccccttcgctgacgacgtggaagacacctacgacgacaagactgaggactcaagcctgcaggagaagttcttcacgcccccgtcctgctggccgcgctcggggaagcctccccacccgcccctgggcaaggagaacgggaggctgcctgctcgggagggggcgctgcagccacagaagagggggctgcccttggtctccgcggaagccaaggagttggccgaggagcgcatgcgagcccgagagaagtccgtgaagagccaggcgctgcgggacgccatggccaggcaactgagcaggatgcagcagatggagctggccacaggcgcccccaggccccgcaaggcatcctcagcaccctcccagggcaaggagcgccggcccgactcccccacacgtcccactctcaggggctccgaggagcccaccctgaagcatgaagccatcagcgaggaggtcctctccgcgccctcggactcggggggcccagatggctctttcacttcatccgagggctccagtgggaagagcaagaagaggtcatcactcttctcccccnnnnnnnnnnnnnnnnnnnnnnnnnnnnnnnnnnnnnnnnnnnnnnnnnnnnnnnnnnnnnnnnnnnnnnnnnnnnnnnnnnnnnnnnnnnnnnnnnnnnnnnnnnnnnnnnnnnnnnnnnnnnnnnnnnnnnnnnnnnnnnnnnnnnnnnnnnnnnnnnnnnnnnnnnnnnnnnnnnnnncggggccacggtggactctggcaagacagggcgcttcccgtcgtaagggcagncagagctgcagctcaggcgccagctaagcttctccgaggactcagacctctccagtgatgatgtccttgagaggtcctcgcagaagtcacggcgagagnnnnnnnnnnnnnnnnnnnnnnnnnnnnnnnnnnnnnnnnnnnnnnnnnnnnnnnnnnnnnnnnnnnnnnnnnnnnnnnnnnnnnnnnnnnnnnnnnnnnnnnnnnnnnnnnnnnnnnnnnnnnnnnnnnnnnnnnnnnnnnnnnnnnnnnnnnnnnnnnnnnnnnnnnnnnnnnnnnnnnnnnnnnnnnnnnnnnnnnnnnnnncatgggcaagaaggacgaccccaagctgatgcaggagtggttcaagctagtgcaggagaagaacgccatggtgcgctacgagtcggagctgatgatcttnnnnnnnnnnnnnnnnnnnnnnnnnnnnnnnnnnnnnnnnnnnnnnnnnnnnnnnnnnnnnnnnnnnnnnnnnnnnnnnnnnnnnnnnnnnnnnnnnnnnnnnnnnnnnnnnnnnnnnnnnnnnnnnnnnnnnnnnnnnnnnnnnnnnnnnnnnnnnnnnnnnnnnnnnnnnnnnnnnnnnnnnnnnnnnnnnnnnnnnnnnnnnnnnnnnnnnnnnnnnnnnnnnnnnnnnnnnnnnnnnnnnnnnnnnnnnnnnnnnnnnnnnnnnnnnnnnnnnnnnnnnnnnnnnnnnnnnnnnnnnnnnnnnnnnnnnnnnnnnnnnnnnnnnnnnnnnnnnnnnnnnnnnnnnnnnnnnnnnnnnnnnnnnnnnnnnnnnnnnnnnnnnnnnnnnnnnnnnnnnnnnnnnnnnnnnnnnnnnnnnnnnnnnnnnnnnnnnnnnnnnnnnnnnnnnnnnnnnnnnnnnnnnnnnnnnnnnnnnnnnnnnnnnnnnnnnnnnnnnnnnnnnnnnnnnnnnnnnnnnnnnnnnnnnnnnnnnnnnnnnnnnnnnnnnnnnnnnnnnnnnnnnnnnnnnnnnnnnnnnnnnnnnnnnnnnnnnnnnnnnnnnnnnnnnnnnnnnnnnnnnnnnnnnnnnnnnnnnnnnnnnnnnnnnnnnnnnnnnnnnnnnnnnnnnnnnnnnnnnnnnnnnnnnnnnnnnnnnnnnnnnnnnnnnnnnnnnnnnnnnnnnnnnnnnnnnnnnnnnnnnnnnnnnnnnnnnnnnnnnnnnnnnnnnnnnnnnnnnnnnnnnnnnnnnnnnnnnnnnnnnnnnnnnnnnnnnnnnnnnnnnnnnnnnnnnnnnnnnnnnnnnnnnnnnnnnnnnnnnnnnnnnnnnnnnnnnnnnnnnnnnnnnnnnnnnnnnnnnnnnnnnnnnnnnnnnnnnnnnnnnnnnnnnnnnnnnnnnnnnnnnnnnnnnnnnnnnnnnnnnnnnnnnnnnnnnnnnnnnnnnnnnnnnnnnnnnnnnnnnnnnnnnnnnnnnnnnnnnnnnnnnnnnnnnnnnnnnnnnnnnnnnnnnnnnnnnnnnnnnnnnnnnnnnnnnnnnnnnnnnnnnnnnnnnnnnnnnnnnnnnnnnnnnnnnnnnnnnnnnnnnnnnnnnnnnnnnnnnnnnnnnnnnnnnnnnnnnnnnnnnnnnnnnnnnnnnnnnnnnnnnnnnnnnnnnnnnnnnnnnnnnnnnnnnnnnnnnnnnnnnnnnnnnnnnnnnnnnnnnnnnnnnnnnnnnnnnnnnnnnnnnnnnnnnnnnnnnnnnnnnnnnnnnnnnnnnnnnnnnnnnnnnnnnnnnnnnnnnnnnnnnnnnnnnnnnnnnnnnnnnnnnnnnnnnnnnnnnnnnnnnnnnnnnnnnnnnnnnnnnnnnnnnnnnnnnnnnnnnnnnnnnnnnnnnnnnnnnnnnnnnnnnnnnnnnnnnnnnnnnnnnnnnnnnnnnnnnnnnnnnnnnnnnnnnnnnnnnnnnnnnnnnnnnnnnnnnnnnnnnnnnnnnnnnnnnnnnnnnnnnnnnnnnnnnnnnnnnnnnnnnnnnnnnnnnnnnnnnnnnnnnnnnnnnnnnnnnnnnnnnnnnnnnnnnnnnnnnnnnnnnnnnnnnnnnnnnnnnnnnnnnnnnnnnnnnnnnnnnnnnnnnnnnnnnnnnnnnnnnnnnnnnnnnnnnnnnnnnnnnnnnnnnnnnnnnnnnnnnnnnnnnnnnnnnnnnnnnnnnnnnnnnnnnnnnnnnnnnnnnnnnnnnnnnnnnnnnnnnnnnnnnnnnnnnnnnnnnnnnnnnnnnnnnnnnnnnnnnnnnnnnnnnnnnnnnnnnnnnnnnnnnnnnnnnnnnnnnnnnnnnnnnnnnnnnnnnnnnnnnnnnnnnnnnnnnnnnnnnnnnnnnnnnnnnnnnnnnnnnnnnnnnnnnnnnnnnnnnnnnnnnnnnnnnnnnnnnatcaagccctgagccattgggggtagggtgcttgtccatcaaagcagttagcacacattccagccaggagccccccgggctagacccacctgcccctaggggtgctccagccgcctgccgcctccctgggctggggccagctgggagcagaggcctggcgcctccaaggcatcccatagcggagcaggccgaggggccgtgctgaccttgggctttccatgggaaccacactgtgcctcaacttgaacattcatcccaactgcaaaggagcaaagaacctgtgtcatccctgtccggaagctgccatctctctcccatgcacatccaggaagtacgctgctagtggccgccatagctctgattctcctccacctgctctcacgtgaggcaaaggtctccttttctctttacttaaaaaaggggagaggagggttcctagattccatcttcaaaccccagtcttcccataaaattggatgtgggaaaagaccttcactgcggtgtggcctgtcccagacctctcctatcgaaggccacaaaaccagtccaggcccggcagagccgcctttggcccttgtagctcctgctggccccacaacggggaagcagtttgcaaagtggctcggaaggagtg

SEQ ID NO: 42054 - DNA, 582 bp, Macaca Mulatta
taacttacagtactttttcgaccacccagaaaagcttgtcatgctgaaggagcatccacgtctcgataaatggcaagaagacatcacccagattcgatttttcagtcctggaagcatgtttggacaaatcacaggcaccaactatagatcaggactatgcttctgcctttgaacctatgaatgaatgggagcaaaatttagctgaaaaagaggataacgtaaagagctatatggctatccagcgcacagcaccaccagaccttagtactggctattggaaactttctccaaagcagtacaagattccttgtctggaagtccatgtgaataatattgatgctgtagaccaggagatgctcgagattctaatgacagttttctcagcttcacagcgcatcgaactccatttaaaccacagcggaggctttattgaaagcatccgcccagctcttgagctgtctaaggcctctgtcaccaagtgctccataagcaaattggaactcagcgcagccgaagaggaactgcttctcaccctgccttccctggaatctcttgaaatctcagggacaatccagtcacaag

SEQ ID NO: 42055 - DNA, 569 bp, Macaca Mulatta
gaagggcagagtcagcagacttgcttgagctcttgactcttaatccagtgtgtataccaccagcccatactataccctagcagaagacaaggatgattcatttgaacaatctgtggccttgatataatttatggaaattagctcactgtttgtattctaaataactaaaaattttaggaaagcaaaagagttttgagaaatgaatactaaatactatacattatttccgtcatgtgtttgcattggaatagtgtggtgatgtctaagccaaatttacttgagaacaaatgtctgtcttactggatgtaatgatgtaaggcatattaatcatactttaaatttactcagtgttttatcatggcttagccatctaataattttgtcataaacttttatctgaattgtggcaaataagttgcggtgatattttgaatggtagtttaaatagtttgaagttgatgacatagctaaacattttgtacaaatattttatttaaggcagatcaacaattgcagatgacattctcaatatatgatttatctttagattggacaaattatttgaaatt

SEQ ID NO: 42056 - DNA, 988 bp, Macaca Mulatta
  misc_feature (1)...(988): n = A,T,C or G
gggatttgggtatatgtgaacgtatataaggagaagctttggggatggaacccaagtctaaacacaaagtttatttatgtttcatacataccttacatacatggctgcaaggtaattttatgtaatatttttagtaattttgtacatgaatcaacgtacttggtgttaagtacttatgtgtggaattttaacacaagtgcttgtgatgtcatatcggagctcaaaaagtttcagatttaggaggatcttggattttcagattaagggtgcttaaactatattgcttatctaatgggccaaacttggagctgtttcaatgtggcattcttgaacccgcaaacgcaaacttttcaacagaatgcccagcccactttaatcttcccaatttatctttaacatgtctacaacaatgttatttatcagcaaaaagctaaaatccttattttaaaacacaaagttcacaataatgttgacacataccttaaaagactagaactgcgaggatatcttcggaattccatagtcggccctaagaagataacattttatcattattttttccaaacaagagaaatttcatacgtgtccccccttttaccgggatagcgcccttactatagtcttcttaacatccaattttcacataattgtaaacaccaactaatgcaaatatgttcatcaccaaagtaacttaccttgtcaaatttattaccgcattcgaccttctccactatatcattctgtatgccctggagcctgcctaccacaacacgagagctgttccacaccgcgccagcagtgtatccattataacagtgcgacaccacttgccgcctattaccactttggtcagcgcgtatgaacaccgagtcgaatcgtttgactgcccataacaactcctctcttggaggccaccctccggnaactatatactacatcctgcccactattatcttgagcaccgtctaagtatctgcacacctgccta

SEQ ID NO: 42057 - DNA, 1202 bp, Macaca Mulatta
  misc_feature (1)...(1202): n = A,T,C or G
agtattttcagcacctggaatcataccggcaaacgtgtggatgcttatgaccgtcctgagctatccctgggctcttatgaattcttggccactgtagattactgcaagnagaacagtaagttccccagccctcctgcctttatcttcatgattgacgtctcctacaatgccatcaggactggtcttgttaggctcctctgtgaggagctcaagtcactgttagactttctacctaggnagggagggtggggcagaagagtcagcaatccgcgttggctttgtcacctacaataaggtgctccacttctataatgtgaagagctcattggcccagccacagatgatggttgtgtccgatgtggctgacatgtttgtgccactgctggatggcttcctggtcaacgtcaatgagtctcgggcagtatcaccagnnnnnnnnnnnnnnnnnnnnnnnnnnnnnnnnnnnnnnnnnnnnnnnnnnnnnnnnnnnnnnnnnnnnnnnnnnnnnnnnnnnnnnnnnnnnnnnnnnnnnnnnnnnnnnnnnnnnnnnnnnnnnnnnnnnnnnnnnnnnnnnnnnnnnnnnnnnnnnnnnnnnnnnnnnnnnnnnnnnnnnnnnnnnnnnnnnnnnnnnnnnnnnnnnnnnnnnnnnnnnnnnnnnnnnnnnnnnnnnnnnnnnnnnnnnnnnnnnnnnnnnnnnnnnnnnnnnnnnnnnnnnnnnnnnnnnnnnnnnnnnnnnnnnnnnnnnnnnnnnnnnnnnnnnnnnnnnnnnnnnnnnnnnnnnnnnnnnnnnnnnnnnnnnnnnnnnnnnnncaggtggagaacgaccaggagcggttcctgagtgacctgcgtcgtgatgtccagaaggttgttggctttgatgctgtgatgcgggtccggacaagcactggtnggtatccgtgctgtagatttctttggagctttctacatgagcaacacaacagacgtggagctggctgggctagatggggacaaaacggtgactgtggagttcaagcatgatgatcggctcaatgaagagagcggagccctcctgcagnagtgtgccctgctttacaccagctgtgcagggcagcgtcggctccgcatccataacctggccctgaactgctgcacccagctggctgatctgtatcgaaactgtgagactgacacgctcatcaactacatggccaagtttg

SEQ ID NO: 42058 - DNA, 402 bp, Macaca Mulatta
  misc_feature (1)...(402): n = A,T,C or G
acttctcccagattgttagggtgctgactgaggaaagatggggcacccagagacagaagatgctattgcccagctcaatgaggnnnnnnnnnnnnnnnnnnnnnnnnnnnnnnnnnnnnnnnnnnnnnnnnnnnnnnnntggagccaaggaaacaggatgctgatagtctccaacgggccctgactgtgggctggtgtgtggaactgctgcaagctttcttcctggtggtagatgacatcatggattcatccttcacctgccggggacagatctgctgtcagaagctgggcatggatttagatgccgtcaatgatgctatccttctggaagcatgtatataccacctgctgaagatctattgnnntaccacctgctgaagatctattgccaggagcagccct

SEQ ID NO: 42059 - DNA, 746 bp, Macaca Mulatta
  misc_feature (1)...(746): n = A,T,C or G
gggggaggcagagacccagagaagtgaagggaacaaccagaagctgctctgctgctaacggtgggctttaggttcctctgcctcgggtcttgaccaccctcactgttatcttccgctttccttgcttctttctgacttgttaaggggtcttctagtggagttcatttgttcacagtcgttatttctaagtggctgggnnnnnnnnnnnnnnnnnncacacacgttntttgaatctcctgaattttttagccaactgaaacatgaatgaaaaatccactttgcagaaagttccaaaaggcggggctggagctggaggaggcttttagtgctgctgcctgaaagactgacttggagagaagctgtgtgcaaactgctactgcatagagggggtctcaggtggaagctactgtatgtcattctctcaatattcctaaagttcggcctgcttacatgagccaggacagtctgagtattaaaggaatggatgaaatgaattcttctctcctccaagtaaaaagtctctagtagccagcatgaatcatttctgcatggtacctgtccttctgggccgtagagaccgccagcagatggttctctggtcagccatatgatgtttcaccatatttaatcaactcagcgatttgaagaaacccaagtgatactaagggacaaagtcaaagagggggttttaggctacaatgacctagttttcactgggctggggccataagttaccaaaagttgca

SEQ ID NO: 42060 - DNA, 3461 bp, Macaca Mulatta
  misc_feature (1)...(3461): n = A,T,C or G
tttgagaagcttgctcaggaccgcaggaaacagctggagatcctgcagctggcccaggctcagggcctcgaccctcccagccaccactttgagttgaagacattccagactgtgaggnnnnnnnnnnnnnnnnnnnnnnnnnnnnnnnnnnnnnnnnnnnnnnnnnnnnnnnnnnnnnnnnnnnnnnnnnnnnnnnnnnnnnnnnnnnnnnnnnnnnnnnnnnnnnnnnnnnnnnnnnnnnnnnnnnnnnnnnnnnnnnnnnnnnnnnnnnnnnnnnnnnnnnnnnnnnnnnnnnnnnnnnnnnnnnnnnnnnnnnnnnnnnnnnnnnnnnnnnnnnnnnnnnnnnnnnnnnnnnnnnnnnnnnnnnnnnnnnnnnnnnnnnnnnnnnnnnnnnnnnnnnggtccttgttcagaagcgacaaactggttggcacagcacacctgaaactggagcggctggagaatgagtgtgagataaaagaaattgtggaggnnnnnnnnnnnnnnnnnnnnnnnnnnnnnnnnnnnnnnnnnnnnnnnnnnnnnnnnnnnnnnnnnnnnnnnnnnnnnnnnnnnnnnnnnnnnnnnnnnnnnnnnnnnnnnnnnnnnnnnnnnnnnnnnnnnnnnnnnnnnnnnnnnnnnnnnnnnnnnnnnnnnnnnnnnnnnnnnnnnnnnnnnnnnnnnnnnnnnnnnnnnnnnnnnnnnnnnnnnnnnnnnnnnnnnnnnnnnnnnnnnnnnnnnnnnnnnnnnnnnnnnnnnnnnnnnnnnnnnnnnnnnnnnnnnnnnnnnnnnnnnnnnnnnnnnnnnnnnnnnnnnnnnnnnnnnnnnnnnnnnnnnnnnnnnnnnnnnnnnnnnnnnnnnnnnnnnnnnnnnnnnnnnnnnnnnnnnnnnnnnnnnnnnnnnnnnnnnnnnnnnnnnnnnnnnnnnnnnnnnnnnnnnnnnnnnnnnnnnnnnnnnnnnnnnnnnnnnnnnnnnnnnnnnnnnnnnnnnnnnnnnnnnnnnnnnnnnnnnnnnnnnnnnnnnnnnnnnnnnnnnnnnnnnnnnnnnnnnnnnnnnnnnnnnnnnnnnnnnnnnnnnnnnnnnnnnnnnnnnnnnnnnnnnnnnnnnnnnnnnnnnnnnnnnnnnnnnnnnnnnnnnnnnnnnnnnnnnnnnnnnnnnnnnnnnnnnnnnnnnnnnnnnnnnnnnnnnnnnnnnnnnnnnnnnnnnnnnnnnnnnnnnnnnnnnnnnnnnnnnnnnnnnnnnnnnnnnnnnnnnnnnnnnnnnnnnnnnnnnnnnnnnnnnnnnnnnnnnnnnnnnnnnnnnnnnnnnnnnnnnnnnnnnnnnnnnnnnnnnnnnnnnnnnnnnnnnnnnnnnnnnnnnnnnnnnnnnnnnnnnnnnnnnnnnnnnnnnnnnnnnnnnnnnnnnnnnnnnnnnnnnnnnnnnnnnnnnnnnnnnnnnnnnnnnnnnnnnnnnnnnnnnnnnnnnnnnnnnnnnnnnnnnnnnnnnnnnnnnnnnnnnnnnnnnnnnnnnnnnnnnnnnnnnnnnnnnnnnnnnnnnnnnnnnnnnnnnnnnnnnnnnnnnnnnnnnnnnnnnnnnnnnnnnnnnnnnnnnnnnnnnnnnnnnnnnnnnnnnnnnnnnnnnnnnnnnnnnnnnnnnnnnnnnnnnnnnnnnnnnnnnnnnnnnnnnnnnnnnnnnnnnnnnnnnnnnnnnnnnnnnnnnnnnnnnnnnnnnnnnnnnnnnnnnnnnnnnnnnnnnnnnnnnnnnnnnnnnnnnnnnnnnnnnnnnnnnnnnnnnnnnnnnnnnnnnnnnnnnnnnnnnnnnnnnnnnnnnnnnnnnnnnnnnnnnnnnnnnnnnnnnnnnnnnnnnnnnnnnnnnnnnnnnnnnnnnnnnnnnnnnnnnnnnnnnnnnnnnnnnnnnnnnnnnnnnnnnnnnnnnnnnnnnnnnnnnnnnnnnnnnnnnnnnnnnnnnnnnnnnnnnnnnnnnnnnnnnnnnnnnnnnnnnnnnnnnnnnnnnnnnnnnnnnnnnnnnnnnnnnnnnnnnnnnnnnnnnnnnnnnnnnnnnnnnnnnnnnnnnnnnnnnnnnnnnnnnnnnnnnnnnnnnnnnnnnnnnnnnnnnnnnnnnnnnnnnnnnnnnnnnnnnnnnnnnnnnnnnnnnnnnnnnnnnnnnnnnnnnnnnnnnnnnnnnnnnnnnnnnnnnnnnnnnnnnnnnnnnnnnnnnnnnnnnnnnnnnnnnnnnnnnnnnnnnnnnnnnnnnnnnnnnnnnnnnnnnnnnnnnnnnnnnnnnnnnnnnnnnnnnnnnnnnnnnnnnnnnnnnnnnnnnnnnnnnnnnnnnnnnnnnnnnnnnnnnnnnnnnnnnnnnnnnnnnnnnnnnnnnnnnnnnnnnnnnnnnnnnnnnnnnnnnnnnnnnnnnnnnnnnnnnnnnnnnnnnnnnnnnnnnnnnnnnnnnnnnnnnnnnnnnnnnnnnnnnnnnnnnnnnnnnnnnnnnnnnnnnnnnnnnnnnnnnnnnnnnnnnnnnnnnnnnnnnnnnnnnnnnnnnnnnnnnnnnnnnnnnnnnnnnnnnnnnnnnnnnnnnnnnnnnnnnnnnnnnnnnnnnnnnnnnnnnnnnnnnnnnnnnnnnnnnnnnnnnnnnnnnnnnnnnnnnnnnnnnnnnnnnnnnnnnnnnnnnnnnnnnnnnnnnnnnnnnnnnnnnnnnnnnnnnnnnnnnnnnnnnnnnnnnnnnnnnnnnnnnnnnnnnnnnnnnnnnnnnnnnnnnnnnnnnnnnnnnnnnnnnnnnnnnnnnnnnnnnnnnnnnnnnnnnnnnnnnnnnnnnnnnnnnnnnnnnnnnnnnnnnnnnnnnnnnnnnnnnnnnnnnnnnnnnnnnnnnnnnnnnnnnnnnnnnnnnnnnnnnnnnnnnnnnnnnnnnnnnnnnnnnnnnnnnnnnnnnnnnnnnnnnnnnnnnnnnnnnnnnnnnnnnnnnnnnnnnnnnnnnnnnnnnnnnnnnnnnnnnnccagacttggagactgaagttcttaaaaggcctttgttgtaaccaaaggcatgcatgtgtcactgttgtgggaggagcctgtcccagcctcatcttgtcctgagatttatccacatacagtaaacaggccggacacggtggctcacgcctgtaatcctcccactttggaaagctgagacaggtggatcacctgaggtcaggaattcaagaccagcctggccaacatggagaaactccgtctacactaaaaacaaaaattagctgggcatggtggccggcgcctgtaatcccagctactagggaggctgagacacaagaattgcttgagcccaggaaacagaggttgcagtgagcctttattgtaccactgcactccagcctgggtgacagagcaagactccgtctcaaaaccaacacaaatacagtaaccaaacattggagattagtgacacctgcagctgggagccagctacaaccgaaatcatttaaaaatttt

SEQ ID NO: 42061 - DNA, 675 bp, Macaca Mulatta
ttggtcaagaacatgaagatcaagtcgctggaggaaatctacctcttctccctggccattaatgaatctgagatgactgactttttcctgggggtctctctcaaggacgaggttttgaagattatgccggtgcagaagcagacccatgctggccagtgcaccagattcaaggcgtttgttgctatgggggctacaatggccacgtcggtctgggtgttaagtgctccaaggaggtggccaccgccatccatgaggccatcatcctggccaagctctccattgtccccgtgcacagaggctactgggggaacaagattggcaagccccacaccgtcccttgcaaggtgacaggccgctgtgactctgtgctggtgcgcctcatccctgcacccaggggcactggcatcgtcttggcgcctatgcccaagaagttgttcacgatggctggtatcgatgactgctacatctcagcccggggctgcactgtcaccctgggcaacttcgccaaagccacctttgatgccatctctaagacctacagctacctgacccctgatctctggaaggactgtatttaccaagtctccctaacaggaattcactgaccacctcgtcaagacccacaccagagtctccgtgcagcggacccaggctccagctgtggctacaacatag

SEQ ID NO: 42062 - DNA, 222 bp, Macaca Mulatta
ggtgaaccatctgaaaagaccagtcagtggagtaggggacgctccaggcaccagcaatggcgcaaccgtctcttccaccaaaaggcacaagtccctttttcagtgcgcgaaatgtagttttgccacagactcggggctcgagtttcagagccacatacctcagcaccaggcggacagctccacagcccaatgtctcctctgtggtttgtgctacacctctgc

SEQ ID NO: 42063 - DNA, 868 bp, Macaca Mulatta
  misc_feature (1)...(868): n = A,T,C or G
ggnnnnnnnnnnnnnnnnnnnnnnnnnnnnnnnnnnnnnnnnnnnnnnnnnnnnnnnnnnnnnnnnnnnnnnnnnnnnnnnnnnnnnnnnnnnnnnnnnnnnnnnnnnnnnnnnnnnnnnnnnnnnnnnnnnnnnnnnnnnnnnnnnnngtacaggtaggtaaatgggggactttcgctgtttaaaaaacccgaaaaaaaactgtggcctaaccccagcttcctaaccacaaaggggacgccccaaaaccttttaattcccccatggtttagtagagcgggattcaaaaaatttgtttcgcgcccgtaactttgctttgtgtaaagaaccaaaaagaagatttgttttatgcaggggggcnacnnnnnnnnnnnnnnnnnnnnnnnnnnnnnccccgcgaaaagaaggaaaatatttatttaccncggccaggcnngncngcgggcccgacccctgtgtgtggtttttttagaacccccccctcttttgggagaagagaaagagaaacgcccgcgggcgcggagtggaggagagaagattttaatggaaaaaagcgagaaggggccaccaaacaacaccaccnacaccccggggccccaaaaggncannnnnnnnnnnnnnnnnnnnnnnnnnnnnagatnaaggtannnncaaacgaaatagnaggnnntnnnnnnnnnnnnnnnnnnnnnnncnnncagagagaggacgggagggnnanagngnnnncccccccccaccnnnnagnnnnnnnnncannnnngaggaggagaaaagaaagattctgccngnnntnnccagggggaggaagagaacaagagagatagagcgagcaacgtgcgggagagagaaagcaacagaaaagggg

SEQ ID NO: 42064 - DNA, 425 bp, Macaca Mulatta
tttgtagtgatcattcaaagaaggaaagcagggaaaattctcgccctgtattggatgcttctaaatctgggcaattctttccgttgctgagtcgggcacgttgcaagttctaggcactcagggcccagcaccaatgtttgctgtgtgcttgccctgcatttatatacccccgatgaccactctgctcattactataggggatgttagggacggagaaacggcaaattggcatttactgaatggccaccatgccgaaacatactcatacttacatagttgagatctgctggagcctttctatgcttctccaggtagaaccttagtcttctcttctgtggcgcgttccttacgatagttaacgcacttcgtcgtgttcattagcctgatttgaagataggaacagctaactttgtacacccaagact

SEQ ID NO: 42065 - DNA, 702 bp, Macaca Mulatta
gcctcgccccttcgggcctgccggcgtgccattggccgaaagttcccttacgtcacggcgagggcagttcccctaaagtcctgtgcacataacgggcagagcgcactccgaggcggcttctccagagcacgggctggaactggcgggcaccgcgagcccctggcacccgacaagctaagtgtacaagacgtgtccccaccacacccaccccacggccgctgaatgaggcttccaggagtccgctcgctgcccgcagagccccgccgggggtccgcccgctgaggcgcctgcagacagtgcgctcacctgccagactgcgcgccatggggcaacccgggaacggcagcgccttcttgctggcacccaacggaagccatgcgccggaccacgatgtcacgcaggaacgggacgaggcgtgggtggtgggcatgggcatcgtcatgtctctcatcgtcctggccatcgtgtttggcaatgtgctggtcatcacagccattgccaagttcgagcgtctgcagacggtcaccaactacttcatcacttcactggcctgtgctgacttagtcatgggcttggcagtggtgccctttggggccgcccatattctcatgaaaatgtggacttttggcaacttctggtgcgagttttggacttccattgatgtgctgtgcgtcacagccagcattgagaccctgtgcgtga

SEQ ID NO: 42066 - DNA, 616 bp, Macaca Mulatta
agtaataatcagacgcatttctacaaaagccactttccctaaatctccaaaatggagaaactggacatgtatcattatagtaaaggttagctttaaaacaaaaattaatattataacttcttaataaccatatttagttgtctgtcacctgtcatttaattcagtctacccccaccccctgccatcattttcctttctgattccttttgattcatagttcctttgctatctttgacttcatccttttaaatgataccccaggttctccccaacctgggctgggtactgattttggagctatttggacagtagcagcaattggctaataatgtcatgcaggtgatgttctaagccgttttaaacaaccctgctctttgtacccggtcctacacaactccttatgggtctctgtgtcagcactgtaaataagcagattccaagcatcttctgtgatggtgtgtttcccaaaacccccaaagcttttagctgatgactcattactgtttgagagaaaatcaaaggggccaattgtgggctatgggaatcaagcaaactattaactttattcccttggatagttattctcaacttctgatttactctaacgtcctagtac

SEQ ID NO: 42067 - DNA, 1017 bp, Macaca Mulatta
  misc_feature (1)...(1017): n = A,T,C or G
gggggcgggcagaggcgagtgtttagggatttacggtccgtgactcgcctccagcagtggacacagagggtcatcgatctggtctacgtgggcttctgggaatgtttcagagccagggagagcgcgttgagtttttttttggttgttcgctagcgcgtggggtccgtgttgcggggagctcgtggggagtcctcgctgggggttcgttttgcagagtcgtgttgtggttcccaaagtctgggagctcatgcgctccgcattggaacaagcgctttggaggtcttcgtttcacggtagccctagggcgtcgtggtggggaagcgaatcgtgtctgtgttggagacagctctgggcagttcgtgttcattgcttatcacaagcagtgcttaaaaaagggtctgcttggtcccacttgctttccctgctacctgtaatatttctgtaataaaaattttgaccttttcacgaatcaattggcacaacttcaagataaataaacaattcctcgtaatcaattgtataaaaataaaattcctcnnnnnnnnnnnnnnnnnnncttccctgagggtttataacccaggggtgatttactaccaataggtgttcttttaaagcccgatctttgggggggtatctaagtaaaatggactctttgatgacgcgttattttcggggattgatcaaaacttcttgtatacctaatggaaaattatcttatgggcgatcattacaagggtgtattatcttaaccagataagtaatgggcgatacaaaaaattatggtaaatggcaagaaaagattataacgatcccttaaaaccgctgatctagtcgtgtcaaaaaatcttgcccatgtattttcacccagctaagaattataccatattttctgataatattctttaaagaaaatttaatatatcactttacttatgaaagaaaatgtgccctgtgtcggagatatctccgatactctaacggcgacgaaaaacacgaccatatgaacaacaagataag

SEQ ID NO: 42068 - DNA, 342 bp, Macaca Mulatta
agctttccatatatgttagctattacatacttttaaaaacactttttcacttgtatatttcagcctatggtacaaagggtgaagtggcctacctccttctcagccacatcttgggaaaatagaaatcagctggaagaaaagtatggcaactgtcctttattttagccttcagaacataactaaaagaaaaatcattcattttccagttacttaggcaagagtttgagaatttgttttttcactaaataaagttaacagccattttcatggtttgatttttcaatcgattttatcaatgaaactttttatcaaaacaataagcagttcatgaaagtactaaga

SEQ ID NO: 42069 - DNA, 1236 bp, Macaca Mulatta
  misc_feature (1)...(1236): n = A,T,C or G
ggggccttcgcagcctccgtgatagcgatggcccgctagagtaccacctttctctctcacctctgtctttttctcaatcctttgactccgccggacttcgtcacccccacgacctggtgttagtctgatcaccccaacattcctggctacccaatgtggggtgacaaaaaccccagtgaaggaacgctagagcgggtgaaagcgaacgatgcattgtatgaaaacacccgagaacgtcttttcaggcgcccacgttagatgtctttttttacaacttcgcgcacgatcagctgagtgcttcagaaccacggctgaaaacaccggacctaagtgacaacgcggacgccgctgcttcatctcacattctctgcacacgcactctatctaccaagctgcggcgcgcttgaaacgcggcgtcagctcacagaggtttatgtccctcgcgttagcgcgggtggaggagaccgggggatatggcgctcgtcgggccgtcgcgcggcgaactcctaccccgcacccgtcctctcggccgttcgcggatgcgtgccgccgggtccgcgccgccagttgttagtgccctcggcccggtggttttcctcactatatctacaaccttcgcatgcgcgcatatatgcttcactgtccgcgatcgcgcagatggacttgtgtcggttgtctaagactagagatatgcgcgtcgagaaacgctntctcagtagtgccggcccgcgtagtcctgtacgaccggtctccgcttgccngtcacactcgacggaacgtcgcatgcgaccagccggactctctcgtatctggcgtcgctctgtcagacctactatttgttcgctttgcaccactactgttgtgatctcaacgagcgctatatctctcgccgcccgccttatcgcgcagtccccgccgttcggtgganccgagaggccgtcgctatgcccccgtagtctgacccacgttgtgcatatgttccgcgctgtgcgcacctctgtgcgggtcgcgcgggggccgcgtacgccgcggctcactccgtgatacgcgttgcgcccgttggcgtgactcaccgcgccacagccgctgggtccactatcctaaccgttagccatttttgaccgcgtgtatgtcgccccctctatcgcgccgtcgtgcccgtgtgccgccgcgcgcgccgcatcgacgtgtgatgtgcaccctagtaatccgcggaatgcgatccactagcanata

SEQ ID NO: 42070 - DNA, 452 bp, Macaca Mulatta
  misc_feature (1)...(452): n = A,T,C or G
ggaagaaattgtacatgatgctgtacagaaggtatttctccactgtgccatctgcagagtgaaactgactaggagtactacatagactgtaagtttcttgtgtacctgccctagactggaaaacccaataagagaaaataacaaataactgggaaacatcatctaaaaatgtattgaggtcagttaaacttagtgctgctctccttggctctaaattttattttaagatcatctgattggtatgaaattaaataacaaatagatggatgcactcctttttattctaaaagcaaatgaaactaaaatgcttttatcaatattcttcactttgaatggaacttaatcatattgtttttaaatatttttaagtaaccaaaccaatgttataaaatttcagagccatgttgttaaaataccaannnnnnnnnnnnnnnnnnnnnnnnnnnnnnnnn

SEQ ID NO: 42071 - DNA, 856 bp, Macaca Mulatta
gacgaggcaggcgttgacatggcccggggccccaagaagcacttgtagcgtgttgcagcgccgaagcattggatgcttgacaaactaacaggtgtatatgcacctcgtccatcgacaggtccccacaagctgagggaatgtcttcccctgatcatcttcctcaggaatagactcaagtatgcgttgactggagatgaggtaaagaagatatgtatgcaacgcttcatcaaaattgatggcaaggttcgagtggatgtcacataccctgctggattcatggatgtcatcagcatcgagaagacaggtgaacatttccgcctggtctatgacaccaagggccgttttgctgttcaccgcatcacagtggaagaggcaaagtacaagttgtgcaaagtgaggaagatcactatgggaatgaagggaatccctcacctggtgactcatgatgctcgtaccatccgctacccagatcctctcattaaggtgaatgatactgtgcaaattgatttagggactggcaagataatcaactttatcaaatttgagacgggcaatgtgtgtatggtgattggtggagccaacctcggtcgtgttggtgtgatcacaaacagggaaagacatcctggttcttttgatgtggtgcatgtgaaggatgccaatggcaacagctttgccacgaggctttccaacatttttgtcattggcaatggcaataaaccttggattcccctgccaggcgaaagggctccgacttactatgctgagagagagacagagcatgctgccaacaaagagggctaataccagatggcaattgctcttgccaataagggatctcgtctacaaaaaaaaaacc

SEQ ID NO: 42072 - DNA, 150 bp, Macaca Mulatta
gtggttgtgagacaacttcaacgagaagtagctgattcccttaaaaaattaactacattagagtctccaccggaaggtacatcacgttgtcacattaatttggatgagacacaggcctcaaagaagaaattatttcaagtggaaagtcaa

SEQ ID NO: 42073 - DNA, 205 bp, Macaca Mulatta
atcaagacgaacacactccagccacggacaacagccgcacgggagctcattgtcctgcaggagaggagcaggcccacatcacagaagaggcttgcatcttttcagggctcttctctgagaaaagaagccacaccacgacacaggctgaaagaggaagccgggaatgggagatggccacaatgccagtcactgcaacgctggcctc

SEQ ID NO: 42074 - DNA, 656 bp, Macaca Mulatta
gatcggcacgagggttttgtgctcccagctccagcgaaaagccgccggtattctccacctggctctcctctatctccgggcaggctcacccgagatcccccccacaccgaactccctctgcacgctcggcccagcggtgttgccccgggagcggacgtttctgtagctatttgagcacaccttgacgtcggcggagggagctggacagggccagcggcgaaggaggcaggccccgcgcggggaatctcggaagccctgcggtgcatcatgaagttccagtacaaggaggaccatccctttgagtatcggaaaaaggaaggagaaaagatccggaagaaatatccggacagggtccccgtgattgtagagaaggctccaaaagccagggtgcctgatctggacaagaggaagtacctagtgccctctgaccttaccgttggccagttctacttcttaatccggaagagaatccacctgagacctgaggacgccttattcttctttgtcaacaacactatccctcccaccagtgctaccatgggccaactgtatgaggacaatcatgaggaagactattttctgtatgtggcctacagtgatgagagtgtctatgggaaatgagtggttggaagcccagcagatgggagcacctggac

SEQ ID NO: 42075 - DNA, 359 bp, Macaca Mulatta
tgattcataatcttctaaaggaagaacagacccccagaacatgattaccgttgttgaggttggtgctgttcacatggcctgtgccatcagtatcttaacgaaggacttggcagatgaacttgctcttgttgatgtctcggagaacaaattaaagggaaagatgatgaatctccaatatggcagacttttcctaagaaaaccaaagatggtctctggcaaagactataatgtaactgcaaattccaagctggtcatgatcgcagctggggcacatcagcaagaaggagaaagctctctcaatttggtccagtgtaatgtaaacatctttacattcattatttcgaatattgtaaaataca

SEQ ID NO: 42076 - DNA, 90 bp, Macaca Mulatta
gatcctcagtcttccacaatgaaccctgtttacagccccgtgcagcctggggctccttatggcaaccctaagaacatggcctacacgggt

SEQ ID NO: 42077 - DNA, 619 bp, Macaca Mulatta
  misc_feature (1)...(619): n = A,T,C or G
ccgacatgnnnnnnnnnnnnnnnnnnnnnnnnnnntntgagatggaattttgctcnnnnnnnnnnnnnnnnnnnnnnnnnntgcgatctctgctcactggagcctctgccttctgggttcaagcgattctccctcctcaannnnnnnnnnnnnnnnnnnnnnnnnnncctgctaccacactcggctaatttttgtgtttttaggacagnnnnnnnnnnnnnncannnnnnnnnnnnnnnnnnnnnnnnnnnnnnnnnnagatccacctnnnnnnnnnnnnnnnnnnnnnnnnnnnnnnagtgtgaaccaccacgcccagcctgtttggagatattcttgtccttatttttcttttatccatgttatataagaagatagttttattgtatttgtaacttggtgaacaggtaggctttttcttattttaatataccacgatgagaccatttaactttattatcttgtaaacttctgtatttctcattggttcttccggctgtttggctaaaaatgtgtaaaaatcccaagggcaatgttttttgttggcgaggcttacctgtgtgtttctccttgctcgatcctgccccttgatgaattcctcccttcttcgcgtcctccc

SEQ ID NO: 42078 - DNA, 1167 bp, Macaca Mulatta
gctgggaggctgcgagagccctaccgcagtagccgcctctgccgccgcggagcctcccgaacctcctcagccgcccggagccgcgcccggagcccggctatagaggctgcagtcgcagccgggagcccgcagcccgcgccccgagcccgccgccgcccttcgagggcgtcccaggccgcgccatggtgaaagtgacgttcaactccgctctggcccagaaggaagccaagaaggatgagcccaagagcggcgaggaggcgcttatcatcccccccgacgccgtcgctgtggactgcaaggacccagatgatgtggtaccagttggccaaagaagagcctggtgttggtgcatgtgctttggactggcatttatgcttgcaggtgttattctaggaggagcatacttgtacaaatattttgcacttcaaccagatgacgtgtactactgtggaataaagtacatcaaagatgatgtcatcttaaatgagccctctgcagatgccccagctgctctctaccagacaattgaagagaatattaaaatctttgaagaagaagaagttgaatttatcagtgtgcctgttccagagtttgcagatagtgatcctgccaacattgttcatgactttaacaagaaacttacagcctatttagatcttaacctggataagtgctatgtgatccctctgaacacttccattgttatgccacccagaaacctactggagttacttattaacatcaaggctggaacctatttgcctcagtcgtatctgattcatgagcacatggttattactgatctacattaaacacattgtttccactcagggttttctttatttaaaccacttgtttccttgctctgggaaacttatcatactggcaacccttaagtaattttttatagggtaattcaaaaaacctttaaaccctgactaattgctttctcaaatttaaggcattttgaatataaaaaattgtctccgtgaaaaaacttttaactttggttcctctaaaacattcccatacacaaactttcgttttagaggatttttttattcccccacatctatatcctctaccctttattaaatttttgggtggtagaaattataattttatacaaatagcactaccaagtttaaaataaactatccaaggttc

SEQ ID NO: 42079 - DNA, 506 bp, Macaca Mulatta
  misc_feature (1)...(506): n = A,T,C or G
gtgctccactgaggctcccgtaacacctttgttcccacatcaggttgactgtctntgttttgtcgttgcttgctctggctgtgtctccctcattagactgggatgctttcaaagtagggacgctatctgggtcagcttggcaccgcagagcgtaccacagcacctggttctgaggaggctctcagtagatatctgttaagtaataagaatgtagggtagtcctgatggtttttgacattgaataggaaacagctccctgtttgatcttaatcactataacctggacatactgtactacatgctgttttcatctgacttctattctatccatctctttgcaactccatttgttcatccatgaaatgaagaaaatgctcatggaattcagtgaagattaaatgaatgaatataggtaatctggcacttgccacacagctaactacgatatagtagctctaatattatggtccttgaggatcttaaggtgttatggcccaaaactgcat

SEQ ID NO: 42080 - DNA, 654 bp, Macaca Mulatta
  misc_feature (1)...(654): n = A,T,C or G
ttatctaatattttgccagacttaatgtatttcttaaagtcattattcagaatcttcagcaaggagattgtattttatttgtttctccttcgttttacctagtttatttcatggtttcaaagtattgtacatttttgtaatcctttaacaagacaaaaggttgagatgttggacatttaaatgccaaaggtgttttattatgagacttagcatttcatatttggggatggtaccttattattgaaaatcagataaactttggttgagtgggtatttggaggaatcttttaaatcttttcttaagcaaagtttggacattctaaaataaggttgccaactggcatgtagagagggaaggatgtgtcatacatttagaccaggtggcctgtcctgtaacttttttggggggaggggtgggcttgatttttgtgtgttttggttttttccaatttttgttttgtgataaaatatgcataataaaacttatcattttaacnnnnnnnnnnnnnnnnnnnnnnnnnnnnnnnnnnnnnnnnnnnnnnnnnnnnnnnnnnnnnnnnnnnnnnnnnnnnnnnnnnnnnnnnnnnnnnnnnnnnnnnnnnnnnnnnnnnnnnnnnnnnnnnnnnnnnnnnnnnnnnnnnnnnnnnnnnnnnn

SEQ ID NO: 42081 - DNA, 287 bp, Macaca Mulatta
agataatgcaaatttttataggtaagaagctatatacatttactaaccaggaagaattctttctaaagattttcttctactcatataatattcctataagcagtgaggataatctctgactttttttaacaaaaatttgagaaaacagacatttaattcttattctgtgacattatcacttttgattagatgatgtcaatcacaaactcctacatttcattcaaaattcctgcaagattatagtattatctatggttttatttctctatgttaatgtacttcaatta

SEQ ID NO: 42082 - DNA, 217 bp, Macaca Mulatta
tcatcagtggcacccttttgctaattaatatgaaaacattatgaatataatagaactggattttctgcgttaaaactgtaagtctgaatctcgaaacatggattgtttctgtggagctctgaaacgagaatactacttatggttgataatgtgtaacgtgatctgaaatgtgactgatttgagcctctttgtcccatggtcctatttttgaattatt

SEQ ID NO: 42083 - DNA, 803 bp, Macaca Mulatta
  misc_feature (1)...(803): n = A,T,C or G
gggaattttccatctagtgtgaggataggaagtgagtcagacaaatacatgtatagataatgtatcatgttgtgttaagtgcaatgaaaaaaacaccagaagagtgagagagcatgtggtcttcaaaagcagagaagtatggagggaacattctagacagaagtctgtcaattgtatgtagtatgaggactgacagggttaggagatcattgaagaaactcttacaggaagttagggcataagtgataagggtgtgttttatgctggtcataaaataattgatggtgaagcatggtggctcgcgcctgtggnnnnnnnnnnnnnnnnnnnnnnnnngggtggatcacacggnnnnnnnnnnnnnnnnnnnnnnnnnnngnnnnnnnnnnnnnnnnnnnnnnnnnnnnnnnnnnnnnnnnnnnnnnnnnnnnnnnnnnnnntacctgggcatgggtggcaggtgccgttgatctcanctactttgaaggctgaagcggaaaagttgtttgaaacctggggaagcaaaaggttgcattggaacccaagaatcccaccggctgcaattccaaccctgggggaacgaaaccaagacccctgttctccnnnnnnnnnnnnnnnnnnnnnnnnnngaccaaattttaatggacttttttagccttcggcccttatatgaaaaaatannnnnnnnnnnnnnnnnnnggggaaaatattttcattttaaccaaaaaatattggggactttattaaaagagggtgaacctccannnnnnnnnnnnnnnnnnnnnntttcaaaaaattttgga

SEQ ID NO: 42084 - DNA, 365 bp, Macaca Mulatta
  misc_feature (1)...(365): n = A,T,C or G
agaagcaccgacctaaaggtgagtaacttgggcataagcacaggaaaggttcctgtgtgctgtgtgatgggtctaaacctgattcatctgcaggaagcctcccagtttgggctggtcaagcagccgcgcttgttggcagaggcagcttgcttcatccctttatctaccagatacaccctcttccttggcctaaacttgagggaggtggtgttgggtacaaagaccccaattctgtggcatcattataacaagaaagtttttgagcagtcggcagaggagaannnnnnnnnnnnnnnnnnnnnnnnnnnnnnnnnnnnnnnnnnnnnnnnaggtctaaaataaaacccagaggatgggcgggatga

SEQ ID NO: 42085 - DNA, 1347 bp, Macaca Mulatta
  misc_feature (1)...(1347): n = A,T,C or G
atcttactgagagactgtgaaacgaaaattttcagcaggcagtgacagtgatcctccattaaagcgtagcctggcacagaggctagaggaagaaagttgaagttccagaaactaacattgacaaaacaccaaagaaagctcaagtttccaagtctcttaaggagcgattaagcatgtcagctggtccaaataatgaagatgcaacagagaaagttaataaagttggtgagatccatgtgaagacattagagagaaattcttcttgaaagagccagtcagaaacgtggagaattgcaaactaaactcaagacagaaggaccttcaaaaactgatgattctacttcaggagcaagaagctcctccactatccgtatcaaaaccttctctgaggtcctggctgaaaaaaaacatcggcagcaggaagcagagagacaaaaaagcaaaaaggatgcaacttgcatcaagctaaagactgatagtgaaattaaaaaaacagtagttttgccacccattgttgccagcaaaggacaatcagaggagcctgcaggtaaaacaaagtctatgcaggaggtgcacatcaagacactagaagaaattaaactggagaaggcactgagggtgcagcagagctctgagagcagcaccagctctccatctcaacatgaggccactctaggggcaaggcggctgctgcgaatcaccaaaagaacagggatgaaagaagagaagaaccttcaggaaggaaatgaagttgattctcagagcagtattagaacagaagctaaagaggcttcaggtgagaccacaggagttgacatcactaaaattcaagttaagagatgtgagaccatgagagagaagcacatgcagaaacagcaggagagggaaaaatcagtcttgacacctcttcggggagatatggcctcttgcaatacccaagtggcagagaaaccagtgctcactgctgtgccaggaatcacacggcacctgaccaagcggcttcccacaaagtcatcccagaaggtggaggtagaaacctcagggattggagactcagtattgaatgtgaaatgtgcagcacagaccttggaaaaaaggggtaaagctaaacccaaagtgaacgtgaagccatctgtggttaaagttgtgtcatcccccaaattggncccaaaacgtaaggcagtggagatgcaccctgctgtcattgccgctgtgaagccactcagctccagcagtgtcctacaggaacccccaggcaaaaaagcagctgtggctgttgtcccgcttgtctctgaggacaaatcagtcactgtgcctgaagcagaaaatcctagagacagtctcgtg

SEQ ID NO: 42086 - DNA, 111 bp, Macaca Mulatta
  misc_feature (1)...(111): n = A,T,C or G
gcacgagggtcagtgtaacaagagacatgagactgaatatagtctatccaaaactttccaatccattagaaccagccctacnnnnnnnnnnnnnnnnnnncataaaggaag

SEQ ID NO: 42087 - DNA, 660 bp, Macaca Mulatta
  misc_feature (1)...(660): n = A,T,C or G
gttctaggcaaccagagaagacaatccctgnaaaagttgggcattctcatgttattttattgagtgtatgtagactatagcacaggcatgcaggcctagaataccttatctgaaacaactggggtatgtcttggatttcagaatttttcagattttagaaaggtaacactatgtctgtattgcttattatcttgtagcatccctaacaaggtttgagaagcagcccataataaaacacacagatatttctgtagtgaaacgtgtatattcacaccaaatggcataactaatgatgactgtcaatagcctcacattaagattgctcaggttttgctacacaataggttatgaaagtactgtgggttttcaggtatgttttggatttcagttttgtggataagagattgtgtaccattatttagccagaggctataattttggcagcttcagctctgacatatatccaagacctgggaagaaagcagatggttgccttagccacgcaaataactgtcataaaactcttgcactaaaatttgtgccgggtattctctggaagtggcccttggcccatcattcagagcttattgatttacttgcacactgttctaataatcttggttacctgatttctcagactgcaacagatggtgaacaaca

SEQ ID NO: 42088 - DNA, 601 bp, Macaca Mulatta
ttcagctttcttgacagctatgatgtggtatatctgcagtgtaaggttgcagtgtgcaaagtgggggactatgcctctctctgctcccggggctgtgcaggacagagtaggagaggtgcaggccccatggagaccaaggaagagcagactgagcatttccaaatggtggggccactggagatccacaaagtcactgctcagaggaagactcttgagtgatttctgcaatttccatgtgaatctgtagaaagcaacgtctatttctcttcagtatgtttgaccaatcagaagctatccgcatagagacaggtcaaagaaacagccagaggggactgtttctctgaggtttgttactaaataaatcttctctgattactaaacttctaaggcaattactctctgtgccaccacaaatgctacattttctaattcttgtcttaaagtgtacaaaatgttacaaagagcagggttttctctctatactgcattgttcatttaaagattgtctttttaagttgactaattatcagatgctattaagtggatctctgtttttatcctctgatggtacgaggataattttcagctcttgccaagagtc

SEQ ID NO: 42089 - DNA, 836 bp, Macaca Mulatta
  misc_feature (1)...(836): n = A,T,C or G
ggatttctgggctttagtagcttaggggtgcattcgagggccctgagagggagcaaatcatggggctgtgcaggcaggaaaggcacttcactttgcagaagtgtcagtgtgcttcaggaaaaagcaattacaaagaacagagagtgttgaagttgtttataggttgcgtgtttcctgaatttggcatttggttcagatatttgggaaatacagatttaaaattcgacatagttgtataatttgttttgccnnnnnnnnnnnnnnnnnngttgcaaccttttaacctgcgtcttcagtgtttggctcttgtaggcttctgtacatggtgacttacgtcagtttttgacctgactgccttgtattttgagaaatgattagttcttcagggtttctgactcatttattatctgttttatgttgatgtatataatgacttggaaataaaaatattgtttgttgccggatattgttgcccttttcttatgggtaattcctggcataatggctttgctcccttattataaaacattaagaacttagatatcgtggctagtggtccaaacattacaaaactcctttgcaggaaaaaatgggaccgggaaatgggaatttggaaaaaaatacctggcctccttaatgtaaagaaatgggattacctttactataccgggtcattttacccctcctttgggggctaactttgttcccacacccctaaataaaacttaaaaattcctagggtacgcgaagagagttttcccgagatttccccgnnnnnnnnnnnnnnnnnnnnnnnaccccccccttggcccagcccaaaaattggggcgtggccc

SEQ ID NO: 42090 - DNA, 222 bp, Macaca Mulatta
tacgtaaggatgcaagacagggttgtgggtgtggaaaaggcaaagaaaatgctagagcctcttaattccccgaatcacttcatttaatgcagtgaagggaaaattctttttagagttccaattccttcacctttaaggtctttttctcaaattatttctttttgaatgtctaaagttaattttaatcagctctggatttgaattcgcttttctcatttggcc

SEQ ID NO: 42091 - DNA, 167 bp, Macaca Mulatta
  misc_feature (1)...(167): n = A,T,C or G
ggcatgtggaggtggtccctgcacaagaaggtcgagcgagatcctggtaagagcccggcgctggtccgcattctgctcagagaactggagaaggnaggcggaaagcgaggacctccggcatgtcatcattcccttgctgcacactgtaatgtacgtgctcaccaagg

SEQ ID NO: 42092 - DNA, 790 bp, Macaca Mulatta
  misc_feature (1)...(790): n = A,T,C or G
gaactggggtggaaaaaatttttaacttcctttccggcttgaaccccttgaacgaaagctgtcccggaaaccccttaagggctctcttcagacccgggggggttcaaaaggccgcctctccttcttcggggttagttctatgaaaatttatgtatgtattggagatcaggtcttactctgttactcaagctggaatgcagtggcatgatcagagctcattgcagcctcaaaaactccttgggctcaggtgatcctcctgtctcagcctctgagttatctgggaccaccggtttgctccaccacaccaagctaatgttttcctttttgtagagatggggtcttacnnnnnnnnnnnnnnnnnnnnnnnnnnnttgtgctcagttgaccctcccaccttggcctcccaaagcacttgtggttataggtgtgacagatgtgacaggtgtgatcataggtgtgataggtgtgagcctatgcacccagcttccatatgcaaaattttaaactctttcnnnnnnnnnnnnnnnnnnnnnnnnnnnnnnnnnnnnacggtggtatannnnnnnnnnnnnnnnnnnnnnnnnnnnnnnnnnnnnnnnnnnnnnnnnnctgnnnnnnnnnnnnnnnnnnnnnnnnnnnnnnnnnnnnncacannnnnnnnnnnnnnnnnnnnnnnnnnnnnnnnnnnnnnnnnnnnnnnnaccaggatannnnnnnnnnnnnnnnnnnnnnnnnnnnntcctnnnnnnnnnnnnnnnnnngnnnnnnnnnnnnnnnnnnnnnnnncacc

SEQ ID NO: 42093 - DNA, 828 bp, Macaca Mulatta
  misc_feature (1)...(828): n = A,T,C or G
ggaagtgttgtattgtctgtggcactgttttaaatgaaggacaattaaattgctttgctgttttatacatcgtctttaatcattagtctacactctttgtttttctgaaagcatcnnnnnnnnnnnnnnnnnnnctgttctttcttgtttgtggtatatcctttctgtatcatttggttctgtggaaatgtccttaataacacataggattaggaccgaattttggagatgggtaagtttgagcaaagagtcagtcaacacaaggcaggatttttgacattttatctctaaaaacagttttccaattgagagttttttaaaacctttaaaaaatacagttagtttttaatggtttcttttagtgtttttacacttggaagtcagatatctaaaaatagggaatgttcttttgctaattttagatctctactaaaatgtaatctgtagtgttttcttgtttgagagcatatcttaaaagattcagacaagtggcatttggggacctcttccccatccactggctttcactcaaaaggaaataagacttcttggttctggcagatactgtctctggcagaactggtctcactgttctcccttgggggagcattttaaggagtatgttgaaaagacctaaggtatacatccgttgaaaaacgggatcagatggccatctgggctaataaagccttaagaaccgggaaagggggccaagaaaaaccggataccccctaccctttttgggtcctttccggggttttacctactatggacgggaaagaagtccattttttttaggcattttagggctggggccccttccagggg

SEQ ID NO: 42094 - DNA, 1062 bp, Macaca Mulatta
caggtaatgagcactcagctaggttaaagcttgaagctcaacaaagacatagtgatctctgtgggcatttataatctgggtccagaaggctctcaagcctcctccaataaaactctatcggaaaacaaatgaaccagtgaaaaccaagtaccagacatttaatataaataccggtaatttgcttctgcctagcgataccaagaggcctcagatctatgggagtcatcagattatactggagaaagaggaaacagaagagctaaaatggtttgatgaaccagctttgatgctcatggttttcaagcccttggtaatgctgaagaagcaccattacctgaggccctccttgttcacgtaccctgaggagtcgctggtgaatgggagttcaaccctgttcagtgctctgctcatcgagtgtctggagaaggtggtcatagcattgtgcagatacacaccctgcaggaacatccccccttattttgtggctttggtgtcacaggaagaggagttggatgaccagaaaattcaggtgactactccaggtttccagctagtctttttaccctttgctgataattaaaggaaggtgccctttactgaaaaagtcatggcaaccccagagcaggtgggcaagatgaaggctatcgttcagaagctctgcttcacatacagaagtgacagctttgagaaccccgtgctgcagcagcacttcacgaacctggagccctttaccttgtatttgatggaggctgaacaagcagtggaccttacattacccaaggttgaagaaatgaataaaatactgggctccatggtgaatgagtttaaggaacttggctactcagcagattataatcctgaagggaaaattaccaagagaaaacgcagtaatgaagtttccagaagcaaaaggcccaagcggagtattcagaagacgagctgaagacccacatcagcaagggcacattgggaaacttcactgggcctataatgaaagaggcctgactgaagtactggctgaagaagcaggagctgctggaagtcctcaccaagcacttccag

SEQ ID NO: 42095 - DNA, 926 bp, Macaca Mulatta
ggggtgtgaggcgccacagggcataggctgagctgcagccctgcaggagcgtcaccaactggcatgcttgctcgtggactggcaagggctggcctggcagcgtccatctgcctcacagtcctgagaaggttagaggacagtttcttgaagttcataagaacctggagtgggcgggagactggcctgtactgcacaggcaccctgagaaggggtgggaaaggcccctcccaaaacaagatctgttttccatttcaatggacaagaggctagaaaatcagagggaggacgggaggtctgggggctggcatgacagtccctggagaaggggatgggctgggttctaggaccttttgtgacttcctctgagggaagagtggccccttggctctgggctcgggaggtgctgtccccacttgttccctctggggatgtcaggggacccaacgcatggatgactcccatccctcttgacaggctgggcatgaggacccaaggcagggtgtgcacagggccacaggagacataggctcattcccattcattgcagaacaaggctaaggccacgggcatcttagagcagcaggcaacaatcctgaaagctgggttcacacagactgaggtgaacaaagaggtggtgtggaagctgctgctgcagtccagagcctgccaagaaggtcccaggtccacagagcctgcgcaacactgggtgcccagggggcgggggctgggcctgcccccaaccccgtctgctgaggagtggctgacaagcagacacccaccagggtgccactcgcttgtgcctggggaagcaaatgtgcttgcttgacccgtctgatgtgctgccgtgggcacttggctgagggtggcagggcactcagctaacccaaagtgacacatgcctggcgggacgttcagtctctgtaaac

SEQ ID NO: 42096 - DNA, 420 bp, Macaca Mulatta
gaaaatctgtgtgataagaaacttggaagatagtacgtactcaattagtgaatattatcctcacactttctccactgacacacatgtctcttcttaccatgaatttttttgagaagctgtgacttacggaaaatttgggaggacgtattcaccctctatttctattccagattttacaattccctttctgaaacccctgtttaatttcattttcctggtcccttaaaacaaacatcctattatctctagccacttacttcttttagattaggaacaatgacattcaaggtaatccgaaaggaagagaggggagaggtaaattccaaaggacataaaggaaatctatgtatcaacagatagcctttccttctttctccctttgcaattctttctactcagccgaatttggatctaactgga

SEQ ID NO: 42097 - DNA, 877 bp, Macaca Mulatta
  misc_feature (1)...(877): n = A,T,C or G
aggagctggaagcttagaaaaactgtatgcctacattgtgggctttgacatatttaagggaccgcttaagacgagattagatgggctcctctggatttgtaactcatttgtcacagataccttgtgattgaaaatcgtgagtgaagtgaaattgcagtgcatttcaagggaattttgtatgtaaatcgtgccttagaaacacttctgttgtcttttctgtgtttggtcgatattaataatggcaaaatttttacctacctagtatcttcaaatcgtagtctttgtaacaagaaccaaataaccttttgtggtcactgtaaaattaatacttggtagcagacagaatccatgtacctttgctaaggttagaatgaataatttattgtagttttagtttgaatgtttgtgctttataaatgatccaaggctagaggggaaactatcacttaaaatccatgtggaaaacaagagctaaaaaggaaaggggatggggattgtggggagggagtgggtgaggtnncctttactacctgtgtgatcttgaaaacctgcttggtaataagctgcggtattgaattggtaaagtaataccaatgggccttttatcatttccttcttccctttaaatttcacttagaaatttttaaaatcatggataatttttaatccttggggatcttactgtccctccgggtttccgctttttaaaaggttaaaaatatgttgaaatgggaagttcacattctttaacccgtggattgggggaagaaggcaaacaatccgcttgttggggaatttaaaaaggaattccctcctagccggttaggggggaaaatttcttcccgtctatatatatgttaaaactttaaaacatgta

SEQ ID NO: 42098 - DNA, 790 bp, Macaca Mulatta
  misc_feature (1)...(790): n = A,T,C or G
ggcaaaccagcatcagaaagacttcccagcaccaagcttgagctctgttgtttcacggaggaggcagcgagaatgggcttgagctgttgagagatttccgcgctagagatggcctttgtatatggggggaaacacaaacgcatccgacactccctgtcctcaccctggcgggatggtgttcatcgccttctcttctgtgagggcctctaggctagcggttgcatttgtggtctgtgctaacacttcgtggttctatatatcagcagcaagtgtgcaaagtaaaggacctgttaactcagatttctggatattttggtggtagcttctagtcccagaatctgtgtttttaaaatactacatgtcattctgtctattcagtcacctggtggtcatctttcttgtactaattaactgttgataagcattttggatattctaggagaaagcctataatttcatatagtttctctttttcacataactgtaacctaaatgtattacttctgataaaactacatatcaaatgtcactgcaaattagttttatatctatcttgtgaggtttgtcttacttattttcccttttggttgccatgtaaagttatcaccctgaaaaatcgtctcccctcccccttctcttgctgtacagcnatgcggttccctttttttgtgggttggctggggctgggggtacctctgggtttaattggaaagttaaaaggaaataggccacctttggccaaaaaattaaccagctcttctggggtaacccttaagaaagaacatggttt

SEQ ID NO: 42099 - DNA, 510 bp, Macaca Mulatta
cgtcagtgaatcaaggatcccaggggatgccaatggcagggcacctcggttgtgtatatgtggggaaatcaaatgctacctgactcacatctgtatcactcagaaacattatgtaaaaaatatcaaagcaagataagcagatgtgtgatccactaccgccaaagcaaatactccttatcgttagtgtccatgcgcatcaagtcctatatagatcacaaatttttatagacaaatctaagacattgaattatttcttcaatatatatgatactttggtgtactgtgatcttgctgcttttatccatatgtcggctttggttcttgtgagtttacctgcttattatgatacttggagtccattcatagcgtggggaagaatgatttttactctgcaggagaaggtctaattgaaataatgctgcttgtccccaaagaaattgtttgccttgtactcttgttaactttagagctagacctgggaatgattctacttcaagccttaacctggaa

SEQ ID NO: 42100 - DNA, 593 bp, Macaca Mulatta
aatgatatgaagtcacagagttatcaagaagtaacagtgctcagaccaaaactgggatgcctgactccctatccaaatgtgctttacactcgtcatgatgaagatgtaaagcaccaggtattttctattttcttctgctgacgaattgataggatgtttctaatataaatattactttttattgttctttttgaaaattattaattttacacagtgatagcatgtttttccaagttaattctctgaagtaatggaccatttatttcaaatgattggtacataatatttaaaatttccaatatccatatctccacagcatcatctgtagaaacttggtccaaagttcactcctaggtgatgtacttaataactgttagtaacattcattcaaacccagagttcttggctctaatttcctgagaacagggacttgccctaaggcacagaccctcattgtaccccagcccttgttgggagggcagctatctatggtaaactgataaactaagctgtgcccccaacaaatttatatgtcgaatccctaagagccagtacctcagaatgtgaccttaattggagatggggcctttaaa

SEQ ID NO: 42101 - DNA, 581 bp, Macaca Mulatta
  misc_feature (1)...(581): n = A,T,C or G
gggtaaataatgatgcaggctaatgacctttcatcacttcctttgtgcgcttcctgccttaagtgacaagtagcaacatggcttgggtcccctttgcagcaccagcctatgctgccacaagtcagtttgcaccctaggtgcccaggagctagtatccttagatctttctatcgctaacttaattctcttcgttatttatctgaccctctaactccatgtctaacttgnnnnnnnnnnnnnnnnnnnnnctttctttacagtcaacccaagcttaacatggactcaggttccccagcagccttaatttgttttgttaacatctgttccttctttttcagctctcctagagtatttctgagtgtcgcgttcatctaatcttagtattccttttaatcacaaattgacctcacagcttgaggtttcctgtgtcctattctgtggactacctgtgctcctttgcttcccctacccttgcataataactatattaagnnnnnnnnnnnnnnnnnnnnncttgagttggnnnnnnnnnnnnnnnnnnnnnctnnnnnnnnnnnnnnnnnnnnnnnnnnnnnnnnnnc

SEQ ID NO: 42102 - DNA, 1239 bp, Macaca Mulatta
gcccaatgaatgcatcagacactcagcttcagttcccatggcaacaggggctaatggtctagagactaaggatgagacaaagacaaacgcagagaaatgtgcgtgttctgtcttcctctgaggtacgcaagcccctattcagggattgaaaagaacatttgctttagttctaccctgccctcccctcaatgctgggtggaggagggcagaaatgcagacgggcccgatatgaatccagaatttctacatcctgtaaatgcacctgcacggcttggagacaggcttgtttgtccccgagccatcatgttaccaacaatgtattgtacctgtaaaccatgcctgtggaacctaggattcccgctaccccaactcactttcctctttcccaccctctggcctctatcatagtagccgagttttttcagtcattccgattttctgacagaaagttccagccagcccgatttcagaagcgctgtctcagaagggctccctgatccttcctgccagagtcacataggacacacctcctccctcttctcctctgtggcctgggagacctccgcccataccatgggaccagttcctaggactcccccttcctgccacactcctgttccgccgagccttggggagactccaaggagggaagtttctggtagtctcccacttctggaaggagcccaactaatgagaggcctcttccctgcccctcttcctgagaagcccaccacctcctgtgtattggctccccttaccagaggctggacaaacagggtgccaggcaagacatgagacgtcccacactataaatttgtgataaacaacaactcaaaagctgggcaaatgcccccaacttcccctctcttctttccgtctattccagcaagtctcagaagtccctttgtccagctgtactctcctctcctgggacccagccgccctccatttcccatgtcctggaacccctcagtccaaaatatcttaaaaaactccacttcactgcaatggtgcaacccacacccatagccatgccctacgccagaaggaaccacatgaagtcctgcccgtcttcccgacctccacggatgttgcgcgacatccagtctcctctgggtcagggggtttgtctcatatgcactcctgagtgctcacctgccagtgactcccctgtgtttcacacccctctcaggggatctcagatccactcggctgctggtctctgtctggatgaccacg

SEQ ID NO: 42103 - DNA, 787 bp, Macaca Mulatta
ggggtttaagcagcggctgctttgcctggggagcacccgtaaatggactttggtctcaatgctttgactctttgtcgtggttttggatgttggaataccggcggtgatctgtcttttataaacacacctgatttaaaggaaagatgagtgaagaaccaaaggagaaaaatgcaaaacctgctcataggaaaaggaaaggaaaaaaggtaagaaatgaataagcaacatgttctcttcattgttctctggctctggggaggaagtgatctttaggctgaatttttaagagattggctttagatttttaagaagctgctagaatctgaatgcttttgtttttccagtctattaatgggtgtgttctgtcttggaggaaaatcatcacaactcggatacattgctaaaatatttaaacagttaaatacagtcatttagatttcactgaagtggtgtgtttttcatagtgatattcaggattattaagtaaacacatgtcctaattatgtgggtgggtgtgtttttttctcctttaaattttacagaatgctcgttaaatcaacagggtataattactaatgaatattattatggtatagatgtttagcttgaacatacattttagggaaactaagagaaacctgtacttatactttaaaattacaggatggaggtgaaactccatttttattaatggatcactttaatggcttgaacgaatctcaggttttgccattctaacccctggcagtccttacagcccagaatgccccagttttggtcctaattt

SEQ ID NO: 42104 - DNA, 765 bp, Macaca Mulatta
ggttctgtcgtcaaagactgtgattctcacctagagcagatgaggtgaacattcttctcataccattctggaatcccttttgcctttagattaatgggaatcctgcgtcagtgaagtgccctttgctgctgctgccagccattctgactccacagccagtgaataggtgctgcttccaccaccaggtggaataacaggagcatatgctgccaatcagcatggttgcctagcaacaggaggagatgctattcattgtctatcagtgtgggggcacaatatgttttagtttaaggtgcttgatgaacacaatgattacatggaccctccatatcagccttggaagttgtgattctgaggctgggaagctggactatctttgaaagctaaatttggaagtgaaagggggatataggatatgatcatctggttacatagataagtactgaaaaataggatttgggtttctggctatggcttaagctataagaataatgggctcctggcaaaggataaagtatatctcatgaaacaagaaataatgtgtctggcaggcatgcgattctcactgaatatgaggaagtgggagacaaatgcctagataatctgaaaaaacacaaaagagattttacggaggacaccaggtataaagtagaaagaaccacagtgggaaagatacccagagtgaatatcaaatttttatacaagaccagtactcctagatattattgatacttggaagtgtcatgcaaccatgggtcactttgt

SEQ ID NO: 42105 - DNA, 1169 bp, Macaca Mulatta
  misc_feature (1)...(1169): n = A,T,C or G
gggnnnnnnnnnnnnnnnnnnnnnnnnnnnnnnnnnnnnnnnnnnnnnnnnnnnnnnnnnnnnnnnnnnnnnnnnnnnnnnnnnnnnnnnnnnnnnnnnnnnnnnnnnnnnnnnnnnnnnnnnnnnnnnnnnnnnnnnnnnnnnnnnnnnnnnnnnnnnnnnnnnnnnnnnnnnnnnnnnnnnnnnnnnnnnnnnnnnnnnnnnnnnnnnnnnnnnnnnnnnnnnnnnnnnnnnnnnnnnnnnnnnnnnnnnnnnnnnnnnnnnnnnnnnnnnnnnnnnnnnnnnnnnnnnnnnnnnnnnnnnnnnnnnnnnnnnnnnnnnnncttacgcggcacttggacctccaccccggtattcccctctgttactccccctccccactaccccccccccataccactttcctgctgcctaactccctgtcccccgaactcaacatatccaccttcacgcccctcttgcatgcccctctccacccacccattatctctatctcggtatacccccttacgcgccccccttcgcgntgccacccaccttgcccgttggtgatcatctcccctcctgaccgccacccggcacaaatcctcattcgctctatgctccaccccgctcctataccgctataaagccagcgagtgagcctgcgttctttgaccaaatgtatatcaccatatgtcgtcaggcgagcagaggcggactaccgaggccacatactcgttaacgactcgcgaggtcactcattcatgacacaaagagggcgctgtatatttctttttaccaccctggcgctttaccccccgtgacagactcgccatttcccgcccttctccttaggcacttccccgtgggcgcccacagtacggcatctggccgcccacttctcccacacgcgctgctcgccccactccttgtcgaaacgatanagtcgtccattataccgcgcgcgatgccctaatttttgttacatgtcccctctgtgatgactcgtgcgctggcgacgccgcctcgcctccgctataatgtatgctgccggccaccgtgattaatacgaccgatcctgcacgaccctctaggacgaattatgagcgagagccgatacgccgcccgagatttgtagacgcgcacctaacgatattgttacgtgccccgagatagnttcgtcttat

SEQ ID NO: 42106 - DNA, 863 bp, Macaca Mulatta
gaataactggcgaactactttgtaagaataacatacttacaacaagtctagaatgttactttagcacagtgaaaacagtttttgaaagggtttgttcatgattacataatttatgaaatattatagttttctgtatagagttctaaatgctaattctgatatcactgaatattaattttaagatctcaaattgtttgcacatcttttatatctgattatagagcttgaatggccctgtactttattagcttgttttgtttagtagtttataagcagccacttggagaatggctagtaaagttaaaaatatagagaaagacagttgatatatgtagcttgggaaaaaacaacctcgccctcacccctcctcctacgtcctcattgtacactattttaggagacgacatggtaatattttgttctgctagggaagatagcagagttgacacgcagtactccctttagaattcaagtattcctccactctcttgccaaacttaatcgtctctcctatgcagaaggagtcaaagcagtgacagggtgcggggatgtttacaagtcgtgagagggaggatatcagctgtgacattgagactctgttccaatgcagggttaatttgctgttcattttagcatttacagccagacaagatgaaaagcaagcaggaatgcctattatatttctattaaatgaatctgttgggacctaatgttcttgattagcttttgaaaatgagtgctctgcaatgcattttctgtttacctaaagtaaacagagaatgaattgtcatttatttagagattccaacactccttttgaaaatgaagctttatgagggatctagctatgttgtccctaaatg

SEQ ID NO: 42107 - DNA, 803 bp, Macaca Mulatta
  misc_feature (1)...(803): n = A,T,C or G
ggggacgggagccggcagggcagatagcccagtaggccatggggagagtgaggagatactggtaactgcctctcaatatacaatcnnnnnnnnnnnnnnnnnnnnnnnnnnnnnnnnnnnacnnnnnnnnnnnnnnnnagacaggatttcactttgttgcccagggtggagtgcagtggcacaatcacagttcactgcagcctgnnnnnnnnnnnnnnnnnnnnnnnnnnntnnnnnnnnnnnnnctatctgggtctacaggtgcacttcaccacacccagctaaactgtatttttttttgtagagtcaggattccattacattgcccaagctgcccttttttcttagtaacaaactctcattttgttttccatactgtgcctggaataaggactactcttagttccttaaagttgggcgtggtcacttgaataagatctggttcttgacgggtgtaaactagaaatactgcatgagattactggggacgtcttcttaaggggtaatgggtgatccctttctccccccatttttctaccatcccccggtgggtgccataaatggccgaggcccatttagccctttttccaaaccatgaaatcacctataaaaggggagcctcgccatgagtgtggcctaactaaaaacctgggaaatcaggctccttgttgatccccaggtcatttttaatttccaagccatgggtaccccccggcttctggattttgttttttactctagcaaaaaaataaaacctcccggtgttttgttatttccccaccgcactaaaaattggagatttt

SEQ ID NO: 42108 - DNA, 616 bp, Macaca Mulatta
taaatacaagtatttctaatggaatcttcagaatcttacaaatagagccgttttagaaggcagcaagttttgtctttgagccatacatcactgatagccatttgccttccgtgtctactttgtttgaactgcttgttcagtataaaacaccttagaaacacaggtgctcctttagaacgattttaaagttataattccttacaacaggtatgccctcacacatcctcggtgtgaaagctctgtttagtgggttatttggtttactctcagggcaagtttttaaaaactgcaagtcattaagaatcatttaaggaaaaatggaacactaagcctttgtctttgctatctttacagatcgaataagaaaagagcaatgatcagcaccaagctccttatggagaaagagcaggtgaaatattttctcagcactcttcctacaaggcgagacccagagtcaccttgtgtagaaaatctttctagtataggactcaatggaaaatagattccccagctgcccgtaagaattcctacttccaacccacagacaagaaatgactgcaagaacgacttgactgaggttagttatatggctgtttctcttttgggtttcacttct

SEQ ID NO: 42109 - DNA, 260 bp, Macaca Mulatta
ataaaaattaagtttcatgaagaacctggttgttgtattgctgttcattgcattgcaggccttgggagagctccagtacttgttgccccagcattaattgaaggtggaatgaaacatgaagatgcaatacaattcagaggacaaaagcagcgtggagcttttaaaagcaagcaacttttgtatttggagaagtatcatcctaaaatgcggctgcacttcaaagattccaatggtcatgtaaacaactgttgcattcaata

SEQ ID NO: 42110 - DNA, 266 bp, Macaca Mulatta
catcagtggtttattttctttcagctgcctgctgatggggaacatttgtgggacttctttgaatgcaatcttgggaaaatatagtgaagtgggatcaaccccaccccaactctctctctttctgtttatgtctctccctgtctcgcttgcacagacacgcagaatattccagtcgcagttccaacagctctgtgactttgcttgggtcacttaagcgagctaaggctcaggagtgtactctgctgcagggagatggtgacacctgc

SEQ ID NO: 42111 - DNA, 135 bp, Macaca Mulatta
ttacagattcttaacgcattatattttatcttagaaatgagaatgtaagaaagtaaggaggtgtgagtgtttatcctttcttggcttggggagggaaggtcattctgaatttttcatgagaatgatctggaaggg

SEQ ID NO: 42112 - DNA, 951 bp, Macaca Mulatta
gggggctttttcgcaacgggtttgccgccagaacacaggtgtcgtgaaaactacccctaaaagccaaaatgggaaaggaaaagactcatatcaacattgtcgtcattggacacgtagattcgggcaagtccaccactactggccatctgatctacaaatgcggtggcatcgacaaaagaaccattgaaaaatttgagaaggaggctgctgagatgggaaagggctccttcaagtatgcctgggtcttggataaactgaaagctgagcgggaacgtggtatcaccattgatatctccttgtggaaatttgagaccagcaagtattatgtgactatcattgatgccccaggacacagagacttcatcaaaaacatgattacagggacatctcaggctgactgtgctgtcctgattgttgctgctggtgttggtgaatttgaagctggtatctccaagaatgggcagacccgagagcatgctcttctggcttacacactgggtgtgaaacaactaattgttggtgttaacaaaatggattccactgagccaccctacagccagaagagatacgaaggaaattgttaaggaagtcagcacttacattaagaaaattggctacaaccccgacacagtagcatttgtgccaatttctgggttggaatggtgacaacatgctggagccaagtgctaacatgccttggttcaagggatggaaggtccacccgtaaggatggcaatgccagtggaaaccacgctgctgaggctctggaatgatcctaacacaaatggccactgaacacctgggctgctctcaggatgctacaaatggtggttgatgtactgtggcacgggaagggtccaccgaagtggctgtcagcaggaacgaaaaatgaatccgaatgagtaccggagggcaaaaagtgttaagggaagaaacttgttcgctccctcc

SEQ ID NO: 42113 - DNA, 779 bp, Macaca Mulatta
  misc_feature (1)...(779): n = A,T,C or G
ggcatctagacaacctaaacaaaaaatagnnnnnnnnnnnnnnnnnnttgatcatgtatgtatattatttttcaattacatggccacataaaagaaggttatacatttaagagtgtttactataacttggctaggtcaatagccataatttaaaatcagatgaatcatctctgcatctgaggttgctaagtaaaagctgtttccaaagatttttctctttaaaatagaaaataaaaatgtagtgagttatatatttttatgtgtatgtataaaagctaataatacagccttatcttcagatagagaaaaacattttttacttgcttttcacaacacaaacagccagttggcaaagtcctgaatgttgaaaaattgaacacatttctacataacacacttagacatagttaagtattttgatctattcatgagaaataaagagcttagatcaaagttcaatataagaagatgaaacaaactcctgcccaagtaaaaaaactagttctactgtctgattctgtctttgattcattgaagtcaaatttgtaaagattgtatctcttgtcacaagagtatactttactgttaagagataatatgcctgaagctgggcacannnnnnnnnnnnnnntnnnnnnnnnnnnnnnnnnncccaagcgggtggatcatctgaagtcangagttcaagaacagcctgggcagnnnnnnnnnnnnnnnnnnnnnnnnnnnnnnnnnnnnnnncctggggcctggtggccgggcccctntagtcccagcta

SEQ ID NO: 42114 - DNA, 643 bp, Macaca Mulatta
tttgaaatgtagccttctaaccctcaagtctttttagaagctgggtggactgttagtggtcttgcagcctatcctaaaagactacctttgaaacaggattcttgtatggccaggatcctgtctgggaaccagaaaccctacaccctccccctccagggaatgctgagttcctgttgtgagcagaggtgaggcagaatccactgtagccttcccccctcccatttgcggggatggccaacccaggcgttgggtgttagtctgcatgagtttgcgagaggagatagctgggtgtcgtggcagtgcccttgaagttggttagcaccttcctgtaaactcttgcccctacttctaactactctataaatatatacatatatttatatataaagtgattagttgaactggcatcctgctgtagcctgagacttgccataagaaactgctgagtacttggcaaacaaaccctttcatagttttgttctccatctgtttggggtaggtgttgagcgaggcaaacggatctcgatacttcagatgggcttttgatgcactgttgccaaggaaggctttttctgattttttgacaaatgaatttttgcacactttcattggtgtctttcggcaacttaaacacacattgaaa

SEQ ID NO: 42115 - DNA, 780 bp, Macaca Mulatta
  misc_feature (1)...(780): n = A,T,C or G
ggtgaggcaggataatcgctnnnnnnnnnnnnnnnnnnnngnnnnnnnnnnnnnnnngtgccgnnnnnnnnnnnnnnnntgnnnnnnnnnnnnngtgtctcnnnnnnnnnnnnnnnnnnncaaaccaacaaataannnnnnnnnnnnnnnnnnnnnnnnnnnnnnntgggaatccactggaatcacgaaggacacccagatcctggtgagcagagcactggcaaacagcctctgtgacagtgtctggttgataaaaagaagattctggtgtagggaggccctttctgctttacacctaggcagatctccaggcgtttggagcacctgcttctctggttccgcagcctgagccacgcacctcttcttgtggtacagtgggaccctctctgctgtatgcccaggcaggtcttcaggcatttggagcacaagcttacttggatcagcagcccaagctgctccattcttcctgtgcagagatcctcatgtagggggactctctctgcttcatgcccagacagatctctgggtattcagaacacctgcttgcctggttcaacagctcgagtcacccctacccctttctatgcagagatctttggtttaagggggagcccactatactccctaacccaggcaaaagctccttctgaaatttggaagttttagagttatccccccctttccttgtggcaaaaaaatttgaatccttaaaaaagttttccccattcccggttgcaggtaaccggaggaactcccatcccctaaggcaataaccttctg

SEQ ID NO: 42116 - DNA, 751 bp, Macaca Mulatta
  misc_feature (1)...(751): n = A,T,C or G
ggggagggcgcggggaggcggaggttgcagtgagcgaagattgtgccattgtnnnnnnnnnnnnnnnnnnngagcagaannnnnnnnnnnnnnnnnnnnnnnnnnnnnnnnnnnnnnnnnnnncgtatttagaaataccatgtatttttgatgtgttagatattttattattgacattaactattatttcttcaagcatttattctggagacagggttgtgcaatcacagctcaccacagccttcaccttccaggcttaagttattctnnnnnnnnnnnnnnnnnnnnnnnnncaactacaggcgttcaccaccacgcctggctatgnnnnnnnnnnnnnnnnnnnnnnnnnnnnnnnnnnnnnnnnnnnnnnnnnnnnnnnnnacctgggcttaagtgttccaccagtctcagcaagttctgggataacaggcatgagccatggcatctggcctcctcaaactatctaaaagccccactttgcctaaatgaaaaattttacctaccattacaagagaacctgtgtggttagagaattaaaataaaaatcccaagaaatttaagggaagttaaaaacagaactattgacccacctaaccctgaaaaagcttttattttttaggaaaaaaaactttaccccacttaaaccctacctttttaagttaattttatgttgaaaattgttaccccaaaaaaaaattggaccannnnnnnnnnnnnnnnnnnttaaattttgaaaatgggattcctt

SEQ ID NO: 42117 - DNA, 135 bp, Macaca Mulatta
agaacagccctcatgcttgctgtgcagcataactcgtcaagtatcgtcagcctcctccttcaacaaaatgtaaatatcttttctcaagacatgtttggccaaactgccgaggattatgctgtttgttgtgatttg

SEQ ID NO: 42118 - DNA, 277 bp, Macaca Mulatta
cctcaagggcagcctccagaagactccactggcagaggagactgtggacctctcaggcatcccactgtcggtacgggacgtgcagcacatcacacactatctgagcagccacggtgctgtgctggcggtgctggacctgagcttcacagggctgagtgatgagctgctgcacctgctgctgcccagcctgtgggcgctgccccgcctcacccagctcctgctcaacggcaaccggctgacgcgggctgctgcccgcaagctcaccgacgccatcaag

SEQ ID NO: 42119 - DNA, 424 bp, Macaca Mulatta
gcctcttgaagtaaatttaaagaactggtatgcaagagcaggggctcttggagtatttccaacatgcttagcttgtctgaagtcaagatttcatctgttgagcaaatttatacatgggcaatgagaaatcctacttataattcaggcaaatatatggggctcgtatctaatgtttagttaatgggagagaaataaaatcctctggatacttgggggttctccatgaccatatctagcctgatcactgtaatgaaacctaggtttgtaagcagaaacagaaataaatttggaacaactcttggtaaataaactcagtgatgatacaacctctttcgcgtggtgttcacactcacaaccccagttgaatacagcagccatggggtttcttgtggagactgacttcagcaacacctttcccctttta

SEQ ID NO: 42120 - DNA, 1499 bp, Macaca Mulatta
  misc_feature (1)...(1499): n = A,T,C or G
gccggaagtcgtctagccctgctgtggtggcctcctacctctgcgaggtccagcctcactccccacacttcctgaagctgcttgtcaacttggccgatcgcaacggaaacacagcccttcactacagcgtgtcccactccaacttctccatcgcgaagctgctgctggagacaggncaggcgtctgcaacgtggaccatcagaacaaagctggctacactgccgtaatgatcactcccttggcttccgcagagaccaatgaagacatggctgttgtctggaagctcttaagagaaggaaatgtgaacattcaagctactcaggnnnnnnnnnnnnnnnnnnnnnnnnnnnnnnnnnnnnnnnnnnnnnnnnnnnnnnnnnnnnnnnnnnnnnnnnnnnnnnnnnnnnnnnnnnnnnnnnnnnnnnnnnnnnnnnnnnnnnnnnnnnnnnnnnnnnnnnnnnnnnnnnnnnnnnnnnnnnnnnnnnnnnnnnnnnnnnnnnnnnnnnnnnnnnnnnnnnnnnnnnnnnnccgcccagctttgtccatcgttctgaagtccccccccccatatggaaaatgctggggtttctgagagcccccgccgacgcagggcaggtccctggggctgtaggggctgcagaagacctgcggtggggaacaaagccttcttttctgactccctccctcgcccttgaagagggcggaggtcacaggccagagagccacccctctagagaagaaactatgtcaaatatgcacatacattcctgttgtataattctgctcattaggatgctttgtagtttttgccttaggccaagccccaaaactacacgggcttcagagcagggttcaaggtgcaaggtgaggggtacatcggtgtcatccaaacatccaaaacatcttcagccttgaattcctcatgactctaccctctgtagcattgtgtagcaagaaggcaggcaggagcacattcgcacattaggaaagcaatactttttacatggaattttaaagtgcactatctttgtcttttaagcaagtgtatacaaatatgtcccattgatatgcatgtctagagatgggaggggatttaagccaaccccctggcaagcattctgtagaggaccctagaagaatcaccatgcagactggtgaaactgaacaaggaccatttgggagatttgttttgatggggttgacaaagaaatcttaaattcagacaaggtaggaagaagcacattggcatcaatgctgaatgtacagtcttgactatttctgagtcatctagtgactccaatgtgctccagagaaattggaattaactaagaaatgtattatctagtaggttagtatgtaataaataaaaaaaagaaaatcgatccaatgacacacaccacatgtatttgggcagagtcagattctctcagctattttgagtctgtaaaagaaacnnnnnnnngcttcctcctgaggatgggttatgtcatcaagaagcc

SEQ ID NO: 42121 - DNA, 766 bp, Macaca Mulatta
gggctggctctcgcttccctgggccacacttttgaatcccggtagccacactggcgcagcccatgtcaatctatgtcactgcctgctgcctcagattgatagcagagcctttttcctttagatttctcaggcgtgtgccagacaccagtccaccatgccccccgaaatccaggtagcacatatcagggcgtacatttagccctattgtctaagcttgagctgagaggaaggtatctcctccgctgtctactcatagcacactgaaggctgtctctaaagaatggctttccttacaaatcctctttcagttttcaaaatcttggccattttatatccttggtgggggtgagggcttttaagagtccaataaccacttttcacctattcatttttaaattctgggcatggaattcacccttcgtggtatcttagtatctgacttggtgaaacttccgatttaaattcttgttaccaaagtaaatattcacaaaatggttatattaagagactagaatgtgttatctttcactgatagacattattgacttttacatatgaatttagcattaatgatctgtgtagagggccctaagtaacaaataaattaattgttctttatgcttataatgtagatcttatcttgaaccactcacaagcctagtgagtgaagaagtgaacgtgtggatttttattattcttcaaaaatcctctagatagtaagtggaatggattctaacatataccatgtatgtggtttatttgggaa

SEQ ID NO: 42122 - DNA, 1146 bp, Macaca Mulatta
  misc_feature (1)...(1146): n = A,T,C or G
ggggctctaccggcgggatttgatggcgtgatgtctcacagaaagttctcggctcccagacatgggtcgctcggcttcctgcctcggaagcgcagcagcaggcatcgcgggaaggttaagagcttccctaaagatgatccgtctaagccggtccacctcacagccttcctgggatacaaggctggcatgacccacatcgtgcgggaagtcgacaggccacgatctaaggtgcacaaaaaggacgtgggtggacgctgtaacctttgtggataccccacccctggcgggtgggggcctttgcgggccacttggccccccccccaggcctccggaaccttcaaaaccggttttcccttgacacccctctttggatgaagggccagaggcgcgttttcgtcccagaacggggcgttatcccctaccaacagaaggcccttccccccgtccccggcctacaaatggtgccgggacgcatggagtgggccaaacctccccctggggaaaagggggcctctcgcgccggagcggttgaaaaaacgttccccgcgccgggggcgccaccgcgcggggtggagctggcgcgcgcgcaaccactagacggggccggcgtggttgtcccgcctcgtcgcccgcccaaatataggcagaccgctcgctggtcccgcgtgtggggcacgactttgcgtcgcccgatcccgccgggttcccgctctgtgccctgccgcgagcccgctttcgcctgttcatgtgcttccgctctctcctcccgtattgtgtctcccgccgcagtcctcagttgcctgtctcctcttcgccgcacgcccgttagcgtatgcgcgcccgcgcagacggcgattantatcgctcattctccttataacgcgctcccccatgtggtggttgtctcacttgtcgngtgttcgcaccatagtctgtttgtgtctcaccgcgagccggtgtccttgactaccagtctggccgcgctgcggcgacgcgactcnttgacgcggctctcncggtgcgcgccagacctgtgtgcgctgcagcggataacacgtgcgtgcgcgggcacgttgtgtggtcgtgccactcgtgattntggtggcgccccatttaatcttgcgccgcgcccggcgctcctccggc

SEQ ID NO: 42123 - DNA, 642 bp, Macaca Mulatta
  misc_feature (1)...(642): n = A,T,C or G
cgtttaatatctaggcggcctgggtatctcacaaatcactcatttggggggatcaagggacccgggaaatatagtattctgctcagtgtctggagatcatctacccaggctggagcttctgggacaggtgaggacccacggaccctggaagagctggtccaggggattgaactccgggcatctctacagagcagagcatgatcatattcctgccactgctgctggggctcagcctgggctgcacaagagcaggtggctttgtggcccatgtggaaagcacctgtctactggatgatgatgggactgcgaaggatttcacatactgtatctccttcaacaaggatctgctgacctgctgggatccagaggagaacaagatggtcccttgcgaatttggggtgctgaatcccgtggccaatggcatctcacattacctcaaccaacaggacaccctgatgcagcgcttgcgcaatgggcttcagaattgtaccacacacacccagcccttctggggatcactgacccacaggacacggncaccatctgtgcaagtagcccaaatcactccttttaacacgagggagcctgtgatgctggcctgctatgtgtggggcttctatccagcagatgtgaccatcacgt

SEQ ID NO: 42124 - DNA, 639 bp, Macaca Mulatta
  misc_feature (1)...(639): n = A,T,C or G
gtatttagtcttgcagcaaatgaatgatgctcacatgcaggtgaccctgcacaggtgtgactgagtcattctgagtcagatgtgagctgagcaagtttccttcccactgaccaaggtggcttctgtcctgctcacccctgtgagaagcttgctctttgctcctggctcttcatgctgggaagatgctcttttttttctggaatgcagagctcgggctgtcacgggagaatgaggagaccttatctgtgggctttgaacttcctggaatcacaggtctttgtttttctctgaaaaccaaattatcagagagtagaatatcagagcaagggccccttacctgccccagtttgtactgaaaagacttttctagtgcatatcacctaggaggtctccaggagcctgagactggctaagtcagtcctcactgaggcccaaggaacagggaaacgtgtgatgcttccctcttgtgtcatggttcatccaaagattgagttttctttgaaatcccaaaatcctgtcacttgaaattcagagccttgcagaggcgtgttcagtggntcaagtggtggaaaagtctccagttggatgagttcctgcatctgtctgcactttaacaagtctctaatttagagtcagcct

SEQ ID NO: 42125 - DNA, 683 bp, Macaca Mulatta
cggctgggctagcctccgcgcctgctgctgcttggcggggggctgctttgctgcaactgcccaccccgcacagacaagccttactctgccaagtattctgccgcccgctctgctgctgccagcaactacgtgtaaggtgccacggctccactctgtccctctctgctttgttcttccctggactgagctcagcacaggctgtgaccccaggagggccctgccacgggcccctggctgctggggactggggactgggcagagactgagccaggcaggaaggcagcagccttcagcctctctggcccattcggacaccttcccaaggccgcctcctgctagcaagaacagagtccaccctcctctggatattgtggagggacggaagtgacagggtgtggcagtggagtggggagctggcttctgctggccaggatggctcaaccgtgactttgggctctgcctgcatcggtgttggccactgtccccatttacattttccccactctgtctgcctgcatctcctctgttccgggcaggccttgatgtcacctctaggactgtgccttgctcaccgaaacccgcacccaggagtatggctgaggccttgcccacccacctgcctgaggagggcagagtggatggacgggtttggaggggaggggtgaaggctttgttaacaggtt

SEQ ID NO: 42126 - DNA, 880 bp, Macaca Mulatta
  misc_feature (1)...(880): n = A,T,C or G
ggaatgccccagttagatacatcaacatgattcaccactattatgacgatgcttcccacactatatcttatcatgcagctaaagctactaaacacaaatcaccaccaaccaccccttacaaaaacccccacccttcagtctcacaatgtccgctgacaaccaaaatgaacgaaaacttgtttacccctttctcagccccaacaattcttaaaccaacccgctacaaatcccccatttatccttattccccccacccttactaaatctttaacccccccaaaaaattcccccattttaaaaaaaccccgagataacgcttccccccttttnnnnnnnnnnnnnnnnnnngagaatatctcccgttttttttcccccccgccgttgataagaagaaaaaagaataatgagagtaatatttattttttgtggtggtggttacttcgataacctacgtgattaaattcattgatctctatattaggagtactcatgaagacgtttttatacaaattaacttcatatagaatcgatttaaattaattttttaccagcgggatgaaagagagttgtatgatagctcgatggtttttgtgttgtcgttcgaaacataagaatatagacaaccctgccgtgtattttccatgcgcatgagaacatcctacatacaattctacacatttcatatgtaagaatgaatctatagaaacaaaacaacaaactatctcaatannncctcaccagaaacaaaggagaaagcttgttatattacttcctcgcggtttctctgatttnnctcgtatacgtactcgtactcgcatgccattccatacaagtctcaagataactttctcaaatattagcatgaacctgactcgaatag

SEQ ID NO: 42127 - DNA, 2838 bp, Macaca Mulatta
  misc_feature (1)...(2838): n = A,T,C or G
accaagagaaatattctgaattaaatcaagaaaatggaactacttcaattcctacttcatgtgtaccagtggcaacgcctttagttttgccatctaataaacagtcagctagaccttcagcaaagaacagtatacacataaaagaaattgatgcagtgcagtgttctggtaagtttgatgaattgaaagatggtgaagaagaaaagataaaatattttaattgcaataagggagagttgcctttattttcagacagttttcaagatgcctatatacctcacaatccggattcaaaagatgaaaaacaaaaattcgctgaaacatcatccttgtctaatgtaacttctaattatgactttgttggccagcacaagaaaatgaaatacaacatccatgagagaaacggtgtgaggtttcttaaaagtattttaaagaaagaatctaaatatgaacatggttatcttaaggcattaatcataaatcagagctttaagtttggaaatcaaaaagcagcagctatcanagatagtattgaattaacaaaggaaagggaaaaaggtgcagaaattccaaagactattaaaaaactgaggtggtttgatgaaactagcagtatagnnnnnnnnnnnnnnnnnnnnnnnnnnnnnnnnnnnnnnnnnnnnnnnnnnnnnnnnnnnnnnnnnnnnnnnnnnnnnnnnnnnnnnnnnnnnnnnnnnnnnnnnnnnnnnnnnnnnnnnnnnnnnnnnnnnnnnnnnnnnnnnnnnnnnnnnnnnnnnnnnnnnnnnnnnnnnnnnnnnnnnnnnnnnnnnnnnnnnnnnnnnnnnnnnnnnnnnnnnnnnnnnnnnnnnnnnnnnnnnnnnnnnnnnnnnnnnnnnnnnnnnnnnnnnnnnnnnnnnnnnnnnnnnnnnnnnnnnnnnnnnnnnnnnnnnnnnnnnnnnnnnnnnnnnnnnnnnnnnnnnnnnnnnnnnnnnnnnnnnnnnnnnnnnnnnnnnnnnnnnnnnnnnnnnnnnnnnnnnnnnnnnnnnnnnnnnnnnnnnnnnnnnnnnnnnnnnnnnnnnnnnnnnnnnnnnnnnnnnnnnnnnnnnnnnnnnnnnnnnnnnnnnnnnnnnnnnnnnnnnnnnnnnnnnnnnnnnnnnnnnnnnnnnnnnnnnnnnnnnnnnnnnnnnnnnnnnnnnnnnnnnnnnnnnnnnnnnnnnnnnnnnnnnnnnnnnnnnnnnnnnnnnnnnnnnnnnnnnnnnnnnnnnnnnnnnnnnnnnnnnnnnnnnnnnnnnnnnnnnnnnnnnnnnnnnnnnnnnnnnnnnnnnnnnnnnnnnnnnnnnnnnnnnnnnnnnnnnnnnnnnnnnnnnnnnnnnnnnnnnnnnnnnnnnnnnnnnnnnnnnnnnnnnnnnnnnnnnnnnnnnnnnnnnnnnnnnnnnnnnnnnnnnnnnnnnnnnnnnnnnnnnnnnnnnnnnnnnnnnnnnnnnnnnnnnnnnnnnnnnnnnnnnnnnnnnnnnnnnnnnnnnnnnnnnnnnnnnnnnnnnnnnnnnnnnnnnnnnnnnnnnnnnnnnnnnnnnnnnnnnnnnnnnnnnnnnnnnnnnnnnnnnnnnnnnnnnnnnnnnnnnnnnnnnnnnnnnnnnnnnnnnnnnnnnnnnnnnnnnnnnnnnnnnnnnnnnnnnnnnnnnnnnnnnnnnnnnnnnnnnnnnnnnnnnnnnnnnnnnnnnnnnnnnnnnnnnnnnnnnnnnnnnnnnnnnnnnnnnnnnnnnnnnnnnnnnnnnnnnnnnnnnnnnnnnnnnnnnnnnnnnnnnnnnnnnnnnnnnnnnnnnnnnnnnnnnnnnnnnnnnnnnnnnnnnnnnnnnnnnnnnnnnnnnnnnnnnnnnnnnnnnnnnnnnnnnnnnnnnnnnnnnnnnnnnnnnnnnnnnnnnnnnnnnnnnnnnnnnnnnnnnnnnnnnnnnnnnnnnnnnnnnnnnnnnnnnnnnnnnnnnnnnnnnnnnnnnnnnnnnnnnnnnnnnnnnnnnnnnnnnnnnnnnnnnnnnnnnnnnnnnnnnnnnnnnnnnnnnnnnnnnnnnnnnnnnnnnnnnnnnnnnnnnnnnnnnnnnnnnnnnnnnnnnnnnnnnnnnnnnnnnnnnnnnnnnnnnnttttgtcaaagccagccataggaaaacatgtgagcaacaacccctgtgaacatttgtcctaactcagattttgtgagcagtgaagtttaacagagctgtgaacatttaacaaagcagtgaagtttaacaaagttctgagaataccatgaaagacattatgcctgcctgaacaaaaagcaggacataacctagctctgaatacatgccacaaggatgaagcttgtgagtagagcaaacaaacatttttccacagaattcacagtgctcctttgtaatttatagattccatgttgaaatatatgttaaataaaatttctgtttattaaacctctttattaaacctctaacttactgataagatgtttataaagtatggcatattttgatttttnnnntgtaataaatattcctaaagttaccacatcccacaaaatggcccttggtggcagcaatagagcaaaggttacctttttgtatggtgaagggaggccttcctatggctgtacaattacatcgattcttccaaatttcatacatggcattttggcatacagaaaaaacatgaaatttttcattaaaatgtcatgaatcaagccagggccgttggctcatgctaaaaatcccagcactttgcaggccgaggtgggcagatggcttgagctcaggagttcgtgaccagcctgggcaaaaaggtctctacaaaaaatacaaaagttacccagg

SEQ ID NO: 42128 - DNA, 1086 bp, Macaca Mulatta
  misc_feature (1)...(1086): n = A,T,C or G
ggggcacagtggttattgcctttgttactagctgacattggctgacattgctgagctgggtgggctttctatatagagtcctgtgctgaataacaatgtttcggttcatcagccaagatcaaagtgggtggtcccataagatgataatggagctaaaaaattcttattgcctagtgacattgtagccattgtgcctttgtaacactgtagcacaattacnnnnnnnnnnnnnnnnnnttggtagccaggcgtggccnnnnnnnnnnnnnntnnnnnnnnnnnnnnacgattgcttgagcnnnnnnnnnnnnnnnnnnntggcaaactcctcatctctacccaaaatatcgtataagttaactcgggtgcgggtgcgcacctcccttgtgcctctcctgccatcttctaagggcccgaggcggggaaccctcggcgacattaactaatcgcgtttgccctccacaattggccccctcgtttcgcgtcccatttccactcgttgactcgcgaatacattgtgcccgccgttgtcctagagcggacgtgcttcgccatgcgtgactccgttcaccattctgtgcttggttgctatgcgcgtctagcccaccctttgccgcgcgtatttgtctctgctttatgcacaccttcgacccttgctatgggcccgccttcttgcgggcttagcctcttcggtgcgaggccgatgtattgctagctggtgcgtagagctaccatggcgcgtccactgtgactcgctgtggtgtgagcggtagcctctggtggccgacggccgtaggcgctgtatgtcccgtggattgttacgccctctttggcgcccccctgctgtgtcgatccgcgcgtgcgatcggtgccgaccgtatgcccgtatccgagccgtgctaccccgccccttatctatgtccttcgcacgtcctggactttttagctccatatgtgttgcacgctccctggatcccccttacgcccccttctattcgacccccccgccccactttaattggtttgattagccccacgggtcgtctctctctccccatagtcccatattttccgtgtgcctgtcgt

SEQ ID NO: 42129 - DNA, 888 bp, Macaca Mulatta
  misc_feature (1)...(888): n = A,T,C or G
gggcctttcggccggaaccgccatcttccagtaatttgccaaaatgacgaacacaaagggaaagaggagaggcacccgatatatgttctctaggccttttagaaaacatggagttgttcctttggccacgtatatgcgaatnctataagaaaagggntgataatnccggttnaaagaaacattcaaaaggggaatggggtaccnngtttcaaaaaaaggaaaattggcccccccaacaaaggtgggttacccattgggccaaaaaaactttggggaaggagtttcctaacaaaaccgtttttacccccccaaccccaattggggccccctggggtttgggggccnnnnnnnnnnnnnnnnnnnnnnnnnnnnnnnnnnnnnnnagnnnnnnnnnnnnnnngggggcgggnnnnnnnnnnnnnnnnnnnnnnnnnnnnnnnnnggcgcccccnnnnnnnnnnnnnnnnnnnnnnnnnnnnnnnnnnnacagggggggtggggggggcgcacccaccccaccnnnnnnnnnnnnnnnnnnnnnnnnnnnnncgcgcgccgcccccaacaccatttcattatattttttttatataagaaaagaggggcggaaggccggcaccgccaaatcactattatatattcaacatttcctataactcctctacataaaacaaaganagacaaacaantctagaagtaaacaataaacacatagaagtaatgaatcagaacacgtagccccttaagtgaggcggatgtgctacgacactgcgcatacaaaaaatcacgacatcacactcaacctgctggtctacacacaagcaggataacacattagcagcaagtcagtctatatacacttacatgtgaaataagcactcatcacat

SEQ ID NO: 42130 - DNA, 788 bp, Macaca Mulatta
  misc_feature (1)...(788): n = A,T,C or G
gggtttaccatgttgcctttctcctcttatctctctttctttcactttatccttcccttctttttctttccttttctcctctcttcttgtttttttgttttgtttataagataggatcttgctgtgtcgcccacannnnnnnnnnnnnnnntnnnnnnnnnnnnnnnnnnnnnnnnnnnnnnngctcaagcagtcctnnnnnnnnnnnnnntnnnnnnnnnnnnnnnnnnnnnnnncnnnnnnnnnnnnnnnnnnnnnnnnnnnnnngaannnnnnnnnnnnnnnnnnnnnnnnnnnnnnnnnnnnnngctgagctcaagtgatctgnnnnnnnnnnnnnnnnnnnnnntnnnnnnnnnnnnnnnnnnnnnnnacgcctggctctttccttttttctgcccacttttcactgtacacttttcacataatctggatcaaggagaatgacagtattttatatagtgctttgccttttgaatcattagtgatagtatactctattagtatgaatcctctgagagagtgaaatatgtttatacaggtagggctcctgatgaaagagtcaaagcctgaattttaaccctagtgtcccccactaatatatgtgaaaccataactttatgtgtaaaagtggctgtaagtaacacatagggattggttggggaggataaaatttaagaaagggggtaaaataaaaaacttttttgtacctggtaaaaggctttttcagaaataacccataagcattttaatttaaatttacattaggaaattagtttagataattc

SEQ ID NO: 42131 - DNA, 146 bp, Macaca Mulatta
ttttgtgcagaaagaagttatgtcaaggctcaggggcaagtcaagtttggggaaatgccagcagtgcatgtaggaaaaagctgagcataagatgcaagaagcaaggtgaggtttttaagagtcagatcatgaagggccttaaatgg

SEQ ID NO: 42132 - DNA, 1751 bp, Macaca Mulatta
  misc_feature (1)...(1751): n = A,T,C or G
gggctttttcgcaacgggtttgccgccagaacacaggtgtcgtgaaaactacccctaaaagccaaaatgggaaaggaaaagactcatatcaacattgtcgtcattggacacgtagattcgggcaagtccaccactactggccatctgatctacaaatgcggtggcatcgacaaaagaaccattgaaaaatttgagaaggaggctgctgagatgggaaagggctccttcaagtatgcctgggtcttggataaactgaaagctgagcgggaacgtggtatcaccattgatatctccttgtggaaatttgagaccagcaagtattatgtgactatcattgatgccccaggacacagagacttcatcaaaaacatgattacagggacatctcaggctgactgtgctgtcctgattgttgctgctggtgttggtgaatttgaagctggtatctccaagaatgggcagacccgagagcatgctcttctggcttacacactgggtgtgaaacaactaattgttggtgttaacaaaatggattccactgagccaccctacagccagaagagatacgaggaaattgttaaggaagtcagcacttacattaagaaaattggctacaaccccgacacagtagcatttgtgccaatttctggttggaatggtgacaacatgctggagccaagtgctaacatgccttggttcaagggatggaaggtcacccgtaaggatggcaatgccagtggaaccacgctgcttgaggctctggactgcatcctaccaccaactcgtccaactgacaagcccttgcgcctgcctctccaggatgtctacaaaattggtggtattggtactgttcctgttggccgagtggagactggtgttctcaaacccggtatggtggtcacctttgctccagtcaacgttacaactgaagtaaaatctgtcgaaatgcaccatgaagctttgagtgaagctcttcctggggacattgtgggcttcaagtccagaatttgtctgtcagggtgttctcgtggcacgttcctgggacacaaaatgttctccccaatggagcactggttcctgctcagtattaccgaccatcctccaatagtgtggttgcccnnnnnnnnnnnnnnnnnggagggagggaaaannnnnnnnnnnnnnnnnnnnnnnnngccaacccgctccnnnnnnnnnnnnnnnnnnnnnnnnnnnnnnnnnnnnnnnncaacccnccgncggccgttgttnntttttntcttcttcccccccgccnnnnnnnnnnnnnnnnnnnnnnnnnnnnnnnncncncacacaacccaccggcgcacacacacacataaacncgcgcggcgcgggaacggtggaagacaggaaagcgtccgcgaccgcccacaccaaccacctacaacccagcaagggtgaaggcgtaggaggcataagatgcgcgaacaactcgagactatgtgcaccgcccacgggcgggtagcccgcggatcactttagtcttgtggtgagggcgggagggccagcagcggagttaaattagtcagagagcgtgtaaactacgcaggagggtntgtgagaagaaaacgaaaaccaagatgttgagatccgccgaaaaaatcgagtaaangtcggtatgtcatgtacccgccatatgtagatgccgcgttgaagagagagacggtaagatcaaggtgcgtacgccgtctggcgtaaacatgacgcgctaggcacactcggctatg

SEQ ID NO: 42133 - DNA, 817 bp, Macaca Mulatta
  misc_feature (1)...(817): n = A,T,C or G
ggccgcttccggtgtcccctacagtcatggctgccgccgttgctgctgccggtgccggggaaccccagtccccggacgaattgctcccgaaaggcgacgcggagaagcctgaggaggagctggaggaggacgacgatgaggagctagatgagactctgtcggagagactatggggcctgacagagatgtttccggagagggtccggtccgcggccggagcgacttttgatctttccctctttgtggctcaaaaaatgtacgggttttccagggcagccttgtggattgggaccacttcctttatgatcctggttcttcccgttgtttttgagaccgagaagttgcaaatggagcaacagcagcaactgcagcagcggcagatacttctagggcctaacgcagggctctcaggaggaatgcccagggctctaccctcacttcctggaaagatctaaattgctactgctgcttgagctgtctcggtgggaataaacttgaaattcgagcggggtaactggttgatatttgggaannnnnnnnnnnnnnnnnnnnngcgttggcacagttgtatctatctcaaaacctgggggggagaaaaaatgacccgacaaattggcctccctgggaagaagactcaccgttgtcaggcggatggccctctcgcacagaagtgcaataactttaaaacacttgaacaataggaaaacccaagagggacggggacagattcgaacccgcggcaatgtgagacagcctctaagaggaacaccacgaccgggacttttagagacacaggaatgggggcgtacacgaacan

SEQ ID NO: 42134 - DNA, 429 bp, Macaca Mulatta
atgctgggtctcctgctccttctcctgggacgaggctcagtgttcagtgctgtcgtctctcaaaagccaagcagggatgtctgtcaacgtggaacctccgtgacgatccagtgtcaagtcgatagccaagtcaccatgatgttctggtaccgtcagcaacctggacagagcatgacactgattgcaactgcaaatcagggctccgaggccacatatgagagtggatttgtcattgacaagtttcccatcagtcgcccaaacctaacattctcaactctgactgtgagcaacacgagccctgaagacagcagcatatacctctgcagcgtctggaatgggacaggttatgggcccagccctcggcagcagttctttggacaaggcacaaggctcaccgtgctagaggacctgaaaaaagtgttcccaccc

SEQ ID NO: 42135 - DNA, 444 bp, Macaca Mulatta
gtgacagggtcaactggaccatcagctggagtgacggggacaactggaccatcagctggagtgacagtgacaactggactatcagctggagtgacggggaccactggaccatcagctggagtgacggggacaactggactatcagctggggtgacagggactaccagatcattagctggggtgacagggacaactggatcatctgcaaaatctgggacaagtataccatcagctggaaaaacaggaacaaccaggacatcagttgaagaatcaaggacaactagaccatcagctggaataacaggtacaaatggactatcagctgaagtgacagggtcaactggaccatcagctggagtgacggggacaactggaccatcagctggagtgacggtgacaactggactatcagctggagtgacagggaccactggaccatcagct

SEQ ID NO: 42136 - DNA, 768 bp, Macaca Mulatta
gggatcagacaataaattacaatgaaaattagaatatatttgaactgaatagtaaaagtgctacatgtcaaaacttatggtagacacctaaagccatgcttagaaggaaatgtatagtcttaaacgcacatttaaaaagattgaaaatgaacctagtagttatctcaaaaacttctaagaatagcaaattaaacctgaagaaaataaaggaaataagataataaagaacaagaattaatagagtagaaaatgaagataaagttggatcaactaaaccaaaagttgattctttgaaaggataattgataagtgtctggcagactgaaaaaggaagaaacaaccaatatcaggaatgaaaggatattacaaatcctacggtcatttgacaaaatatgtgcatgacttcaagccaataaattgaaaattttaaatgaagtgaacaaattttttaaaatatggaagagccaaaattgacaaatgaaaaaatagaaaatttgagtagttccctatctgctaaagaaatggaacctatagttactttatttgcttttccatagtgaaacaacaagcctagatggattgattcatcaatggaaaaacaatcttaaattcttacaaagagcagcagaaatgcaggaaccctccccaactcatcttatgatgccagaaaacctaggataccaaaaacctggcaagagacttccttgagaaaagagacctattttcatttcccccccaacatccaatgcaaaaaaatccccggaacca

SEQ ID NO: 42137 - DNA, 1059 bp, Macaca Mulatta
ggcacgaggctttgtgatgatcttaaaattgtttgtttaggtaaaaatatacattcagctgaaagcattacactaacatttacattttaagccttaggaggttattcagcccaattcccgagcagtggagagaatactaaacttgtgtctcaaggtttcatggttttcccacattctttggctatttaatttcccaggtcacgtagacaatcattgataattgaaacaagtcctgagttgaaataaccttgagttgagcaaaaatatcctcattttggcagaagctgggcttggtagtacagtaaaattttagtgtaatgtgctcttgtaattgaaaggggatagataatctggatgtttctgcaaaggaaaataggtgtgtacttaacagctttgactctactcagtttcttaaaaatataagagcaaaaaaacaagttaaatgtaatgattaagtttcctttaaattgtagtaataaaatatatgaagctacctttttttactttgctctgtgactggtttaaaaggtaagtttgttatgttgttggtagattttgccacggcttctcccaacagagtagaagtgattaggccttgtaacttaacagtggtttaccactttgttctacattccacttttgtgaaggatagtattggaatttgcgtctgaagaccaatcttgatgtaactcctgtcagtatattggtaaaatgtagcagaggcaggagtttggatgtttggatgggattcccttaggattctacagccaataaagatgctacttcccatgcatgtcctaggaatcagtaatcctcttttactctgttgggatgagtctttttttgtttctgttcagagtggttactaacttcaccttctttcctcttgctgtcatctgcattcgtgcttcccacctgttgttggcatgtcctttaccttctctttccctgccacatcaacctacacactgactcatcattgacgtggaagatgtggaagatgtcaagtttgtaatcaactatgactatccaaacagctcagaggattatgtgcaccgt

SEQ ID NO: 42138 - DNA, 205 bp, Macaca Mulatta
cataaatgctttttgtttcctgctcatacaggttctaggagtggccagcccactctttgggatgtccccacttcctttttcagttgtccaagtagtgttctgcccagccttccagactctctttcttacccttcccttgaaactattgtgttcattatgcttaaatactttccagtcatgggagctttgctgtaggcccttggcc

SEQ ID NO: 42139 - DNA, 907 bp, Macaca Mulatta
  misc_feature (1)...(907): n = A,T,C or G
ggagaagctgtgcctgaggatgaacagatcagtgccaaggaccagaagaacctggagccttgtgataacacccccatcnatagacaatattgctcctgttgttgctggcatctctacagaggagaaagagaagtatgatgaagagatctccagtctctacagacaactggatgacaagnnnnnnnnnnnnnnnnnnnnnnnnnnnnnnnnnnnnnnnnnnnnnnnnnnnnnnnnnnnnnnnnnnnnnnnnnnnnnnnnnnnnnnnnnnnnnnnnnnnnnnnnnnnnnnnnnnnnnnnnnnnnnnnnnnnnnnnnnnnnnnnnnnnnnnnnnnnnnnnnnnnnnnnnnnnnnnnnnnnnnnnnnnnnnnnnnnnnnnnnnnnnnnnnnnnnnnnnnnnnnnnnnnnnnnnnnnnnnnnnnnnnnnnnnnnnnnnnnnnnnnnnnnnnnnnnnnnnnnnnnnnnnnnnnnnnnnnnnnnnnnnnnnnnnnnnnnnnnnnnnnnnnnnnnnnnnnnnnnnnnnnnnnnnnnnnnnnnnnnnnnnnnnnnnnnnnnnnnnnnnnnnnnnnnnnnnnnnnnnnnnnnnnnnnnnnnnnnnnnnnnnnnnnnnnnnnnnnnnnnnnnnnnnnnnnnnnnnnnnnnnnnnnnnnnnnnnnnnnnnnnnnnnnnnnnnnnnnnnnnnnnnnnnnnnnnnnnnnnnnnnnnnnnnnnnnnnnnnnnnnnnnnnnnnnnnnnnnnnnnnnnnnnnnnnnnnnnnnnnnnnnnnnnnnnnnnnnnnnnnnnnnnnnnnagcacgaagccaagatcaagtctctgacagactacatgcagaacatggaacagaagaggaggcagctagaagagtcccaggactcgctcagcgaagagctggctaagctccgagcccagg

SEQ ID NO: 42140 - DNA, 820 bp, Macaca Mulatta
  misc_feature (1)...(820): n = A,T,C or G
ggcnnnnnnnnnnnnnnnnnncatctcagcattgtgggaggccaaggcgggcggatcacannnnnnnnnnnnnnnnnnnncnnnnnnnnnnnnnnnnnnnnnnnnnnnnnnnnnnnnnnnnnnnnnncccgggcgtggtggcgggctctgtagnnnnnnnnnnnnnnnnnnnnnaacatgacccaccgcacctgnnnnnnnnnnnnnnnnnnnnnnnnnnnnnnnnnnnnnnnnnnnnnnnnnnnnnnnnnnnnnnnnnnnnnnnnnnnngcgcccctgcacccnnnnnnnnnnnnnnnnnnnnnnnnnnnnnnnnnnnnnngctcacaaataacgttgagaaaagacaagcctgtgtaagatccggaagcgccactgaaggacataaaagcagccgcacgcgcagagggtggcgccgcgtgcccagacccgaagacacgccctgcgagctgtctgctgacgtcacaggcagcccaccactcccacggaaatccattcattaccagtaaaaatacccccatgcttgttggagatttttctgggactctgtgaatggatctgaagttggtccagtagaggaaacatgtgggaaatatccagaaaatatggggagagaacaagcttgcaggattccacgtaaaactgtggcagttggaggcagcaacaaccaaacctggcgacacgagctcattgaacttcaggacccaagaaccttagaaaagacccttggaaccccttggggaaaatccattctgtgtgtacaaattggtgggccgtcctcccaaaacccgtgggaaaaaaacgggcccggaaatgaaat

SEQ ID NO: 42141 - DNA, 778 bp, Macaca Mulatta
  misc_feature (1)...(778): n = A,T,C or G
gggagaaggatgtatgctgtagttgagggaattgtttgtgcatttcttccagagagtgttcatgagttggatacatggagagcagctgcagcagagaggggagagattgagacagagtcttgctccatcacccaggctggaattcagtggcataatcacagctcactgcagccttcaccttccagattaaagtggtcttnnnnnnnnnnnnnnnnnnnnnnnnnnnnncacaggaggaaatctcttcactgctggcactgacaatggaagactgagggtgcctgggatccttcacccccacgtccagtgaatccacggaacccagggtaattgggatggtatctggacccacttcccttcacctcacctgaatcccggaggaaaaggaagagaaatccacataagttacttgtgttctttctctcccaaactttcatcacttcctaatcaactttgttacagaccttcagtggtacccttaaaaaactccccttatatatcctgaataactccttactgttccgtgggacctatggccttcagaaaactttccaggaactttactcctatcccnnnnnnnnnnnnnnnnnnnnnnnngcttccgtttcctttcaattttaaaatttggttaaattaccttccaaacccacacccaataaccaccctactttctttcaactggcttcctcaagggccttgagaaaaacctttctaataataaccnnnnnnnnnnnnnnnnnnnnncttcctatgggcgcgggcgaagggcctttaacaa

SEQ ID NO: 42142 - DNA, 773 bp, Macaca Mulatta
tgttgctgctgccactcccggggactggccctgccctggggaggggctttcccaggccacttgaaaactccaaaacccctatgattcctggagcccaccctaagggctccttgggctcagagccccactcctttgacatcttcctggacaaccccagagctgagagtcataggaactctgatgtccgtcacgcccctgctgacgagatgcctgagaagcctgtagcctctccccttggcccagccctgtatgggcccaaagcagcccaaggggctcagagagaacgacccccagtaactgatgacctccagatggctcgaggacaaagctcccacggctggacaggacctctggattcacaagagcttctggagcaagaagcagtggctccgcacccagtgggccaccctcatctcactttcatccctacaactcccagacttcaactcagggtagccacagttcctccctccctgcagcatggaggccaacagggacagcagccacctagagatgagggtctgaaggccaaaaccaagagcagggtcccacccacttctccctcagactaccagggcccaccccacacccttgttccccactcaggtactgtcaagaggccagtcctggaaggacagggtgggtctgaggaacacttccaggaggcagctcaaggccccctcttcacccagcaggatccagcagcctctgaagttggctcagttcccccagttgaggtggtgtactctcaggagccaggggcccagccagac

SEQ ID NO: 42143 - DNA, 826 bp, Macaca Mulatta
  misc_feature (1)...(826): n = A,T,C or G
gggtgttggggagagtggagacattctcagggctgtgtggnnnnnnnnnnnnnnnnnnnnncattctcagggctgtggnnnnnnnnnnnnnnnnnnncattctcagggctgtgtgannnnnnnnnnnnnnnnnnngtgacattctcagggctgcgtgtgtaaggactgtttgccattcatagctcctatctagataccattaaaatcagctctcctctacttgcaccagtttgccttccaaatctcccttttctggattggaaaaaggcaaacttaatcccaaaaactgtgtgtgagcatcacttgttaggggttttcacctgtactcgtgaatgaccactctgacatcccaaaaacagtgtggctggagagtaatgtgactggcatttaaaaataacctagggccggatgtagtggctcatggnnnnnnnnnnnnngnnnnnnnnnnnnnnnnnaggtagatcatgaggtcaagagttcaagaccagccttgccaaactgtgtgaaaccccgccctctactaagnnnnnnnnnnnnnnnnnnnnnnnnntggtgtgtgccctgtaattcccagcctacttcgggaagcttgaagcacgaagaattgcttgaaccccggggagggggaaggttgcaattggagcttgaaaatcgttgccaactggcatctccacccctgggcctgaaagaattcaagaaattccctccccacaacnttatgctaaccccacttcaanatattaaatatcccttgttccgggcccgcccttcgggtccctttagaaaaaaccttttcttagaacccattctctttttgggccgccgc

SEQ ID NO: 42144 - DNA, 463 bp, Macaca Mulatta
atgccaatgttttcttgtgccatttctttctacaataatctatttggcttctgtttcaccgtagctgtcatagacatgtcatttaggtatcatattatcagtactaactttttgtttattagaacataagaactaaatatctagacattaatctgatctggttgttctgtttgttatagttagcccgtactcccttttttgttgtttgtacttcccctttcattttgagtacatatatgtgtcattgacaaatgcagatttttccaattattcttcctcagtcttttcctttgggtaagtaactcagcatatataattcagccacctgataattgtaactccaccatctcccccccaaaagaattgtagcagcatcaggctgaatagcattaagttatctaacacagtacagtagtgaaaaccaattccttcaagtatacctttctcttctatttttggcttc

SEQ ID NO: 42145 - DNA, 134 bp, Macaca Mulatta
gttgtactgttagggggggtaaaggtatcgggaaatgaggtcagctgttgtatcaaggatagagggggccacagatagtgggagagacagagtgaacttgaaagggggggtccgaagagagggcgagagggaga

SEQ ID NO: 42146 - DNA, 808 bp, Macaca Mulatta
  misc_feature (1)...(808): n = A,T,C or G
gggggtttcttttcaatgcttggttaattctacttacttaaattctaccattccctctttagttttcccttttcattgttggctggtgtccattttccaaaaatatctaatgcagtaactttaaatataaattactgtgtataaattgaaatttatattataaaggaataagtgattttatattttatgactgtttaaacatttgtcatctatacttcttggcttgtttgtcagataaacgagaaaaatttaaaaacacttaggggagggcagctatcaggaattttctttttaattgtgtagttttctggggatgtgtgtaatataggagtacatagagattttttaaatttcctgtacgtttttattgttattagacattttaaaagtaaatccttggccagcatggtggcttnnnnnnnnnnnnnnnnnnnnnnnnnnnnctgagacaggagggtaacttgaatgcgggaatgtgaaaacaccctgagcaacataatgagtcttcctttccttaaataaataaattaataaaattcctatcccatcccaattagtttctactaatcnnnnnnnnnnnnnnnnnnaaggcaggccaaatcaccctgaggtcattagggttcaaaaccaaccccggacccnnnnnnnnnnnnnnnnnnttctctacttaaaattccaaaattaaccggggtggtggtggaaacaattccctgttaaaccccacctattttgggaaggctgaaggcaaacccaattcccttgtaaccccgggaagccgaagattttgggtgggccccaaaaaaaaacc

SEQ ID NO: 42147 - DNA, 1272 bp, Macaca Mulatta
  misc_feature (1)...(1272): n = A,T,C or G
gatttttcatactgctccagacccaagcattcctcttcctcagcctcagtctcgatctggatcccgaaggacacgagcaatctgcctctctacagggtctaggaagcccagagggaggtatactccatgcctggctgaacctgatagtnnnnnnnnnnnnnnnnnnnnnnnnnnnnnnnnnnnnnnnnnnnnnnnnnnnnnnnnnnnnnnnnnnnnnnnnnnnnnnnnnnnnnnnnnnnnnnnnnnnnnnnnnnnnnnnnnnnnnnnnnnnnnnnnnnnnnnnnnnnnnnnnnnnnnnnnnnnnnnnnnnnnnnnnnnnnnnnnnnnnnnnnnnnnnnnnnnnnnnnnnnnnnnnnnnnnnnnnnnnnnnnnnnnnnnnnnnnnnnnnnnnnnnnnnnnnnnnnnnnnnnnnnnnnnnnnnnnnnnnnnnnnnnnnnnnnnnnnnnnnnnnnnnnnnnnnnnnnnnnnnnnnnnnnnnnnnnnnnnnnnnnnnnnnnnnnnnnnnnnnnnnnnnnnnnnnnnnnnggaaacaagagctacagtggatctattcaaagcttaaattctgtaggttccaaggagacacccaaagcttcaccaaacccagacctgcctccaaaaatgtgcaggagattaagactagacactgcctcaagcaatggctatcagcgtcctggctcagtgtggcagcaaaagctcaactctttgaaaatgtgggttcacctaagccggtttcttctgggcggtaagngctaacatttactgagttactactaagcatcagacattgttcgtggagattccattctatctaggggagaagataaaaatatcagcaataataacaaaataccggataccaataccatgcagacttgaagcaggaagatatgatagttccctgggcaactatttcagagantcagagaaggcctgaccttcagcaaagctcttgaaatttaagatgaacttgaaggacatggccatgtgaagatcaagaggaaaacatctcagggcgtggacatagctggcctnnnnnnnnnnnnnnnnnnnnnnnnnnnnnnnnnnnnnnnnnnnnnnnnnnnnnnnnnnnnnnnnnnnnnnnnnnnnnnnngccagtgtacccatcagtggaaccaggatggttaaaggcaacttatgaaggcaaaacgggactagttccagaaaattatgttgtcttcctctaatacgatttagtggatggcagtatcttcatggtatccatggtaacgaataagtgctatgatttta

SEQ ID NO: 42148 - DNA, 905 bp, Macaca Mulatta
ggggtgttcctgcaagggctggtgtggaaacaaacagtgtgggtgcaggaagcaaaagtcagactgtggtgtggactgtagctgtgaccccacaaagtgtcggaaccgccagcaaggcaaggatggcttgggcaatgttgaatggacccaggattctgaaggctccttcaaactggaggatcctaccgaggtgaccccaggattgagcttctttaaccctgtctgtgccacccccaatagcaagatcctgaaagagatgtgtgacatggaggaggtgctgtcaaagaagactgctccagctccctcctcttttgacctcccagaattgaaacatggagcaacagaacaccaacaaaataaggctccagggaagaaaaagaaacgagctctggccagcaacaccagcttcttctctggctgctcccctatcaaagaagaagcccactgaagttggagtcatcatctctacctccagtctggcttgggagatgctttcaggttgcagccagaaggggtttcttaaatgacttctctggatttcaggtttcttgctgttgaaaaaaggaacaaagcattactaaaaagaaggtaacctttgttggatgttgtctctcagcctccagccccagactactactctctgttctccagaagggtgctaaaccacctactgaagagagaaccaactgactttcctaatgactcatcagcagccagtcctcagtatgatcaagttccttcttatttgtgagcagttcaggctctcctgttggggatgaggccaaggctttcttatcttttggttgtctctgcttaatggaggagcctggcttaggttggaggcctggctgagatctttcactccatctcaggaatggggttgtgatctttcctgtcctgacccc

SEQ ID NO: 42149 - DNA, 1288 bp, Macaca Mulatta
  misc_feature (1)...(1288): n = A,T,C or G
gcccattctcaggcctaatactaaagccaagtgaggcctttgaactgctgtctgccccccaaccttttccttccttatctaggaatcaggcaaaagttggccagagttagctcagtctcagggaaggcattcttctagagtcactcggttttgcatgacccgattcaaattttccatgtttgtcactttgattcccactctgagttttctcagtacatataaccttcccatgtgatgactggcctgggtattcatatgtgcatttgatacctgttgcttatctcctgggggacccctggttcagnnnnnnnnnnnnnnnnnnnnnnnnnnnnnnggggttgtcatcagagactctcagggttggagcgtggccctgccactgagtggccttgggagtctcgtttgacctctctgaaccttgaattcctcacttgtgaaatggggacacgttgacctcctgcatggcaagtgtcttgcttgatgtctggccaaaagaccaatactaccgtcattcactgccagagaggccctgcacgtggattttagagtttgctccgttttgtttgtcctaagcaaatgtccgaccatgtacaggctgatggattttgtaggtgcaacgtccctaacacaatcaacctctctcctcaaaagaccatgagcatgcccggattcagagggcaccgtgtgtggggctggcgtgggcacgtgtctgtagctgggtctggcttctagggttccaggctcaggcaggagggtggggtcccaggaggtcatctctctctccttaacctggaccctttggaagttggtttccaaatatcctgaattcctgttcctcactatgtggctcagtacaacgcttggcccggcagcaggagcctggttggtgttagtctgctggggaacgggaaaaagaagagaaacgtgaagctttcccttnnnnnnnnnnnnnnnnnncaaactctcacatctcccaccaataacacaccatctttatccctaaactttaagaaaagttgttgccaggcgcagtggctcacgcctgtaatcctagcactttgggaggccgaggcaggtggatcacctgaggttgaggctttgagaccagcctgaccaacatggagaaaccgtgtctctactaaaaatacaaaattagctgggcgtagtggcgcatgcctctaatcccagctgctcgggaggctgaggcaggagaatgacttgaacccaggaggcagaggttgtggtgggccaagattgcgccattatactccagcctgggcaacaagag

SEQ ID NO: 42150 - DNA, 845 bp, Macaca Mulatta
tgtgaccctggctcccaggtggtgagctgcctcagcaccgctgttctgtctggccactacgtgggcttctccatggtgtctctgctcctggagttgaactctgcctgcttgcacctgcggaagctgctgttgctctctcgccaggccccatccctggccttcagcgtgaccagctgggcctccttggccaccctggccctcttccgcctggtcccgctggggtggatgagtctgtggctattccggcagcgccaccaggttcctcttgctctggtcaccctgggtggaattgggctggtcactgtgggcgtcatgagcatcatattggggatccgcattctggtcaatgatgtcctgcggtctcgaccccatccacccagccccgggcacgagaaaaccagggggaccaggacacatcgtgacgatggacctgtcaccagggacaattccactctcagcctgaaagactagagaaaagccatgggcccctcgctgggggaggtggggccaggacaaggagatgagggtcttccatgcacagtcccccatcggggtgagggccagactggctcatcagcatctcggtttctcttccagctaactcacatcccttccccttgctaggatctaagaagaatagctgatgttggataggtgggaacctgggtttctgtttactgaaatccgtcatcagatgagtgccctttccagcaaataaactcaagaagtacagccagatcttcagtaaagggtggcaggaggcaagcagctggaagaaactgccagtggagacagaagctctttgctttaacccagggacatgtcggggaaggtgaagtcccact

SEQ ID NO: 42151 - DNA, 638 bp, Macaca Mulatta
  misc_feature (1)...(638): n = A,T,C or G
ttgaattgccagcagtcctggcagtacgagttttattcaggcagggggttctgaataaagtgataagctgcgtcaaacctgtgccataagaaactgtactgctnnnnnnnnnnnnnnnnnnnnnnnnnnnnnnnnnnnnggtannnnnnnnnnnnnnnnnnnnnnnnnnnnnnnnnnnnnnnnnnnnnnnnnnnnnnnnnnnnnnnnnnnnnannnnnnnnnnnnnnnnnnnnnnnnnnnnnnnnnnnnnnnnnnnnnnnnnnnnnnnnnnnnnnnnnnnnnnnnnnnnnnnnnnnnnnnnnnnnnnnnnnnnnnnnnnnnnnnnnnnnnnnnnnnnnnnnnnnnnnnnnnnnnnnnnnnnnnnnnnnnnnnnnnnnnnnnnnnnnnnnnnnnnnnnnnnnnnnnnnnnnnnnnnnnnnnnnnnnnnnnnnnnnnnnnnnnnnnnnnnnnnnnnnnnnnnnnnnnnnnnnnnnnnnnnnnnnnnnnnnnnnnnnnnnnnnnnnnnnnnnnnnnnnnnnnnnnnnnnnnnnnnnnnnnnnnnnnnnnnnnnnnnnnnnnnnnnnnnnnnnnnnnnnnnnnnnnnnnnnnnnnnnnnnnnnnnnnnnnnnnnnnnnnnnnnnnnnnnnnnnnnnnnnnnn

SEQ ID NO: 42152 - DNA, 478 bp, Macaca Mulatta
gctgcgtgtgttcctggacggagcactggtgctgctgaccgagggcccctaaaccccaaggccaacagagagaagatggctcagatcatgtttgagaccttcaataccctggacatgtacgtggcagtccaggccatacttctatgcctctgggcgcactactggcattatcatggattctggagatggagtcacacacagtgcctgtctacgagggctgtgccctccccacgccatcatgtgtctggacctggctggccagaacctgaccacctcatgaagattctcacagagtgtgactacagcttcactagcacggccaagcgggagatcgtgcatgacatcaaggagaagcagtgctacgtcgccctggactttgagcaggagatgcccactgccacgtcatcctcctccctggagaaaagctacaaactacctaacagccaggtgatcaccattggcaacatgcagttccagt

SEQ ID NO: 42153 - DNA, 673 bp, Macaca Mulatta
aaactacagtatttcgaggaatgattggacatagcatggttaacagtaaaatacttctcttaaagaaaccaagagtctggtgggaactagaaggcccacaagtacctctgcgacctgactgccttgctatcgtcaataattttgtgttcctgttaggtggggaagagctgggcccggatggtgaattccatgcttcttccaaagtattcaggtatgacccgagacaaaactcctggctgcagatggcagatatgtctgtaccacgctctgaatttgctgtaggtgttattgggaagtttatttacgccgtagcaggcagaaccagagatgagactttctattcaactgagagatatgacatcaccaatgataaatgggaatttgtggatccatatccagttaacaaatatggacacgaggggacagtgctcaataacaagttgtttatcaccggtggaatcacctcatcttccacctccaagcaagtgtgcgtgtttgaccccagcaaagaagggaccatagaacaacggaccaggagaactcaagtggttaccaactgttgggagaataagagcaagatgaattacgcgagatgctttcacaagatgatttcttacaatggcaagctttatgtcttcggtggcgtctgtgtgatcttgagggcctctttcga

SEQ ID NO: 42154 - DNA, 171 bp, Macaca Mulatta
agatttatccaataatggacaagtcaagtcgcacacgtcttgctctcattatctgcaatgaagagtttgacagtctttctaaaagaacgggagctgaggttgacatcataggcataacgatgctgctacaaaatctggggtacaaggtagatgtgaaaagaaatctcactg

SEQ ID NO: 42155 - DNA, 449 bp, Macaca Mulatta
  misc_feature (1)...(449): n = A,T,C or G
caggaatacctgtgagaggaacccaaatagatgtagatgcgatgcacagaagagtaagtcacttgagttgatggcggccacccagtcaatctgcagcagagcatggacttccatctgcacctgtgaaacccagcgcatgggtgcattggtcaccactgcacagcctcagcgtcagacacccactttgcgccaaaaatgtattcaaataattactcctttgtgtgtccctttcccaccgcccacttgaaactgacatttttattcaaaaataggaaatagaagagaaatatgtttgagtgctggtctgctgtgacttcattgaccttttaaatcctcaccatctagtaccgaagcacaggacaaaatctcacagtattcacgaagtanattgccacaacctcatcagctcatccaacacttgtccatgcttttgattttgcccttcttac

SEQ ID NO: 42156 - DNA, 788 bp, Macaca Mulatta
gggactttcatcttcctatcatggccgccgcctgggcgcctctgctgagtcgtatgtatttccctcctgacattttttttcagatgttccggtcactttatggcctcaccaacagagatgagattaaaaacaatttgtcaaactatctttaataatgccccatcactctgcctgtgacatattagtgacctctgagcttgtagtcacttcctgctgacccctgaccccgttgatttccgtctgctgggttgatctcacccgtggcctttgctggtcatgagatttgcggaacgtgtggtggtggtaaagggccacaactgttgtcaacgtgcatgtaggggtctgaggtctggctctacagtttgtaaaatggaaataataatgcccgtgtaagaacttgagaggatgaaattaggccacgtacgccgcttggcatcatagtaagcactcagtaaaggccaattgcttttaaccattttttataacgcgcccttcgtttaagtgcagagctttatcagaccccaaaggtctctgctctctgttgggaagagttaccaattctttgcaggaatttattattacctccgtttaatggcgaaattattgttacctaacaatggtaaggattgccttttttcgtatatatgaacttcatttttaactttttccggactaatttatttgatttaaaaaattttttcaaaccctggctgttttaaaacaggccctttgcaaaaatttccaagctgtagggaaaattttttataggggggaaaaaaaattccaaa

SEQ ID NO: 42157 - DNA, 806 bp, Macaca Mulatta
ggggggatggtttttattgttctctattctgtttaaatggcataagaattttctggtccctaaaattttggatattagcacccatgaaatcagctatatttggttagttgttaattgttattgtccctttcaggttctttttactgcttcttatgtcagttttggtacttcacactcatagataatcagattgactatccagtttatttgtaatggagaccagtattaatactgattatattcatgacaataattaatgtcagggcttactgtgtgctagaaattatactaaatatttggaagtgatatcttctttattccctgccaagtgagatacatacatttcacagatgggaaaattgacacaaagattaagtaactttccatgatcccatgataatatttattaagacgacatatttatctacttctgtatctgtagttatttaatctctgtttccatattacttgaatttttttccttttctcttgaagtcttattgatgaacttgtacattggatctttccctctacccctaaagaacccattccttatatattacaagccttcctaagaacattaatgtatcattcctttaaatcttgggatccctgcattaaccataaaatggccttttatactttttcaatttttttaaaaatttcgaaatcttcgaattttgatattttcctttcccccacaaggggaaaaatacactttttattgtgggttcctggaggaactccctctaactataattaaaaattttattggaaaccctcgctacaaaatattttctcctctt

SEQ ID NO: 42158 - DNA, 810 bp, Macaca Mulatta
ggcattctcttagctctttaccttggttttttgtttttgtctttgtttcctgagatggagtctcactgtgttgcccatgctagagtgtagtatctgttcacaggagcaatccctaattccatgtagggaaaactacatggaatttgatatagcagagcttaaaaagacatcagataattacagatgagcatggaaaggtagctaaggcttaagtcatatgattattttatgccaaatttaggagtttcaaatttattcatagggttagtccatggactgactcgctgaaattgtttgcaaaatgttgtggatatattcattttgcaaagggatgggggggaagttgtccatagcttattagatctcaaagttgtccataataaaaaaaaattgttaagaatatttgcagtgaaaagcttaagtagacgcccatactgttcactaattagagtgaagtaaggcattaccatacccatgttttgtattacaagaaatgtgatgtacagaactgtcagtgcgatgaatggaagttgccaggaagacttctgtagcccaaactaaagcacagattcattcattggacatttcactgaacttttcctattccccagatactggtaagcactgatgagacagtgatgaactacaactcctattcggaacaccatttccattccagggctcaacgcttctttaagggaagacagacatgaaatcagggtaatctccaaaaacgaaatgggaccccgtaccaacctcctggagttatttggcggtgggtaaggaaaaaaagatttagggatgggattt

SEQ ID NO: 42159 - DNA, 829 bp, Macaca Mulatta
gggggatggccatttgatctctaagaggaattttgtacactccacagaactcctatctatagtaaaattgattttcagttttaaatgtgggcgaaaagtcattttctccaagattttaaaacgtaattcttatttttaaatggtttaccaaaatttgtcagtacattttacagtgtagaagcattttaaaaatcatttctagcaagcacttgacatctagtcagctctctactcctcctttattttgtttttttcaaaagattaagagctcttttctttgaataaaataatttctcataattaagcagtagaagatctatctttacaaagtatgagggatgccagatgttgataaacttactctttcttaatctggacaaagtaaaacttaacagatttttctgatgagcatgttttatgaatcctccattgtgctccattctatcacatgtgcgtttttcatgttaaactgcaattacctgctcattacttaaatctctttcccctagtccttctaaatttaattttgctgaaagttgggagtggtagtcctttttccccctttaaggctatggcatttaatcggaagcttttctttttcaaccatggacttttaataatggtctaaggtaaaacaaatatttgctgactttccccacaatcgttgtgcctatgcacggcagttcacctttggcgcctttccctttccgccgacccgaaagtaaaaaaggcttggggtcaatacttaaccaggggtgtaaggttgtaaaaaagggcggtgggtgatggttgtcttcttgtggggtaagaccttctcaagaaagtttac

SEQ ID NO: 42160 - DNA, 940 bp, Macaca Mulatta
  misc_feature (1)...(940): n = A,T,C or G
ggccattacggccggggtaatggacgttaatactgctttacaagaggtgctgaagaccgccctcatccacgatggcctagcacgtggaattcgcgaagctgccaaagccttaaacaagcgccaggcccatctttgtgtgcttgcatccnnctgtgatgagcctatgtatgtcangttggngaaggccctttgtgctgaacatcagatcaacctanttaaggttgntgacgacaagnagcttnggaaaatnggtagngcctctgtanagttgacggnagagggnaaaaccccggtnnagtgattgngntggcagaatggtgtantnatatgaggaactntgaaaaanggaagtctccnnncgcgnnnnnangntntgcgnngaaagggccntangggatggaaataaaatgaaannnnaggtgggagtcctgtgnnnttacggaggngaaacagaacaaaggggatcagacagagacgagcaaaacggatgcggcgcccacgcccgtnaggcccccttcgagaaagaagcctttaactcngaggaacacagcagctcttanattggaancggagaaccgaagaagcccaaaagagcaaatgaaaagatgggnaacangtganaggcatcaagaggggtgatattgcctngagagaagaaattcaagaaagggaccgagaagaactggcaagagagaagagtgtgcttccngangaattgnagcaaaagcacccaganaancggtcgatagccaagcctgatactnagataaaaatttctgncaagagtgagaaattcaaggcaacactagcagcgatgcgaagcacagaatcacacagagtganacgaccagacgatataacatcgaacgaagcatattatncccccccgnngcnagcgcaactctaaaaagatgtatanggcgcgatataaacctggaaa

SEQ ID NO: 42161 - DNA, 256 bp, Macaca Mulatta
attcagagagagcaaatgcggccagcattatcttcatgggtttgtttttctcgtttgaatatgaaaattcccctaacagcttctatgttctcctttagaatacttaccaaaagaagcccggcaaaaacagacattcatcacgtggactcaaaaaaacaaactagtgcaagcctttgagaggaacccattccctgatattgctaccaggaaaaaactgactgaacaaacaggcctgcaggaatcaagaattcaagta

SEQ ID NO: 42162 - DNA, 1185 bp, Macaca Mulatta
  misc_feature (1)...(1185): n = A,T,C or G
ggaggtaaaaaaaaatattttaaagctatatccaggtcttactccaagagattctgatttctttgtccataaatgggaccagacttggcattgttaaaaacaacacacactgacaactccccaggtgattctgatgtgtgtacatggtgaaaatgtgtatggaatggctttcactcccacttcccaatgtaaagaaaatgcctctctaaaatctttgagatacaattacccagtatggcaatgcttgttgatcaggctccagtgccaatagtttctctctcatacctaggcgctcaccctactgtctgatgatctacgaggtcatccaccatgccttagccttatcatcggacccgcttgtctgcgaccgctattgagactcgagcattcatgtgaacatcgagacacatggtacaatcagcanactcaccccactcggtnaccagtgtcaatcgtaggacntgagctgaaaaccggaggggnnnnnttcnnnnnnnnnnnnnnnnnnnnnnnnnnnnnnnnnannnannnnnnnanncannnnnnnatnnntnactatttanacaaanaaaaaaataatnaatccatatatcttactcattcatatacttacttacatataatactaatactcttnctttaatatacantcaacacacccaatcctcaactcaccactactaatcctacntaccatactacattccacattatntaatacccaacacttacacccaccacttttaccacactccccataatacatttctttnaanttaatnatacaattttataatcctcatttacccttaattccttcatgaatccaancctcaccancctccctacaactccgttataattcttatctcttttatatactactattatcctatccaaatatctttaaaactatattaccttcctctataatcctccatttctaccttcanctattttcattctctttccctcttttcgaactattattatatacttntttctcattatttattaattactccattaatcatcatgcattatattcttntcaacccgtatcttgtctttgtnatctcananantactctnnataatttgcnncgcactaacacgtctnccctgctttcccganatgtctctatcatcatataatccgcatgctcgcagtgtatcggtgcggtg

SEQ ID NO: 42163 - DNA, 765 bp, Macaca Mulatta
gggaaaatccggaggagattgcacaagctccctcagtctcccatgcctgtgtctaacgcccctcacggtcagtaagtttcctctgatgcctgacccaaatgccttttgttaaagtttaaatccatttcctttggagattttattttgtgttgtacacttatgctctaacttggcacagtgcttgacacataggtgctcactgagtaaatgttttgttgaatgaatgtatggtgcttggaagagaaagtaactcttagagacagttgagagttgtatttcatcctgtttattctgggtgagggaagacagtcttagagttggaagagaggtaatccgcctcagcctcccaggataaaggaacttccttttgaaataccctggatggctactctctgcttgaatgttttgagtggagggcactctgtgtctgacagggtgattataagccaggatgtgcctacctgtaatgctcagatttgccccagagtcagggtgctccctggcatagttgctcctcttactcttagacccgccagctgattttctccagataggaacagggctaggagaaacctttctgagaaatccacctcttctgatttcagatgattctctaggtggagaagaacttcccatctttaaagttcttaaagaagacgtatttgttgtatactaatcctccagcacctgctcccactctttattataaaatgtcacatccaaagaacagatgctgtcattgatgcctgatgagccagtagttta

SEQ ID NO: 42164 - DNA, 292 bp, Macaca Mulatta
atgtctctagtgatccctgcaaagttccagcatattttgcgagtactcaacaccaacatcgatgggcggcagaaaatagcctttgccaccactgccattaagggtgtgggccaaagatatgtttgtgcggtgttgaggaaagcagacattgacctcaccaagagggcaggagaactcacggaggatgaggtggaaagtgtgatcaccgttacggagaatccacgccagtacaagatcccagactggttcctaaacagacagaaggatgtaaaggatggaaaatatagccagg

SEQ ID NO: 42165 - DNA, 2975 bp, Macaca Mulatta
  misc_feature (1)...(2975): n = A,T,C or G
gctccctgcagagttaggcttgctgaggggcaggcgcaggagtcctggctgagctcatgacctgaggctgccgagcggnnnnnnnnnnggttgcaatggcggaggcagaggcaggggtggcagtggaggtccgtggactgcctcctgccgtgcccgacgagctgctcacactctactttgaaaaccgccgacgctctggaggggggcctgtgttgagctggcagagactgggctgcgggggcatcctcaccttcagagagcctnnnnnnnnnnnnnnnnnnnnnnnnnnnnnnnnnnnnnnnnnnnnnnnnnnnnnnnnnnnnnnnnnnnnnnnnnnnnnnnnnnnnnnnnnnnnnnnnnnnnnnnnnnnnnnnnnnnnnnnnnnnnnnnnnnnnnnnnnnnnnnnnnnnnnnnnnnnnnnnnnnnnnnnnnnnnnnnnnnnnnnnnnnnnnnnnnnnnnnnnnnnnnnnnnnnnnnnnnnnnnnnnnnnnnnnnnnnnnnnnnnnnnnnnnnnnnnnnnnnnnnnnnnnnnnnnnnnnnnnnnnnnnnnnnnnnnnnnnnnnnnnnnnnnnnnnnnnnnnnnnnnnnnnnnnnnnnnnnnnnnnnnnnnnnnnnnnnnnnnnnnnnnnnnnnnnnnnnnnnnnnnnnnnnnnnnnnnnnnnnnnnnnnnnnnnnnnnnnnnnnnnnnnnnnnnnnnnnnnnnnnnnnnnnnnnnnnnnnnnnnnnnnnnnnnnnnnnnnnnnnnnnnnnnnnnnnnnnnnnnnnnnnnnnnnnnnnnnnnnnnnnnnnnnnnnnnnnnnnnnnnnnnnnnnnnnnnnnnnnnnnnnnnnnnnnnnnnnnnnnnnnnnnnnnnnnnnnnnnnnnnnnnnnnnnnnnnnnnnnnnnnnnnnnnnnnnnnnnnnnnnnnnnnnnnnnnnnnnnnnnnnnnnnnnnnnnnnnnnnnnnnnnnnnnnnnnnnnnnnnnnnnnnnnnnnnnnnnnnnnnnnnnnnnnnnnnnnnnnnnnnnnnnnnnnnnnnnnnnnnnnnnnnnnnnnnnnnnnnnnnnnnnnnnnnnnnnnnnnnnnnnnnnnnnnnnnnnnnnnnnnnnnnnnnnnnnnnnnnnnnnnnnnnnnnnnnnnnnnnnnnnnnnnnnnnnnnnnnnnnnnnnnnnnnnnnnnnnnnnnnnnnnnnnnnnnnnnnnnnnnnnnnnnnnnnnnnnnnnnnnnnnnnnnnnnnnnnnnnnnnnnnnnnnnnnnnnnnnnnnnnnnnnnnnnnnnnnnnnnnnnnnnnnnnnnnnnnnnnnnnnnnnnnnnnnnnnnnnnnnnnnnnnnnnnnnnnnnnnnnnnnnnnnnnnnnnnnnnnnnnnnnnnnnnnnnnnnnnnnnnnnnnnnnnnnnnnnnnnnnnnnnnnnnnnnnnnnnnnnnnnnnnnnnnnnnnnnnnnnnnnnnnnnnnnnnnnnnnnnnnnnnnnnnnnnnnnnnnnnnnnnnnnnnnnnnnnnnnnnnnnnnnnnnnnnnnnnnnnnnnnnnnnnnnnnnnnnnnnnnnnnnnnnnnnnnnnnnnnnnnnnnnnnnnnnnnnnnnnnnnnnnnnnnnnnnnnnnnnnnnnnnnnnnnnnnnnnnnnnnnnnnnnnnnnnnnnnnnnnnnnnnnnnnnnnnnnnnnnnnnnnnnnnnnnnnnnnnnnnnnnnnnnnnnnnnnnnnnnnnnnnnnnnnnnnnnnnnnnnnnnnnnnnnnnnnnnnnnnnnnnnnnnnnnnnnnnnnnnnnnnnnnnnnnnnnnnnnnnnnnnnnnnnnnnnnnnnnnnnnnnnnnnnnnnnnnnnnnnnnnnnnnnnnnnnnnnnnnnnnnnnnnnnnnnnnnnnnnnnnnnnnnnnnnnnnnnnnnnnnnnnnnnnnnnnnnnnnnnnnnnnnnnnnnnnnnnnnnnnnnnnnnnnnnnnnnnnnnnnnnnnnnnnnnnnnnnnnnnnnnnnnnnnnnnnnnnnnnnnnnnnnnnnnnnnnnnnnnnnnnnnnnnnnnnnnnnnnnnnnnnnnnnnnnnnnnnnnnnnnnnnnnnnnnnnnnnnnnnnnnnnnnnnnnnnnnnnnnnnnnnnnnnnnnnnnnnnnnnnnnnnnnnnnnnnnnnnnnnnnnnnnnnnnnnnnnnnnnnnnnnnnnnnnnnnnnnnnnnnnnnnnnnnnnnnnnnnnnnnnnnnnnnnnnnnnnnnnnnnnnnnnnnnnnnnnnnnnnnnnnnnnnnnnnnnnnnnnnnnnnnnnnnnnnnnnnnnnnnnnnnnnnnnnnnnnnnnnnnnnnnnnnnnnnnnnnnnnnnnnnnnnnnnnnnnnnnnnnnnnnnnnnnnnnnnnnnnnnnnnnnnnnnnnnnnnnnnnnnnnnnnnnnnnnnnnnnnnnnnnnnnnnnnnnnnnnnnnnnnnnnnnnnnnnnnnnnnnnnnnnnnnnnnnnnnnnnnnnnnnnnnnnnnnnnnnnnnnnnnnnnnnnnnnnnnnnnnnnnnnnnnnnnnnnnnnnnnnnnnnnnnnnnnnnnnnnnnnnnnnnnnnnnnnnnnnnnnnnnnnnnnnnnnnnnnnnnnnnnnnnnnnnnnnnnnnnnnnnnnnnnnnnnnnnnnnnnnnnnnnnnnnnnnnnnnnnnnnnnnnnnnnnnnnnnnnnnnnnnnnnnnnnnnnnnnnnnnnnnnnnagcgggtgtcgcacccgctgctgcagcagcagtatgagctgtaccgggagcgcctgctgcagcgatgcgagcggcgcccggtggagcaggtgctgtaccatggcacgacagcgccggcagtgcctgacatctgcgcccacggcttcaaccgcagcttctgcggccgcaacgngccacggtctacgggaagggcgtgtatttcgccaagcgcgcctccctgtcggtgcaggaccgctactcgccccccaacgccgatggccacaaggcggtgttcgtggcacgagtgctgactggcgactacgggcagggccgccgcggtctgcgggcgccc

SEQ ID NO: 42166 - DNA, 585 bp, Macaca Mulatta
  misc_feature (1)...(585): n = A,T,C or G
gggagattacaggcgtgtgccactgcgcccggctggtatttatgactttttaaagctcgtttgttccctaatatatgcaataatttagatgacctagtccactactttataatgaaaccttgacttactgctttgtagcatgaacttagaaattattttggaaataagtagttggaaaaatacatgcaaatatttatttgagtgcctactgtgtaccttactctatgccaagtggatacagatgtctggaagtttgttttcctacttctgctgtaaagcgagcccttcaccaaactttacctattcatttatcccctaaaatggctntgtttgtttctttcttnccatgtgtgctgcataaagggaaacatttacaaatgaaagtgtatttgtatctttataatattctgatttcaaagtccgaaatttgtttannnnnnnnnnnnnnnnnnnnnnnnntgnnnnnnnnnnnnntaacctttaagggaaatttttctttttcgaccccaattattttccctccaatcccaaaatggttcattctaattcgaaaaagaaggccctttggctttaagaaagtttttt

SEQ ID NO: 42167 - DNA, 811 bp, Macaca Mulatta
  misc_feature (1)...(811): n = A,T,C or G
gggcaccactgaggaaactgagatgggaggatcgnnnnnnnnnnnnnnnnnnnnnnnnnnnnnnnnnaagattnnnnnnnnnnnnnnnnnnnnnagtgacagagaaagacccnnnnnnnnnnnnnnnnnnnnnnnnncaaaacctttctttaggttcctgaaaaatcaagtgaataaaataccaccaggaaaaactgtttctgctatatttctttgcttttctatctccttaaactcctcagccaattagctaaggnnnnnnnnnnnnnnnnnnnaagggatacatcagtacttactaattttttttaattttgcttatcataaatgcagatcatattatagtagctttggcaaaatctgctttccaatataacatcattttttttacttgaattcgaatggcccttaactttaatctacatttgggcggggctggttagcctctcccaactgtctgtttcctcagattcatctcctatatgaagaaaaataccattttaagacccatctgaactgcccaggtatagttgagtttgtatgttcacatttattttaaaattataagtggtgtatcttatctgttgtcatgaaaagaaacaaatattttggcttttatatcctgactgatgaatgtggtggtaatgttaacctgtatgatttgtgccaatacagagtttggaaataccaaaggtgtaacagttaaaagatccgaaattttttgaaaaattttgaaaaaattaataggttttttctccaatcctataatttcccaggggcttaattattaattccaagggaattccggggaatc

SEQ ID NO: 42168 - DNA, 480 bp, Macaca Mulatta
atttcaggccccggacaggaggcagtgccgcttcggccgaaggcctgagcgcccgaggcctctgggatggtgtgggaccggcaaaccagggagggagtatgagtggaaacctgacgagcaagggcttcagcaaatcttgcagctgttgaaggagtcccagtccccagacaccaccatccagagaaccgtgcaacaaaaactggaacaacttaatcaatatccagactttaacaactacttgatttttgttcttacaaaattaaaatctgaagatgaacccacaagatcattgagtggtctcatcttgaagaataatgtgaaagcacactttcagaacttcccaaatggtgtaacagactttattaaaagtgaatgtttaaataatatcggtgactcctctcctctgattagagccactgttggtatttcgatcacaactaatagcctccaagggagaattgcagaattggcctgaactct

SEQ ID NO: 42169 - DNA, 752 bp, Macaca Mulatta
  misc_feature (1)...(752): n = A,T,C or G
ggggagtgatctggatcagatctttcagatccatgagagaaaagcaaaggagacttggaagagctgtccccctgacaccacctggtctgtgtgtcagtgtccagcttctccatgactctctggggagccaactgctgtcctaactgcttctaccctcaatccagacaaagcctctaagtccttttgtcacctcctgacccaactccgatcactccatctcatggcccagtatgtactaatcctcaggtcatctctattcagaagtcttgctttctgtgtctggccacttagcccttgtgctgttccctccaacccccagaagccagttgcagttttaactttgccctgtttctacccctagcccaaataaagcctgtgaactactgaacagaggtgacctgaggaggccaagggttagtgcccactctgtcccagggggctactgtagttaaggaagatgccacacacaagaagatgcttgtgcactcatgacccaatctctcagtcttgtctttcccaaaccatctgtcagcactctccactgctgtgtgcacccagaaatgtgcacaggtaagctctctgtcagacaggcactctgagtaaagggaagctcagagtgggcacaacaaaccccgcagacccagagcttgggggggctccacgggagagggaagttagatgggaaacgtcagtatgttgatacccaggtggaagaattttagaatccnggaaagggaattacctggctgccc

SEQ ID NO: 42170 - DNA, 766 bp, Macaca Mulatta
  misc_feature (1)...(766): n = A,T,C or G
ggcgtggtggcaggtgcctgtaatcccagttacctgggtnnnnnnnnnnnnnnnnnnnnnnnnnnctggaaggaggttgtagtgagccgagatcgcgccactgtactccagcgtgggcaatagagtgagagtctgtctcaacaaaaacaggccatctcatcctccaggaacagctatgaatgactgtaactgttcaaagaaatccaagtttttcttacattttttttaaaaaatgcatttttggtaaaataatttaaacaatttaaatttgtaaggtagtaaaaattccatcagccagagataatcatctttaatatttaaacaactttccagatatgtatagatatctgtacacatacatacccgcatgcatatgttgctgtatgacatcaatttaaaacgatcatacaacaccagctgttccataactgctttttttccacaaatacttggcccattttcaaggagatgcatacggtcagttcataagtgatgcaacagcacacagaataaaaaatatcatctggaagctaaacagtttaaatgtgggagctctgcaactccccagctgggtggccttggggcatcatttggcccctctgagtctcagtcaccacattctgtaaagtgggagaagatcacttgcaccctcaaaagcttgttacaaaaattaccaggtgcccctttaaagtctccaattttcatttccaatgtccctcccctggcttaggaaaaggaggaaatgatccgaatccttaaaacttca

SEQ ID NO: 42171 - DNA, 1083 bp, Macaca Mulatta
  misc_feature (1)...(1083): n = A,T,C or G
ggggaattcaagagtgagccagttgtagaagaaaacagctttattgaagtggtgacgatgttacagctctgactgctcccgcagagcaggactactccatataggcagtgtgctgacagcagcagcttaggggcaggtctgcagtcgtatttatacctgcttttaatgacatgctaattaaaagatggatgattcacaattcgccagaaaatggactgtcgcttccaggtgttgccatggggatggtaaactgtcttggtgccggtgggtgtgtcttatggagaggtgctttccatgcctcttcccagtttcggtcagtcttcagtctggtccagagtccagtcctgtctttcacctacctcatttataccctatgagaaatccgttggttttccatgggtgagaagccggagaactcattgtttaaaggggctgaagtaaaacagcagggtgttgttcaggggaaagggaagtcaattagaaaatagaaattgggaacctaaaaggtgggttaaagaaaagggtccaatcttagaaatggggctggcggatttctataacataggtggtgggggtaaaataaatagatttgggaagtgaaaagaccgaggtgaaaagaggaagaggggaaaaaatatacctcaattgtttnnnnnnnnnnnnnnnnnnnggctttttaaagccgctccttgagctataagtatttgggaggaaaaaaggggaaaagaggggagtaaaaccaagtctgggggagaaaatattttttacagagaaaatttcttccctcgggggtacaaaatttggaggcaaaaaaaaggtgtggtaacccaattttctaaggcccaacataaatataggggccaaagtaacaatttgtgtggtgggtatttctccccccgtggggggctggtttctcgtgatataaagcccgctccgcgagatgcgacactagagaaaaaataaggggtagggcataatatacaactccggctgctagcgggagcctgataaaaataactcgaataactccccatagtatatgtataccccactagaacagattcgtcgaggagacggatacag

SEQ ID NO: 42172 - DNA, 826 bp, Macaca Mulatta
  misc_feature (1)...(826): n = A,T,C or G
gggtgatccgcccgtnnnnnnnnnnnnnnnnnnnnnnnnnnnnnnnnnnnnnnnntgcgcctggcactttgttcctttttattgctgtctagtattccattttatgaatgcaccacattctgtttattctcctgttgattgatatctgattatttctagtttggggctgttatgaatagagctgctataggtaattgtataaaactcttttgtagatatgtctttttatatcttttggattaatatttaatacttagaattacaggtaggatttgtctaactttatgagacatttccagatcagtttccaaagtaactgtactattttatactctcactagcaatgtgtgagtgttctagttactctatattctttccaacatttgatgttgtcagtctgtaatattaaccattctagtggctgcatagtggtatcttcttattttttaacttatacctccccttatccctaatgaattgggcactttttcatatgctttttgcctattgcaattttctctttaggtatgtgatgcatttctatttttgtacaacgtggtaaggtatgcatcctccccttgaattttcagaaatgtacattctcctgaaaaaaagaaattgggaacccatggatccattttgaaaaatacctttttttcggttggaaaaaaatgtcccccctttggctgaagaaaaccgataaaggggggcgggcttttccctgttttgggggcaaggggaatattttggggaaaatcccggtatctttcacagggcatggggggggggaaaccccaaaggtgctnnnnnnnnnnnnnnnnnnntt

SEQ ID NO: 42173 - DNA, 295 bp, Macaca Mulatta
  misc_feature (1)...(295): n = A,T,C or G
ggggttatcttttcatgctaactcatagggcccacgtgccagttcaggggagtgagtatgaaacgtggcaatggagagtcagcttgcgaccccagcaagcttgttctctgcagactcaacttggccatattggttccagccaatttcagctggttcttttatcccataagggaaggaagtttcagtattttatcaagtagtttcttatctgctaccctgcaaactcaaaaaaaggcaaaaattaaaggaattctgtgactgtnnnnnnnnnnnnnnnnnnnnnnnnnnnnnnnnn

SEQ ID NO: 42174 - DNA, 773 bp, Macaca Mulatta
ggcagatggaattattcagactgaatttgttcatgtggctatattcacttactatacatttttatgtaataggcactctacccagagttggagataaagataaaataatatatactttctacctttaaaggagcttgcaacctcatggatttaatcaaagaacaggttacaaccattgcaagttaagttcaactttattcagagagaaatattcttcctaaagccaatttcagaattccttattccaatcttttctccacagagactctatggtgatggcaggagttgtgcagtacatttatttgtttccccacagagatctttttttgaaaaatctactgagttctgccagaagaaactcatgacatgttgtaagtttaattatgttcaattcattaacacaattagagctgtgaacaaatttattgacactgccagaatcacttagtaacaggcagtaagtcatagattaaaaaactcattcttgtaggcctctaaactctgggaatgagaaatggcaaattcatctttagttctctgaaacagttctaagagacctgaccagaggttgccactaataatttattgcaggaaccgttcatattttaagaatggttcttatgtcccttgggacataaattgaattcccctttgaatactacttttcatttttacataaataagtgatccaaacagggagatttgatgcaatatgggattgaattttaagctgacctgcattggccctctcttgcaaaccaggggatggaaaa

SEQ ID NO: 42175 - DNA, 550 bp, Macaca Mulatta
ttgctgctgtctgccagggccaccttcaacacctgtcttcttgtttcaaacacgtactttctaataagctcttactaaatctatcttaatcaactctggcatccatccagtcctctgcacatttttgagccagagacaaccaagaaaaccttcttcagctcatactgttaagtttcatcccactctagaattgaccttgtgagtctggttttaatatagaaactgttttgtagttgatcgcagcatcctcagactgcacagaaccctgaagcccatcttcctctgtaccggccagttccctgccagctcccaggtggccaggtctgctctcaccctgtgggaggagggccactcagacccctgggaacccagttggcttggagcagctgtctgggcaggaaggttgcacagtggtgcgtcaaccaccactgtacgtccaccaccgggaaatgatgaaggtctaaaatctgcctgtatctgtatctgagttatggagaagttgcttttcctcctctgtactcattctgactgagtttggatctgtttgcag

SEQ ID NO: 42176 - DNA, 755 bp, Macaca Mulatta
gggaggtagagtggcagacgatggtacggtagcctgaggtctccttacctgcctcttctggcatggaaccacgccttcaggaaccagaggaagggctcttttctcagtattctcaaaatatcatacccaaggtagagtctccattccataagtggaagttgggcaaggaagggtcttcccacgtttcagctgcactcaactgggacttggcctcagcaacaggcagcagggacaggatgagaaaactaaagtcctgctcctgtacctcactgggagctaggtgttcttgactgcaggaatctggagtagatgctcagtccaccctcactgagctgggagaaaggagggagggaccagtcttggttcaaataccagactctcttccctctcttaccaaatttttgtagatattcctgaatagatgtttcttttgccatttgctctcagggccattactagagactttaaatgtatgtgtgcacatgtgcatgtgtgtgtttgtgtgttttaataatttttaccagtttcactcagtgaaactcatactatcataccacaagtcccgaatctcaatgcaaatatatattaggttggtgcaaaagtaattgtggctttttgcattacagttaatgctgtttcctagaaatgtaagaaacataggaacagagctgttcctagaaatgtatgcagcccattatatatgaaaggaaaaaaattgagcatttaatccctgattctttgaattctactagaat

SEQ ID NO: 42177 - DNA, 369 bp, Macaca Mulatta
  misc_feature (1)...(369): n = A,T,C or G
actttaaagaatcctgtcagaagttctatcaggcagagctggaggagctgtcctttgctgaagacacggaagagtgcaggaaacatannnnnnnnnnnnnnnnnnnnnnnnnnnnggtaagatttcagaggtactggatgctgggacagtcggtcccctgacaaagctggtccttgtgaatgccatctatttcaagggaaagtggaatgagcaatttgacagaaagtacacaagggggatgctctttaaaaccaannnagaaaaccaaggccataaaaccaattctacacctgggcaacttttcagagtttgtactgtacctcttttctaaccagatccttcagcccaagggcctgaatatttacctta

SEQ ID NO: 42178 - DNA, 822 bp, Macaca Mulatta
ggtgctagggagggcggcagcagcatgtcgtggtcactcaatttgctaatcaagagagaacccctgaaggagtatttaggaaacatggggggtactatatatttttgtaaatagaaacttgtttcctgttaataattaaaccatttttctgatagcagaaacatcagcacaggcatactttatccatttatggttggttaacacacagaacctcttctactgagtagggttaataatacttagtatgtgcctagcattcagcactcgcaacagccttgtgaaataggactatttttattcccattttacagataaggaaacagagaccagaggtgcaataactttcttaaaacgactagaatgagcaagtgacagctaggactcgaacacaggctgttggccttcagaatctaggctcctaacaccagacaccaaagccaagtcagtgccaaagttattccatacaaatgatacttgttttctcgccttttcaatgttcatattatctctgctcttattttcatcttaattgtacacctccccttacatgtttttgcaagtatctcacttttgcaaagtggaaactgatactttactaaaccctcctcaaaaaaagcatggaacaggcccccagagtgattgatgcccccaaaacttaaaatgaaccacaggcaacccagtggcccatgcccaaatgaagtttttgggaagccttgaggtttttggggcctttggtcccataagaaacccttttttaaagtttggaggagcccttaataaaaataagaagggggtttccctaagaaattccctgcggcaata

SEQ ID NO: 42179 - DNA, 717 bp, Macaca Mulatta
  misc_feature (1)...(717): n = A,T,C or G
ctgccaaagctgagagggagcaacttgggaagcattttgctcactgtcctacccaagttttaatagcataatagttgatgccaaaggagatggtgacgtcccttccactgcagttgctgtcacaaccttgatgtctttaagctaatggccatttgcatctgtgtcttcaaacagatcctggttacagccattttctatcgttcacttctggggttaagtaatgcagggttctgcaaacaaggtgtcgctgtccaaatgtactgtactggcatagagagcactgctttgttttccactgttgtagagaaaactagggagaactttatttttcaataaacttttcttgtnnnnnnnnnnnnnnnnnnnnnnnnnnnnnnnnnnnnnnnnnnnnnnnnnnnnnnnnnnnnnnnnnnnnnnnnnnnnnnnnnnnnnnnnnnnnnnnnnnnnnnnnnnnnnnnnnnnnnnnnnnnnnnnnnnnnnnnnnnnnnnnnnnnnnnnnnnnnnnnnnnnnnnnnnnnnnnnnnnnnnnnnnnnnnnnnnnnnnnnnnnnnnnnnnnnnnnnnnnnnnnnnnnnnnnnnnnnnnnnnnnnnnnnnnnnnnnnnnnnnnnnnnnnnnnnnnnnnnnnnnnnnnnnnnnnnnnnnnnnnnnnnnnnnnnnnnnnnnnnnnnnnnnnnnnnnnnnnnnnnnnnnnnnnnnnnnnnnnnnnnnnnnnnnnn

SEQ ID NO: 42180 - DNA, 796 bp, Macaca Mulatta
  misc_feature (1)...(796): n = A,T,C or G
gggttaagcaaagcggccagggtctcatcgtgttgagactcgagtctctcagaccttggattcatcccctggtgtctttgagcctcggtttccacattggtaaaagagaagtgaagcactgtctcacagggtcatcacagagattaaatgaaataacgtagaccaggagggcatggcgtttaaaagtcacagatggggcaccctcgggccatccagcccagtgttttctttagcccctatgatgttcattttttgttatattccattaggtgccaatatttttaaaatgggagatttcacataaaattaaaaggtctgcannnnnnnnnnnnnnnnnnnnnnnnnnnnnnggagtcttactctgtcaccaggctggagtgcagtagcacnnnnnnnnnnnnnnnnnnnnnncgcctcccannnnnnnnnnnnnnnnnnnactcagcctcgcgagtagctggggctacaggcacgtgccaccacnnnnnnnnnnnnnnnnnnnnnnnnnnnnnnnnnnnnnnnnnnnnnnncggccaggatggtctctatctccacctcgtgatccacccacctcggcctcccaaaatgtnnnnnnnnnnnnnnnnnnnnnnnnnnnnnagccaagggctgcattttcttttaaaactcagaacacccagtagtcttaggggccccatcctccgcatggaaacaagctaaattagcatctttcccactgcaatttggggcatgacccaaccctatggttttgccaaactccctccttttttctcctttttatccttaaattggggac

SEQ ID NO: 42181 - DNA, 490 bp, Macaca Mulatta
cagtggcgtttctttaagcatctcctcctccaggaggatagagaaaccccaccccgcggcaagcccaggaccctgaccaccccctgctgcctcctgaaaaccctcccctccgccccgcatggccagagcgctccctccgaccgggctcagacctgtcgatacccttgagcaacttgcccacgttagctctcatctgttcaaacatcgccatgacttctgtcgctttccacaaccagggctggagactaataccggcccggcacggcgtccgcgaggacgggaaaaggaagaggtggtggaaacggaaacgacgtcattgttgtcgctccagctccctgggggcggtgaagggacaggctctcgcagcagccgccacgctttccggctgccacgtgacttcttcctcgcaggggcaattagcgcgtgcgcattcgctccactcaagctggacggacagcgtgagaaaaagcttactgtatcccagtgcgca

SEQ ID NO: 42182 - DNA, 830 bp, Macaca Mulatta
  misc_feature (1)...(830): n = A,T,C or G
ggagtggtgggtggctcatnnnnnnnnnnnnnnnnnnnnnnnnnaccgaggcaggcagatccannnnnnnnnnnnnnnnnnaaccagcctgannnnnnnnnnnnnnnnnnnnnnnnnnnnnnnnnnnnnnnnnntggtgggcatggtggtgtgtgcctgtaatcccatctactcggaaggctaagacnnnnnnnnnnnnnnnnnntggaaggcagaggttggagtgagtcgagattgtaccactcnnnnnnnnnnnnnnnnnnggagagnnnnnnnnnnnnnnnnnnnnnnnnnnnnnnngttggtatgttaacatactaaccttgtccctccccgatgcttataatagaatagctacttttctctttaatatattcacagtttgtaggatgaccaccactatcttaaatttttttactgccaatgaagtagactatacatgacatgaaacataaaaagcagaaaccactactgacttgatcatttttaccatcttgaatttgagaaccacaccatcaaatccaatctattttagcacaatgccctcaaaagtgttggaaatcaaaagtcagcggggcttgaaaatttgccagtgttgccatggaaataaaaagggaacccccaaaattttaaggccattttatttggcttcccttcatcaataaaaagccttttctattaaaaaaaaaattgcccagctgtggaccaaaacataaggggcccagtaaatggaacctgtattaccacatttctgggggctaaaatttcccaatcctcacctccaaacattaatttttgccaaaacgtggcggttccaatcccacagggcc

SEQ ID NO: 42183 - DNA, 1383 bp, Macaca Mulatta
  misc_feature (1)...(1383): n = A,T,C or G
acgtgctacctcaaggctccacctggccacacggcaggcactgaggctgggaggcagcccccagacagatgagtgtccgctcctctctgagaggtgaatgagcccgaggggtcccgacctacagagtcgtgaggagcagcggcgccaacgacgcaggcccnnnnnnnnnnnnnnnnnnnnnnnnnnnnnnnnnnnnnnnnnnnnnnnnnnnnnnnnnnnnnnnnnnnnnnnnnnnnnnnnnnnnnnnnnnnnnnnnnnnnnnnnnnnnnnnnnnnnnnnnnnnnnnnnnnnnnnnnnnnnnnnnnnnnnnnnnnnnnnnnnnnnnnnnnnnnnnnnnnnnnnnnnnnnnnnnnnnnnnnnnnnnnnnnnnnnnnnnnnnnnnnnnnnnnnnnnnnnnnnnnnnnnnnnnnnnnnnnnnnnnnnnnnnnnnnnnnnnnnnnnnnnnnnnnnnnnnnnnnnnnnnnnnnnnnnnnnnnnnnnnnnnnnnnnnnnnnnnnnnnnnnnnnnnnnnnnnnnnnnnnnnnnnnnnnnnnnnnnnnnnnnnnnnnnncagcacccagggcagcagcagcagcgcacacccgccgcccagcggtcacacggcctggcctccggagagacggtgggcgtcccgcaaggtctgggcagccccggcctgatccgcagcatgctgctctccaacccgcacgatctgtcgctgctcaaggaacgcaacccccccttggcggaagccctgctcagcggaagccttgagaccttttctcaggtgctgatggcgcagcaaagggaaaaggccttgagagagcaagagaggcttcatctctacacggccgaccccctggaccgggaagctcaggccaaaatagaagaggaaatccggcagcagaacattgaagaaaacatgaatatagcgatagaagaggcccccgagagtttcggacaagtgacgatgctctatattaactgcaaagtgaatgggcatcctttgaaggcttttgttgattctggcgcccagatgaccattatgagccaggcttgtgccgagcgatgtaacatcatgaggctggtggaccgacggtgggctggggttgctaaaggagtgggcacacagagaattattggccgtgttcatctagctcagattcaaattgaaggtgatttcttacagtgctctttctccatacttgaggatcaacccatggatatgcttctaggcctagatatgctccggagacatcaatgttccatcgatttgaagaaaaatgtgctagtcatcggcaccactggcacgcagacttactttcttcctgagggagagttgcccttatgctctaggatggtaaatgggaaagagtgagtcttcggacaaggaaattacacatt

SEQ ID NO: 42184 - DNA, 3140 bp, Macaca Mulatta
  misc_feature (1)...(3140): n = A,T,C or G
agccacaattacaagttcatccgaaaatgatgaccggagtggctccagtttggaatggaataaagacggaagcctaagattaggggtacagaagggagtgcttcatgaccgcagggcagataactgctccccagtggcagaagaggagaccaccgggtcagcagaaagcacgctgcccaaagcagaatcctcagctggagatggtccggtcccttattctcagggctccagctcgctaataatgccacggcccaactcagttgcagncagcaacaagctcaaccaaactggaagatctgagttatttagacgggcagagaaatgctcctctacggacgtcaattagattaccatggcacaatacggccggaggtagggcacaggaagttaaagnaagcacgatttgctccctacaagccacaagacattttgttgaaacccttgttgtttgaagtaccaagcataacaacagactctgtgtttgtgggacgggattggctctttcaccagatagaagaaaacctgaggaacacagaactggcagaaaacagaggcgcggtggtggttggcaatgtggggtttgggaagacagcaatcatttccaagttggtggccctgagctgccacggaagccgcatgaggcagattgcttccaacagcccgagttcatcacctaaaannnnnnnnnnnnnnnnnnnnnnnnnnnnnnnnnnnnnnnnnnnnnnnnnnnnnnnnnnnnnnnnnnnnnnnnnnnnnnnnnnnnnnnnnnnnnnnnnnnnnnnnnnnnnnnnnnnnnnnnnnnnnnnnnnnnnnnnnnnnnnnnnnnnnnnnnnnnnnnnnnnnnnnnnnnnnnnnnnnnnnnnnnnnnnnnnnnnnnnnnnnnnnnnnnnnnnnnnnnnnnnnnnnnnnnnnnnnnnnnnnnnnnnnnnnnnnnnnnnnnnnnnnnnnnnnnnnnnnnnnnnnnnnnnnnnnnnnnnnnnnnnnnnnnnnnnnnnnnnnnnnnnnnnnnnnnnnnnnnnnnnnnnnnnnnnnnnnnnnnnnnnnnnnnnnnnnnnnnnnnnnnnnnnnnnnnnnnnnnnnnnnnnnnnnnnnnnnnnnnnnnnnnnnnnnnnnnnnnnnnnnnnnnnnnnnnnnnnnnnnnnnnnnnnnnnnnnnnnnnnnnnnnnnnnnnnnnnnnnnnnnnnnnnnnnnnnnnnnnnnnnnnnnnnnnnnnnnnnnnnnnnnnnncaggaaataataagtgcactgccgtttgtcaagctttccttagatgacttcccagacaacaaagacatccacagcgacctgcatgcctatgtccagcacagggtgcacagcagccaggacatcctcagcaacatctccctgaacggcaaggctgatgccacgctcattggaaaagtgagcagccacctggtgctgcggagcctgggctcttacctgtacctcaagctcaccctggacctcttccagaggggccacttggtcattaagagcgccagctacaaggtggtgcctgtgtctctttctgagctctatttgctgcagtgcaacatgaagttcatgacccagtccgcctttgagagggcacttccgattctcaacgtggccctcgcatccctccaccccatgacagacgagcagatctttcaggctattaatgccggccacatccagggggagcagggatgggaagactttcagcagaggatggacgccctctcctgcttcctcattaagaggcgagacaaaacccgcatgttctgccacccatccttcagggagtggcttgtttggagagcagacggggaaaacacagccttcctgtgtgagcccaggnnnnnnnnnnnnnnnnnnnnnnnnnnnnnnnnnnnnnnnnnnnnnnnnnnnnnnnnnnnnnnnnnnnnnnnnnnnnnnnnnnnnnnnnnnnnnnnnnnnnntttccagggcctcagtaagaagacgggaatttcttcaagccatctccaagccctgtggattggctatagcaccgaggggctgtccgccgccctggcctctctcaggaatctttatactcccaacgtgaaggtgagcnnnnnnnnnnnnnnnnnnnnnnnnnnnnnnnnnnnnnnnnnnnnnnnnnnnnnnnnnnnnnnnnnnnnnnnnnnnnnnnnnnnnnnnnnnnnnnnnnnnnnnnnnnnnnnnnnnnnnnnnnnnnnnnnnnnnnnnnnnnnnnnnnnnnnnnnnnnnnnnnnnnnnnnnnnnnnnnnnnnnnnnnnnnnnnnnnnnnnnnnnnnnnnnnnnnnnnnnnnnnnnnnnnnnnnnnnnnnnnnnnnnnnnnnnnnnnnnnnnnnnnnnnnnnnnnnnnnnnnnnnnnnnnnnnnnnnnnnnnnnnnnnnnnnnnnnnnnnnnnnnnnnnnnnnnnnnnnnnnnnnnnnnnnnnnnnnnnnnnnnnnnnnnnnnnnnnnnnnnnnnnnnnnnnnnnnnnnnnnnnnnnnnnnnnnnnnnnnnnnnnnnnnnnnnnnnnnnnnnnnnnnnnnnnnnnnnnnnnnnnnnnnnnnnnnnnnnnnnnnnnnnnnnnnnnnnnnnnnnnnnnnnnnnnnnnnnnnnnnnnnnnnnnnnnnnnnnnnnnnnnnnnnnnnnnnnnnnnnnnnnnnnnnnnnnnnnnnnnnnnnnnnnnnnnnnnnnnnnnnnnnnnnnnnnnnnnnnnnnnnnnnnnnnnnnnnnnnnnnnnnnnnnnnnnnnnnnnnnnnnnnnnnnnnnnnnnnnnnnnnnnnnnnnnnnnnnnnnnnnnnnnnnnnnnnnnnnnnnnnnnnnnnnnnnnnnnnnnnnnnnnnnnnnnnnnnnnnnnnnnnnnnnnnnnnnnnnnnnnnnnnnnnnnnnnnnnnnnnnnnnnnnnnnnnnnnnnnnnnnnnnnnnnnnnnnnnnnnnnnnnnnnnnnnnnnnnnnnnnnnnnnnnnnnnnnnnnnnnnnnnnnnnnnnnnnnnnnnnnnnnnnnnnnnnnnnnnnnnnnnnnnnnnnnnngtgctgtacctggtggagaagggagccgtgatcgagcatgtggaccacagtgggatgcggcccttggacagagccatcggctgccgaaacacgtccgtagtggtggcgctactcagaaagggagccaaattagg

SEQ ID NO: 42185 - DNA, 183 bp, Macaca Mulatta
aggtcaagctgggctcggcgctagggggcccctacctgggagtccatctgagaagaaaagattttatctggggtcacagagaggatgtgcccagcctggaaggggccgtgaggaagatccgcagcctcatgaagatccaccggctggacaaggtgtttgtggccacagatgccgtcagaaagg

SEQ ID NO: 42186 - DNA, 5103 bp, Macaca Mulatta
  misc_feature (1)...(5103): n = A,T,C or G
gagtgtgcgaccagactgcggcagagaacgagccatgctctctgagtgtagaagctgcattgtgagcacacgtgacgatctgaaggggttaattctcccccgggggctgacttgttccagagaagggcgacaggcctggagagcagtttgatgccttttcctctacgagggctgtgggatttgactcctgtagagctgttgttgtcagtttctctgtgtgatgggggaaacctttgctgaagccttttggaacttttgatggccgatcaaagaggagtgatttgtgaaatcggttatttttcccatctgctggatgtgaacagtaaaacgtttttgcaaaaccaaaatggggagttcatctggcttcaaaacaaggagaccagccctgcaaagcagagttgactttccagtggatccaaaaagtgccgttctgacctcagccaagcattgcaggctgtgaacagcagagtcagctttgaggatcctccagaaccctctggaaggcctatgaggacacttctcaggttttgatacacttgactatccaacatttaactccttgccttgggtctccgagtttaatttcctgctgtgtcatagcaactaaagggaaaggaacnnnnnnnnnnnnnnnnnnnnnnnnnnnnnnnnnnnnnnnnnnnnnnnnnnnnnnnnnnnnnnnnnnnnnnnnnnnnnnnnnnnnnnnnnnnnnnnnnnnnnnnnnnnnnnnnnnnnnnnnnnnnnnnnnnnnnnnnnnnnnnnnnnnnnnnnnnnnnnnnnnnnnnnnnnnnnnnnnnnnnnnnnnnnnnnnnnnnnnnnnnnnnnnnnnnnnnnnnnnnnnnnnnnnnnnnnnnnnnnnnnnnnnnnnnnnnnnnnnnnnnnnnnnnnnnnnnnnnnnnnnnnnnnnnnnnnnnnnnnnnnnnnnnnnnnnnnnnnnnnnnnnnnnnnnnnnnnnnnnnnnnnnnnnnnnnnnnnnnnnnnnnnnnnnnnnnnnnnnnnnnnnnnnnagtcctccactgagctccgccgccacctgcagttcgtggaagaggaagcggagctgctccggaggtccatctccgagatcgaagaccacaaccggcagctgacccacgagctcagcaagtttaagtttgatcctccccgggagccgggctggctcggggagggtgcgagtcctggtgccgggggaggggcacccctgcaggaggagctgaagtcagccaggctgcagatcagcgagctcagcggcaaggtgctcaaactgcagcacgagaaccatgcgctgctgtccaacatccagcgctgcgacctggcagcgcacctggggctgcgtgcccccagtccccgggacagcgatgccgagagcgatgcaggcaagaaggagagtgaaggggaggagagccgcctgccccagcccaagcgggaaggccctgttggcggggagagtgactcggaggagatgttcgagaagacgtcgggcttcgggagcgggaagccatcggaggccagcgagccgtgcgccacggagctcctgaaggcccgggaggactccgagtgcctagtgaccctaaaacacgaggcccagcggctagagcggacggtggagcacctcatcgcggacaccgacagcttcctccgtgacgcggggctgcaggggggtgcaccctcgccggggcctggcctccagggtgaagaggagcggggcgagggggaccagcaggagcctcacctgctggggaccatcaacgccaagatgaagtagttcaagaaagagcttcaggccttcctggagcaggtgaaccgcattggggatggcctatcccccttgccccaaagcacagagtcctctagcttcctctccactnnnnnnnnnnnnnnnnnnnnnnnnnnnnnnnnnnnnnnnnnnnnnnnnnnnnnnnnnnnnnnnnnnnnnnnnnnnnnnnnnnnnnnnnnnnnnnnnnnnnnntccagactgagagagcagctagagtggcagctggggccggcccgaggggacgagcgggagagcctgcgcctccgaactgcacgggagctgcaccgccgcgcagacggggacgccgggagccatgggctgggaggccagacctgcttcagtctggagnnnnnnnnnnnnnnnnnnnnnnnnnnnnnnnnnnnnnnnnnnnnnnnnnnnnnnnnnnnnnnnnnnnnnnnnnnnnnnnnnnnnnnnnnnnnnnnnnnnnnnnnnnnnnnnnnnnnnnnnnnnnnnnnnnnnnnnnnnnnnnnnnnnnnnnnnnnnnnnnnnnnnnnnnnnnnnnnnnnnnnnnnnnnnnnnnnnnnnnnnnnnnnnnnnnnnnnnnnnnnnnnnnnnnnnnnnnnnnnnnnnnnnnnnnnnnnnnnnnnnnnnnnnnnnnnnnnnnnnnnnnnnnnnnnnnnnnnnnnnnnnnnnnnnnnnnnnnnnnnnnnnnnnnnnnnnnnnnnnnnnnnnnnnnnnnnnnnnnnnnnnnnnnnnnnnnnnnnnnnnnnnnnnnnnnnnnnnnnnnnnnnnnnnnnnnnnnnnnnnnnnnnnnnnnnnnnnnnnnnnnnnnnnnnnnnnnnnnnnnnnnnnnnnnnnnnnnnnnnnnnnnnnnnnnnnnnnnnnnnnagcgtgcccgactgtgcctgcagcagcagtatgccagcgacaaggcggcctgggacgtggagtgggccgtgctcaagtgccgtctggaacagnnnnnnnnnnnnnnnnnnnnnnnnnnnnnnnnnnnnnnnnnnnnnnnnnnnnnnnnnnnnnnnnnnnnnnnnnnnnnnnnnnnnnnnnnnnnnnnnnnnnnnnnnnnnnnnnnnnnnnnnnnnnnnnnnnnnnnnnnnnnnnnnnnnnnnnnnnnnnnnnnnnnnnnnnnnnnnnnnnnnnnnnnnnnnnnnnnnnnnnnnnnnnnnnnnnnnnnnnnnnnnnnnnnnnnnnnnnnnnnnnnnnnnnnnnnnnnnnnnnnnnnnnnnnnnnnnnnnnnnnnnnnnnnnnnnnnnnnnnnnnnnnnnnnnnnnnnnnnnnnnnnnnnnnnnnnnnnnnnnnnnnnnnnnnnnnnnnnnnnnnnnnnnnnnnnnnnnnnnnnnnnnnnnnnnnnnnnnnnnnnnnnnnnnnnnnnnnnnnnnnnnnnnnnnnnnnnnnnnnnnnnnnnnnnnnnnnnnnnnnnnnnnnnnnnnnnnnnnnnnnnnnnnnnnnnnnnnnnnnnnnnnnnnnnnnnnnnnnnnnnnnnnnnnnnnnnnnnnnnnnnnnnnnnnnnnnnnnnnnnnnnnnnnnnnnnnnnnnnnnnnnnnnnnnnnnnnnnnnnnnnnnnnnnnnnnnnnnnnnnnnnnnnnnnnnnnnnnnnnnnnnnnnnnnnnnnnnnnnnnnnnnnnnnnnnnnnnnnnnnnnnnnnnnnnnnnnnnnnnnnnnnnnnnnnnnnnnnnnnnnnnnnnnnnnnnnnnnnnnnnnnnnnnnnnnnnnnnnnnnnnnnnnnnnnnnnnnnnnnnnnnnnnnnnnnnnnnnnnnnnnnnnnnnnnnnnnnnnnnnnnnnnnnnnnnnnnnnnnnnnnnnnnnnnnnnnnnnnnnnnnnnnnnnnnnnnnnnnnnnnnnnnnnnnnnnnnnnnnnnnnnnnnnnnnnnnnnnnnnnnnnnnnnnnnnnnnnnnnnnnnnnnnnnnnnnnnnnnnnnnnnnnnnnnnnnnnnnnnnnnnnnnnnnnnnnnnnnnnnnnnnnnnnnnnnnnnnnnnnnnnnnnnnnnnnnnnnnnnnnnnnnnnnnnnnnnnnnnnnnnnnnnnnnnnnnnnnnnnnnnnnnnnnnnnnnnnnnnnnnnnnnnnnnnnnnnnnnnnnnnnnnnnnnnnnnnnnnnnnnnnnnnnnnnnnnnnnnnnnnnnnnnnnnnnnnnnnnnnnnnnnnnnnnnnnnnnnnnnnnnnnnnnnnnnnnnnnnnnnnnnnnnnnnnnnnnnnnnnnnnnnnnnnnnnnnnnnnnnnnnnnnnnnnnnnnnnnnnnnnnnnnnnnnnnnnnnnnnnnnnnnnnnnnnnnnnnnnnnnnnnnnnnnnnnnnnnnnnnnnnnnnnnnnnnnnnnnnnnnnnnnnnnnnnnnnnnnnnnnnnnnnnnnnnnnnnnnnnnnnnnnnnnnnnnnnnnnnnnnnnnnnnnnnnnnnnnnnnnnnnnnnnnnnnnnnnnnnnnnnnnnnnnnnnnnnnnnnnnnnnnnnnnnnnnnnnnnnnnnnnnnnnnnnnnnnnnnnnnnnnnnnnnnnnnnnnnnnnnnnnnnnnnnnnnnnnnnnnnnnnnnnnnnnnnnnnnnnnnnnnnnnnnnnnnnnnnnnnnnnnnnnnnnnnnnnnnnnnnnnnnnnnnnnnnnnnnnnnnnnnnnnnnnnnnnnnnnnnnnnnnnnnnnnnnnnnnnnnnnnnnnnnnnnnnnnnnnnnnnnnnnnnnnnnnnnnnnnnnnnnnnnnnnnnnnnnnnnnnnnnnnnnnnnnnnnnnnnnnnnnnnnnnnnnnnnnnnnnnnnnnnnnnnnnnnnnnnnnnnnnnnnnnnnnnnnnnnnnnnnnnnnnnnnnnnnnnnnnnnnnnnnnnnnnnnnnnnnnnnnnnnnnnnnnnnnnnnnnnnnnnnnnnnnnnnnnnnnnnnnnnnnnnnnnnnnnnnnnnnnnnnnnnnnnnnnnnnnnnnnnnnnnnnnnnnnnnnnnnnnnnnnnnnnnnnnnnnnnnnnnnnnnnnnnnnnnnnnnnnnnnnnnnnnnnnnnnnnnnnnnnnnnnnnnnnnnnnnnnnnnnnnnnnnnnnnnnnnnnnnnnnnnnnnnnnnnnnnnnnnnnnnnnnnnnnnnnnnnnnnnnnacagccactcgctgggggacacagccgagccagggcccatggaggnnaggaactaccttgttctgcactagctccatccctagagccctgcttctccaggcccgagagaccagcaaaccgtcgccctccgtcccggtgggccccacattcccccactgcctcacagcctcagtcacccggagacccgacgtccttggaggagcatggtggcgaggagccgcccgaggagcagccacaccgtgatgcaagcttgcatggattatcacagtataattcactgta

SEQ ID NO: 42187 - DNA, 463 bp, Macaca Mulatta
  misc_feature (1)...(463): n = A,T,C or G
atgatatccattcgagctgtatttatattcttgtggctgcagctggactcggtgaatggagagaatgtggagcagcatccttcaaccctgagtgtccaggagggagacagctctgttatcaagtgtacttattcagacagtgcctcaaactacttcccttggtataagcaagaacttggaaaaggacctcagttcattatagacattcgttcaaatgagcatgaaaagaaagaccaaagaattactgttttattgaacaagacagtcaaacatttctctctgcacatcacagagacccaacctggagactcagctgtctacttctgcgcagcgaattctggaggctactagaaggttagctttggagatggaacaacagctaaatgtaatagcannnnnnnnnnnnnnnnnnnnnnnnnnnnnccagctgagaggctctaaatccaatgacacgtctgtctgc

SEQ ID NO: 42188 - DNA, 439 bp, Macaca Mulatta
  misc_feature (1)...(439): n = A,T,C or G
acattgtagcaaaatggcgactgtcattcacaaccccctgaaagcnnnnnnnnnnnnnnnnnnnnnnnnnnnnnnnnnnnnnnnnnnnnnnnnnnnnnnnnnnnnnnnnnnnnnnnnnnnnnnnnnnnnnnnnnnnnnnnnnnnnnnnnnnnnnnnnnnnnnnnnnnnnnnnnnnnnnnnnnnnnnnnnnnnnnnnnnnnnnaggccttgccccgggccaactgtatacataccctgcccgctgctggcgcaagaagagacgattgcacccacctgaagatccnnnnnnnnnnnnnnnnnnnnnnnnnnnnaagtggagcttcccctgaagaaggatgggttcacctcagaaagcaccacgctggaagccttgctccgcggcgagggggttgagaagaaggtggatgccagggaggaggaaagcatccaggaaatacag

SEQ ID NO: 42189 - DNA, 2207 bp, Macaca Mulatta
  misc_feature (1)...(2207): n = A,T,C or G
gctcaccgttcccacatgtgaacttcagccaagacaccacaacagggactctgcccgctgaatcccctatgattcctcaatcctgtcctggtcataccccactgggttttgtgaggctatttaggaagataagtttcccttactgaagaaaagagagacaacatgaaagaaaacaatggccccaaaggaggaatttgtgattgacataaatgggagtgttcccttgggctcataatgtatcatcaaagtagcaaacccccaggtcatttatttctccacctatttacctgctatgaaaagaagatgcgtttaagtttcctgcagtttcacactggacattaatgctctnnnnnnnaaaagccgtatgttctagatgtagcaggtttcttttggaattcactcactgggagtctggcactaccccctaaatggtacttttgttgtctttttgttcaagacaaccagcttcttccaagatcagaactgcatgccagcctcccttgataaacagcctaccagctctcttggtagatcagatgtttaatagttagcctaactcatttgttttttcaaggagcaattatactacaatgaattaatattttaactgcagggaaagcattacagctagttcctacgtagactctagaggttgggaatggccaacaggatttcccatactaagaggagaggacaactccatcctggccagcagttctctatgtttgaaataccatcattagatactgctccaaagacctaaggggagatgtgcctaggagaagtgtatggtcctgatccttcccactgaggctcaatggcccagcaaaatatgaaagtgagacctgtgcttctaaagcgtaacagtctagaatcagtagagtttgtgaaacaacctcaccaccgcaggagcaaatnnnnnnnnnnnnnnnnnnnnnnnnnnnnnnnnnnnnnnnnnnnnnnnnnnnnnnnnnnnnnnnnnnnnnnnnnnnnnnnnnnnnnnnnnnnnnnnnnnnnnnnnnnnnnnnnnnnnnnnnnnnnnnnnnnnnnnnnnnnnnnnnnnnnnnnnnnnnnnnnnnnnnnnnnnnnnnnnnnnnnnnnnnnnnnnnnnnnnnnnnnnnnnnnnnnnnnnnnnnnnnnnnnnnnnnnnnnnnnnnnnnnnnnnnnnnnnnnnnnnnnnnnnnnnnnnnnnnnnnnnnnnnnnnnnnnnnnnnaggtcaacggcaacctctctgaacaggacattgtgtcttctgaccttgcctacttaaggttggctcagcatcttgaggatgggcctcgaagggtcaaggtgtcccacacattcctcccgagggtccccaaggtgcaaagcaatggtcctgttagcatatgcttggaagcaggaacttggaggtccttagagaaagccacagctgccattcaggttccagatgatatttatcacagtccttcctgggaagctagagagtctgctctcagcccagacaggccagctgaagtaagtaactccatacaccctttgggtgacacatgtccaggtgatgggagaaggatgactctaccagattcagaaaaatccacctcctgcttaaatgccaccagtgttgccagccacacaccaggcacagagaaacttaaacctgaattgcttttgcccaaagacaactcggatgacaaagactttggcccactgtcatctcagtcaaaggaaacgtgtgttccttcacctctacggactcacagttccccctcatcaggctcccacaggcagacagcctacccaggaagagcctcagactgtccttcatcaagtaacaatcaccagaatctggtgtcactcaaaattaacagtgcatcgaaatctgcccctgggtgtcaggggcagatggcaaacaaccccacagagtcagacaccctggagtttccaaattgtccaggaagtgatcacctcccatcctctcttccaaagagtgagaccaaacttcagagcaacagggagattagtgacattaatcaaattcacctggcacggggtgaactctgcgacctccaaggccgactgcaatccgtggaagaatctctgcactcgaaccaagagaaaattaaagtccttttgaatgtaattcaagacttggagaaagctcgagctctcactgaaggnggcgcaacttttatcgaactggccaagatctcaacaattgcag

SEQ ID NO: 42190 - DNA, 782 bp, Macaca Mulatta
  misc_feature (1)...(782): n = A,T,C or G
atggtgaaaccctgntctctactataagcaaaattagccgggcataggcagcatgcgcctgtaatcccacctacttggaaggctgaggcagcagaatcatnnnnnnnnnnnnntnnnnnnnnnnnnnnnnnnnnnnnnacnnnnnnnnnnnnnnnnnnnncannnnnnnnnnnnnnccatctnnnnnnnnnnnnnnnnnnnnnattttaatataggaaaattgaaggaaaaattagacttttgtgttatgtcttcccttactttgttctgtctgtatattcctatattgattcagtagtagcaatgcataattttcccacaaacttcatccttacatgtagagaaagtgttgataaaatattcttgcaataaagtgctctttgcaaatatgtactcaattttcagtttattcaattttcttaataccatataagttcttgtaggagagcttcagattctccatacaaaatgtttaatccaaaactatgctggatagagtaaaacccttgctgagcctcttagaaaaaaaaaaatgctttatatgtcaaatataggctatgttaaatcataacaaagccttttgcctcattgcactcccgaaagcaagatgggtcaccagcagccttactggagccacctacagaagttgggccagggttctcgctcttctcacatctgcccaaaccagcatagtctgatccggaaaaccaggcttcatatgtgccgtcagtgttccgtcagtacatgaaggacataggttcaatgattggacaagtatcctc

SEQ ID NO: 42191 - DNA, 856 bp, Macaca Mulatta
  misc_feature (1)...(856): n = A,T,C or G
gggcaaaggaagctttcagtaagtggtagctggtgcttatttgtggccacggctgattgagactggaagctgcagggactccggtgcgcgatggtagatgcttcgtgaatgctggcaagaagagtgagcatggggtctggccaaaaagagagcttcctaatgaggcatcctggaaactgatgggaactgtgttcttatccatcttccccacctcttgtgccccatcaactcagagtggcccagaagcccaaagctgagaggacgaagctcaatgggcccactcaacatgaagatgacaaggatgaagacctttatgatgatccactcccacttactgaatagttaaagcttcttggtgacgtgacagtctgtggaaactctccacaggacaaatgctgaaaagaggagaggagctttcatgaggtgacgtccgtggaagaaccttcaaccctcctttgaaaccacctgtaaaaaggaaaacctgtcttgatttccccaccttttccccctttctgtgcttgaggcagaaacaattttccctggcagcttgatttagtaagcaaaccataaaccacttggaacctggtttttcccccgtgcacactttgcaattgtttttggcccctaatttccagcaatggaagttccggtaatcatttggattggggttcatagaaggccaggcccatttggttccaaacccaagggaaaatttcccctggaaaaggtgtggtttggtaaaaaaaaactatatatatatgggccgcgaatttctataccctgcaatgagcacaatattgaaaaaccgaaataaatccctttttcgggcccctccctattgggcccctattagaan

SEQ ID NO: 42192 - DNA, 784 bp, Macaca Mulatta
ggggagtagcgccgggtggcgggggcagtttggctgcgggtgtgtgaagggagtcagtgtggaggccacagggtactcgccacgatgagcagcaccttagctaaaatcgcggagatagaagccgagatggctcggactcaaaagaacaaggccacagcacaccacctggggctgcttaaggctcgtcttgctaagcttcgtcgagaactcattactccaaagggtggtggtggtgggggtccaggagaaggttttgatgtggccaagacaggtgatgctcgaattggatttgttggttttccatctgtggggaagtcgacactgcttagtaacctggcaggggtatattctgaggtggcagcctatgaattcactactctgaccactgtgcctggtgtcatcagatacaaaggtgccaagatccagctcctggatctcccaggtatcattgaaggtgccaaggatgggaaaggtagaggtcgtcaagtcattgcagtggcccgaacctgtaacttgatcttgattgttctggatgtcctgaaacctttgggacataagaagataattgaaaatgagctggaaggctttggctttcgctttaacagcataccccccaacattggctttaagaagaaagaccagggaagcattaatctcacagcccacttgccccccagagtgagctagatgctgaaactgtgaagaagcattctgggccgaataccaggattcctaatgctggatgtgactctacgtagggaatgcttcagcctgatgaacctct

SEQ ID NO: 42193 - DNA, 782 bp, Macaca Mulatta
  misc_feature (1)...(782): n = A,T,C or G
gggaataaaaatttatttgtaaattgttactagtcgtcnnnnnnnnnnnnnnnnnnnnnnnnnnnnnnnnnnnnnnnnnnnnnnnngnnnnnnnnnnnnnnnnnnnnntnnnnnnnnnnnnnnngcnnnnnnnnnnnnnnnnnngctccgcctcccaggttcatgccnnnnnnnnnnnnnnnnnnnnnnntnnnnnnnnnnnnnnnntgctcaccaccacannnnnnnnnnnnnnnnnnnnnnnnnnnnnnnnnnnannnnnnnnnnnnnagnnnnnnnnnnnnnnnnnnnnnnncttcgtgatccannnnnnnnnnnnnnnnnnnnnnnnnnnnnnnnnnnnnnnnnnnnntgtgcctggtcagttgttactagtcttgtagtcatgagaaattatgagagtaggtccttttcctcttctatttaaaaaagcttgagaaatgttactaagatttttatttcatcaaaaaatgttggggtggaatgcattacacagtttcctacagcgacattttttttgtttgtttggagggggattctcaccctgtcgccaggctagagggcgggtgggtgcgatctcgccgtcgctacgagatgccccccacccatggccaagccaatgggttatggactgactgcggggaaattttacgtggaagaaagggggtttccacccaggtctggccccgaagagggccccccgaaccccctgagcgttgtggaggcccccctgccggaccctgggccgccccccacaaggaggggtggaggggaaaaagaag

SEQ ID NO: 42194 - DNA, 653 bp, Macaca Mulatta
agcttttgccaaataagacgggatagtttatggagttttctgaggcgcattggactccggtcagccccttgagcgtgggctcggccgtcggcaggcccgctgggttggccgggctggccctcccaggctgcctttctctctggtcgtggcccggcccgccccggcctccaccgccacaattcatgctggtgccgtgcctgcagccccactcctggtatgcctgagattctccacgggccaagccggtcctccttcccggcccactcttccaggaccaggacgctcctgtggagccagcccaccttggctgagggtcccaggggctggaggcctacctggttagcctccgtttcccagaccttgactcaaggcgcctccagtcctcccaagcccctgactttcaagtcctttcaagtccttgtgccctgaccaagttgggaggaaaagagggctgagggcctggaggtggactcgcgccctctcgaacccacctagatgtctcctcctccccagcctatgagctcagacttggggggctccatctgtccctctctgaggtccccaatcttgtccctgctctgattctgtcagcagacctgaacactccttggtgaggacccctgcctccaaggctgcccccagtgccagctgtc

SEQ ID NO: 42195 - DNA, 792 bp, Macaca Mulatta
  misc_feature (1)...(792): n = A,T,C or G
ggnnnnnnnnnnnnnnnnnnnnnnnnnnnnnnnnnnnnnnnnnnnnnnnnnnnnnnnnnnnnnnnnnnnnnnnnnnnnnnnnnnnnnnnnnnnnnnnnnnnnnnnnnnnnnnnnnnnnnnnnnnnnnnnnnnnnnnnnnnnnnnnnnnnnnnnnnnnnnnnnnnnnnnnnnnnnnnnnnnnnnnnnnnnnnnnnnnnnnnnnnnnnnnnnnnnnnnnnnnnnnnnnnnnnnnnnnnnnnnnnnnnnnnnnnnnnnnnnnnnnnnnnnnnnnnnnnnnnnnnnnnnnnnnnnnnnnnnnnnnnnnnnnnnnnnnnnnnnnnnnnnnnnnnnnnnnnnnnnnnnnnnnnnnnnnnnnnnnnnnnnnnnnnnnnnnnnnnnnnnnnnnnnnnnnnnnnnnnnnnnnnnnnnnnnnnnnnnnnnnactcctacaaacctttcaggaccccaaaaccataataatggatttcaccttccacaactaagcataaaaaccaaaaccgaagcccccctttttgaattatcctgagaagggcgaaannnnnnnnnnnnnnnnnnnggcttttaacaatggaaatacatcatacagggtccaatttcgccccttaatccattcaatagcctaaaaaacaatagaaaatatattcgggggagaaagagcccataacaaaataagagtgctatctaaggtaaatttacataacacataccaaaggaaaccaaaaccgattcaaaaaatattttttcccaagctaaaaaagtaaaactacataaagacccaccaaatagcaataa

SEQ ID NO: 42196 - DNA, 1876 bp, Macaca Mulatta
  misc_feature (1)...(1876): n = A,T,C or G
agaaggaaaataaaatatgcattttatgacacaacccagcttgcagggatgaagtagaaggtcctcactgtacctcatggcaggctgctgacggcagatatttaacctggctcactgaactgggcagtcagggaagggtcggctcctgctctgtccagctgtcttcataagggactctgtgatactttttataaaaatgactttgatttctgcataagaaggcttgccaagcttgctgtccagcagtggctgctgcagggaattaattcagatggcagcaagagaaccctggctccttggaccaggacattcccttcacgtgtgttggaatgagagcaggaagaatgctggtcggaagtccctacccagggctctgggacttcagtattctcagaccaactgggccactcctctgagttgggatgctgacccacacttggccctggctgcggcatccccaggacgctgcccttagccgtcatctcgttggggctgggggctgagcaggtcacaccgaacaaaaggagtgtgtccccatcaataagctcacatctgagttctcttccacannnnnnnnnnnnnnnnnnnnnnnnnnnnnnnnnnnnnnnnnnnnnnnnnnnnnnnnnnnnnnnnnnnnnnnnnnnnnnnnnnnnnnnnnnnnnnnnnnnnnnnnnnnnnnnnnnnnnnnnnnnnnnnnnnnnnnnnngattccactggaaaagccatccatcggtgccaagtgtgtggagagcttcaagagccatnnnnnnnnnnnntccatgagcacatccatgtgggagagtggccctgaaagtgtcctagtgtggcaaaggcttcccactaagtggacctcagatggcacagggagacccttctggggatgtgggaggacactgcctaggcggtgaggggccgcggtttcaaatgtgcacattaaacgcagacacagcctctcttggctgccaagaagcctgtnnnnnnnnnnnnnnnnnnnnnnnnnnnnnnnnnnnnnnnnnnnnnnnnnnnnnnnnnnnnnnnnnnnnnnnnnnnnnnnnnnnnnnnnnnnnnnnnnnnnnnnnnnnnnnnnnnnnnnnnnnnnnnnnnnnnnnnnnnnnnnnnnnnnnnnnnnnnnnnnnnnnnnnnnnnnnnnnnnnnnnnnnnnnnnnnnnnnnnnnntgggcagctattcccaggcgcagaggggagcagtggccacacaggtgccagcgtggcaggagctgcagtcagaggcagcatctccagagccctgggagcagaggccagccacatgaagcccacgagtgtcgctggcatgggaaagggacatgaggatcacactgacccaagagaaggcccacagtgaggaggccccaccgaagcgtccccagcaacaggggctgaggcatctgaggcagccagcccactcggaaaggcctgctgactgcactccggatgtcaagaggacccttgggaaaaagaaaggcaggagtgcagcaccttccagagcctcagcttgcttctctccttctagctccggctggagtgatggaagaggctgcgctgggagctacctccaaaggagcctaccctccccagcctgagcgtggaggctaccggcactgtgcttcccctagtgaaatccatcnnnnnnnnnnnnnnnnnnnnnnggggtcaaggagaccctgttcacccccaccatggggtcaggtcttcaccgcatggaggccgcacggattcccagtcacaaacccaaagccttgctgcctgtgcctctgcttcgatagttgtttcaatgtcttttttaaaaaaatcacatacactcgagtaagattgagtctcctcaccaaagagatctggctgtatcccgagtctctga

SEQ ID NO: 42197 - DNA, 1300 bp, Macaca Mulatta
ggatccccccaacctgccccggcacgtcggattgggattttgcctacgccgcgctggctggctcctccggaaggaacgctctcccaccctcagactcccccgggggtggcctccacacccgagccaaagcccggggaccagggcccgcagcgccacagcctgccggcctttctcggtgggacagcctagggcacgctcgagctgagccgccgggccagggtgtgcttacctccactccaggatctgtgggctgggccagggttgggcgatcctgctgcctgcgcagcctggctgggctggagcgggacggcccctgctccctggctcaagaaagccccctgtggtagagccccgggcgcgcagggcatgtggggtgcgcgaagccccgttccccacgccccggtgtgggtgaaggccaccgactagggaactgggggacaccccgggggccgcgttgcacaggccgcctgcgtgcgccgatgccctgccaccctggcctgggtgcctggccctccggttctgaaaccaaatctgaatccgggactccgggaggcccgtctctctggccagttcttccctggtggcgatgcctggaaagcgatcctgctggaaggctcgcaggagcagggcggtctgggaccgggtgacggcggtccgctttcgcctgccttcttgcgggccgcgtttcccgccccagggccgagattcccgccggtgctgcctcagctggcgcgatctctcgttctgaaaccaaatctggaccctgggctccggaatgccgatggcctgggccagctcttccctggtggcgatgcccgggtacgggttccgctcaaagcaggctcgcagggcctccctctggctcggggtccaaacgagtctccttcgccgtcctagtcctcgggctccctcagggagggcgccgtcggcaggtgtcgggagagccatcgcagggagacctggccagaacttcgcggacagacacgggcagagagaggcggcgggctcccgtgcccctcagtcggcctgtgcacggcgcgcaggtctagccaggaggcggcccagccgacggcccttataaaggcccccaagctccaccccttcaggaatgcggtaggacccctgggtagcccgccctcggaagccgggaaccacagggcccagggctctgtggcctgggtatgggtggggccggagaagcccgggagggggtagggggtgggagcacggtgaggggggagggggaagaggggaggggggggggcttcgggggctggtctctcggcctctccaggaattc

SEQ ID NO: 42198 - DNA, 725 bp, Macaca Mulatta
ggatgtcatgacgtttgacataccgttggaacgagccgcctcctcagaagatggaagaccatgttcgtggccgaccgggcctctccttctggcctgtttcttaagatgcggaaccacatttcagtggtaggaaaagtggcttcgtaaaatagaagagcagtcactgtggaactaccaaatgacaagatgctcggtgcaaataggggtgctttgggataaaagatttatgagccaactattctgtggcaccagattctaggccagtttgttccaccgaagcctctcccacagcagtccacctctgcaggctggtgaccgaatggcttgtaagtggctctgtggcaagatcacactgagatcagaaggctaggatgcttgtctagtgtccttagctgtcacattgggtccttccagggtggccagacagtgttggtgaccacttccttccaaaacataggcaccctcctggtgacagagacccgccatggtatgccttggcccattccagcagtcccagttatgcatttaaagtttggggtttgttcttttcgttaatgttactctgtgttgtcagctgtcttttcatttcctgggctaagcagcattgggagatgtggaccagagatccactccttaagaaccagtgatgaaagacactttcttcactctgaagtagctaatggtacaaatgagaacttaaaagagaggatgttatttagactgaa

SEQ ID NO: 42199 - DNA, 631 bp, Macaca Mulatta
ggggctgcgtgagggtgcgtatgtgcgtgagcgtctattgattattaagtctttcaagcatgaagtaacactttatggttattatgccagcccggaatattcaatataagctcaggttctacaattgattcggcaggaatcaaatccgagtttgtctacagcagattcggcaaggaccaggccttccgtgacgcaacttacaagaatccagatagtgactcctctatcatcaggagtaaagaccacatggagcagaggccctgactgacctgcaatggacataaaatgaattcctaaacatatgaaaaaataaagttaccatcatcctggaagaattgtataggaaaatgttggagacccactgaaagctggcttgttcacagtggggctcttgatatgaacaaacctgaagatgtcagactgtataaacacacagaggaagatgtgttcacaaaggctcctacactggaaaattatacgctacttccgaaatgctttgccacatttaaaagtgtaattatacccttttcttaatgactgacatgacatatgtttacatgtgttttagccaacttatgacagtacacagtcgtgtgttgtacatttggtaccacatctacatttcatgaga

SEQ ID NO: 42200 - DNA, 397 bp, Macaca Mulatta
caggcagacaagctccagcagagtgtggccagatgtggtgcctggagcgactccgcttcggtcctgagtgccttcggcggagtggagactggcttctcccgggtcgggcgcgcagagccaagtctcgtaccaccgccgcgtgcgcaaacgtgctcactccggaccgcatccccgagttctgcatcccaccgcggctcgtgccccgcctggccttggctgcattccggaattcctgggtcgaagaagcagagacggacgagggcgccggccgcacggactgggacccgcgctcgcaggccgcgttgtcgctgcagcatctgccccgtgtacgcaccgcctacggcttctgcgtgctgctcgagagcccgcacactcgccgcaaggagtcgctcctgct

SEQ ID NO: 42201 - DNA, 888 bp, Macaca Mulatta
cccctctgatggcgtttgttctcctgggcctctctgcccatccaaagttggagaagacattcttcatgctcatcctgctgatgtacctggtgatcctgctgggcaatggggtcctcatcctggtgaccatccttgactcccgcctggacacacccatgtacttcttcctggggaacctctccttcctggacatctgctatacaacctcctcagtcccactcacccttaatagcttcctgactcccaggaaaaccatctccttctcagcctgtgcagtgcagatgttcctctcctttgccatgggagccacagagtgtgttctcctgagcgtgatggcgtttgatcgctacgtggccatctgcaacccccttaggtactctgaagtcatgagcaaggctgcttatgtgcccatggctgccagctcctgggtagctggaagcctcactgccatggtgcagacatcccttgcaatgaggctgcccttctgtggagacaacatcatcaaccacttcacctgtgagattctggctgtcctgaagttgacctgtgctgatatctctgtcaatgtgatcagtatgggagtgaccaatgtgatcttcctgggggtcccggttctgctcatcactttctcctatgtcttcatcattgccaccatcctgaggatcccctcagctgaggggaggagaaaggccttctccacctgctctgcccacctcactgtcgtgatcgtcttctatgggaccatcctcttcatgtatgggaagcccaagtctaaggacctgctgggagcagacaaacaggaccttgcagacaaactcatttcccttttctgtggggtggtgacccccatgctcaaccccatcatctacagcctgagaacaaggacgg

SEQ ID NO: 42202 - DNA, 689 bp, Macaca Mulatta
  misc_feature (1)...(689): n = A,T,C or G
cccctcttctccccacctccactccacatttctttcattttcttttaataaaaaattcccacctcccaagcaaatccgagatgcatttagattcannnnnnnnnnnnnnntattctgcctctggactcacatttctcgtcttggaaatgtttcttctatcttctcccactccacgtctgcttaaatccctgctggctcaggccctcctccccctctccccactccctcacacacagaatgatgtcttcccttggccgaccagggctcctctaccaagtcnnnnnnnnnnnnnnnncgcagggccagcgctttagtgcgccccaggggcccgattgggcaagaaaaggaaagcccagccctattttatccagcccagctgtccccagccccgcgcctctccccagaacctaaaaggcaagcttggcccccttaggcctgtttgaaccgcagttttttgtgtgatgatagaatgatgacattctgcatttatcaaatctttttttttcttcattgtgtagctcagtgaatggtcaactcgctgctgtgtgcgctgtgacccttctgcctccgcatttagctgtattgtgacaccctcttaaccatttcctgtctccatctgaggaaggcattgctatttaagcggcagtatcccctatctcaggccagcctagccatgggggtgaggggga

SEQ ID NO: 42203 - DNA, 744 bp, Macaca Mulatta
  misc_feature (1)...(744): n = A,T,C or G
tctcagcactgagctccatgtggtggaattcaggataccagtacagtggtgtgatctcgactctctgcaacctccacctcccaggttcaagtgattctcctgcctcagcctcccaagcagctgggattacaggcatccgccaccacgcccagctaatttgcgtctgtgtatttttaatagagatggggtttcaccacgttggccaggctggtctcnaaactcaggtgatccatccacctcggcctcccaaagtgctgggtttacagacatgagccactgttcctggacaacacatttatacatatatatgtgtacattctgtaatatatacttttacacatatatatttgtgagcacatattaccatttttgtacgacaaacttccgggggggaggttattcaatggaaatgcaattttaaattgtattagaaagggggacggccctcattagtgccgtctgagtacagcatatagttttatgtcctttaccaaccttattacacagtcaaactcctaggtctcgaaatctaaacaattcgctctcctgcttttctattgccgggaggacacccccttttcaaccctatgaacataccctcacattaaccggttgtcacatcctcggaccgttttgccaaaaaacgcagaccccctcataacctttcgactggcgacacgccatccggtccactaccggtcccaaccataaccccgaatcttacgctctcgaaccgaacacgag

SEQ ID NO: 42204 - DNA, 795 bp, Macaca Mulatta
  misc_feature (1)...(795): n = A,T,C or G
gggatggagtctcgctctgtcacctagggtggagttaagtggcacaatctcgcctgcaacctccgcctacctggttcaagcgattctctgactacgggcacgtgccaccattnnnnnnnnnnnnnnnnngnnnnnnnnnnnnnnaggtttcacgatannnnnnnnnnnnnnnnnnnnnnnttgagcttgtgatccaaccnnnnnnnnnnnnnnnnnnnnnnnnnnnnnnnnnnnnnnnnnnngtgcatggcaaactctttaatttatattgcagggcagatgggtattttcccccttgtaggaggctgctgagttggagtcatgttctagagatattcagaagtaagctgaaaggaaagtccagtaagaggaaaagaatcatttcagcagaaatatactacagatcagcagggtgacattgagttagttactgaaccttaataggctaaattatactcaaaaaaatgctctgtgcataaataataacatttttacatcttgagtttctataaaacaggaattattggcccctacttgccttacaggtatttgttgaggatctgctggaataatgaaatagttaaaatcactctatttgtaacattgtgtcactggtgcccttatgaatttttagatatttatttattatttagtatgtatttgttgactatctgctatgtgtaaagcaatatgggcaagtgctgttgggaaatacaaagagaaataagttagttcttggatcctaaggaggagaaaaacatgtattttcaggttcaaaggtgatatagtggctta

SEQ ID NO: 42205 - DNA, 664 bp, Macaca Mulatta
  misc_feature (1)...(664): n = A,T,C or G
gaattacagtttattgactgggagatcgacagtgacagggcagaggctagtgactgtaatgaatttgaagatgatgagggtgctgtggaaatctcagactgtgcttcttgtgcaagtaatcagtctttgacaagtgatgagaagctatcggagcttcccaaggtaagaatgaattatttcaaaacttttagtctctgtataacatctgctaatcatagttgtnnnnnnnnnnnnnnnnnnnnnnnnnnnnnnnnnnnnnnnnnnnnnnnnnnnnnnnnnnnnnnnnnnnnnnnnnnnnnnnnnnnnnnnnnnnnnnnnnnnnnnnnnnnnnnnnnnnnnnnnnnnnnnnnnnnnnnnnnnnnnnnnnnnnnnnnnnnnnnnnnnnnnnnnnnnnnnnnnnnnnnnnnnnnnnnnnnnnnnnnnnnnnnnnnnnnnnnnncaaagtgctggaattgcacgtgtcagccaccatgcctggccaaaagaatgcaaatttaaatcagcagtcttccacgagtcctctcccagtggagtcacacagtatatgcttaattctttcagcaaaatgtttagatgacatgtgtgaagtgttatgtactagggaactcattagagactcagggtttttattagggactggtaacataggcaccctctccctaga

SEQ ID NO: 42206 - DNA, 390 bp, Macaca Mulatta
ctgaactcatctttattctttccttcacccaaatttgtcctcccttttaggatgagttaaggtagggataggatgcttatgaaacccctgaaattgtatacacgaagtttgtattcgtgtagtaagtgtattttcaccccatacggaaagagtccacattattcatcagattcccaaagaggtctataataccagcatttacgaagtgctagggatgtagataatctgagagggatttcaggggaaatatacaaagataaagctagggggaatcaggccaaaaattaaggaactatgatataatctggagaatggaatgcatttaggatatataacgtatggagactaactagaaaaagtctacgaaaagtcttgcacataatatttata

SEQ ID NO: 42207 - DNA, 209 bp, Macaca Mulatta
gtggggacttagtaatacctccaccagcagcactgctgcctcctggcgtcttcaggcgtgtccatgtccctgctattgcttgtgaccctgtcgcagtcccacagccccagcctgtggcaggaaggcctgtcatgtgctagcttccatttgtgtacatggccctcggtaggagggccaggcatgccctgtccttgtagctggtatatagg

SEQ ID NO: 42208 - DNA, 710 bp, Macaca Mulatta
  misc_feature (1)...(710): n = A,T,C or G
gggagaagcgagtgtgtttttctcacgtccggcaacaaaggatgttttgtgctgctactgagtgcttctgctgctcaactcctccctgctctccaaagaagtgtccttctctgacatgggcaacatcacaatccagcctcaaaagaagccaccttgggcttccaagacacaaagcaggggatacggagaagtgtctgcactagagcctggatggtgctactcacaacagtgagcgttcagggtgactgctagtgatgtgcagtgctgagtgccacattccatgggaccacatgtcctttaataaacgtattccacgtgcgcttatggaactcatggcttctaaagcacaaggcctatgcttcaagcatagtgctatccctgagcagcatttgtaagccttcagtctgcaacagtgggattacctaccaggctcagctgatggaccgggatgatattggaagagaggctgccagcctgaagacttacctggaaacattcttctccttggtctggttttaataaaatcaccagattctactagaaggaaaccaaagattacaaaggtccaaattaatatatgacaaagtagaaacggaaactgggaggaaatgaggtgaaacacggggggatgatgtattnggaaatagggaaaatgaaaaccnagtacaggaatagaaaacaacctgnaaaagcagtttctgggaaaacta

SEQ ID NO: 42209 - DNA, 672 bp, Macaca Mulatta
  misc_feature (1)...(672): n = A,T,C or G
gggttagtagcaatcgaaactatcagcctactctctcatagcctaaatgtcttcattttaaaaataagcacttttatgagatgatttctcatgttttaaagttccatctcatttctctgtctcttctcaactcctctctttgtgtgtatatgtatacatatgaattcacatacatttatacacacatatatgcatccaattactctactttgatgctcactgctcacatccagaattatgtttaatattttttcaatttatatcattttaatagattcacatgtgaagatgattcagtaatataatatgcataattgatcccatcaatgccagcaccccaatgattatatacaaatatttgtatgcctctgaacaacaaaacacataacctaatttagtatttgttataaccctgagaaaggaatctaccagtttaaatttgttttagtactgctgcagctaataactgacaaaatgagataatctggtcttgctcccactagtccccaaatttaatgctttctggggaaaaacgaaccttctctgggaccaagaacagggggaagtccttaccaaataaaaccctgggggaaataagttgggggttttaaaaaaaagcctggccctccggtccctcccannnnnnnnnnnnnnnnnnnnnnnnnnnnnnna

SEQ ID NO: 42210 - DNA, 384 bp, Macaca Mulatta
attgccgctggaggtgtaatggacgttaatactgctttacaagaggtgctgaagaccgccctcatccacgatggcctagtacgtggaattcgcggagctgccaaagccttagacaagcgccaagcccatctttgtgtgcttgcatccaactgtgatgagcctatgtatgtcaagttggtggaggccctttgtgctgaacaccaagtcaacctaattaaggttgaccacaacaagaaactaggagaatgggtaggcctctgtaaaattgacagagacgggaaaccccataaagtggttggttgcagttgtgtagtagttaaggactatggcaaagagtctcaggccaaggatgttatcgaagagtacttcaaatgcaagaaatga

SEQ ID NO: 42211 - DNA, 775 bp, Macaca Mulatta
  misc_feature (1)...(775): n = A,T,C or G
ggggtcttgggtggtgaaggaacgggcaaatctgctcttacagtgaggtttcttactaagcgattcattggagaatatgcttctaattttgaatctatctataacaagcacttgtgtttgggaagggaaacactaaatctggaaatatatgacccttggtctcaacacagaaagcaaattctccctcccagtgaccttccctggcaaatggggttgtatttgggatgaaatccaggaaagggccttcttttcctttccccaaaaccctggttctaaaaaaaccggggacccccaaaattannnnnnnnnnnnnnnnnnncttggggaaaaaccccaaaatgnnnnnnnnnnnnnnnnnnnnnnnnnaccccgaggaactctttttttttcccatcgggcgcgcaaacaaaaaaatatgtcttttcctttgnnnnnnnnnnnnnnnnnnnnnnnnccaaaaaaaagccagtcgggcgccccccttgctggtgaataaaaagcgacgggggggcgcggtttttttttgtgggaaaaaaaataagtgctgcggcgcgcaaaaaaaagaaaagaattttttctttgtggcggggnnnnnnnnnnnnnnnnnnnnnnnnnnnnntcgaaaaaaataatnnnnnnnnnnnnnnnnnnnntccgaaaaaacacctttccgcccccccccccgaaaaaaagaacagaccccccccccccgcgggggggataaaaacaaagcgggcgcgcccagcctagtgatagtgaagggcagtctgtggag

SEQ ID NO: 42212 - DNA, 247 bp, Macaca Mulatta
ccaacctcagggctggggccaaggatattttagtggctacagatgtggctggtcgtggtattgacatccaagatgtgtctatggttgttaactatgatatggccaaaaatattgaagattacatccaccccattggctgcacgggacgagcaggcaagagtagggtggccatcaccttcctcacaaaagaggactctgtggtgttctacgagcggaagcaagacatcctggaaagcccagtgtcttc

SEQ ID NO: 42213 - DNA, 818 bp, Macaca Mulatta
ggaagaatttgggcctgaattcagtcagagctggaaaccaaaagagaagcaaaaagtgataaaagaagaagaaagacaggcccctaccctggccacaagcgcatgccagcgggatgctgaacgccaccgcggcagttgcccttgccccgaccccgtgtgagctccgcagctgcttgccctggatgagggggccttctcctcaccctctgtggtggtcggatgtttggtggatgtctactaaggcctctaagaagtcggctgtcaagcagggggaagaaagtgtccccatcctcacccaccctgcttgctggagggatacggaaaatgaaaccctacctgtctacgttcgtccctcttaattccatgaccatgacagcttgagttgccaccctgcatacggaatagtgtggtcttccctctcctcgccgtgagaacgtggtctggggatgatcctacttgtggcctcatcacagagaatgccacggcccggcatcctctgactgcggggagtttcccccccttcaaaactggaattgcgccatccggagaccccccaggagccctacgcccccccggcccggaacctcgaagggccggctccccgattgggacccagggggcccattccgggagggcccccggtcccccaaccagagaaggccaggcgcggggcgccgggaccccgggggtgaaccccctggcccctggcgttcgtctacctgcgcatggaaaaacagtagacgccgggttgcttagacacagggggatagcccccctgacccttgtccggagcgtatcgcaggaggcttgactcccgt

SEQ ID NO: 42214 - DNA, 640 bp, Macaca Mulatta
tggagctgctggcctggtccctgaatgctctcccagtcttggggcccactttcctacccttctctacttctctacttttcctacccttctctacctttttccttcctatttttgtgtccctgccacactgtgaactcagccctatcttcctcttccctcttcgctttggggaaagctagcgaagttcatctaaggtacagtacaagttacttttctgttcgattggtgacctcaaacttcccccatctaaaggacgccttagacctcagcgttctatctgtgcagaaagtctcctacacccatcctgcctccctgcccaagcttgtgaaaagtttgctgcagatgctgcaggaggatggggatccacacagccctgcaaggcctcagcagcctctgggaactgctttgtatgtgagctgcacttggccaagccaagctctggcagttgcagtggctgctccctgtggcttcctatccctcatccatgctccaaatctcctcagcaaccatctgccaaaaagctgcgtggcaacacctggctcagaatctgatatcatcccagactaagctctgccctccagagttgcatgtgtgggtttgctccctggttcttggccttatacctgaatgtgtctcagag

SEQ ID NO: 42215 - DNA, 341 bp, Macaca Mulatta
  misc_feature (1)...(341): n = A,T,C or G
atagggcggagggaagctcatcagtggggccacgagctgagtgcgtcctgtcactccactcccatgtcccttgggaaggtctgagactagggccagaggcggccctaacagggctctccctgatcttcggggaggtgagttcccagagaatggggctccgcgcgaggtcagactgggcaggagatgccgtggaccccgcccttcggggaggggcccgncggatgcctcctttgccggagcttggaacagactcacggccagcgaagtgagttcaatggctgaggtgaggtaccccggaggggacctcataacccaattnnnnnnnnnnnnnnnnnnnnnnn

SEQ ID NO: 42216 - DNA, 890 bp, Macaca Mulatta
  misc_feature (1)...(890): n = A,T,C or G
nagagcaggaagccttcggtaccatggacctggctggagaatgtttcaacgcctggccctgggctccaggagggcccaccaccaccatggcccaggatggaggcagcacttgcgccaggggcaagcaggtcacagatgccagggctcatttgacctctacttcatcttggacaagnnnnnnnnnnnnnnnnnnnnnnnnnnnnnnnnnnnnnnnnnnnnnnnnnnnnnnnnnnnnnnnnnnnnnnnnnnnnnnnnnnnnnnnnnnnnnnnnnnnnnnnnnnnnnnnnnnnnnnnnnnnnnnnnnnnnnnnnnnnnnnngaatagaataaaaaatggtcttgaccagcttcggaaaattgtacctgatggacacacattcatgcaggcaggatttagaaagnnnnnnnnnnnnnnnnnnnnnnnnnnnnnnnnnnnnnnnnnnnnnnnnnnnnnnnnnnnnnnnnnnnnnnnnnnnnnnnnnnnnnnnnnnnnnnnnnnnnnnnnnnnnnnnnnnnnnnnnnnnnnnnnnnnnnnnnnnnnnnnnnnnnnnnnnnnnnnnnnnnnnnnnnnnnnnnnnnnnnnnnnnnnnnnnnnnnnnnnnnnnnnnnnnnnnnnnnnnnnnnnnnnnnnnnnnnnnnnnnnnnnnnnnnnnnnnnnnnnnnnnnnnnnnnnnnnnnnnnnnnnnnnnnnnnnnnnnnnnnnnnnnnnnnnnnnnnnnnnnnnnnnnnnnnnnnnnnnnnnnnnnnnnnnnnnnnnnnnnnnnnnnnnnnnnnnnnnnnnnnnnnnnnnnnnnnnnnnnnnnnnnnnnnnnnnnnnnnngatgaaaagccaaccagtatcgacagtcattccatgaattgccctgggccaaaactagaaaaacctggaga

SEQ ID NO: 42217 - DNA, 648 bp, Macaca Mulatta
  misc_feature (1)...(648): n = A,T,C or G
gggatatgaggattcctaatgctatttaacttagaaataagtaatttaattaacaaatattttagttgaaatttttgtctgacttgtaaggagagattgttttttaccagtcagtgagtcactcccaaagccattttttaatagatactaaattagacttgaaagaaaacaggttcattcagttttcattgccttctagtttgtctgtgtaatatcaaataatgaagtcaatgcagtatttatgtatgtatgtatgtatttgttttgagacagggtctttctnnnnnnnnnnnnnnnnnnnnnnnnnnnnnnnnnnnnnnnnnnnnnnnnnnnnnnnnnnnnnnnnnnagtgattctcttgctcagctgttcgggaggctgaagtaggagagtcacttgaacctgcnnnnnnnnnnnnnnnnnnnnttgagactgcgccactgcactctnnnnnnnnnnnnnnnnnnnnnnnnnnnnnnnnnnnnnnnnnngaagcttttataaaaacatgttaaaatgaatgcatgaattccctttttgtcagtctctgcttcgcttcctgagtgattaaaatttttagtataatttaaacccaaatgatatgtcccacggctgaaaaatgtttatactgtggctaataatactcga

SEQ ID NO: 42218 - DNA, 195 bp, Macaca Mulatta
aatcagaatctcacctcctttggctcacctatgcatttactggtcacctgtagagtttcatttcctctccttttctcctctcaagttcaagaaccccaggctacatggaatgtaacatccaacctattatttttggttgtgtgttttggcattatagatcctactgtcaaccgatatcatgtgcgggggtttcct

SEQ ID NO: 42219 - DNA, 558 bp, Macaca Mulatta
  misc_feature (1)...(558): n = A,T,C or G
ctgtatctcatcatgaatcttaaatcatttccttgattcctaacattcttaaattgcagaactaatggtaaggtaaattttaaggaaaaagttaagatagctttgggaacagagacttccctaaactgattccataatagatttgggggaattaatttaacagagaatttcagtttcatcagtcccttgaatccatcttcaggacttctgcttttaataactttagaaaatttactaatccatagaactaattgagtaggctataggaaggatacaaggataatgtcttttttataaaacagtttagtatagcttctttacatgtatccatttgttccagaaaatgtgcattggttctgaatgtgaaaatatttaaagagagaaaggaacacttaagtgtgggcttcagtgggaattttcacaaaaaaattggcaannnnnnnnnnnnnnnnnnnncaaatttgacttctacagccaaatggaattggtaggctgtagctgttacactgaaatttccagtctttttaagtgcctcctgaaagccatttaaaatggaaa

SEQ ID NO: 42220 - DNA, 702 bp, Macaca Mulatta
acttagggagggattgaaggccctggaaactccaggaagttagggggaaaagggactttgaggagcaccctaatagggtaaacccccaaaccaacttggtgattattgcacctcggaagggagagctgtggattctgccttggatcagtaggtagtgactacagtctctaagagggagaatacagaaggaagaccatgcctgggactggaggaatgaaaagctgataaagtttaggttatgattgactttgaagtgcccacggaatttcaaagtggaaatgtccattcagtaatataaagtatgatccctgggagtatttgggttttgagtaaagttctagcaatcctcaattccagatggtacttaaggccctgactatgcataaaactacctcgggttaacatatgtaagatgtaaagaaaattaggctcaggggttttcatataaatcttttaataatccatagacttctccattccccccataacatcccatctccctctttagggacctggagaagcattgtcagttttgtatcacttctaaggcaggacatgtcttcttggtttcatgctggagcttgatgagatgatcaatcaaaatattaagaagcatttttcaaattaccataggaatattttaaatgtaattcaatagcatttgagttattcaaaactttcaaatcacttcatttcctgacc

SEQ ID NO: 42221 - DNA, 775 bp, Macaca Mulatta
  misc_feature (1)...(775): n = A,T,C or G
ggttaacaagggaaatttgnnnnnnnnnnnnnnnnnnntgcatgttctatgggtagctatcaaagggtgtaacaagttattccagcctttcccaattatattggttttaagaagtctgcataatcactaggtggcatttttccttcatttgtgaaccaagatgggtaaatgatgcaacccatacaatgacttctgacttttttagctttgacagaatctccattgtctcattgaatttctcattgtattgtatgtctttccaagtatgaaaccatactatgtagttaatgaaaaatggaaggctgcacattattttgcatgaataattaattgcccattagggctaaggagactgccatgatttttatcggttctgggtaaatgaaaattttaatggaaaactgattcaacatttactagctttgtgcaatataataaaaggtagaagcaaaacactagcacattgtgcttggcttgtaaggatggctttaataccattacattaaatggacagtgtgcacagtgtattgtaaaatgccaactcttgcaaattttacaatacttaagtatgttcaattaacattctaaagtattaaaagtacaaaggaaaaaaccaagcattttttagcaataccatgaaatctccagtaattgttttgaacattgcctttttgctctttaacccaactttttctgcattgaaaatgaattgcctttgaatttccaggtttttttacccccatgacttccgaagtttagttaccttgtaccccca

SEQ ID NO: 42222 - DNA, 699 bp, Macaca Mulatta
  misc_feature (1)...(699): n = A,T,C or G
agatgaaaagaatagtatagaatccaattgaaaatcaggcactgcaagtcatgtcttcatttcctttaatctaaaacattcctctactttctttgatctttcatgacattggcattttttaagagtcaaagatagttgtcttgtaaatgtcccacaatctggatttgtcagtttcctcatttttgggaaaaatactgcataggtaatgtatccttcctgcctcgtaacagcagatcgcctataatactaaatttgatcacttgattaaggtgatcttccagatctctccattgtaattattttgcnnnnnnnnnnnnnnnnnnnnnnnnnnnnnnnnnnnnnnnnnnnnnnnnnnnnnnnnnnnnnnnnnnnnnnnnnnnnntacaccagcctgagcaacatggtgaaaccctgtgactcttcttagaagtctaccttcttcctgtgtacgttcagcccaaagtgagactttggagttgggaagaaatacttctgaattaaactactgatcagtgtcacccaattctaatcccaaccacctttattctaggcataccatactcactgccatacttactgtttggttgggtacctttgccctccttcctattggccttctagttcctacccaactgtccagtccacgggcctcagtaacacctttttgcccagccctgtgtagcgttgcctgcctcctta

SEQ ID NO: 42223 - DNA, 529 bp, Macaca Mulatta
  misc_feature (1)...(529): n = A,T,C or G
gggctgtgaaatctataactcaaatggtcagatgatcaggagccagctatgaagcagtataccatctctttaattattttgtaggtcctgtgtgtggaaccaactataaacccagttctaaagtggtgtatgatggtgaacctttgggaatagttcttatcaacttaattggatacttttagcaaatagcaacttaattctcagcactgaacatgaattacttctttggagttttttttcattcatatttttattgtttccaggaatttatttgatattaatgggcataaaacagcatcactgtacttaagctatggatgtttttattttatattttctttatttataactgtgccaagtattattttgctacttaccgtgttattctgtggaaagaaaaacctgtaaagtgtttaataaattagccctccttacataaattaaatgtcaaaattttgtaaaatattaatcagaataaatactgactctnnnnnannnnnnnnnnnnnnnnnnnnnnnnnnnnnnnnnn

SEQ ID NO: 42224 - DNA, 786 bp, Macaca Mulatta
ggaattttcaaacttaacatatactttaagcaattttaatatttaaacattggcaaaattgtctttttgaatgtgaagttcaactctggcagtaggatgttgcaatagtgatctggaactatggggccaatatagccacatggggttatttaaattaatcaaataaatgaaaaattttattttttctgttgcattagccacattttaagtgctcagtagccacatgtgactggtggctaccattattagtgcagatataggaagaacatttccatcatctcagaaacttctctctagacagttctggtctaggagataacaatagttcttggtagaaattttgacaggctaatgacaaaatgtttgtaaccctaagctttgcatgcccaagaaaaataaggcattcttttttatgtatcagaccagagaagctgtattcagcacattttgaaatgctagtttttggctatggccataccagtctaaatgtgccagatctcatctgaaatgctagtttttctgactacaaaaacttcacaggacatagtagataagctcagtagagccacttaaaataattcccctttttttttctgatgaattctattacaaaaccaggtctgtgttataatagaaaacacacgtaatgaattaaaatctttaaaaattataatttgcaggaaattaagttttattttctagattttctagggtgggtattaaatgttgattagcatttaggttgggaacccaggagaaactcattttgtttttggaataatttcc

SEQ ID NO: 42225 - DNA, 823 bp, Macaca Mulatta
  misc_feature (1)...(823): n = A,T,C or G
ggggcaggaagatggcagttacacaaagttttattccactgattttaggggatcagaacctggaaatgaaaattggagattacttgtcaaacaaagggaccaaagctctgcttaatttaagtaacctgatttcaagtacttcaaagacccagaaaggcaacttattattgacagtatgaaaaccactaatcctcctagtaaccataggagctaggtactattattgtgctgttctcactgatgatgaaactgaagtactgagaagttaagtagcttgcccagcgtcatacagtctgtaagagacagaggcaagttccaaatcaggcagtactccacagtcatcttttaaggccctttaaaatatgctagaatttaaagggaaactgatgggctggatttcaggcatctatgaacaggatatttatcgnnnnnnnnnnnnnnnnnnnnnnnnnnnnntgtcggcgcccgccctcaaactttaaaccttttttgacccgttcggttggcgcgcggggcccgtaagggaacttggaccagggccgaatcgttgtccacccagataccccaggagaaccaggggtcgcgagaatccccacccaaaaacacccccccggaaaacaacccagcggttctgaaaaaaacccggatgggaaatctcagcgccattagttgttatataaccatcaggagggggaaatccaaaccccgaggtaaaaataagggcccccgccccggcaaataaaatccccccccccggtggggggtaaataaaaaacaaacttgctcgtgggtgcaaaataaaccccaccccccgccagacagg

SEQ ID NO: 42226 - DNA, 556 bp, Macaca Mulatta
  misc_feature (1)...(556): n = A,T,C or G
ggctctgaaggctgaaaaaccagactgctggtctagatgaagcctgccttttcccaactgattctgagtaatgcccacctgcgcactgggaggactgggtgaagcctcaggaagttcacgctatttgtagtggtgaggatcctgacctctcctgttcctgtggtgacctgggattcaatctttgagggggagaacctgctagaaggactctcagtttgctggaagttcctgttttctctctattnnnnnnnnnnnnnnnnnnnnnnnnacctccaaataaaaccccttggcccctaacctaaacccttttaccttnnnnnnnnnnnnnnnnnnnnnnnnnnnnccaaatgcccacccacctcataaaataacaaacaagaaagtaaaaaatatgaaacaagaaattaaaacttagaaaaggaacgccgccacaaaaaacccaaatattaaaccctaaaaataataatagaataataacacagcagcaaactcctaccccaacatataaaatataacccccacacgctatattaaaaaatatccaccatacgccaga

SEQ ID NO: 42227 - DNA, 150 bp, Macaca Mulatta
gcaggcaggacctagatccatgatctgcttggcaacaccagctaaactgcaatggtggctgggacgtcctctctgggtgaccacagctaccacgactccctgtggctggggccatcatgcttttcctgtaaaggacagaaaaagtctttg

SEQ ID NO: 42228 - DNA, 902 bp, Macaca Mulatta
  misc_feature (1)...(902): n = A,T,C or G
gggccaatannnnnnnnnnnnnnnnnnnnnnnnnnnnnnnnnnnnnnnnnnnnnnnnnnnnnnnnnnnnnnnnnnnnnnnnnnnnnnnnnnnnnnnnnnnnnnnnnnnnnnnnnnnnnnnnnnnnnnnnnnnnnnnnnnnnnnnnnnnnnnnnnnnnnnnnnnnnnnnnnnnnnnnnnnnnnnnnnnnnnnnnnnnnnnnnnnnnnnnnnnnnnnnnnnnnnnnnnnnnnnnnnnnnnnnnnnnnnnnnnnnnnnnnnnnnnnnnnnnnnnnnnnnnnnnnnnnnnnnnnnnnnnnnnnnnnnnnnnnnnnnnnnnnnnnnnnnnnnnnnnnnnnnnnnnnnnnnnnnnnnnnnnnnnnnnnnnnnnnnnnnnnnnnnnnnnnnnnnnnnnnnnnnnnnnnnnnnnnnnnnnnnnnnnnnnnnnnnnnnnnnnnnnnnnnnnnnnnnnnnnnnnnnnnnnnnnnnnnnnnnnnnnnnnnnnnnnnnnnnnnnnnnnnnnnnnnnnnnnnnnnnnnnnnnnnnnnnnnnnnnnnnnnagactgttcaaagcctcaaacaactaacccaccccccttctggctaaacagttggacctagggtaattatatccttgtttgggccccgcacctagacacctacgagaaaagcctttccaaaaaaccaatttccttattgggcccacgggggtccccgattagggaaaaggggaaaacctatgctcataagcttggtattcccattggaaaaaaactccggggtcatatgacataggcgagccttgggaatatctcccacactaatatagaaaaaaaaactcccctggggcgggtctaaaaccgtataccgtttnnnnnnnnnnnnnnnnnnnncccaaaatgggggggttttttcgcaagaggcgt

SEQ ID NO: 42229 - DNA, 761 bp, Macaca Mulatta
  misc_feature (1)...(761): n = A,T,C or G
ggtgttttgtttttgaagtcccataacctagatctgttcctgctgggcattcctgcatcccttttgtatgccttcaaagctttaccttgtagcatttaccatggcttaatttatgttgtgataatttgattaatgtctgtacctctcaccacatatctaccnnnnnnnnnnnnnnnnnnnnnnnacgtgtaacaccttgcttagtgcctgggcacatagttgttactcagtaaaatctgtctaataaatgagaagacccctaacccctcctgttcatggtattccacaagattttttcatggtcaaatacgaataataattgcaggccaagttgtgtaataccttgccatgatagaggcctatccatcagggattcaaaggttagctttggcctgggtcttagcaacatcagtcattttttagttgggggtgagaatctgcaccctctggcgttgggtagggacacatttaactgtgtcttctctatagctcataatataaagccctgtagcaggtcatgagcctggatatttacactgatgctttggagattatgccacttaagtaatgttagcttaggtgtatttatccgtcttcctcctttctgcctctcctcacccactcctctcctagtaagaaattacttttccttttcgtatttttatattgagttgtgaacacttgctttactctggtgtgtagacttgggcagaacactttatgtcactgagtctttgcttccntggtttgtacaatgggaa

SEQ ID NO: 42230 - DNA, 810 bp, Macaca Mulatta
  misc_feature (1)...(810): n = A,T,C or G
ggctcttgcctgctgccatgtgagatgtgtctttgctcctccttcgccttctactgtgattatgaggcttccccagctacgtgaaactacaagagtaacacttttccaaaaagaaaactaacttgagtggaagcttgaggttttaaatcttggtagaaggaagaagtgagatgattttacttgaagagagccattttctttttctcgaggctcatagaaaatgtatcctctttcatgccttgtgaatttaaaacaaagaggaagattttatctataaatgatggtctcttcaaaagctgatattcaattggagtcaaaggattggattatctgaactcttgggggaatttcttgctcccataatgttgtggctcagaataatgtcatcttttcttcttcctaaaagtgctgaaaggcactcaaaattataagtcaaagtgcgtgactgatgggattgttaatgtaagatgtgtctaccacagaatcagaaaagatgtnnnnnnnnnnnnnnnnnnnnnnnnnnnnnnnnnnnnnnnnnnnnnnnnnnnnnnnnnnnnnnnnnnnnnnnnnnnnnnnnnnnnnnnnnnnnnnnnnnnnnnnnnnnnnnnnnnnnnnnnnnnnnnnnnnnnnnnnnnnnnnnnnnnnnnnnnnnnnnnnnnnnnnnnnnnnnnnnnnnnnnnnnnnnnnnnnnnnnnnnnnnnnnnnnnnnnnnnnnnnnnnnnnnnnnnnnnnnnnnnnnnnnnnnnnnnnnnnnnnnnnnnnnnnnnnnnnnnnnnnnnnnnnnnnnnnnnnnnnnnnnnnnnnnnnnnn

SEQ ID NO: 42231 - DNA, 828 bp, Macaca Mulatta
atagaacagaagtgacagagtttatcctcttgggattaacagatgaccccaatcttcagatacccctcctcctggcatttttattcatctacctcataaccctgcttgggaatggagcaatgatggtgatcatccactcagactcccatctccacactccaatgtactttttcctcagtaacctctcctttgtagacttgggttactcatcagctgtagcccccaaaacggtggctgcattgcagtcaggggacaaggccatctcctacaatggatgtgcagctcagttcttcttctttgtggggtttgccactgttgagtgctacctcctggcctccatggcctatgaccgccatgcagcggtatgtaggcctcttcattacaccaccaccatgacagcaggtgtgtgtgctctccttgctactggttcctatgtctctggcttcctcaatgcctctatccatgcagcaggcaccttcagactctccttctgtggttctaatgagattaatcatttcttctgtgacattcccccactcctggctctctcatgctctgacacgcgcatcagcaagttggtggtcttctttgtggtgggcttcaacgtctttttcaccctcctggtcatcctcatttcttacttcttcatatgcatcaccattcaaaggatgcgttccgctgaagggcggaagaaagtcttctccacctgtgcttcccatctcactgctgtgtccatcttctatggcacaatcatcttcatgtacttacagcccaactccagccagtccatggacacagacaaaatagcctctgtgttttacacagtgg

SEQ ID NO: 42232 - DNA, 675 bp, Macaca Mulatta
  misc_feature (1)...(675): n = A,T,C or G
gacgccacatccccgatgtagaggaattaattactttccatgaccatgcttttatagccatatctctaatcagcgtcctggtatgatgtgccctgctcnnnnnnnnnnnnnnnnnnnnnnnnnnnnnnnnnnnnnnnnnnnnnnnnnnnnnnnnnnnnnnnnnnnnnnnnnnnnnnnnnnnnnnnnnnnnnnnnnnnnnnnnnnnnnnnnnnnnnnnnnnnnnnnnnnnnnnnnnnnnnnnnnnnnnnnnnnnnnnnnnnnnnnnnnnnnnnnnnnnnnnnnnnnnnnnnnnnnnnnnnnnnnnnnnnnnnnnnnnnnnnnnnnnnnnnnnnnnnnnnnnnnnnnnnnnnnnnnnnnnnnnnnnnnnnnnnnnnnnnnnnnnnnnnnnnnnnnnnnnnnnnnnnnnnnnnnnnnnnnnnnnnnnnnnnnnnnnnnnnnnnnnnnnnnnnnnnnnnnnnnnnnnnnnnnnnnnnnnnnnnnnnnnnnnnnnnnnnnnnnnnnnnnnnnnnnnnnnnnnnnnnnnnnnnnnnnnnnnnnnnnnnnnnnnnnnnnnnnnnnnnnnnnnnnnnnnnnnnnnnnnnnnnnnnnnnnnnnnnnnnnnnnnnnnnnnnnnnnnnnnnnnnnnnnnnnnnnnnnnnnnnnnnnnnnngtaaacaaccctgccactctcttttt

SEQ ID NO: 42233 - DNA, 1931 bp, Macaca Mulatta
  misc_feature (1)...(1931): n = A,T,C or G
tgaacacagaaagactagagtagacaagaatcacttctccattcttggttatatttcattatctttatacactactgaaatcagtttgtttcaagtattttacttgggattcttgcatctatatgaaattgggctgcagcctgccnnnnnnnnnnnnnnnngtcagtttatggtgtcaagattgtaactccattaaatgaattggaaagtgttgcctattttcctgttctccataagaatttgtaaaagattggaatgatctgtttgttaaaagtttataaagctgtctggcctagtatttattggtgggaaaactttaacnnnnnnnnnnnnnnnnnnnnnnnnnnnnnnnnnnnnnnnnnnnnnnnnnnnnnnnnnnnnnnnnnnnnnnnnnnnnnnnnnnnnnnnnnnnnnnnnnnnnnnnnnnnnnnnnnnnnnnnnnnnnnnnnnnnnnnnnnnnnnnnnnnnnnnnnnnnnnnnnnnnnnnnnnnnnnnnnnnnnnnnnnnnnnnnnnnnnnnnnnnnnnnnnnnnnnnnnnnnnnnnnnnnnnnnnnnnnnnnnnnnnnnnnnnnnnnnnnnnnnnnnnnnnnnnnnnnnnnnnnnnnnnnnnnnnnnnnnnnnnnnnnnnnnnnnnnnnnnnnnnnnnnnnnnnnnnnnnnnnnnnnnnnnnnnnnnnnnnnnnnnnnnnnnnnnnnnnnnnnnnnnnnnnnnnnnnnnnnnnnnnnnnnnnnnnnnnnnnnnnnnnnnnnnnnnnnnnnnnnnnnnnnnnnnnnnnnnnnnnnnnnnnnnnnnnnnnnnnnnnnnnnnnnnnnnnnnnnnnnnnnnnnnnnnnnnnnnnnnnnnnnnnnnnnnnnnnnnnnnnnnnnnnnnnnnnnnnnnnnnnnnnnnnnnnnnnnnnnnnnnnnnnnnnnnnnnnnnnnnnnnnnnnnnnnnnnnnnnnnnnnnnnnnnnnnnnnnnnnnnnnnnnnnnnnnnnnnnnnnnnnnnnnnnnnnnnnnnnnnnnnnnnnnnnnnnnnnnnnnnnnnnnnnnnnnnnnnnnnnnnnnnnnnnnnnnnnnnnnnnnnnnnnnnnnnnnnnnnnnnnnnnnnnnnnnnnnnnnnnnnnnnnnnnnnnnnnnnnnnnnnnnnnnnnnnnnnnnnnnnnnnnnnnnnnnnnnnnnnnnnnnnnnnnnnnnnnnnnnnnnnnnnnnnnnnnnnnnnnnnnnnnnnnnnnnnnnnnnnnnnnnnnnnnnnnnnnnnnnnnnnnnnnnnnnnnnnnnnnnnnnnnnnnnnnnnnnnnnnnnnnnnnnnnnnnnnnnnnnnnnnnnnnnnnnnnnnnnnnnnnnnnnnnnnnnnnnnnnnnnnnnnnnnnnnnnnnnnnnnnnnnnnnnnnnnnnnnnnnnnnnnnnnnnnnnnnnnnnnnnnnnnnnnnnnnnnnnnnnnnnnnnnnnnnnnnnnnnnnnnnnnnnnnnnnnnnnnnnnnnnnnnnnnnnnnnnnnnnnnnnnnnnnnnnnnnnnnnnnnnnnnnnnnnnnnnnnnnnnnnnnnnnnnnnnnnnnnnnnnnnnnnnnnnnnnnnnnnnnnnnnnnnnnnnnnnnnnnnngataaagtttgggcaaattattataacctttctctgcctcagctttgccatctgaaaaatggaaataatgtcgtatattgtttgagaggaagttaagacatttagtgtactgagaactcatccaggcataagtatataaatatatgttgcagtaggctgaataatggcccccaagacatcaggtcctaatccatgaaccctatattaccttacatggaaatgaggtctttgcagatgtaattaaattggagatcttgagagggggacattttcttgagttatcaaggtaggtcctaaatgcaatcacaagtgtctttaatcagaggcagggagatggcaaacagaagagga

SEQ ID NO: 42234 - DNA, 816 bp, Macaca Mulatta
  misc_feature (1)...(816): n = A,T,C or G
gggattcatgtgcgatgcgctggctggagtactggttcactaccaatgccctgagcttttctcttacatagaaaaactgtccacatctcagtaatcacaagcagcatccattttgttttctcttcttgggagacatctctcaaaccaggaatattcttgaaaagaacatgagcaggaaaactgctggtgattctgttttttagttttgtttttatcttgcctgttggctttggtacatttgagaatacgctgaagagggagaatttcagtgatggagattctagattaaatatcaggactgatttcctggtaagattatggtccagttttaccaaagaaccaattccttgaatgtcggaatctaactttttatattgtcattattattgttgttttaaaatggttcttcgtcttttctgttttattcttctcaagctgctttcaggagctagcagaaaataactcaaagttgaagactctggaagattttgctttaacctaacttgcattgatgtattaaatttataattttagcattcccaatagatcctgtcattccttaaacataataccctttgtcttggagtagaatatagagttagtggatttctagtttaggagaggagctcaaaactataatgtttaacaaattgaaatatgaaatagggcttttttttccctttttatgcacacctatattacccttaaggaatttccttccatagacagctgccctcaaagggaaatcctctttaaactgtcatttggcgcagaaggtcaagtcctagtcngaanncttgggagggggtgcgctcc

SEQ ID NO: 42235 - DNA, 742 bp, Macaca Mulatta
  misc_feature (1)...(742): n = A,T,C or G
ggggaaaaaatggagnnnnnnnnnnnnnnnnnnnnnnnnnnnntctgtaaggaagctcagatattggactcattagaaaaaaatttaaatcatctgtgttaaatatgcctaaagatctgaaaggaacagtatacaaaaatctaaatataaccacaagagcaatgtctcactaaatatagagtaactctcctgtacaaccactgagtcaaagaagaaatcaaaaggggaatttttaagtatcatgagaaaagtgacaatggaaaaacaacatgtgaaaatctattgattcaagaaaagcagttctaagaaagaagtttgtagcaataaatgcctaatttttaaaaggatattacaaataaataagctaccattatatctcaaggagataggaaaagaagaacaaactaaatctaaagttagcagaaggaaggaaataataaagatcagaacagaacaaaaaatcaagtagcaggaaaaccataggaaaaaaatgataatcctgtgagttggttctttgaaaaactcaaatcaataagaccctagcaagactaacaaagaaaaaaagacatgagactcaaataactaaaatcataaatgaatatggagacattacaacagatacctcagaaataaaaaggaatataagggagtattatgaacagtttgtatttcaagaaattggataacctangaggaaatgaaataaattcctagaaaaaatataaacctaccctggaattga

SEQ ID NO: 42236 - DNA, 756 bp, Macaca Mulatta
cccccctggttggcccccggcaccgggtctttccaaacttccccggcccttcgggaattctgccctgttttcagttctccccaaagtccctgggattaccagggcgtgaggccacccgccccccaagctccccgcatgcatgttttcataaagcgcttaaccagtaggagccagaacacaatcacaaaaccctaaaaatgttatcgttctctgcaaattgttctttaaataatgcccagcatatatgtaaagtgctttccaatttgtgaaaattcttgtatgctcttttttgtgagtaaagatttctaaagggccaggattcattttacaaaaacctctccatccagaacatttggaaaattacagattccattcatcatatatacaggttatctgaaagttaccttagatatcatgcattgattaaaaattttttacggctcctgaatgcattaaaaggtattccacagtaaatctctaggggataaaatatcattttctttggtcttcacgaagcactttggaattctctagtatcttgaggttataattaggaatgacaattgttagaatatattgctgccaagaattttgtttatgcaagctttctaatttctgtgaacttaatgcagaggggtgtgatggattatctagcagtgatatacgaagacaaaaaattgaaattattatagtagttctaaaaaatattgatagagtagaaaattaattaccatgtcattttcaaaggattcaccc

SEQ ID NO: 42237 - DNA, 780 bp, Macaca Mulatta
  misc_feature (1)...(780): n = A,T,C or G
gggcaggaagagctgattaaatgacctactagtagattgaagtgaaatctagaggaaagagcattcaagtataactcctgggtttttgcctaagcataaatggcagtgccatgactgaggtggagaagagataaggtgggacttgggaaggaaatcagtaatttggttttggccttgctaagtttgcaatctgagtatagatgtccagtaggcagttgaatacatgcatccggagttcctgggagaggtccaagctgaagatacaaatttggaagctgctggcctgtaaatggtgtgtaatggcatgggaatgagtgagatcatctagggagagagtgtgggtaaacaagggaagagtactgaagacaagcctggaaagctcccagcttttagagatttggttaaaagcaagaggtgctagcaaaggaaaatgagcaatgagtgaggttggagggaaatcagaggagggtgggtccctgaaacctggagtgtttggagaaagattcagtttggtgaactgtaatgaatctgcggcaggttaggtaaaaaaaaagtagataatttgtgaccacaataaaagcccatttctgtgaaagtgaggggggatgaaacatcccgggttggagtaactttgngggaggaggaataagaggaaaatgaaatggccagaataaaggaataaaatggaccttggtggggcccaactttggggcccctttgagaaaaactttttctaaaaaaccattttctttttttgggcaccccccgaggcccccccaa

SEQ ID NO: 42238 - DNA, 359 bp, Macaca Mulatta
aaaaagaacagcaagaagcaactgcacatattgatgaagtacaaaatgaagtagacttaataaacaagccaatgaggagactttgaaaccagaacagaaatataacaaactcggccaactattttttcagatgaggtctgaattgatagccaaaatcccaaaggggtaacagcatttgtcaaccactgacaaatggtctgcactgcttgtggatgaagatgaaaaagaactaccctctttaacccgtgctgatgagaggcaaaattgaagatattaaaccaggttacagaatattttcattctgacaaaaatccttacttcaaaaataaagttctctcccaaaactttaatctgaatga

SEQ ID NO: 42239 - DNA, 954 bp, Macaca Mulatta
  misc_feature (1)...(954): n = A,T,C or G
ttgaatttgccaatgggagacactgaaaagagattggagagggataagaagaggaagaccacattatttctcccttcccgctctgcctcaggtgaaaagaagcatctgcattacctctgtgatacagctctcaacagacaggcccactgtgacccccgactcctccagnnnnnnnnnnnnnnnnnnnnnnnnnnnnnnnnnnnnnnnnnnnnnnnnnnnnnnnnnnnnnnnnnnnnnnnnnnnnnnnnnnnnnnnnnnnnnnnnnnnnnnnnnnnnnnnnnnnnnnnnnnnnnnnnnnnnnnnnnnnnnnnnnnnnnnnnnnnnnnnnnnnnnnnnnnnnnnnnnnnnnnnnnnnnnnnnnnnnnnnnnnnnnnnnnnnnnnnnnnnnnnnnnnnnnnnnnnnnnnnnnnnnnnnnnnnnnnnnnnnnnnnnnnnnnnnnnnnnnnnnnnnnnnnnnnnnnnnnnnnnnnnnnnnnnnnnnnnnnnnnnnnnnnnnnnnnnnnnnnnnnnnnnnnnnnnnnnnnnnnnnnnnnnnnnnnnnnnnnnnnnnnnnnnnnnnnnnnnnnnnnnnnnnnnnnnnnnnnnnnnnnnnnnnnnnnnnnnnnnnnnnnnnnnnnnnnnnnnnnnnnnnnnnnnnnnnnnnnnnnnnnnnnnnnnnnnnnnnnnnnnnnnnnnnnnnnnnnnnnnnnnnnnnnnnnnnnnnnnnnnnnnnnnnnnnnnnnnnnnnnnnnnnnnnnnnnnnnnnnnnnnnnnnnnnnnnnnnnnnnnnnnnnnnnnnnnnnnnnnnnnnnnnnnnnnnnnnnnnnnnnnataaacaaaggaatgtgaaacgccacaaggccagaagcggccacttgttacaggcgcttcctgctgaaagatgcttcttccctcccgtagcatctgccactggctccggaataatcacccctggggaagtgaagaaggaaaagg

SEQ ID NO: 42240 - DNA, 750 bp, Macaca Mulatta
  misc_feature (1)...(750): n = A,T,C or G
nnnnnnnnnnnnnnnnnnnnnnnnnnnnnnnnnnnnnnnnnnnnnnacgggcggatcatgnnnnnnnnnnnnnnnnnnnnnnnnnnntnnnnnnnnnnnnnnnnnnnnnnnnnnnnnnnnnnnnnnnnctagccgggcgaagtggcgggcgcctgtgnnnnnnnnnnnnnnannnnnnnnnnnnnnnnnnnngcgnnnnnnnnnnnnnngnnnnnnnnnnnnnnnnnnnnnncgnnnnnnnnnnnnnnnnnnnnnnnnnngagccagactcannnnnnnnnnnnnnnnnnnnnnnnnnnnnnnnnnaagtcactgttaggactgatgatgacacagatgttcatctgcctacaagcacaggcacactacaaccctggcccttgaaggacaattctgttttattaaaggcttgaatttataaccacaaagggattctttttgttcaggtagtcagcattcactcaatgaatatttgtttatgctatctttatcccaggcattgtgttaggctctgagacctagtacaaaaactgaccaggtcctttgaagtattagttattgagtgaccngtaagagaagacaaaaaagaagttaaaatccatagatgtggttcatccactcccagattagaataaagatccatggcagtttcttccaaattgttttatggaggtaggatagataatattatccctctgaaggctcattggatgagtaaattaccaattaaaggtggattggcttttcaat

SEQ ID NO: 42241 - DNA, 482 bp, Macaca Mulatta
atgcagacgcatgaggtccctgctgcaggcccttctcagtcccgttcccctctcttcatccccatgggcatcctgttttgtatttggtgcctcctgctacctggctgtcgtcctctggccacccgtggatgtgtctggaagcacacatccgtagcatgcttcacactccagcatgccagaacaccgtgtgtcttgtacaattgtgtctttccctcgtgtggtcttggagctctacccatgttccaacagagacctggcttatccatgatatctgcctgctccgtggtattcctccatacaaatacaccactgcatatgtacccgttcctttactgaccccccagtgcctgggcactctttggttttttccttatgaaaatggcccccacaggtcaggcgcagtggctcacacccgtaatccagcactctgggaggctgaggcaggtggatcacctgaggtcaggagtttgagaccagcctga

SEQ ID NO: 42242 - DNA, 656 bp, Macaca Mulatta
  misc_feature (1)...(656): n = A,T,C or G
ncaggtgaagagcgtgaagccgtgtctgaagcagctgcagcagtgcatccagaccatctccacgctgcacgatgatgagatcctgcccagcaaccccgctgacctcttccactggctgcccaaggagcacatgtgtgtgcttgtctacctggtnnnnnnnnnnnnnnnnnnnnnnnnnnnnnnnnnnnnnnnnnnnnnnnnnnnnnnnnnnnnnnnnnnnnnnnnnnnnnnnnnnnnnnnnnnnnnnnnnnnnnnnnnnnnnnnnnnnnnnnnnnnnnnnnnnnnnnnnnnnnnnnnnnnnnnnnnnnnnnnnnnnnnnnnnnnnnnnnnnnnnnnnnnnnnnnnnnnnnnnnnnnnnnnnnnnnnnnnnnnnnnnnnnnnnnnnnnnnnnnnnnnnnnnnnnnnnnnnnnnnnnnnnnnnnnnnnnnnnnnnnnnnnnnnnnnnnnnnnnnnnnnnnnnnnnnnnnnnnnnnnnnnnnnnnnnnnnnnnnnnnnnnnnnnnnnnnnnnnnnnnnnnnnnnnnnnnnnnnnnnnnnnnncgatttctgcgggaaactctgaagatgtccaatgccgaggacctgaaccggctcacagcctgctcccttgtgctcctgggccacatcttctatgtgctgggaaaccacagggtgagt

SEQ ID NO: 42243 - DNA, 811 bp, Macaca Mulatta
  misc_feature (1)...(811): n = A,T,C or G
ggaaagattgccagaaaccaccagaagctaagaagaggcaaagaaagaatcttccttagaacctttggaggaagcaaggccctgcaagagccttgatttcagacctccagcctccagaactgtgagccaatacattcctattgttttaagccacccagtttgtggtacagaagtccttggaaaccaatacataaaccttcctacattttgtaagttggcctgtggactcttccactggactcttcatgtcacagttaattatggaatgagaagatattcggaactgaactgtttagatgatcagaaattgaaattttgtgaaaaaaaaaatcccttctcatgagcagcctttagccacctatgatgatgctcaagagacagaaatgtaagtggaaaagaaaaagtttataaaggactagaatggcatatataagtaaatataattactatagtaagtatactatccttaggtaagtataaatattaaatttctttttaaagaaatagactagaaggcataggtttgatgcccaggcaagtgaaaaaattgctagtgtttgaaacagtttaacaaaaaagaagaaagaactaggaaaccaagaaataaattgagcccaggcgcggtgggctcaacgcctgtaatcccagccacttttgggaaggcctgggccgggtggggtcacggaaggtccgggaaaatgggagaaccatccctgggcttaacacaggtgaaaaaacaacccccctttttcttcccggnaacaagaaagagtaggtggataaaaannnaaacttgtccgggccgccccca

SEQ ID NO: 42244 - DNA, 2980 bp, Macaca Mulatta
  misc_feature (1)...(2980): n = A,T,C or G
aggatatgtgctgtctctggtctgtccaaactccttccaggcttggtgtgagatcacaaatgtgtcacagctgctggcttctcctgtgctctacacggacctgaattccagcataaacaacttgagcatttcagcaaatgtagaaaacaaatacagtctttatgtgggcttggtactggcagtaagttcaagtatttttattggctccagcttcatcctgaaaaagaagggcctcttgcaactggccagcaagggtgttactagagctggnnnnnnnnnnnnnnnnnnnnnnnnnnnnnnnnnnnnnnnnnnnnnnnnnnnnnnnnnnnnnnnnnnnnnnnnnnnnnnnnnnnnnnnnnnnnnnnnnnnnnnnnnnnnnnnnnnnnnnnnnnnnnnnnnnnnnnnnnnnnnnnnnnnnnnnnnnnnnnnnnnnnnnnnnnnnnnnnnnnnnnnnnnnnnnnnnnnnnnnnnnnnnnnnnnnnnnnnnnnnnnnnnnnnnnnnnnnnnnnnnnnnnnnnnnnnnnnnnnnnnnnnnnnnnnnnnnnnnnnnnnnnnnnnnnnnnnnnnnnnnnnnncagggtttatttcttttgctgtgatcataactgtgatctccttggtgctgattttgattgtggctccaaagaaaggacagaccaatatattggtttatatttcaatctgttccttgattggagcgttttcagtttcttctgtcaaaggcctgggaattgccattaaggagctgatagaatggaagccagtttacaaacatcctctggtctttgttttgctggctgtacttgtgctttcagtaactacacagattaactatctcaacaaggcactggacacctttaatacctctcttgtgacacccatttattatgtattcttcacatccatggtagtcacttgctctgccgtcttattccaagagtggtatggcatgacagctggagacatcattgggaccctgagtggattcttcactattatcattggcatcttccttctacatgcttttaaaaatactgacattacttggagtgagcttacatccactgctaagaaagaagccatctctctgaatgtcaatgaaaacaattatgttttactagagaacttggagtgttcagccccgggatacaatgatgacgttaccttgtttagtagaactgatgactgaagtctctagaaacactgagttttaaccaatatgagacacacgaagaggaaaatgaatgcttgcttcctggaagaaatgctaggaaagttagcatttttacagttttaactaatttagatgtgaggccacgtaaaaatgccatttttttggcagtcgaatttgaaaatcaaattgattatcctccagaannnnnnnnnnnnnnnnnnnnnnnnnnnnnnnnnnnnnnnnnnnnnnnnnnnnnnnnnnnnnnnnnnnnnnnnnnnnnnnnnnnnnnnnnnnnnnnnnnnnnnnnnnnnnnnnnnnnnnnnnnnnnnnnnnnnnnnnnnnnnnnnnnnnnnnnnnnnnnnnnnnnnnnnnnnnnnnnnnnnnnnnnnntattaaaactgagaagagaggccaggtatggtggttcacacctgtaatcctagcactttgggaggccaaggcgggcagatcacttgagctcaggagtttgagaccaccctgggccacaaggggagaccctgtctctacaaaaaatacaaaaattagtcaggcatggtggcacatgcctatagtcccaaccacttgaggctgaagtgggaggatcgcttgagtctgcaaggctggggctgccacgagcccaggttgcactactgcgctccagcctgggtgacaaagtaagaccctgtctcaaaaaagaagaaaaagggcaaggggcttttgctttaaaaaacnnnnnnnnnnnnagaagtgagatcacaggtgctttgttcttccttctgcaccttccttcttaaactagataattaattagttattttaagnnnnnnnnnnnnnnnnnnnnngcctgctttatttgttagtgggctagaatacacaagacacagccacccataaagagtttatgaattgtgactcaccgacataccataggaatttactaccagttaaagagggagaacgtaggaagagaaaagtacttcacataaaggaaaacgttttcttctcacaaaaacacagacgcgtgattgttttcacaggttccattaagtaactcaggtctggaagacataggacaaaatggagtttctgaagaagtccgggtgaattcagctttggagtcacttatgttcatttttttttcctttcttttagtattatcctaaaggttatttttcttgttgatatagagatttttgtaaaagattgctacattattcaggattgtatcctacacttcaattgctctcaaatgttttaaccctaaagagtgggttttccacagactggaagcaactagaaaaatctttgtgaaaaatctgaacaaagtatcacaagggctctcttgaaattttgcactttcacccttattaaggaaattataattagttactaacctttaaaaataggtatattctaataggatagaaagttaacttcctggcaaacaaaatactaagatctcaggggctactgcaggaaaataccttttttgcacattaaaacgtttataaaattttcctctctcatttcaaacgcatggcaggaataacatttttggtggtctttaatgtnnnnnnnnnnntttcttttagtattatcctaaaggttatttttcttgttgatatagagatttttgtaaaagattgctacattattcaggattgtatcctacacttcaattgctctcaaatgttttaaccctaaagagtgggttttccacagactggaagcaactagaaaaatctttgtgagaaatctgaacaaagtatcacaagggctctcttgaaatttgcacttcacccttat

SEQ ID NO: 42245 - DNA, 1448 bp, Macaca Mulatta
  misc_feature (1)...(1448): n = A,T,C or G
ctgggaccagattgtgcagctttcctgcagattcccgcagaagagatccctgcctacatgtctgtgcttcgactcctgaggaagctgctaagtcgataccggctcccagtagcaacccgagagaaccctgttatcaatgactgctgcaggggtgctatgctttccctggccacagggctggcccactccggaagtgacctctctctgttagtcccagaaattgaagatatgtacagcagcccctatctgcgcccctcagaatctcctatcaccgtcgaggtcaactgcaccaatccaggnnncaggcaccagatattgctggatgagtactgggctctacatacctggaaggcaaattatagaagtctcactgcctgaagctgctgcctctgctgacctgaannnnnnnnnnnnnnnnnnnnnnnnnnnnnnnnnnnnnnnnnnnnnnnnnnnnnnnnnnnnnnnnnnnnnnnnnnnnnnnnnnnnnnnnnnnnnnnnnnnnnnnnnnnnnnnnnnnnnnnnnnnnnnnnnnnnnnnnnnnnnnnnnnnnnnnnnnnnnnnnnnnnnnnnnnnnnnnnnnnnnnnnnnnnnnnnnnnnnnnnnnnnnnnnnnnnnnnnnnnnnnnnnnnnnnnnnnnnnnnnnnnnnnnnnnnnnnnnnnnnnnnnnnnnnnnnnnnnnnnnnnnnnnnnnnnnnnnnnnnnnnnnnnnnnnnnnnnnnnnnnnnnnnnnnnnnnnnnnnnnnnnnnnnnnnnnnnnnnnnnnnnnnnnnnnnnnnnnnnnnnnnnnnnnnnnnnnnnnnnnnnnnnnnnnnnnnnnnnnnnnnnnnnnnnnnnnnnnnnnnnnnnnnnnnnnnnnnnnnnnnnnnnnnnnnnnnnnnnnnnnnnnnnnnnnnnnnnnnnnnnnnnnnnnnnnnnnnnnnnnnnnnnnnnnnnnnnnnnnnnnnnnnnnnnnnnnnnnnnnnnnnnnnnnnnnnnnnnnnnnnnnnnnnnnnnnnnnnnnnnnnnnnnnnnnnnnnnnnnnnnnnnnnnnnnnnnnnnnnnnnnnnnnnnnnnnnnnnnnnnnnnnnnnnnnnnnnnnnnnnnnnnnnnnnnnnnnnnnnnnnnnnnnnnnnnnnnnnnnnnnnnnnnnnnnnnnnnnnnnnnnnnnnnnnnnnnnnnnnnnnnnnnnnnnnnnnnnnnnnnnnnnnnnnncagctacaggaagcctttggttgggagccattcatccgtctcttcaccgagtacaggaaccagaccaacttacccacagataatgttgacaaaatgaatctgtgggtcaagatgttctcccaccaagtgcagaagaacctggctccgttctttgaggcctgggcctggcccatccagaaggaagtggctaccagcctggcctatctgcctgaatggaaggaaaatattatgaaattgtacctcctcacacagatgta

SEQ ID NO: 42246 - DNA, 455 bp, Macaca Mulatta
agggcaaagtggaatacctcctaaagtggtagggcttctcagatgaggacaacacatgggagccagaagagaacctggattgccccgacctccttgctgagtttctgcagctacagaaaacagcacatgagatagagaaatcagagggaggcaaacgcagagctgattctgattctgaagataagggagaggagagcaaaccaaagaagaagaaagaagagtcagaaaagccacgaggctttgctcgaggagccggaggggattattggagctacagactccagtggagagctcatgttcctgatgaaatggaaaaactctgatgaggcttcctggtccctgccaaggcagccaatgtcaagtgcccacaggttgtcacatccttctatgaggaaaggctgacgtggcattcctacccctcggaggatgatgacaaaaaagatgacaagaattaa

SEQ ID NO: 42247 - DNA, 753 bp, Macaca Mulatta
ggggaggagaagccgggggagagagaaggcgggagtcttgattctcttttggccagcagtttttaggtccatcagtactgcactgcaagaatggcagattttgggatctctgctggccagtttgtggcagtggtctgggataagtcatccccagtggaggctctgaaaggtctggtggataagcttcaagtgttaactggcaatgaaggccatgtgtctgtggaaaacatcaaccagctgttgcagtctgcccacaaagaatccagctttgacattattttgtcgggtttagtcccgggaagcaccactctgcacagtgctgagattttggctgaaatcgcccggatccttcggcctggtggatgtctttttctgaaagagccggtagagacagctgtagataacaatagcaaagtgaagacagcatctaagctgtgttcagccctgactctttctggtcttgtggaagtgaaagagctgcagcggggagcccctaacccttgaggaagtacagtctgttcgagaataccttggtcatgaaagtgaccatctgctgtttgttcagatcacaggcaaaaaaccaaacttttgaagtgggttcttctagtcagcttaggctttccatcacccagaaagtctttctccttcagtgaaaccctgctgtggaaccttgcctgctgccaaagctgttggaccccctctcagcccaacgattgtgggaaggaacgtggttctttgtaatctccatttgac

SEQ ID NO: 42248 - DNA, 603 bp, Macaca Mulatta
  misc_feature (1)...(603): n = A,T,C or G
aggtgtcagtgaatggcaaacggctggacctcacctacagtttcctaggcagccagggcatcgggcagtgctatgacagctccccatgtgagcgccagccatgccaacatggtgccacgtgcatgccagctggcgagtatgagttccagtgcctgtgtcgagatggattcaaagnnnnnnnnnnnnnnnnnnnnnnnnnnnnnnnnnnnnnnnnnnnnnnnnnnnnnnnnnnnnnnnnnnnnnnnnnnnnnnnnnnnnnnnnnnnnnnnnnnnnnnnnnnnnnnnnnnnnnnnnnnnnnnnnnnnnnnnnnnnnnnnnnnnnnnnnnnnnnnnnnnnnnnnnnnnnnnnnnnnnnnnnnnnnnnnnnnnnnnnnnnnnnnnnnnnnnnnnnnnnnnnnnnnnnnnnnnnnnnnnnnnnnnnnnnnnnnnnnnnnnnnnnnnnnnnnnnnnnnnnnnnnnnnnnnnnnnnnnnnnnnnnnnnnnnnnnnnnnnnnnnnggagggccgcagaggttccatccaggtcgacggtgaggagctggtcagcggccggtctctaggtcccaacgtggcagtcaacgccaagggcagcgtctacatcggt

SEQ ID NO: 42249 - DNA, 509 bp, Macaca Mulatta
acggcctctccagggtgactgtggattcccagcgctctgtggaatatggttcacagaacacctgcatctgctgttgggatgcccccaaactgtaatagcagcacgctgaatctttcatcagaaagaaccatcttatcatctggaggctggtcaggaaaataaactcaaaagccagcgcccctcccttcagaactctgctcctgaggtcacctttcagtctgcataagtcctcccaacctgggcgccccagagcttctcagcggatccatcccctcttccattctctcccaaggtttcagctgcattctgctctgcatggtcttcctctcctcttcatacaaactagaccttcaccccctgcccgctacggcgctgcaaacgccactgagatacatttgtttgggtcccaatgtcttttgggggctccaaaaagcccagaaagagtcatgccttcagccatggcccatgggatgccttttcccggagtcagccccatgggtcagtgatcc

SEQ ID NO: 42250 - DNA, 818 bp, Macaca Mulatta
  misc_feature (1)...(818): n = A,T,C or G
ggcaaagtgagaaacatcacagtgactttaaaatatactacaaagcaatagcaaccaaaacagcatggtactggcataaaaacagacacatagaaaaatagaccagaaaaaaaaaaccacatatgaaaacattaaatacgtaaatacatctatatatttacagccaactgatcttcaacaaaggtgccaagaacacacattggggaaaatacagttgcttcaaaaaatggcactgggaaaagtgaatatccacattcagaagaatgaaattagactctaatttctcaccactaacaaaaatcaactcaaaatgtattaaagacttagtataagaccacaagctataacactattagaataaaaaattaaggaaatgttttagaacattggtcctggcaaggagttttttaataagacctcagaagcgtaggcaacaaaagcaaaaatagacaaatganattacatcaaaccaaaaaccttcttcacaggaaggcttgtcgtgctatgggttagaaaattttggattactgctgttttgtgaattaaaataaatattcctttggtcaaattttgtcccattgactttagtctaattatttataattacaagtaaggttttttattaataattttatttccaaatttttttattacatttgaaagggaagtaaaatcccatatttttaaacttgaattgtaatatttcaaataattgtggggttgccctagaaatacccattgttaataaagttaagccnnnnnnnnnnnnnnnnnnnnnnnnnnnnnnnnnngggggcccggaaagttggggggggcca

SEQ ID NO: 42251 - DNA, 761 bp, Macaca Mulatta
  misc_feature (1)...(761): n = A,T,C or G
ggcactctctctaaagtgttgtggggcctgttcctgggtctgttgggaccctgcctttgctgatttgcacaggttttggtcttttacattgagagcaattaaagttaaatggaattggtaggatcaaagagtcattgatggcgtataaacacaagaccatcttgaaagttctgaaacgtcttatttctgtatagaacttcatttttactgggcacttagaacaataaaaaatcctgcagaccatttaaacaagtgaaaccctaatatataagtgagcgtatggttacgttttcacttgttttcatactttgcaaatttgaaagtaactcatgttggaaaaactgttctttagctttcccagttagtatctatagataatataaatattatctatagatattcccagttattcatatgtactgatatggtacttaaaacaatctgcatttgaaaatttactccatatattaaattacccttacagataaactatgcagttacattgtactaactttagcaaccctgaaatgcatcattactggattatgtgaagtatttctcctttgcaattccatattcatcaagctgcttccttcacaccaggcaaaatgtcatctggggtgcttaagttgaaaagcaaatttctaaatctttatgtgttttccggggaagaataaagtggtggactangttaaaaaaggttagggggcaagtcttgacaataaacatctaggcatttcactggacttgcccaagggttg

SEQ ID NO: 42252 - DNA, 911 bp, Macaca Mulatta
acaggctgggcccacgacggggctcttagccaggctctgaggcccaggcagggcctagggtgagaagatggcagatggtggcggcgacctgagcaccaggatgttcacagaagaccaggatgtagatgagggacttctctgtgacgctgtattcaagcacttcaaaagacataaggtggagatttcaaatgcaataaaaaagacatttccattccttgagggcctccgtgaccgtgaactcatcacaaataaaatgtttgacgattctcaagattcttgtagaaacctggtccctgtacagagagtagtgtacaatgttctcagtgaactggagaagatgtttagcctgccagttctggaagcactgttcagcgaggtcaacctgcaggaataccccgatttaattcacatttatgaaagcttcaaaaatgtaatccaagacaaattgcctctccgagaaagtgatggagaagagagggaggagaggcctggcatccaactaagtcttgaacaaggaactggtgaaaactcttttcaaagcctgacttggccccgttgggattccccatctcatgatggtacaaccccacctgaaaatggactctcagagcacccctgtgaaacagaagagataaatgcagacagaaaagatacaagcagtgacaaaaatggttcgctaggaagccacaaacaaatgaacaaagtgcccaaaagactgagccacagaatctgtgaacagtcgctgtccaagtgactaaggggatgcggaaggagagcccggccatgcccggatgacacgggcgaaccagaacaggaaccagataatcggacggcgacgggggattaaggcacaccacgtactaagcgagggaaccggagtaaaatatccaggaacatagaaccaggatagc

SEQ ID NO: 42253 - DNA, 682 bp, Macaca Mulatta
ctttgccatgagtttatcagatcctggcccatgaggctgttctacagaaccctcacctgggcccacacccagttgatcattgcctacatcatgctggctgtggaggtcaggagcctctcctctctctggttgctctgtaattcgtacaacagtgtctttcccgtggtgtactgtattctgcttttgctattggtgaagagaaagcacaaatgtaagtgacatctttccctggctttcatcttatacgcccatgaaacagtttagaaagtgccagatgacgcatcaataatgcgtacatttgaacttttccataataaaaatttttctaaagttttagatgaatatacccagtgacttgcagtaggaatttgtgtatctactttagcaagctattctgctggtactgaggatacgaaagggaaaaatatgtggtttcttcccataaggtttatagtctagatgggggagcaaagattaagtaaagtgatacataaaaacacaaggtgctgtgaacgagatggcaaacgctctatatatagacaccccaaaattgagtgttcagttggcccacctgatcctggaatgggagctttagcaacacaaaaccaaaacaaaacctaattcattatcacattggtttgttatgtggactacagactcatatccattattaagtttgaaa

SEQ ID NO: 42254 - DNA, 773 bp, Macaca Mulatta
  misc_feature (1)...(773): n = A,T,C or G
ggcacatgaacccagacagcnnnnnnnnnnnnnnnnnnnnnntgcgccattgcactccatccagcctgggagacagattgnnnnnnnnnnnnnnnnnnnnnnnnnnnnnntttccttttctctgttttgaagtagggcttttctttgagtattggtctactggttaaagatctataacatctttccaacggtaagccatgtttgtagtatgtcttctacaatttccagattaggttcctttaaaatagaatgaacaattaaaaacattaaaaaaaagatgagtgcagaatccttttagatgtttattacttctcccagctgttataattgtcttgctcacctctaatttcatagcagttatttttttagccattcacatctgtgtctttatgaagcatttaattttcctagaaacaataattatttttataattgtattttatcatattatgttacatttagactgtttaattacaagtaaaactgatgtagcaacttggggaaaaagggaacttactcttgataagcatactaatcaacttccgaaagatagtaccttagcattttggagagcacctgataggaatgaatgttcagcattctacaaacatcatttatnnnnnnnnnnnnnnnnnnnnnnnatgaatcagtcacgtctccctaaaagggaatgtcaggtggagaagcttttttacctggaaatctgtaattttctcctggaagggaaaaaaagccctaattagctttttcaaggaagctttccttccaaaggg

SEQ ID NO: 42255 - DNA, 1605 bp, Macaca Mulatta
agatgtatatacaatgtcttcatgttatctggttttgtacctagtcctttgcatggatatatcggtacctaatgaaaatcgaggatcagtgtatgacaaatctcccatcctcccctttccttattgcctgtgtcggcaatagacaagtagaatagttgtgtgttgtttacttacttgttcctgttctggagagatttctattattggtaggggaatattcttaataagtataaatatgttttcatatactttatttcatttcgtagtcttttgcatggctatgtagggacctaatagaaagttaagtttcatactatgacacctcacttcttcttttcctacatatgtaggttattttatttcattctctaggatctattccattaaggatacaagtatatagatgcacatacatcgtttgatatcttttttcccccattattttcctttagcactaagtcccttgcaagggatctgactgtacctaacaaaaataaagacctactaaatccctgccatctggctggaaggtgtagcggtgtagtgatgtaactaatggcaacaagtgtgcagcagataaaacaggctcggctatggttgagttctgaaagctaattagatccagcatttcttatgttgattcaaattgaatgagatagtgaaaagggacctgtgcttttgtaaattctagaaaggcaagaggacagtattgaataaaggtgtgtttaaacttcattgctcgtatatcttttagtaactggtaaaccggcgaagctgataagccaataagagtgctgtctagaactcatttgcaaacccttaagagtagcttctttttgaggcctggacttctagttcatctatagaagtctattatgattccatcattgcatagcttgtgtacctggtagaaattgtttgttggagtgacccttttgagttattgacatggctccgatgaatagaacatgagccccaaaactaaatccaaaaggaattttctatctttcatcccccacatgtggcaagacaagttagccctttcctacccagagttcttttgtgtgactgcatctttctcctctgttctccattgtgtgctttcctttttgtctttagtgcctacactgttaggtgttttcttcactggcattcacaaatttaagccattgctgcctcattagccttgtattttgtgtgcatatcatgtatccagaactgtatgttcactttaagcattcttacatcacactgtctcttcatctaccatatggcaaatgttaaaactccacatttgtctgcatcagagaaaatgcatgtgcacacatcctccctccctccctctctgctctcttcccttctttcaagtctcttagcattgtttgttttcccatttctgatactactactccatgctgaagatttgccatattactattttggaaatattgaatgatagaactcctagaaaattttcaaagaaatgttatatactgtatatcaaactctcaggttctagtgttgaaaaagcctatactttactattacttatacctgctgccatagaaaaaactaaggtgtattcatgacacattttaatttgat

SEQ ID NO: 42256 - DNA, 243 bp, Macaca Mulatta
atctctgcctgagtatagaactgcagcataggtatctaaagacacagtgatatttccttgggaagctctggttggaggttatcacccacctagctctctctcccccgatattgtttttgactgtccttagaaagaacgtgtaccagagcaatggctgactcaagaacaatgtaagggttgggggaagcaacaactttataaagcatttcaaacacgtgttttgcaagccaaacataatcagaa

SEQ ID NO: 42257 - DNA, 345 bp, Macaca Mulatta
tcctccaccgtgaagtccccagtccaggtcatcctgctgcgtgccctcgccttcctggcctgcgccttcctactgaccaccacactgtatggggccagcgaccccttcgccccgggcaccactgtgcccctggccctgccacctggtggcaatggctcggccacacctgacaatggcactgcccctggggccgagggctggcggcagctgctgggactgctccccgagcacatggcggagaagctgtgggaggcctgggccttcgggcagagccaccagacgggcgtcgtggcactgggcctgctcacctgcttgctggcaatgctgctggctggccgcatcagg

SEQ ID NO: 42258 - DNA, 1176 bp, Macaca Mulatta
  misc_feature (1)...(1176): n = A,T,C or G
aagtgggggtcaccaccattctggtcttgactatcaccctggccatctacggcacccggaagtcaagaagaaagcatatcaggaaattggggaaaggcagagtttggttccaggcactgcagcaactggagacacacctcacgaagagcaggggcagagtccagcttaaatctctccccgaaaatggtttctctcatctccagtgtggtcactgctgaccactctgttttcctaaactttgaaatggcatgtgcaaccaaaagtaggtatatttgtgacttcttgtttaagtctctgggacagaaaaattcacactgttacatggataagggtgggattggggagagggaacagttgggagtagaagcaaaagccattctgggactaaaataggaagcagatgccgtttcccagtgtgtgtccctgtcttcacctaaatgcatttgtgtaaaaatagaggagggagaatgctaacatttggatttggaagccatgaatttactctgaagtttgcagttgtttccaatttgtgagctctaagagtttctgcctgtaacaactaccctccctttattttgattttttaaaagctgtctgaatttcacactcttagagcccagaagagtcccgaaaagacacaagtcttgcttggttactgctttttaactgtgagggctctatgttgacagactgttatctactcggagccacctcaaacatctgaaaagaaagatgttgcctgtgccgattccactttttccagctgccccttgatgaacactcccttacaccagaccactcttggacttctgacttgtgtcatcaagtcctcagaaaatattttaacttgtaaactattagtgggtcaaagaggaagggatgatttggagacaaggagtaatgaaagatgggtaaaaactgaaaaaattccggtgctgagtactaccgcttcatcttccacggatggtcatgacctttcctgtccttctgttacatgnnnnnnnnnnnnnnnnnnnacaccccacatttcaataagtctgcattgttccaggtccttactattcctgtcctcctgttatatgnnnnnnnnnnnnnnnnnnnnnnnnnnnnnnnnnnnnnnnttcacatttcagtaagtctgcattggttctggggggtaaaacaggcaagaaaatt

SEQ ID NO: 42259 - DNA, 96 bp, Macaca Mulatta
agggagctggaactgactgcaagatgccttaagggtgtagaacaagagaaaaaggaactgaggcacctcacggagtccttgcagcagacgctggag

SEQ ID NO: 42260 - DNA, 572 bp, Macaca Mulatta
tgtgagcatctagtaagcttgtgaccttgatactttttaaacattatctttttatttgcttggagtatcaaccatacagctgactctagagcggtgaagggagtagggattagagcaaattcggacttcctgcccctatggttctcagttctcatgtctctctgggaaatgtgttggcccaattccctatctgccactctgagtctcttgagtaaatgtgtataaatgagaaaaattatctcaaagatttaacttataatttagatattttcttctttctaaactcaggaataaacctggtttatagataacgtaatatggctactagagctataattgggtaggtgactagaagcattctttcaaatatatttcttgtaaagacatctactttgttttaactaggaaaagaaactcctcattaaaataagataaacatttccataagcactttctacaagagtgtaccatctgtctaccatgcatcccagagtgtttgtatcttgctcacagtatttcaaaaattcctatgggtgaaaaaaatgtacatttcttaatttattggaaaagtg

SEQ ID NO: 42261 - DNA, 654 bp, Macaca Mulatta
catttttgtaaatttcaaaagaaagtataagtttaattattaaaatttgctctcttaccaaatgaatacaagggcttttgaataatctcattgcataagaggccctcatttcacaaaaatggtaagaactaaatcaaaagattcaaggattttccctttataaagaatcagaaaatttgacaatccagacattcaaaaaaacattctgccagttgacttttttggactactatttgattagatgattggttctgaaattaaactggatgtatgcccaaattaaattagcataggaatgtgtatggttttttttaaaagtatattttagcatattaataatttaatttacgttcagttacaaacctcattctttatagcattaataggtttagggaatgttcttgatggtgtgctgattaccatattagagaaaaaataaactccccatattataattcacttgtttagtaaggtgagtttcttacttgtgatttgagtggaccatgcctaaaaattacaagtatatttgcgctaagcgacaaaatatgtccctgaaaaatcttagcatacttgaatcataaaatgtaatggattgtattaaattctaaatgttaagaaataagtggatttaagattttgtctttcttttcttat

SEQ ID NO: 42262 - DNA, 104 bp, Macaca Mulatta
ctttcctctgcttcaggccgcacgaatacagtctggacatccccgaggggcctgcagtgcagtattgcaatttggcaagagaccttcagctcgaggccttcctg

SEQ ID NO: 42263 - DNA, 641 bp, Macaca Mulatta
  misc_feature (1)...(641): n = A,T,C or G
gggatcttttcaagttacatataatacctatatgtagctgatatacatttcactgcaagggtattgaattattttgtaactggccttagagggttttcacatggcttcttttttnnnnnnnnnnnnnnnnnnnnnnctaccaactaaaagccatgaactcnnnnnnnnnnnnnnnnnnnnncactctgtactatgaaaaaagtttaagcatatataaaagtagaattgtactacttttaataaatccccatgaacctgtcacccagcttcaccattatcagattatggcccatcttgtttcacttataactctacttatatcccatgcttttttatacatataattttaaagcgtatctgagatatcatagtctttcaaatgtaaatgtttcaatatttgctgtaaaaggtatgaattttaaaaatgtaaacataatactattttcatacctaaacaattaacagtaattctttaatatcaattttctagttttctcaaagatgtcataaacttttttttgttcattttgttttttaacttatctgaatcaagatccaaggaagaaaacacattgtgatgggttgatatgtctcctaatttcttttatgtatgggtaccctctcctgttttctctctgtan

SEQ ID NO: 42264 - DNA, 589 bp, Macaca Mulatta
caaaggcatttatttgcacatttgttcctattatccagctatcaatattttagaacattctaaaatgggtcccaaattgctgaagatttatcatcctgctgttccagggattgttggtaatcttcatcctttcctaattagaagaggcccctgggctgcaagtacagtcagcaaggtgggtggttacactggaagaaggagcaggctgaactcaggccagcggagtcttcatgctcatcaggttctcacctcttgtctccctctgcaggcacatcctcatctgccttgctgcctacctgggctgtgtatgctttgcctactttgatgctgcctcagagattcctgagcaaggccctgtcatcaagttctggcctagcgagaaatgggccttcattggtgtcccctacgtgtcccttctgtgtgccaacaagaaatcatcagtcaagatcacgtgatggcaaggtggtggctggcttctctgcttatcgcccctcatgcagtgggcttcctttgctaggaagacagccaagggatttcgaagagttgggatgtgggctatcttttcaaaaatctgtttgctgaggctctc

SEQ ID NO: 42265 - DNA, 631 bp, Macaca Mulatta
  misc_feature (1)...(631): n = A,T,C or G
acaggtgtattactgtcgcatgtctatcatttcctgcacacggacctgtgttcctgatttgtctcttgatttccactgactaaacctgcacctttagcatatcccagaagtgggaatcaaggtttgcagtattagaaatacatacatgatttatgtttccagactattgccaccctttaaattaagcaaactgctttaggtatctagttgacagcattataacagtgcagtggcacagtcatggctcactgcagactcaacctcccaagtagttgggacacctggctaatttttggtagaaacagggtctcactnnnnnnnnnnnnnnnnnnnnnnnncnnnnnnnnnnnnnnnnnnnnnnnnnnnnnnnnnnnnnnnnnnnnnnnnnnnnnnnnnnnnnnnttgtgtctagccccatgagtgtcttttggagtaaaatattgtagcatgggaacaaagagacaagccatggccgctgccacgtataagtgctagaggttataacccctgctctaaagtggtgtttttaggaagcaaagcagagaattgaactcccaggttctctgaccaataacctaaggaccactggcaacatctaagattgcagatctgagaatcagatactacctgc

SEQ ID NO: 42266 - DNA, 895 bp, Macaca Mulatta
aaccctctggagtaaataatctataaagaagacaggcagggtacattttcagagggaagacagtcttcacctgggcacctatcacatgtcacagttgctaggacacagcccttcgggcagcttgggaccctgccagggtggccacctcaaggctcctttctctttattccttgtctggaactgtcaccctgcctggcacagagaagggcttagtgaggtttgtgggggtgaactgagcattctcctggtcacctagagggtgtcttctgtgtgaggaaaagtagccaccatttctaggtttgttacaagcttcatggactgctttcttccccttctctggcaggtgggcattaactaccagcccctgacggtggtccctgggggaaacccggccaagttgcaatgggccatgtgcatgctaagcaacatcatagccatcaccaaggcctgggcctgcctggaacataagtttggtctcatgtatgccaggcaggcctttgtgcactggtacatgcgggaaggcatggcggagggggagtcctctgaggcttgcaaggacctggcagctctgggggattatgaagaggtgggcgtggattccgtggaagcggaggctgaagaaggtgaagaatagcgaggggagggtgcggtggactctctcctgccacccccaccatggctgctttcaagctgtttgcaactcaagtttctctacaaaaccaagacctctgtgtgtcgtgctgcttggctctgcctacaggagcaggtgggaccccagagcctgcgtggacagtcggtggggtcccagcctgccctgctggcatggggttggggtgcagcacgagtgtatgtccttaaggagctgccatggaagtatttgacccaggggaaacag

SEQ ID NO: 42267 - DNA, 651 bp, Macaca Mulatta
ctttgcttcatcatctgaaggtaaaattttccagatacggcaggcggctttcagagtacaataaacagggaatgagaactatttacatggaagtttcttcctcatgatgcggtggagaagcctcggccacttggttctgccggatgttcctggggttactgtaaatgggaaggacaggcagagctaaacaaggtttatcatttagaagtgcctgtgtgaagtcacttttgctggaaactgcagcctgggagctttctttgtattcacatctcgctcttctgtcaagtacactttaccctgaccttatgagtggatgaagatacctcagttgtctgactttgccaattgcttaatttcagaattcaaaaagggggaagaaaaacatcctgctaaaatatgaacatctgagtgtcttattttctaacatcgtcaatagctgtgagcgtcagcattaaatattctcccaaggagtgccatgaaattgaagtcactttattaaaaacaggtgtatctgcaaaacagccaagagactcagacgttgaaagccagagatgacactgagcgtgcttttattgtggcccgccatcttcaagtgggacatgttgattgatgagtgattgcctgtccataaactttctcatcatcctgttc

SEQ ID NO: 42268 - DNA, 752 bp, Macaca Mulatta
  misc_feature (1)...(752): n = A,T,C or G
gacataattaaataaaagcaaaatatcatgtgcacaaaaatgtntactacagtattgcctctatgcagtaaaaacctaggttatatttatatgcaacaattgagagtggttattgaattgattaatctcccagatgtgtcttacatcccccaccccttctttttacatctctcactctgtcatgcatatataatagggtctaaaacagttgctggttgatttataattaagtccttttggataatatacttggagggtgagtttctgctttcagctaatgactagattttacaatacttacaaattatgtggccacccccttttaatgtattcttgttttcttctcttcctttattatttttgatgcctcagatcatttctttatgttccctttttaggtatcagcctggtggacgatatctctcgatgtcccgcagtgatatatttaatgatgtttaaagtctgaaaaagtttgtgggaccactaaccaaggtcgacacatcagttcagtcttgatgaacatctgtgtaccctagaatttcctctatactcagtgaaaagtgtcaagataacaaaaaagacactgagaattaattatatcttaggaataatagtttaatgtgcattgaatagagtatcaccttttccaacaagatttattacatatcatttcctaagcatctgccttagaagtacagttacagtggaaggattttaaaaaagagcaacatatgttaagaacatgcagttca

SEQ ID NO: 42269 - DNA, 756 bp, Macaca Mulatta
  misc_feature (1)...(756): n = A,T,C or G
cttttaaaaagtaagaatttttattcagaattaattttagatttataggcaaggtggcaacgatggttcaggagttctcatagccccttctccagattgccatcatgtggtatccctacagattcgtagtacatttgtcaaaaccaaggaaattaacattgattcaaaagtattaataaacactgtattctgatttacccagtttttctttctaatgcctttttctgttccaggatttaatctaggatgccatattccattttagtctctatgcntatggtcattcattcattcgttcatttatttattttgagatggaagctccctccatcgtnnnnnnnnnnnnnnnnnnnnnnnnnnnnnnnnnnnnnnnnnttccaccttctgggttcaagcaactctcctgcccctnnnnnnnnnnnnnnnnnnnnnnnnnnnnnncaccaccacannnnnnnnnnnnnnnnnnnnnnnnnnnnnnannnnnnnnnnnnnnntaggctgacctcgaatttctgatctcaagtgatccatctgcctgggcctctnnnnnnnnnnnnnnnnnnnnnnnaagccaccacacccggccacattttttaaaattatttatttttgagacggactcttgctcttcnnnnnnnnnnnnnnnnnnnnnnntgcannnnnnnnnnnnnnnnnnnnnngcctcctannnnnnnnnnnnnnnnnnnnnnnnnnnnnnnnnnnnnnnnnnnnnnnnnnnnncaccaccacgcc

SEQ ID NO: 42270 - DNA, 763 bp, Macaca Mulatta
  misc_feature (1)...(763): n = A,T,C or G
gggagggaagcaaggataactctatgattgggtagcttgtctagaagaagggcagacaagtgaacctaagctgcagtcgatgatgaagtcactagctgggaaaggggatgtttgctgttttgtggtttgcacactgaccttgttttgtgcttaaacaaaattgtcaagtgattttgttttttgtctcacttcatcacagtcactgagtgatcttgtccgatgctggtgttttgtgagattgtgtccaagagaactcctgacctcaaatagaagagaacttttggacacaaacacacatagcttacaggtggtacctgtgagcaccaggtcagccctaacagctctgaagcctggctgtgtcagaccagttcccagattacaggagcggctttcctctcacctgctaagtcatcacagataagaggaaaattatgggtcagttaatagtagcattttttcctttcaaatggctctggttanaaaataataagataaaaaaatagcattttggtggaatcaaactgaacacttgtacttagtgttggttagggcatttatgttggtggaatctctgttctctagtgataagcccaggggctggtgttttttatagaaagaaagaaccgccacttgggtaaacatataaaaaagcccctttattccacagtaaaccccagggaggacctaaataaatattccaaagggcctggtaacctttggatttggactaaaaaaccttgggaaccgcttccctcacacctta

SEQ ID NO: 42271 - DNA, 135 bp, Macaca Mulatta
aagaacacatacgggcggaatgatggggcctggatgaaggcccccctggccaaggatgagcggatttacgtagccaactattactacggcaacaccgtggtagagtatccggaacctggagaacttcaaacaagg

SEQ ID NO: 42272 - DNA, 422 bp, Macaca Mulatta
  misc_feature (1)...(422): n = A,T,C or G
agacaaggtcctgacggagaagagaaagctgttaatccgttctttggatgaaggtacaataaatggcttactgggtgaattattcgagaaaagggtgctgaatcaggaagagatagagatagtaaaatgtaaaaatgctacagttatggataaggcccgagctttgcttgactctgttattctgaaaggggctccggcatgccaaatttgtgtcacatacatttgtgaagaagacagtcacctggcaggacactgcgactctcagcaggtnnnnnnnnnnnnnnnnnnnnnnnnnnnnnnnnnnnnnnnnnnnnnnnnnnnnnnnnnncagctcctcaggcagtgcaggacaacccagctatgtccacatcctcaagcccagaaggcagcatcaagctttgctttctagaagaacctcaaag

SEQ ID NO: 42273 - DNA, 277 bp, Macaca Mulatta
  misc_feature (1)...(277): n = A,T,C or G
gctctttcagagacatttttactcatgatttggaaaaaccaacnnnnnnnnnnnnnnnnnnttcttatctgaaacttgaacttatcaaaactcacttgtctagaaattagcctgggaatatccaggcactggaatttctcactttttttccttctccctctcaacttcagtactganangagaaagtcatttccaaatgtctatgttttgaatttttaaatagaccaaatttagagtcatntaaagatataataattagctttcttaacaattttca

SEQ ID NO: 42274 - DNA, 3651 bp, Macaca Mulatta
  misc_feature (1)...(3651): n = A,T,C or G
gttcaagttcgacaagtggctgtgaaatttgccagcacggtgtttccctcagatcatatcccttccagatattttctgctactgcatgcaggagatcnnnnnnnnnnnnnnnnnnnnnnnnnnnnnnnnnnnnnnnnnnnnnnnnnnnnnnnnnnnnnnnnnnnnnnnnnnnnnnnnnnnnnnnnnnnnnnnnnnnnnnnnnnnnnnnnnnnnnnnnnnnnnnnnnnnnnnnnnnnnnnnnnnnnnnnnnnnnnnnnnnnnnnnnnnnnnnnnnnnnnnnnnnnnnnnnnnnnnnnnnnnnnnnnnnnnnnnnnnnnnnnnnnnnnnnnnnnnnnnnnnnnnnnnnnnnnnnnnnnnnnnnnnnnnnnnnnnnnnnnnnnnnnnnnnnnnnnnnnnnnnnnnnnnnnnnnnnnnnnnnnnnnnnnnnnnnnnnnnnnnnnnnnnnnnnnnnnnnnnnnnnnnnnnnnnnnnnnnnnnnnnnnnnnnnnnnnnnnnnnnnnnnnnnnnnnnnnnnnnnnnnnnnnnnnnnnnnnnnnnnnnnnnnnnnnnnnnnnnnnnnnnnnnnnnnnnnnnnnnnnnnnnnnnnnnnnnnnnnnnnnnnnnnnnnnnnnnnnnnnnnnnnnnnnnnnnnnnnnnnnnnnnnnnnnnnnnnnnnnnnnnnnnnnnnnnnnnnnnnnnnnnnnnnnnnnnnnnnnnnnnnnnnnnnnnnnnnnnnnnnnnnnnnnnnnnnnnnnnnnnnnnnnnnnnnnnnnnnnnnnnnnnnnnnnnnnnnnnnnnnnnnnnnnnnnnnnnnnnnnnnnnnnnnnnnnnnnnnnnnnnnnnnnnnnnnnnnnnnnnnnnnnnnnnnnnnnnnnnnnnnnnnnnnnnnnnnnnnnnnnnnnnnnnnnnnnnnnnnnnnnnnnnnnnnnnnnnnnnnnnnnnnnnnnnnnnnnnnnnnnnnnnnnnnnnnnnnnnnnnnnnnnnnnnnnnnnnnnnnnnnnnnnnnnnnnnnnnnnnnnnnnnnnnnnnnnnnnnnnnnnnnnnnnnnnnnnnnnnnnnnnnnnnnnnnnnnnnnnnnnnnnnnnnnnnnnnnnnnnnnnnnnnnnnnnnnnnnnnnnnnnnnnnnnnnnnnnnnnnnnnnnnnnnnnnnnnnnnnnnnnnnnnnnnnnnnnnnnnnnnnnnnnnnnnnnnnnnnnnnnnnnnnnnnnnggccaagcagatagaacttcagttcactattggcgaagccattaccagcgctgcaataggaactagttctgtggctgcccgagatgcctggctagtgactgaagaggaatatactcctcctgctggnnnnnnnnnnnnnnnnnnnnnnnnnnnnnnnnnnnnnnnnnnnnnnnnnnnnnnnnnnnnnnnnnnnnnnnnnnnnnnnnnnnnnnnnnnnnnnnnnnnnnnnnnnnnnnnnnnnnnnnnnnnnnnnnnnnnnnnnnnnnnnnnnnnnnnnnnnnnnnnnnnnnnnnnnnnnnnnnnnnnnnnnnnnnnnnnnnnnnnnnnnnnnnnnnnnnnnnnnnnnnnnnnnnnnnnnnnnnnnnnnnnnnnnnnnnnnnnnnnnnnnnnnnnnnnnnnnnnnnnnnnnnnnnnnnnnnnnnnnnnnnnnnnnnnnnnnnnnnnnnnnnnnnnnnnnnnnnnnnnnnnnnnnnnnnnnnnnnnnnnnnnnnnnnnnnnnnnnnnnnnnnnnnnnnnnnnnnnnnnnnnnnnnnnnnnnnnnnnnnnnnnnnnnnnnnnnnnnnnnnnnnnnnnnnnnnnnnnnnnnnnnnnnnnnnnnnnnnnnnnnnnnnnnnnnnnnnnnnnnnnnnnnnnnnnnnnnnnnnnnnnnnnnnnnnnnnnnnnnnnnnnnnnnnnnnnnnnnnnnnnnnnnnnnnnnnnnnnnnnnnnnnnnnnnnnnnnnnnnnnnnnnnnnnnnnnnnnnnnnnnnnnnnnnnnnnnnnnnnnnnnnnnnnnnnnnnnnnnnnnnnnnnnnnnnnnnnnnnnnnnnnnnnnnnnnnnnnnnnnnnnnnnnnnnnnnnnnnnnnnnnnnnnnnnnnnnnnnnnnnnnnnnnnnnnnnnnnnnnnnnnnnnnnnnnnnnnnnnnnnnnnnnnnnnnnnnnnnnnnnnnnnnnnnnnnnnnnnnnnnnnnnnnnnnnnnnnnnnnnnnnnnnnnnnnnnnnnnnnnnnnnnnnnnnnnnnnnnnnnnnnnnnnnnnnnnnnnnnnnnnnnnnnnnnnnnnnnnnnnnnnnnnnnnnnnnnnnnnnnnnnnnnnnnnnnnnnnnnnnnnnnnnnnnnnnnnnnnnnnnnnnnnnnnnnnnnnnnnnnnnnnnnnnnnnnnnnnnnnnnnnnnnnnnnnnnnnnnnnnnnnnnnnnnnnnnnnnnnnnnnnnnnnnnnnnnnnnnnnnnnnnnnnnnnnnnnnnnnnnnnnnnnnnnnnnnnnnnnnnnnnnnnnnnnnnnnnnnnnnnnnnnnnnnnnnnnnnnnnnnnnnnnnnnnnnnnnnnnnnnnnnnnnnnnnnnnnnnnnnnnnnnnnnnnnnnnnnnnnnnnnnnnnnnnnnnnnnnnnnnnnnnnnnnnnnnnnnnnnnnnnnnnnnnnnnnnnnnnnnnnnnnnnnnnnnnnnnnnnnnnnnnnnnnnnnnnnnnnnnnnnnnnnnnnnnnnnnnnnnnnnnnnnnnnnnnnnnnnnnnnnnnnnnnnnnnnnnnnnnnnnnnnnnnnnnnnnnnnnnnnnnnnnnnnnnnnnnnnnnnnnnnnnnnnnnnnnnnnnnnnnnnnnnnnnnnnnnnnnnnnnnnnnnnnnnnnnnnnnnnnnnnnnnnnnnnnnnnnnnnnnnnnnnnnnnnnnnnnnnnnnnnnnnnnnnnnnnnnnnnnnnnnnnnnnnnnnnnnnnnnnnnnnnnnnnnnnnnnnnnnnnnnnnnnnnnnnnnnnnnnnnnnnnnnnnnnnnnnnnnnnnnnnnnnnnnnnnnnnnnnnnnnnnnnnnnnnnnnnnnnnnnnnnnnnnnnnnnnnnnnnnnnnnnnnnnnnnnnnnnnnnnnnnnnnnnnnnnnnnnnnnnnnnnnnnnnnnnnnnnnnnnnnnnnnnnnnnntttggtggcattcgattatacctgcaggagttaattagtattacccagaaggctttgcagtctcagtcttggaaaatgaaagcccagggtgcaattgccatggcatcaattgcaaagcaaactagctctctagtacctccatgtctcgaaatgatactgaccgcattgctgcaaggcctggctggaagaacgtgggcagnnnnnnnnnnnnnnnnnnnnnnnnnnnnnnnnnnnnnnnnnnnnnnnnnnnnnnnnnnnnnnnnnnnnnnnnnnnnnnnnnnnnnnnnnnnnnnnnnnnnnnnnnnnnnnnnnnnnnnnnnnnnnnnnnnnnnnnnnnnnnnnnnnnnnnnnnnnnnnnnnnnnnnnnnnnnnnnnnnnnnnnnnnnnnnnnnnnnnnnnnnnnnnnnnnnnnnnnnnnnnnnnnnnnnnnnnnnnnnngaattcacttgaaagtagtggggtccagacaaccaaaaatgaagatgagaatgagaaggaaaaggagctccagctggaatatctgctgggtgcctttgaaagcctgggcaaagcctggccccgaaacgcagagacccaacgtn

SEQ ID NO: 42275 - DNA, 631 bp, Macaca Mulatta
  misc_feature (1)...(631): n = A,T,C or G
gggggaagaagaagaggcgagaacgacccccggaccgaccaaagcccgcgcgcgctgcatcccgcgtccagcacctacgtcccgccgccgtcgccaccatgcccaagagaaaggctgaaggggatgctaaaggagataaagccaaggtgaaggacgaaccacagagaagatccgcgaggttgtctgctaaacctgctcctccaaagccagagcccaagcctaaaaaggcccctgcaaagaagggagagaaggtacccaaagggacaaagggaaaagctgatgctggcaaggaggggaataaccctgcagaaaacggagatgccaaaacagaccaggcacagaaagctgaaggtgctggagatgccaagtgaagtgtgtgcatttttgataactgtgtacttctggtgactgtacagtttgaaatactattttttatcaagttttataaaaatgcagaattttgttnnnnnnnnnnnnnnnnnnnnnnnnnnnctatgttgttagcacacagaacacttcattgttgtttttgggggaaggggcatatgtcactaatagaatgtctccaaagctggattaatgtgggggaaacacctttcccttctagttttgagagactccctctggntcc

SEQ ID NO: 42276 - DNA, 551 bp, Macaca Mulatta
  misc_feature (1)...(551): n = A,T,C or G
ggggtgctgagattaannnnnnnnnnnnnnnnnnnnnnnnnnnnnnnnnnnnnnnnnngccgaataatagtctgttgtatgaatatgccacattttctttatgcattcattcattgatggacatttgggttgtttttaattatcaactattatgagtaatgacactgtgaaaactcattcccaagttttttgtggggagatacgttttcacttctcttggctatatacccacaagtggaactgctgaatcctatggtaattttatgtttaatcctttgagaagttgccaaactattttccaaagtggttgtaccatttcacattccccccatcagtgtgtgaattttctcccgtctgtctcttgctcactctcttgccatgtgacatgctggctacgcttcccctctgccatgactgtaagcttcctgaggccctccccaagagcaaatgctggcaccacacctttcttgaacagactgcagaaccgtgagccaaagaaacctcttttctttgcnnnnnnnnnnnnnnnnnnnnnnnnnnnnnnnnnnnnn

SEQ ID NO: 42277 - DNA, 687 bp, Macaca Mulatta
  misc_feature (1)...(687): n = A,T,C or G
nnnnnnnnnnnnnnnnnnnnnnnnnnnnnntaggacattaaaatttattctgaaattatctctggccacaacaataaaattaacaaagtatcactaaacagtcttactcctgtcatcagctgtacaatacatacagtatcatagaactggccactaggattaaaatccactagaacatatttaatgttaagtggcgacagcagcatctcacagaaaatttttacatacatatatacacagtccacattcaaccatttcacatattttcagtacacacagttgcagcatattacagtcacatgtctaagttgttgctcgataaaaacccaagccactgcctagacataactgtagcagttgagctgagtataattacaattaattttatatatgtccatagcagagagatgtacaagcccctaagaaacagagttcacaaatacttttttttaatgctattacagcattatgttgggcaatattaaaacctttaccgagaccagatcagtttttttaaaaagtcttctgcttaccagaaatatttttgatgaaaaaaattacaaaaatgaatgctctccttaaaataattcacactttaggattccaatatggcccaatgctactgatgcctaaagtgttttctaacattctgatggagtcgtttaacacgaacccaaatcacccatt

SEQ ID NO: 42278 - DNA, 684 bp, Macaca Mulatta
tccttcggggaaatgaccacaatttattgaacatagcctaaatgttggagtcaggcatttctggattcatattttgacatcatgctgtcatcttgaccaaaatacctaaactttctgacctccagcttccttgccactcaaataaggattacaaaactttcccctgttaaaatgtggtaagtactaaagatgacagcaaaaatggagtccagcacagagcttcctaaataagcaagcactcaacagtgctgcttcctttctacctcccctgcttgacaatccagtttcccacaggagcctttgtagctgtagccaccatgatcggtccagggattcttcaatagccccttctccccttgcagacatcctcgtgggagtttagtctcggctcgacatgaggataggagtttgggaccaggtctgagtgacattcagacttgcccaaagttgccattagctccccctgcagaatgtcttcagaaatggggcctggtcagtctacctggtgacctggcagttttcctcttaagaccctttccactttggttgctgctttctgggctcatcgtgtccttgctcaacaggataccccttgaagtggctgcctgggtcacatccccttccaaacaagaaatggaaatattagaaatcaatggttgaaatttcccctaagaagactcattt

SEQ ID NO: 42279 - DNA, 170 bp, Macaca Mulatta
tgtggaatgggtgcctacccggatgcgggccatcatgtcgacagcactcgggtactgctacaccgttggccagttcattctgcccggcctggcctacgccatcccccagtggcgttggctgcagttaactgtgtccattcccttcctcatcttcttcctatcatcctggt

SEQ ID NO: 42280 - DNA, 423 bp, Macaca Mulatta
gcaaagaagacgtccccactaagagaccacctgcccttcaagcaggagttaacactgtcaccaccttggaggagaacaaaaaggctcagctggtggtgattgcacacgatgtggatcccattgagctagttgtcttcctgcctgccctgtgtcgtaaaatgggggtcttttactgcattatcaaggggaaggcaagactgggacgtctagtccacaggaagacttgctccactgtcgccttcacacaggttaacttaggaagacaaaggagctttggctaagctggtggaagctatcaggaccatttacaacaacagatccgatgagatcctccgtcgctggggaggcaatttcctgggtcccaagtttgtagctcacattgccaagctcaaaaaggcaaaggctaaagaacttaccaccaag

SEQ ID NO: 42281 - DNA, 673 bp, Macaca Mulatta
gggggttcggcgctcgcctctcggcccttgttcctgcgtgctcggcttcttccagtcgcctgggcccggatcgggaagtgtcaagcggctgccgagttccctcacctccgcggctatcaccactgaacccggaccccctacccaggtccagggccagccgccatgacgaacgtgtactccttggatgggattctggtgtttggtttgctctttgtttgcacctgtgcctacttcaagaaagtacctcgtctcaaaacctggctgctatcagagaagaagggtgtttggggtgtgttttacaaagccgctgtgattggaaccaggctgcatgctgctgtggcaattgcttgtgttgtaatggccttttacgtcctgtttataaaatgaattccaaagtatccaagtcatcaactggccaaccaggggacggggatgaagaacctgttggagacctggactcagtgtaggagagttcagctgaaatcttcagtccccagattgcaccacagcgtcagcccctgctatttgtggggaaaactcatggccccgaaattatgtttgctttaggggactacgaaagccccctcctttgatctggtggaaatcgtccttggcgaatgctttgaatgccaaaaattaacccctcaggataaattatacctcctccaaaccg

SEQ ID NO: 42282 - DNA, 174 bp, Macaca Mulatta
gcacaccagcgctggtgcagaaggctctggccaagccctggcatcccctggctcctgtctggaggagtttagaagtgcgccattcatcgagtgtcacggccgtgggacctgtaattactacgcaaatgcttacagcttttggctcgccaccatagagaggagcgagatgttcaa

SEQ ID NO: 42283 - DNA, 309 bp, Macaca Mulatta
  misc_feature (1)...(309): n = A,T,C or G
gatggcagacttaaaacatatccagtttcctgttgctttttcntgtgcttcaaattcgtagtttctggaagagagctcgatgtccacatatcacatattacaatgctccctcagcattcagaaggaagcagtcagtagaggaatttgtgaaatattttcctagatccatctgtaatgttttctttcctactgaaacatgggctgggactctagaaaagctccagcacatcatggtcctttctttttataagcaggagtctctttctgacctgctgtctccatgtggagcaagagaaagagcccaggact

SEQ ID NO: 42284 - DNA, 890 bp, Macaca Mulatta
  misc_feature (1)...(890): n = A,T,C or G
gggggtggaggaacttccggcagcggcagctcaagtggccaaggcaagatgggtcaaagtcagagtggtggtcatggtcctggaggtggcaagaaggatgacaaggacaagaaaaagaaatatgaacctcctgtaccaactagagtggnnnnnnnnnnnnnnnnnnngaagggaccagacgctgccagcaaactgccactggtgacacctcacactcagtgccggttaaaattactgaagttagagagaattaaagactatcttctcatggaggaagaattcattagaaatcaggaacaaatgaaaccattagaagaaaagcaagaggaggaaagatcaaaagtggatgatctgagggggaccccgatgtcagtaggaaccttggaagagatcattgatgacaatcatgccatcgtgtctacatctgtgggctcagaacactacgtcagcattctttcatttgtagacaaggatctgctggaacctggctgctcggtcctgctcaatcacaaggtgcatgccgtgataggggtgctgatggatgacacggatcccctggtcacagtgatgaaggtggaaaaggccccccaggagacctatgcggatattggggggttggacaaccaaattcaggaaattaaggaatctgtgggagcttcctctcaccccatctgaatattatgaaagagatgggtataaaagcctcctaaggggggtcatttctctatgggtccacctgggcacaggtnnnnnnnnnnnnnnnnnnnnnnnnnnnnnnnnnnnnnnttccnnnnnnnnnnnnnnnnnnnnnnnnnnnnnnnnnnnnnnnnnnnnnnnnccccggggggaaaaaacccttggtttttgccccaaagactggttaaccaaaa

SEQ ID NO: 42285 - DNA, 848 bp, Macaca Mulatta
atcagttatgactattcggaaaccaagcatcattataatcctctcaaactcctaattgcgaagaatcgatgacatttcaagaagtgataacatttctctgaacaagaaacagacagtgattgaccacgttttacacagtactctggcactggtgctgtgttttcttcccctccctaaatttgaagaactatggagaaatggtacttgatgacaatagtggttttaataggactaacagtacggtggacagtgtctcttaattcttattcaggtgctggaaaaccgcctatgttcggtgattatgaagcccagagacactggcaagaaattacttttaatttaccagtcaaacagtggtattttaacagcagtgataacaatttacagtactggggattggattacccacctcttacagcttatcatagtctcctatgtgcatatgtggcaaagtttataaatccagactggattgctctccatacatcacgtggatatgagagtcaggcacataagctcttcatgcgtacaacagttttaattgctgatctgctgatttacatacctgcagtggtcctgtactgttgttgtttaaaagacatctcaactaagaaaaagattgctaatgcgttatgcatcttgctgtatccaggccttattcttatagactatggacattttcaaatataattctgttagtcttggctttgctttgagaggtgtcctcggagtatcttgtgactgggacctgctagggtcactggccatttgcttacctataactataaaccgatggaacttatcatcctgacaattttaggctataactggcagtgtttaacaaggct

SEQ ID NO: 42286 - DNA, 748 bp, Macaca Mulatta
gggcagaacagcccaagatggccgacttcgatgatcgtgtgtcggatgaggagaaggtacgcatagctgctaaattcatcactcatgcacccccaggggaatttaatgaagtattcaatgatgttcggctactacttaataatgacaatctcctcagggaaggggcagcacaggcctacaagatttactgatggactggatgtgaagtgtgagagaaagagaagaatcaaagatcaccccaagtttttggcttaggcagctgataaaatggagatcctgtttacttgagatggaattaaagtgcatttgcccagtataacatggatcagttcacgcctgtgaagatagaaggatatgaagatcaggtcttaattacagagcacggtgacctgggtaatagcagatttttagatccaagaaacaaaatttcctttaaatttgaccacttacggaaagaagcaagtgaccctcagccagaagaagtagatggaggtctgaagtcttggagagaatcctgtgacagtgctttaagagcctatgtgaaagaacattattccaacggcttctgtactgtttatgctaaaactatcgatgggcaacagactattattgcatgtatttgaagccaccagtttcagccctaaaacttcttggaatggtcgttggagatcagagtggaagtttcaccatcacaaccacctacagccccaaggtggttggaagtgccttaagattcaagtttcactat

SEQ ID NO: 42287 - DNA, 693 bp, Macaca Mulatta
  misc_feature (1)...(693): n = A,T,C or G
catcatttgtatancatatttaattttcttgtattcatttagacccaagaacatgctgaccaatgtattctatatgtaaactataaattctatggtagctttgttgtatattattgtaaaattattttaataagtcatggggatgacaatttgattattacaatttagttttcagtaatcaaaaagatttctatgaattctnnnnnnnnnnnnnnnnnntatgaaattactagtgcccagctgtagaatctaccttaggtagatgacccctagacatacattggttttgagggctagtcagccattccatttgactttctatttaaaggccgtgagcaagcttatcatgagcgaatacgtcaagggagtcgatttctgaccaatcaagaactctaaattagaatatttttaaggtatgtagaattcccagtttcagccacaatttagccaagaacaagatataaacttgaataagaagtaagtagcataaatcagtatttaacctcaaattacattatttgaaacagaagatactatgttatgctcagtaaataattaagagatggcattgtatgagaaggagccctagactgaaagtcaagacatctgaatttcaggctggaaaactatcagtatgatctcagcctcagttctcttgtctgtaaaatagaagaactggattaggcagtttgt

SEQ ID NO: 42288 - DNA, 770 bp, Macaca Mulatta
  misc_feature (1)...(770): n = A,T,C or G
acagactttgcatttcaatcagagaggccagagagcaaggtctaaacttctagcttctagacaactttcctgatagaacatttaactgtgggaagaggcttccccaggtcccatctatccctgtttagggatagagttgataacatttttgtaggtggcatgtttgcctctacctgaattttttgaattgatttttgagcttttgagattccaggagggaggacaaggcctctgctgttgtggataggaaaggcttaacctaaaattaaaccagcaacgaagcattagtaaaaatctaacaatatgaagggctcttatgagtgatttttttcaaaagatgaaaactccagaaacgcacgggaatgaaatacctcccagaaacatgaagcaatcatcgaagactcactggtaatattttttaaaagtatacaaatcaaagcaaaaataagcatgtgtaacaatgagaaatgtgcaaatatcttttaaggcagtactaagtgcaagaggagtaacatgaaataaacattctttcacacggctactgggaatataaatttctctccagaaaggtcgtggcagtttgacgataggtggcaaaacctgaagattgtgtacttgggcacagagtttttatttctaggaatgtatcctgaggaaattattaaactgcagtgtttagaaattgtccgtatagcattgtatacacaagaaaaaacaaaagcctggatgccctgtcagntggaaaaagagggttcaatgaaatgattggg

SEQ ID NO: 42289 - DNA, 727 bp, Macaca Mulatta
  misc_feature (1)...(727): n = A,T,C or G
ggnnnnnnnnnnnnnnnnnnnnnngcacctggccaagatagggtcatttctaagtgctgtgtgtgatgtcatctaatttacagtgctattcaaattcagacaacagttctgcctccaaattctatttatttctgaacttgactgggaatatatattaatactaaatcaagactttatttttaaatgtaaccttagtgccagtttcataatataccaattcactatttggttactgtgctgtgaatttagacatttgcatctcctcagacttctgttgaaccccaaaacatcagtgagccctcaatatctgtgcatacattcaagcctcaggtcccctgctttgtagatcccgtgaactccttgataagcacaggtcacagttacgaactcttcactgcacatctgattttgcaagacagtggtcaggggaagatgttaatctgtgcccgggatatatgccacttagctgagttcagttcagctttgccaagtgtgtaagtaacctaagtgccaccacgtggcaggtgaagtgcaaggctcattgggggatacaacatattcatccagtgtcttctgaatgcttagcactctcctaaacgctggggaacatagcaagacagacaaggcaaggccctctgtttttcatgggaggctaacattttctaggtttcttaaaaatcaaatgaaaaaacaggtcaactttttccagcctccttggggtgaaaat

SEQ ID NO: 42290 - DNA, 4269 bp, Macaca Mulatta
  misc_feature (1)...(4269): n = A,T,C or G
ggaggatagagcagttgaagttcgaataggatggagaagttactctcgcttcatctggacatgagttctctggaggcattagcagtagcaactctggatcaacacagattttctggattccgaaatctagcaaggatctgagctggttaactcagagggtggagcatgatgctaacaagaccgttcatcattttggacccctcacaaacacacttttctttagcagaggtgacattccttaggctaaatctttggatccagggacataacagatttgttgagagaaaatgtggcagtgccttcacccaggacagtggtgaggaagccccgagcatcactgatggatttaaccattctcttctgaagtgctctgctctaggctgggtcccattttcacctgcctgtcctctgattggcttttgcaggagggcagcttacgtgtttgtcaaccagttagaaagccagttcctgtgggttgagtttaggccttcttggccatgattgagaattttgacttgggatactgggttgctggtgacaaataatgtcttcctcttcccccttcccgcctggctcgattatgggaatagccgtcagtgcatctatgtctgtgaccaagacccagccagactaacgtacacagcagagagaaataacgttcaaatggtgggtcacacatctcatctcaagataaggtgcttagggttcactgctttattcaaaagtattttcactgtagctccttcatatggaatatcaaaactgaagaaattcacacatggacatgcaaacagacattgattaatcaaggtagcatctttatgtaaatatataaataagtttgggcattgaaatgtaaactgtacagctaatacacttctcctctgcagtgttggttgctgtcattcagtaatgnnnnnnnnnnnnnnnnnnnnnnnnnnnnnnnnnnnnnnnnnnnnnnnnnnnnnnnnnnnnnnnnnnnnnnnnnnnnnnnnnnnnnnnnnnnnnnnnnnnnnnnnnnnnnnnnnnnnnnnnnnnnnnnnnnnnnnnnnnnnnnnnnnnnnnnnnnnnnnnnnnnnnnnnnnnnnnnnnnnnnnnnnnnnnnnnnnnnnnnnnnnnnnnnnnnnnnnnnnnnnnnnnnnnnnnnnnnnnnnnnnnnnnnnnnnnnnnnnnnnnnnnnnnnnnnnnnnnnnnnnnnnnnnnnnnnnnnnnnnnnnnnnnnnnnnnnnnnnnnnnnnnnnnnnnnnnnnnnnnnnnnnnnnnnnnnnnnnnnnnnnnnnnnnnnnnnnnnnnnnnnnnnnnnnnnnnnnnnnnnnnnnnnnnnnnnnnnnnnnnnnnnnnnnnnnnnnnnnnnnnnnnnnnnnnnnnnnnnnnnnnnnnnnnnnnnnnnnnnnnnnnnnnnnnnnnnnnnnnnnnnnnnnnnnnnnnnnnnnnnnnnnnnnnnnnnnnnnnnnnnnnnnnnnnnnnnnnnnnnnnnnnnnnnnnnnnnnnnnnnnnnnnnnnnnnnnnnnnnnnnnnnnnnnnnnnnnnnnnnnnnnnnnnnnnnnnnnnnnnnnnnnnnnnnnnnnnnnnnnnnnnnnnnnnnnnnnnnnnnnnnnnnnnnnnnnnnnnnnnnnnnnnnnnnnnnnnnnnnnnnnnnnnnnnnnnnnnnnnnnnnnnnnnnnnnnnnnnnnnnnnnnnnnnnnnnnnnnnnnnnnnnnnnnnnnnnnnnnnnnnnnnnnnnnnnnnnnnnnnnnnnnnnnnnnnnnnnnnnnnnnnnnnnnnnnnnnnnnnnnnnnnnnnnnnnnnnnnnnnnnnnnnnnnnnnnnnnnnnnnnnnnnnnnnnnnnnnnnnnnnnnnnnnnnnnnnnnnnnnnnnnnnnnnnnnnnnnnnnnnnnnnnnnnnnnnnnnnnnnnnnnnnnnnnnnnnnnnnnnnnnnnnnnnnnnnnnnnnnnnnnnnnnnnnnnnnnnnnnnnnnnnnnnnnnnnnnnnnnnnnnnnnnnnnnnnnnnnnnnnnnnnnnnnnnnnnnnnnnnnnnnnnnnnnnnnnnnnnnnnnnnnnnnnnnnnnnnnnnnnnnnnnnnnnnnnnnnnnnnnnnnnnnnnnnnnnnnnnnnnnnnnnnnnnnnnnnnnnnnnnnnnnnnnnnnnnnnnnnnnnnnnnnnnnnnnnnnnnnnnnnnnnnnnnnnnnnnnnnnnnnnnnnnnnnnnnnnnnnnnnnnnnnnnnnnnnnnnnnnnnnnnnnnnnnnnnnnnnnnnnnnnnnnnnnnnnnnnnnnnnnnnnnnnnnnnnnnnnnnnnnnnnnnnnnnnnnnnnnnnnnnnnnnnnnnnnnnnnnnnnnnnnnnnnnnnnnnnnnnnnnnnnnnnnnnnnnnnnnnnnnnnnnnnnnnnnnnnnnnnnnnnnnnnnnnnnnnnnnnnnnnnnnnnnnnnnnnnnnnnnnnnnnnnnnnnnnnnnnnnnnnnnnnnnnnnnnnnnnnnnnnnnnnnnnnnnnnnnnnnnnnnnnnnnnnnnnnnnnnnnnnnnnnnnnnnnnnnnnnnnnnnnnnnnnnnnnnnnnnnnnnnnnnnnnnnnnnnnnnnnnnnnnnnnnnnnnnnnnnnnnnnnnnnnnnnnnnnnnnnnnnnnnnnnnnnnnnnnnnnnnnnnnnnnnnnnnnnnnnnnnnnnnnnnnnnnnnnnnnnnnnnnnnnnnnnnnnnnnnnnnnnnnnnnnnnnnnnnnnnnnnnnnnnnnnnnnnnnnnnnnnnnnnnnnnnnnnnnnnnnnnnnnnnnnnnnnnnnnnnnnnnnnnnnnnnnnnnnnnnnnnnnnnnnnnnnnnnnnnnnnnnnnnnnnnnnnnnnnnnnnnnnnnnnnnnnnnnnnnnnnnnnnnnnnnnnnnnnnnnnnnnnnnnnnnnnnnnnnnnnnnnnnnnnnnnnnnnnnnnnnnnnnnnnnnnnnnnnnnnnnnnnnnnnnnnnnnnnnnnnnnnnnnnnnnnnnnnnnnnnnnnnnnnnnnnnnnnnnnnnnnnnnnnnnnnnnnnnnnnnnnnnnnnnnnnnnnnnnnnnnnnnnnnnnnnnnnnnnnnnnnnnnnnnnnnnnnnnnnnnnnnnnnnnnnnnnnnnnnnnnnnnnnnnnnnnnnnnnnnnnnnnnnnnnnnnnnnnnnnnnnnnnnnnnnnnnnnnnnnnnnnnnnnnnnnnnnnnnnnnnnnnnnnnnnnnnnnnnnnnnnnnnnnnnnnnnnnnnnnnnnnnnnnnnnnnnnnnnnnnnnnnnnnnnnnnnnnnnnnnnnnnnnnnnnnnnnnnnnnnnnnnnnnnnnnnnnnnnnnnnnnnnnnnnnnnnnnnnnnncctgtcttctcccctgtaccttgtagttataccgaggtgagaatcatgctgaccccagtcccgtcccctctcatttcaggaaaacccttttctgattcaggtagggggagagaaggagttaagggctccgtttactcccaagtcatggatttttaatattccatttttattactaatatacctctgttcctagaagctactggagtcttgagtgtgtgtgggaaaaggctaactgtgaattaagttaatgtttttcttataagaaatggaagtttatttttttattgatattactatgtgataaactgagtatgcatatactgaaatggaaggaaattttaaaactattattctagaagaaatgggcagttttgtaatttggtggtggctgagaccccatagaagttttactttgtaaataatttggagagtgaataaggagattgtgctatgaaatcttgacatgctctttaggaagtagacttgacagtcctaggaaggttgacataaaaataccaaccttaagtaaagctctagtacaaaaaagggtaaatgtcatcattcttatttttaggcctctttcttgagagaggtgggagtgggaggtagtgttataactggcactttaattcgtttttggaactagaatttaggggcagttggatgaaattgcaaattttgaaggggaataagaattttctagtgctctataaagaaatggagaaaaaagccttgctttcatctttttagaatttattcttgatttttagcacactgtggggcttttagagctaatatgatctaaattcagaaaatttaattttcatagcaggccaggtgtgaattacttatgtttgctatagaatgcttatttagactaataataaatttactttgctgtctaaggctagtcagagaatgtggggatgaggcaggatgttttcaattagccagagatgatccacaaagtgaa

SEQ ID NO: 42291 - DNA, 729 bp, Macaca Mulatta
  misc_feature (1)...(729): n = A,T,C or G
gcacgccagcctgggccgacaggtnnnnnnnnnnnnnnnnnnnnnnnnnnngaaaatgnnnnnnnnnnnnnnnnnngtattctaaacactatgtgaaattctggaaatcgaatgttatcagtcatagtgtcatatgccacagaagtaagtagatttctatgtgagccgtgtctttaccataatcaacctaataaaatcctcgttagatttttaaccatagtcattttaaatctttgtcattctcagacagttgctttgattcttccttgaagtatttataatcagctacagtccaaaattgctttttctttgaggagatatatggaaaacattctgacaacgactcttgaatacaagttttgataacttcaagatcataccactggactctctgagaactttcaaaattttaatgaacagtctgataccttcatgaaattcaagacaaagaagaaaaaaacctcagttttattgcactaaataatcaaaacgataatgttttcataatattttatttgagaatgtgttgattctttgaatgttttaatctccagatttatgaactttctcttttaagctatttatactttacagcaatttggtaaaatatacttttgtaaacaaaaattgaaaacatttgcttttgctcccaatctgagtgccccagaattgggaaacctattacatgagtattcatatgcttatgcgtaataaagatatttgcacaag

SEQ ID NO: 42292 - DNA, 644 bp, Macaca Mulatta
agactgaattcaaatctgaatagtcttgagttcttaaatgcccaaagaacacactgttatttcttgtgtatatttcaacataaatcatgtggggatcaattggttcggaaggccctggttgagaagacttttagataataaggtcatatatatatatatagtaatataagccaatgtctactgttttgcgccagctagtgcttacaatttcatttgagccctgagtatgtgccctgctgtgggtctttctttggtagttgaacgttgaattcaagtcttttatttagttttaagaagtactaagcaaacaagcaataaaaaggggaatggggcgtgctagtgtttgaatatgctctcttgttgctctaattctgtgcctctgtgcattaatatttggatgcatgcaatgccagcatggaaattggtcttcacacatactgcagttttccagaaacattcacaaaacaataaatgtaacagacattccatttgttaatgggcatatatgtgaaaagcagtgtagaaaataggctaatattagaaaatggttaagtccttaataacttcaagtgtggttatataatggacactgtcaatgttcataacttaaacctgggtaacctggtcaaaaataatgcttggga

SEQ ID NO: 42293 - DNA, 285 bp, Macaca Mulatta
caaattctttattattcttaatggtatgacatagttttccatatggtaatgaaatacccatgctgactttcctgaagaacaaggaaaaaatgaacaaattggagaacacagtgcttggcaggcttatcttcatatacatgatgaatatcatcagcctttactgaagctttaaaatcctcttggtctaagttacttttccttgaaggatcattcctgccccttgacatctttgagaattgttcaacatgtaaatgatgtgcatcatttgatcaacttacattttag

SEQ ID NO: 42294 - DNA, 575 bp, Macaca Mulatta
  misc_feature (1)...(575): n = A,T,C or G
tattctagnnnnnnnnnnnnnnnnnnnnnatcttaagtttttttttagctaagccttaacgatgtccagctagtttatttgcagacagcgttttaaaaagtgaatagatgtttagctgaagtgaaatatagatttacgactgtgtaactcttggtaagatataacaaaacctagacatctaaagtttttggaaatttttattttaaaagtttgttgggaggtaaaattgactttaccttgggttaatagttttatagttaagaagaaagtctggcgaagtttacttgatctcagttcattcaagaatagggtatttagttccactttggttattttcacttctaccctaaattcatagtccctgttacttaagctttacccttgacttaccagtttttgtagcagcgagataaatggggagtagcagtgcctttgttaatgtaaattgacaaaaaattgtgtcatatactagcaggagtagataagctgataatgggcttagaactgtacaaaatgattttctgtagacaggatgatctgtaaccatgagtacactagacaggagaaactttgct

SEQ ID NO: 42295 - DNA, 1052 bp, Macaca Mulatta
  misc_feature (1)...(1052): n = A,T,C or G
cccccacatacttcttcattacacctattaccatccagtggaactccccaagctctcctagcctcacagactctcacccactgacagagcattcttggctgattgacaggaagttccagcaaacagcacaagtgtttattatcctccaaatcactaaaacatatagaggggtctatgtctgtatcatgcataactcagtcactggtggaacaaatctcataatcaagaggatcatagtccctgatggtccacacatccccagcattttcacttcatacccctattaccgttcaggagaaaaactctacttgtactgcttcgcgaactctaacccaccggcagagtattcttggacgattaatgggaagttctgcaatcaggacaagagctctctatccgcgaaattactacaaagcatagcgggctctatggttgctccgctcgtaactcagccactggcagcgaaagttccacactcaagacgatcaaagtctctcctccttcagcaacagggcgtatttctggccttaatccgatatagcagccgtgatgtcatttctgtatttcaggaagactggcaggcagttgctttcgttcttcctcgaagtatttacaatcagctacagtccaaaattgcttttttttcaaggagatatatggaaaagactctgacaacgactcttgaatacaagtttctgataacttcaagatcatatcactgagaactttcaaaattttaatgaacaggatgctaccttcatgaaattcaagnnnnnnnnnnnnnnnnnntcaaatttattggactaaataatcaaaaggataatattttcacaattttttatttgaaaatgtgctgattccttgaatgtttcattctccagatatatgaactttctcttttaagctatttatactttacagcaatttggtaaagtatacttttgtaaacaaaaattgaaacatttgcttttgctccgaatctgagtgccccagaattgggaaactattcatgagtattcacatgcttatggtaataaagttatttgcacaag

SEQ ID NO: 42296 - DNA, 718 bp, Macaca Mulatta
gtgaggcatacagaggcggccttgggctgggccttggtctccccgctggacttcgagggtatcttcgccgcctctgttgggggtgagcgccgcgcggctgcagcatgcctcacaggaagaaaaaaccctttatagagaagaagaaagctgtgtcttttcacttggtccaccggagccaacgagatcctttagcagcagatgagactgcaccccagagggttctgttgcccacacaaaaaatagacagtgaggaaaggcgagcagaacagaggaagtatggagtgttctttgatgatgactatgactacctgcagcacctgaaggaaccatctgggccctcagagcttattccctcaagtgccttcagtgcacacaaccggagagaagagaaagaagaatcgctagtcattccaagcactggaattaagttgccttcatcagtgtttgcttcagagtttgaggaagatgttggattgttaaataaagcagcgccagtttcaggacctcgactggattttgatcctgacattgttgcagctcttgatgatgattttgactttgatgatccagataatctgcttgaggatgactttattcttcaggccaataagtcaacaggagaggaagagggaagggatataccgaaatctgagaatgaagatgacagcgaatgggaagatgtggatgatgagaagggagatagcagtgatgactatga

SEQ ID NO: 42297 - DNA, 540 bp, Macaca Mulatta
ttctgtaaaggagcatcttagcaagttttacagatactactggattgaaagttatgtagaagggatttcaaatctgatataagtgggtagataagcttgtaaggaggtgagggacagtgagcatacccatggcatacagagggtaccggttcctgcacatctcagactgagaaggcaagcaggtcgagcatagcaataccacctcatattgcaacatttcttatggtcctctgttgtcaaactatgtatagatctagatttcccactgaaaggggaagcaaggatacttgagttcttcaaaaccacacatgcgtgcatgtgtatcctcttatgtagggtatattataataatgcctgttatgttatactttattaaatgttacatacatgtatgcatacacacacaaatatatatacacatatacatgtatgtattcttactattccattgaccccatgtgacttttttctcatttttatgagcatacctggttatgttttggcaacattatctgagaatatatttagaaaatccattca

SEQ ID NO: 42298 - DNA, 606 bp, Macaca Mulatta
aaaagcctcaactccggagccctggggccaagtggcccctcctcaaccagtcccaccccccgaaggaagcccggggatcgagcgcttgactgccgaattcaatggcctgaccctgaccggtcgaccccgtctttcccgacgtcacagcaccgaaggccatgaggacccgcccccatgggcggagaaagtgactagcgggggtcctctctctcgccgaaacacagcaccagaagctcaggagtctggtcccccttcagggctgaggcagaaactgagccgcatggagccagtggagctcgacacccccggacacctttgccctgactcgcctgagtccagccgcctgtccctggagcgccgaaaatacagcgcctccccgttgaccctccctccagccggctccgctccctctccgcgccagtcccaggagagtctgccaggggcagtatctccgctaagcggacggaggcggagtccggggctgctggagcggaggggctcggggacgttgctcctggaccacatctcgcaaacgcggccgggtttcctgccccctctcgacgtaaatccccaccctcccatccctgacattcgccctcaacccgg

SEQ ID NO: 42299 - DNA, 749 bp, Macaca Mulatta
ctctgcatctcccacttttggcagaagatataagcttcttaccatgtaggaatcctcttcaagatggacatacttggcggtgacgggtaatcatctctcttagactaaggctgaatgctgctaagtcccaagcagtcaagtagggtgctcaaagtatctattgaaaaagcaacataacatctgtagcaactccatcaccacctaactgtgattgagcacttagttctaggatgcttttttcccctcattctgtccactaaagtaaagcacacttcttactggtcccttgtgcctttcccaaacatgtatctttcattggttcaactactttaatgtgtatgtatcccctctgacttgcatgtgggataccacatagaaccctagagcagtatgaatatatgttttgagtcatctacatgtatgggatagtgagagcatgtgaacgtgcccagcagtatattaccaagggggccatagacagaagatgaaaaatacttatttgtaaaaatttgactttttcttttaaggagcaataacaacagccattttcttagattactttcattctgaatatatttgaaaacatttaatatataaaagagctaaattttattctagatgaataaaaggaaactatatttgggaacaaaatattttgagatgttacagaaatgcagtataagcttctttttacactaataatccaactatcctgcatttcaattggcgtatatccaattatactctaa

SEQ ID NO: 42300 - DNA, 247 bp, Macaca Mulatta
gttttaaagaaagttctggtgcttcagggctagacttggagcaccccctagctttcctttaaggaacaggagcttgagtagggcggcctgccccacgcacttccaacccttctggtctagggaccattctggaaatgaaagggctggatgggggaagccccaggtgaatttcagccagttctgatctgatcttactgagctggtggactgaggctctccttcaagagatctttaacctgaagagatg

SEQ ID NO: 42301 - DNA, 804 bp, Macaca Mulatta
ggcacacagtaatggcaggctttggagatgcacctttggttgtcgactgtccaggctagaagcagagcctgagccaccaggaggcagaagtttagttttagaaatcacattgaaacctacaaaagttctccaaattttccaagacaatgagttttccttggtaaagcccatctactagcaaggagtacaaatatgtgccctccttctccattgtttttcccaaatcccaataaaaaatgtaagcttttttgtagccacactcatttttcctgctcttggataaaggaataagtctatttatttcttaattttgaagaaaggggaccgtgggcacatatccactgcattggagtcaattttgttctgaattttgccactgttcatcaagcagttgttgagatgataaattgacccaattaactgctttccttggggggaagaatgtaccagctagaggatgtaagtatatgatctacttgtgaattatagttttaatgcaaatgaattgcttttgtctgatttgcatatatgtttcttgtgagccgagttagtgcccaggcacatggtgtggtaaaaaatctgtgttttggttgcttgtttgtttgtttttcccgaaaatggagtctacactctggtcgcccaaggctgggaatggccatgggcattgaattccttgggcctccactggttaaaccttccagccctcccccgggtattccacaggaaatttcttcctcttggcccttcaaggcccttccttgggggaatataaccactgggggggaaactgtgcataagggagtt

SEQ ID NO: 42302 - DNA, 387 bp, Macaca Mulatta
aaagtgtcttaatgcctacatgagggcatattgactacactacaaaaataaattttgtctgtacttctgaaaagaattttgctgtttctcagctgttttccaaaagcaaaggaagtctttatggtttttatctatgtcatgttatatgtggcttgtttataaatttgggtggaatggcataccatattcttggttctcaaaatctatcacttttaaccttacacttgatgtgagaaaactataataactatgtatgaaacccaggggttgaaaaatacaagcatagattttatcagggtgttttgtcaaagcagattattcagtgattcctccccaccattcttaaggacgttaaataatgctgttgtgttagctctgagtagaaag

SEQ ID NO: 42303 - DNA, 800 bp, Macaca Mulatta
  misc_feature (1)...(800): n = A,T,C or G
gggagctcaaaactggattatcaccttagcaacttagaataacttgaaatagaaaaaaacacatttaatttggactgtttctggatctgttaagatatacacagtctattttttgtatagtattggaaaataaaaattctataatttgggtatgggttcttttgtatacattacctgcccattgaggaaaggggcaagtccattatgcaacttctctccaaacccttcatgttctggatatgatacttaaagaggcatgagcagctacattctggttatcagaaggcatttattaaatgactgcttgctgcatatgtgcccaaagagatatctttagtaaacatagtaattagtagaaatgccagaaagagttcctggttcctcttgtgtttgacactaagaaaatagcaagagtgagatcctacataaggtcatttgtcagaatgatgtttttgtttgttcagagttggctgacctccaactcctggggtcaaggaatcctcctgccttagcttcccaaatagctaggactataggcatgcacccagccatgtgttttcttgatagctcttaaagcccagatgaaaaaaaaatcacatttttgccccctaatggaaaaaacattttggccattggttggtcccttattttcagggaactggtccggttttccattggnnnnnnnnnnnnnnnnnnttgtggggcccacgtttaataataacccatttattccctttttaagtaaaaacccggcaaaaccttaaaaatttccaaaattttcccttaattggtttctgaac

SEQ ID NO: 42304 - DNA, 676 bp, Macaca Mulatta
  misc_feature (1)...(676): n = A,T,C or G
gtcatcgcctgtgctgagaactggatgccactatgattacagagtaagaggcacctgctccgtaggcctttgcagggccactggcaggcctgagggatgggggctttgcttataaattgcacaccccttgtctgcctgccttttcagggcaggaagaccttcagtgaggaaaattgcaggtgcaaatttttcaggacagtattcagctgctgtcttttttggccatttgtatcacatgactgtgttctcattaaggaatacactggtttcaaagcagtctggagcactttgtcgtgcctagagctttttgttcctatttactannnnnnnnnnnnnnnnnnntgaagaatatattagaatcgaatattctttttaaaatattgccagtgtacaataatagcttcgagtgaaattttatattattcttgttaaactgctgtacagcattgatttggtatacaaatttatttaaattattagagtgacctctagggacttgaatcaataatgcactttacaaaaaatctagatgtaaatccatatttgatatcagactcgggttactatgtttacaaaagctgtttttaaaaatccatgccttaattagatgagccagtctggtttatatacctgttaatgatatgccaaatggattcatgtcttacaggtctcccat

SEQ ID NO: 42305 - DNA, 781 bp, Macaca Mulatta
  misc_feature (1)...(781): n = A,T,C or G
ggcaaacaatgattaggttctaaaattgtagtgtannnnnnnnnnnnnnnnnnnnnnngtcaaatgtgtaccctaaactaccatggacagtaatttttatgcacactaaaattagacttaagagcaacaaaaatctacataagggccaggtgcgnnnnnnnnnnnnnnnnnnnnnnnnnnnnnnagagggcagggcannnnnnnnnnnnnnnnnnnnnntttgaaaccatgcctaggtcacattctgttttaatgttaaggttctataactttaatatgggttgataaatttacttgttgtgaggatgacatgccatagtggcatcacagtttacctcagatagtagattctgagtcaaccagtaagaaaaatgaacacaggtgtttaccacctccctccccaacagacnnnnnnnnnnnnnnnnnnnnnnnnnnnttgggatgatttgttttgtaacattttgtcttattcaacagtatgtatttaataatcattttaaaagttgtatgtattctgttgtaatcaggtagccacagtttattaaccaattttcctgttgtacaattagatcatttcccattacttgctgttatgaaaatgatgagatgaacctccttgagggataaacctttgtgctcatccaccatgaagtattctgggctaaaatcttggtttgtggaaattgatgggttcaccgggatatgaaccatttttaaaggcctttttaaattcacaattgccccagaattgtccccccaaaatcaattggcatgcctttcc

SEQ ID NO: 42306 - DNA, 934 bp, Macaca Mulatta
ggcaaaaaagcagaggttttaatacataagtaaaaacccatacatatttgatgtgtaatgcaggttaattacaatacagatgtactgaaacaattgtgaactgctaacattgaagaaaatttgacaattctgattgatgctgcaattacttgctgtttttattgatcttatggtttatttcttaagccataggcagtgtaaatacagccctgcagcagataaatgtgagtaaagagagccttagttttattttccaattggtataaatttttgaaggatgtgatgttcattaacattcggttgtattccccagtatttgtaatgggaaattacagaaaaaccgtgtctgcatagttttaaggaaatactaggtgtaatcatggaggggaattgatttcatgcctaaaatttatgttaatcaaaagaatttttcctcaaacccggccctttaaataaagggcccacctttttaaaaaagcccccttgggtcaagcaaagggaggtaccctttaaaatgggcaaaaattttggcgcaaaaaagagccaagggggtggttccaaacccttgtgaaatataaggggtggtttttttttttatgggggaaaaatgtgtttaattttttggaaaaatccccccctactctttctccacaaagaaatattttataagattttagaaaattttccttgtgaaacccccccgcaaaaaaaaatacctttttttataagaaaaaaccggcgaattaacccctctctggaaaaaaaaaactccaaaggggtgtaaaaaacacaacattttgttggtgtgtgtttataaacaaatttacgccccccacaatatttcttgtgagaaccaacaggcgctccttaaaggggtgtgtttaaaaaaaacaccccccaaagaaaacaactcacgattactatatagttataa

SEQ ID NO: 42307 - DNA, 559 bp, Macaca Mulatta
gaattatctatcttacagcataaggctgcaatgtaagatgtgtcttgtgagtataatactttaaaagctgaagcattttaaaatctaatcttatactttgttggtgtaagtcatactttttaactatttgacagtaaaatatgagataaaaatcagccctgcactgtaacatttgcactctggttcttggtgtgcaggtagatcgttggccagagacaggatatgtgaagaaacttcagagaagggacaatacgttctattactacaacaaacagagggaatgtgatgacaaggaagtgcacaaagtgaaaatttatgcttactagcctgtcttctttgtattacttgtcaattatactttaagaattcatcatttccttctacatcgtgtaaatgtttgtcattttacgaaataattcaaaatgcaatcttcagtttattattttgtgaaacacaaaagccatgagaattagcatctgttaatcaccttgtcctgttctaagaactggctttaaatgcattaaagttgtactttcttggtcctgctctttttgtccat

SEQ ID NO: 42308 - DNA, 698 bp, Macaca Mulatta
  misc_feature (1)...(698): n = A,T,C or G
ggtgcaggnnnnnnnnnnnnnnnnnnnnncgnnnnnnnnnnnnnnnnnaggaggatcgttggagcccagagttcaaagaccagtctgggtggtaaagtgagaccttgtctccaccagaacattttaaaattagccagatgtggtggtgtgtgcctgaggtcccagctacatgggaggctcaggcgggacgactgctagagcccaggaggtcaaggctgcggtgaagctgtgattnnnnnnnnnnnnnnnnnnnnnnnnnnnnnnntgagacccatctctgaaaatgtaaaaaccaaaaactaggtgagaaaaaaccagaaaacagcagggctgcccccaggccctgggggaatttgctctcccaccgggggggggaggtggaaaactgctgggggctggtttaaaactgcagtttaacattggtctggaaccgaccaaaaatgttagccccaaggataccttgaaaccctnnnnnnnnnnnnnnnnnnnnnnnnnnnnnnnnnnttccgaaaaaacaacgctcttgggggggggggggcgccnggaaaaaagaattgggaatttctcaaaagagaaaaggcctttcttcttaggggtggcgcgttccgccgccatgtcacagaatgttccccgcacccacaaaaaagaagcccgccggcgtcctgggggcgcagaaaaaaagccccggtgcctcatga

SEQ ID NO: 42309 - DNA, 1778 bp, Macaca Mulatta
  misc_feature (1)...(1778): n = A,T,C or G
ccggacccgaggggaacggggaacccttggctgcctctatgggagaggcagcgcgggccgccctggcccgagggaccccgctactggctgtgcggaacctccgtcctgttgattcacagactgcggcccaggcccgtgatcagacagcagctctgctgaacagcgcggggttgggagctgcggatctgtttgtgctaccggcgaactgcggcagcagcgacggctgcgaggagctagagcgcctccgggcggcgctgcagagccaggcagaagcgctgcggaggnaggctcctgcccccggcccaggatgttttcgaggtgctgggtgcagcagagctggaggctgtgcgtgaggcctttgagaccggcggcctggaggctgcgctgtcgtgggtgcgctcaggcctggagcgcctgggcagcgcacggctagacttggccgtggccggcaaggctgacgtgggccttgtggtggacatgctgcttggattggatcctggcgacccaggtgctgcgcctgcttcggcgcccttggggcccactcccttcccggccccagagcgcccgaatgtggtgctctggactgtgcctctgggtcccacgggcactgccaccaccgcggccgcagcctctcacccaacgcactacgacgccctcatcctcgtcacccctggggcccccactgagaaggactgggcccaggtccaggccttggtgctaccagatgcgcctcttgtctgcgtgcgcacagacggcgagggcgaggatccggagtatttgggagaaggaaagatggagaaacccaacggcgagagcttaaagaacgcaggcggagggggattggagaatgcactcagtaagggaagggagaaatgtagcgctggatcgcagaaagcaggcagcggggaaggtcctgagaaagctggcagcgagggtttgcagcnnnnnnnnnnnnnnnnnnnnnnnnnnnnnnnnnnnnnnnnnnnnnnnnnnnnnnnnnnnnnnnnnnnnnnnnnnnnnnnnnnnnnnnnnnnnnnnnnnnnnnnnnnnnnnnnnnnnnnnnnnnnnnnnnnnnnnnnnnnnnnnnnnnnnnnnnnnnnnnnnnnnnnnnnnnnnnnnnnnnnnnnnnnnnnnnnnnnnnnnnnnnnnnnnnnnnnnnnnnnnnnnnnnnnnnnnnnnnnnnnnnnnnnnnnnnnnnnnnnnnnnnnnnnnnnnnnnnnnnnnnnnnnnnnnnnnnnnnnnnnnnnnnnnnnnnnnnnnnnnnnnnnnnnnnnnnnnnnnnnnnnnnnnnnnnnnnnnnnnnnnnnnnnnnnnnnnnnnnnnnnnnnnnnnnnnnnnnnnnnnnnnnnnnnnnnnnnnnnnnnnnnnnnnnnnnnnnnnnnnnnnnnnnnnnnnnnnnnnnnnnnnnnnnnnnnnnnnnnnnnnnnnnnnnnnnnnnnnnnnnnnnnnnnnnnnnnnnnnnnnnnnnnnnnnnnnnnnnnnnnnnnnnnnnnnnnnnnnnnnnnnnnnnnnnnnnnnnnnnnnnnnnnnnnnngctaccgagcggctcacggcgtactgctgcaggctctggatgagatgcgggctgatgctgaggctgtactggcaccccctgagtctgcccagtgagaggtgggagggggcttgagggtccagactgtggcaggggatgcctgggcttaatcctgggtgcttgaaagggatgtggactctgatttctagcagggatgtgtgacttctcatcacctggattcagagagtctgggggacaggaatcc

SEQ ID NO: 42310 - DNA, 395 bp, Macaca Mulatta
aactgggtggaagaaggatcgttacacatcttcagaaagttctcattgccccagctgcctagtactgtacaagaagctctactctgatggcagatctaagaaggctataggcctttggttatgggaagcagtgtcattacattcaagcttcacttctctgatcgacttccacccactgggattcagagactccaaggttctgcctatgtctgatgccataaggaaaattcaacttcctctgctcaaggttcccctctgctcatccttcctcattcagacatccgccgccataccagtgtttagaaccaaaacatgaagggctagcaatagctaggatagttagcagaaatattgtctgtaaagctagacagatgagcccagaagaatggtcccag

SEQ ID NO: 42311 - DNA, 727 bp, Macaca Mulatta
ggtctggctccgactcccaccaacttggctctgccggaaggcagacccaaggccgcgggctcccggctcgcggggtcgccggctcgcggggttccaggtcttagcgtactgccccagcttcttttgtgctgcagccaaagatgatgtcctgctgcccgataccttcggggttggctctgtgtgcgggtgtggagtcttgtctgggaaaggctgtactcagctctggccctgccgccgctcccgtagtttaaagtgagagcagtggtctagaatctagttcgagagatcatagttggtttttgggtctctacccttgacattgagtgcggtattgtgtgtagcgtgcatttttctggataaaaattcttagcttctttcatgataactatgattacaaaaagtttaagccctttggatttcaagagcaaagttaagtgaaatactgagaaaacagacattactgtgtttttgcccacagaacgttgcagaagtcctggtgtttcattgacattaattcatttcgttgtccacagcctacattaagtgaggaaactggggcttacagaggtttacattccataggcagtgatttgaactaacacctgggcactgttctgacgtactggaaatgggggaacaatacaagtaatacttcgatccctttaccttcctaaggcagtgggtctcaagcttacattggatgtacatccgccggcgacaaaatccc

SEQ ID NO: 42312 - DNA, 91 bp, Macaca Mulatta
caagcgaggtatcaggctcaaataattagaacacattaatttaggtcagtgcttctcaaactttaatctgcctactaaggtacaagcggtc

SEQ ID NO: 42313 - DNA, 646 bp, Macaca Mulatta
aaccagaaaaaaatgaagagccagtaaaatgataaatatataaataatctaaatatattttgactttataaacagtgataataatgtcttgcaaagtcaagagtattgtagacacaggaaaggtggcaaatgaagttaaagtgcttaaatgtaatttcattgttggaaagaagacgaacatattgattcattttagacttgtagggttgaataacattacatcaactaacattaaatatgtgtggttacatgaactaatcagtaaatgcagagaaacaacatataaaactcaaaaatgataaaaagtaaaacctaattcagtcaaagtaatataaaatgataccaaaaacgaaatattgaaaagattggaaaatagaaagcaataaaaataagaagagtcaacactaacatcttagtaattataagtaatgtaaatattctaaatgtacaaataagaaagacaaaacttgccccaaactgtctgtttaaaaaataaattccactatatgctgtttataagagatagctctaaaatataaagatactgaaattgaaagtgaatagttggaaaaatatgtcttacaggcactaaccaaataaaaaccagtgaagctgtatcagatagacctcaaagcaaacagcattt

SEQ ID NO: 42314 - DNA, 390 bp, Macaca Mulatta
atgaggctggtggcaagagtaactgtgtttctgacctttggtactataattgatgctaagaccactcagcccacctccatggattgcgctgaaggaagagctgcaaacctgccttgtaatcactctaccatcagtggaaatgagtacatacattggtatcgacagattcactcccaggggccacagtatgtcattcatggtctaaaaaacaatgagaccaatgcaatggcctctctgatgatcacagaagacagaaagtccagcaccttgatcctgccccacgcgacgctgagagacactgctgtatactattgcatcgtgagagtcacgggcggatctgaaaagctcgtctttggaaagggaacaaaactgacagtgaactatatccag

SEQ ID NO: 42315 - DNA, 640 bp, Macaca Mulatta
  misc_feature (1)...(640): n = A,T,C or G
gggcattccatgggagaacttcaacacagcttttgctccagagatcaaacatagctttcatgatctctctaccagctatcgaacttatcctctggtnnnnnnnnnnnnnnnnnnnnnnnnnnnnnnnnnnnnngccaggccggagtgcagcggtgcgatctcggctcgnnnnnnnnnnnnnnnnnngggttcgagcnnnnnnnnnnnnnnnnnnnnnnnnnnnnnnnnnnnnnnnnnngtgggcttccacgcctagtnnnnnnnnnnnnnnnnnnngnnnnnnnnnnnnnnnnnnnnnagccagaatggtctttatctcttgacctcatgatccacctgcctcagcactgtgggaggccaaggtgggaggatcgccnnnnnnnnnnnnnnnnnngctgtagtgaactatgatcacatgactgcattctagcctgggtggcaaagtgacaccctgcctctaaacaaaaatcaagcaacaaaaaacttgttatttccctgcagctttgggaagccagaacacaattttgcagtgaacctgaattttctgtgacaaataaattacttaattggcacatatgatcatcacccgtcctgtctccatcaaagccttctattaaatgcttgtaaaattgaagaattt

SEQ ID NO: 42316 - DNA, 672 bp, Macaca Mulatta
  misc_feature (1)...(672): n = A,T,C or G
gggggggctttgcgaagatggcggcgccgggggtgctggagtcagacctgccaagtgccgtgacacttctgaaaaatctccaggagcaagtgatggctataacggcacaagtgcaatcactgacacaaaaagttcaagctggtgcctatcctacagaaaagggtctcagcttcttggaagtgaaagaccagctgctgctcatgtaccttatggatttgacccacctcattctggacaaagcctcaggagggtctcttcagggacatgatggaattttgagactggtggagattcgcacggttttggaaaaacttcgtcccttggaccaaaaactgaagtatcaaattgacaaactggtcaagactgcagtgaccggcagccttagtgagaatgacccacttcgttttagcctcatcccnagcatatgatgagcaagttgagctctgaggatgaggaggaggatgaagtaaangatggccagtctgaggcttcagggaagaaatctgtgaaaagagtgtctanaaaaaatgttcccccccgcttgtttccgttcatttgatgaaacnaaactgaccgggagagaaacctcctaaccagccaaaaacgggctttggtacttctgcatccggacttaaggcatactccatgctcaaggaaccgtgagtcggctcc

SEQ ID NO: 42317 - DNA, 357 bp, Macaca Mulatta
  misc_feature (1)...(357): n = A,T,C or G
agaaaggacatggatgaagcagggaggcacgtgcctgtctcgttcgcctaaaaatatgctgcatccaggaccatgccggcacaaagtaggagcccaaggaatatttattgaagaaatgaaaggtgacagaaggcagaaggagggagactccaagaagannnnnnnnnnnnnnnnnnnnnnnnnnnnnnnnnnnnnnnnnnnnnnnnnnnnnnnnnnnnnnnnnnnnnnnnnnnnnnnnnnnnnnnnnnnnnnnnnnnnnnnnnnnnnnnnnnnnnnnnnagaggagattggccactggacagccaaactccagggtaagatcatcttcctactccatccccttcccagctccccatc

SEQ ID NO: 42318 - DNA, 813 bp, Macaca Mulatta
gggggggcctgcttttcctttccccattttgtgttgcatgcctggttgttctcaccgatttcgcaagttgggaggtgtgatgagcctgggatattcatcttcaacagaaacgatccagataagctcttcattcaaacagggtttgggctgtactgcaattttgttgtcaaattggatttggaggtgctcaggtttagtgagcacctccgtgggaaagagaactccgttggatggtaagatctttgtgttcggagatgagcagatgacgactgggatactggagatttttgaatgtgcacccggctgagaagaccacaccaatggggctatatgcagaattcaaggtgaaaactgcttttgatggtagtagttgacactgtttgcaaaaacagaagctgacggtggctctgctggtcatcccagaggcctccaggaagtcatagctacgtctcattttctcctctgactgtttcaaatgacctctttttacaaaaatactttctctacttaaatctacccctctcttctccaattgtctaaaaccccactttactttcttagaattatttgacccataggattctgaaaggaaattgtatagaattattttcatccccaacctttcttaatttcatttaattgaggaaaactgagaagtctaaaaaggtttaaaaattagacccagaatcacaagtattttccaaggtccttcttttcaaatcttggtaaatgttttggatttttgttaaaatatgtaatccccatagcctaacactggaatggcttttttaacttttgggattattctccctc

SEQ ID NO: 42319 - DNA, 241 bp, Macaca Mulatta
gtaatatatcataaatcagaaaaatatgatcagcctttagctctgtaatgatgggaattttctatttgcatgcacattttgtttggatatagaatttgctcccctttatagcttctgctctattaagagcttcatttttttctgaaaagtttaaaaaattaaactcctaatgttgattttagtgtgaatatttgaggcaggattttaaatcatatttaaaatgtgaactatttaaaatatt

SEQ ID NO: 42320 - DNA, 414 bp, Macaca Mulatta
gatgagaacagaaaagagcagccagagactctagaaggtcccgggggaagagcctcagcactcataggacagtgagtcctgggccaggggagacagaggagccctgagggtggcccgcccatccccacagagctcagaagatgccctccagagaggaaaggtggagttcccacaagaggccaggaaacaacgtccccaaaacacagcgaggacgggatttgtacagctctctcctgcttactgcaacacacgctggagcatatcatagggggccgccatcaggccctgcccgttcatgcagcacatccacccagtgcctgcgcttcctgtcacctcgtgttctccagagcagagaagcagtggcaggagagacaaggctggggtgtctttcagaatcaatagactaaaaatggc

SEQ ID NO: 42321 - DNA, 703 bp, Macaca Mulatta
  misc_feature (1)...(703): n = A,T,C or G
gaggaggcaggagggaggaccaaaggctaaggactgtcttggtggccctgggcaagtcttgaacttcggtgccatcgtctgcaaaagggaggaaagaatgcctgcgtggcgtggcgtggctacgtggatacgcagggaagaaccccacggtgtgacgcctggcacttaacaatggtagcatcattttcagtgcccaggaagaaggcagctgggaccaggaaagggccaccaccctgcacccaagcccatagaacaggagagccactttaggcagctctgagcaggacagacttgtggccaagtcaagaaagtaaggtctgggcggnnnnnnnnnnnnnnnnnnnnnnnnnnnnnngnnnnnnnnnnnnnnnnnnnnnnnnnnnncccnnnnnnnnnnnnnnnnnnnnnnnnnnannnnnnnnnnnnnnnntcatctctagnnnnnnnnnnnnnnnnnnnnnnncgtggtggtggacgcctgtagtcccagccaannnnnnnnnnnnnnnnnnnnnnnnnnnnnnnnttgggaggcgnnnnnnnnnnnnnnnnnnnnnnccnnnnnnnnnnnnnnntctgggggacacagcgagattccatannnnnnnnnnnnnnnnnnnnnnnnnnnnnnnnnnnnnnnnnnnnnnnnnnnnnnnnnnnnnnnnnnnnnnnnnnnnnnnnnnnnnnnnnnnnnnnnnnnnnn

SEQ ID NO: 42322 - DNA, 774 bp, Macaca Mulatta
  misc_feature (1)...(774): n = A,T,C or G
ggggaccgatgatgaacttaacatattgtggatatagaatttaaaaacaaaggtgaagacaaaagtagaataataatacagaaatggtacatgttctgatgaagtagaagtaaaacaaaatgtggaggaggaggcaaggaaagaggagtgtaaaatagactctttgatgttcagaccataggtgagaggtaaagaatactagtttgaggagagggtctatagaattccttgttcaagggtggtctgatttgacagtgggacaaggtacggttctttaatgagtaactttttttcatgtggtgggaacactgtctgannnnnnnnnnnnnnnnnnnnggacaggaaactacatttcttccttttactactacttttccttttcaccgtctagtctccaaagggtgtctctccctttcttaccatcatctcccccagaatcaatacctttcagagtcttgaaggtccacttttaagacctttccctgcagttagtgctctgacctactaggacactcttcagtattttcacacttaaactgaacttcctagtgataattttagatccacagtattttcacactttaaactgaacttcctagtgataattttagatccatcttaaggttcccctcttccctccttcatatagtttttcccgaacttggatgggagaggtttgagagagaaaccccactgatccggggttttattttaatactcccgggggcaaaattcaaataagggggctttctccgggccttccatttaaggccg

SEQ ID NO: 42323 - DNA, 814 bp, Macaca Mulatta
  misc_feature (1)...(814): n = A,T,C or G
gggaaaaataactaatgggtattaggcttaatacctgtacaacaaaccctcatgacacaagtttacctatgtatcaaacctgcatatgtacccctgaactgaannnnnnnnnnnnnnnnnnaacatgagttttggaggggacattcaaaccatagcaaatatatatcgaaaaatctttctaaatctttattgttcaagtgctctataatctgaatcatcatgagctcaactgaaaaggtctctgctttagtgatagatgaaaatgcatttactagcaaagcctctgagaagccccagaaaatgtatagtatttcaaaacacaattaatagtttgaggtggaacagatcagaatagaaaatgcatcagcatgatatgtataagactgtataagcattatatttgtcaatagaaaaacttttacatttattaaatgtgatgaaaacctctgtacatataaaataaataaagttgcgtgagggccacaattccattaaagcttctggcttcaaattaaatatagataacactctaatccagacacttattaagcattaatgtgagatgttaatgccttaaaatatattaaccatgaaacattagagggcattttaaaagacagcatttcaaatgctctaaatgtaaaattaacctgatatatgtggggttacatctttttttataatacaaatgggggttaaaatgaaggaaaactttgcttttaccataggggaaccaattctatacacattacgcttttgggcttttcaaacatatggttcaaacatctgaaacaatgggaaaggggtggatttt

SEQ ID NO: 42324 - DNA, 259 bp, Macaca Mulatta
atgcggaaaccgaaacgggctgcatgggaaactctttccaggaaggctccggggccctcaactggtctccaccttcccctgcaacctgtgacacctgccattttccgtcttaggagagggcaacgccacccttccgtttgctccgggcaaaacttgtagagttcccccctgacgctggagttttttcctcagatccaagatcccaattggccaccaactcgtgatttcccatcggccaagtgggggggcattgatctac

SEQ ID NO: 42325 - DNA, 447 bp, Macaca Mulatta
  misc_feature (1)...(447): n = A,T,C or G
acaagaagaacttgaaggccctctacgtggtgcaccccaccagcttcatcaaggtcctgtggaacatcttcaagccgctcatcagnnnnnnnnnnnnnnnnnnnnnnnnnnnnnnnnnnnnnnnnnnnnnnnnnnnnnnnnnnnnnnnnnnnnnnnnnnnnnnnnnnnnnnnnnnnnnnnnnnnnnnnnnnnnnnnnnnnnnnnnnnnnnnnnnnnnnnnnnnnnnnnnnnnnnnnnnnnnnnnnnnnnnnnnnnnnnnnnnnnnnnnnnnnnnnnnnnnnnnnnnnnnnnnnnnnnnnnnnnnnnnnnnnnnnnnnnnnnnnnnnnnnnnnnnnnnnnnnnnnnnnnnnnnnnnnnnnnnnnnnnnggcctgcacaccgagggcctgttccggagatccgccagcgtgcagaccgtccgcgagatccagaggctctacaaccaagg

SEQ ID NO: 42326 - DNA, 372 bp, Macaca Mulatta
cctaacagtgcttgcatttttcaggggccacatgtacacatgggaggtggatgagcaaatgctccatgtttcaaaacaaaaaccagtatctactttgctcattggccccccaacgatgtgaaaacagctgtctgtgacatccaacccagggggctaaaaatgtttgataccttcatcagcaataacatgaccatccagtggctgttcaggcacatctcgcagcagttcatagccatgttcaggtgcaaggccttcctgcattgctatatgagtgacggcatggataagatggagttcaccgaggccaagaagagcatgaacagccttgtgtctgagtaccacgagtactaccaggatgccacacttgaggag

SEQ ID NO: 42327 - DNA, 822 bp, Macaca Mulatta
  misc_feature (1)...(822): n = A,T,C or G
ggatgcccccgttagacacatcgacatgattcaccactattatggcgatgcttcctacactatatcttatcatacagctaaagctactaaacacgaaccactaccaaccaccccttacaaaaaactccacccttcaactccacaacatccgnnnnnnnnnnnnnnnnnnnnnnnnnnnnnnnnnnnnnnnnnnnnnnnnnnnnntttaaatcaacccgctacgatccccattatcctattccctaccctactaaccttaacccccaagcaccccattaataatcgactagctaccattcaacaagacctgactnnnnnnnnnnnnnnnnnnnnnnnnnnnnnnnnnnnnnnnnnnnnnnnnnnnnnnnnnnnnnnnnnnnnnnnnnnnnnnnnnnnnnnnnnnnnnnnnnnnnnnnnnnnnnnnnnnnnnnnnnnnnnnnnnnnnnnnnnnnnnnnnnnnnnnnnnnnnnnnnnnnnnnnnnnnnnnnnnnnnnnnnnnnnnnnnnnnnnnnnnnnnnnnnnnnnnnnnnnnnnnnnnnnnnnnnnnnnnnnnnnnnnnnnnnnnnnnnnnnnnnnnnatctccaatgttatttaaacatacgaaaaccagtccggccataactcattttcaaaactattaagcctcctagcccgtgtacgaaattaaaacacgctaaaaactattctaaaaaatcctgggacacatcctgggcctaatattatatacccatataaaaccgcgacgaacaacccgcctgattatacttaaggcgcaacttattttcataaaccccaacccccngtacccgcctcatgtgtaa

SEQ ID NO: 42328 - DNA, 767 bp, Macaca Mulatta
  misc_feature (1)...(767): n = A,T,C or G
ggaatatctaataatttttgaaattagctcttgtttttcatttttttattgttgtttttacagatttcaggttacaaactgcaaagtttatgcataattaagtatggtatggttgccagaaaagcctaaaattactacttagaaaatttaaaactgtttacccccattgtcttgtacttgcgagctaacttgtacttattcttgtgaaagcactgtcatcttttagtagcaaattttgataatgtttctcgtggaaaaaaaatcagtatctatctttagaacaatgtaattataatgtgggaagcgtgcataaatgagagagagnnnnnnnnnnnnncnnnnnnnnnnnnnnnnnnnnnnnnnnnnnnnnnnnnnnnnnnnctttcaatagtttatgccagcaatctttgcttgaatgtttaacgatgccttcagtgtgatgctggccaatagatgattgcagtttaaaatgtcattattgtgcaggcttggataactaacattccatgatgtagcttgtttctgatgagatgattgtaggtacacttttctcattatccaatcatctgtgggatacttagttttctaatgtgccattatctatttttattctgcagttatgttcaaaatacagtacatattttaaaatagaataaattgttaaacataaaatttttaaaagtagtagatgtgcgtaagaaaacttttgtaaaatagttatgaagtcccacccaagtagcaactttctgggcattcaaagcaggatt

SEQ ID NO: 42329 - DNA, 648 bp, Macaca Mulatta
atgggacagagcccctgatccaccagcaccacctgagggtctgcaaaccaccccagcgatggaagaggaccaggagctggagagaaaaatatctggattgaagacttcaatgactgattgcgagaggaagacagcctggaaatggtccaggcaactggaacagatagacactgtgtgacattgtattgcacgaggaagaccataccctaggaaattctctacattacatgatcatgaagaacccagaagtggaattttgtggttacactacgacccatccttcagacagcaaaattaatttacgcattcagactggaggtacccttccagctgttgagccatttcagagaggcctgaatgaactcatgaatgtctgcaaacatgtgcttgacaagtttgaggccagcataaaggactataaggatcaaaaagcaagcagaaatgaatccacattctagtcccttatgcagtatacaaggagaactgtcctctaggatattctcttcctgatggtgcagaacccagaattagaagtttgtggttacagcatactctgttcttcagaaaggcatgattctagctgttgaccccttgcagctgttggaatctctgcaagaacctctgtattattctaataaattccctctt

SEQ ID NO: 42330 - DNA, 136 bp, Macaca Mulatta
  misc_feature (1)...(136): n = A,T,C or G
taatgcatcctctgacctacccataaacgtcaatagattaccatctatgctctcacccgaagtacaaaatcaccaaagagtcccaccacgggtccagcattcctgtcacccaaaagcagtttctccatcacacggn

SEQ ID NO: 42331 - DNA, 814 bp, Macaca Mulatta
acaagaaggtgatcgcaacgaaggttttgggaacagtaaaatggttcaatgtaaggaacggatatggtttcatcaacaggaatgacaccaaggaagatgtatttgtacaccagactgccataaagaagaataaccccaggaagtaccttcgcagtgtagatggagagactgtggagtttgatgttgttgaaggagaaaagggtgcggaggcagcaaatgttacaggtcctggtggtgttccagttcaaggcagtaaatatgcagcagacgtaaccattatagacactatccacgtcctaggggtcctccacgcaattaccagcaaaattaccagaatagtgagagtgggtaaaagaacgagcgatcggaggggtgctcccgaaggccaggcccaacaacgccggccctaccgcaggcgaaggttcccaccttactacatgcggagaccctgtgggcgccaaccacagtattccaaccctcctgtgcagggagaagtgatggagggtgctgacaaccagggtgcaggagaacaaggtagaccagtgaggcacaatatgtatcggggatatagaccacgattccgcaggggccctcctcgccaaagacagcctagagaggacggcaatgaagaagataaagaaaatcaaggagatgagacccaaggtcagcagccacctcaacgtcggtaccgccgcaacttcaattacccacgcagacgcccagaaaaccctaaaccacaagatggcaaagagacaaaagcagccaatccaccagctgagaattcgtcccctccggaggctgagcagggcggggc

SEQ ID NO: 42332 - DNA, 87 bp, Macaca Mulatta
tttgctcgctccaagatctgtctgtcctacttccgagagggcctgacactgcctgtgcccttcaacatcctgccctccccaaaggct

SEQ ID NO: 42333 - DNA, 454 bp, Macaca Mulatta
aactcttcccagtcggccgacggtttgcgctgtgctgtgagcggtgtggagatgcaggaacactgtgatgaatgttttgaggagatttgtacagaaatggaggagaagtatggggaagctgaggagacgaacgtctgtgacaagctgggagggagaccccgtggtggggaacgtgcacggcaagtttggccgtgaggcagatgcggaaaacgctgtgactgacttgaacaaccgttggtttgacggacagccgagccacgccgagccctccccccagacggacttcagagcagcctgccgccgtcaggatgagaccggagaatgctccccgggcggctcctgcggcttcgtgcatttgaagcccatttccagagagctgcggcgggagctgtacgggcggcgtcgcaagaagcgtagatcaagatgccgatcccggcagcgtcgttctgggtct

SEQ ID NO: 42334 - DNA, 720 bp, Macaca Mulatta
  misc_feature (1)...(720): n = A,T,C or G
ggggcatagcaagcacannnnnnnnnnnnnnnnnnnnnnnnnnnnnnnnnnnnnnnnnnnnnnnnnnnnnnnnnnnnnnnnnnnnnnnnnnnnnnnnnnnnnnnnnnnnnnnnnnnnnnnnnnnnnnnnnnnnnnnnnnnnnnnnnnnnnnnnnnnnnnnnnnnnnnnnnnnnnnnnnnnnnnnncgttttaaacgggcccgcgggtacccctgaaccccgtgcaaaagggtagcccataaatccactttggtttccttttaaattggggggaaacctcccccatggaaaaagggcaaccccacgaaaggggtttttaaaaggggccccccctaaaccttttttaaacccccgtgggaaaatttttgaaccctggnnnnnnnnnnnnnnnnnnnnnnnnggaaaaaaataggggnnnnnnnnnnnnnnnnnnnnnnnnnnnnnnnnnnccccccatttggggggaggcnnnnnnnnnnnnnnnncnnnnnnnnnnnnnnnngggcgaaannnnnnnnnnnnnnnnnnnnnnnnnnnnnnnnnnnnnnnnnnnnnnnnnnnnnnnnnaaaccccnnnnnnnnnnnnnnnnnnnnnnnnnnnnnnnnnnnnnngnnnnnnnnnnnnnnnnnnnnnnnnnnnnnnnnnnnnnnnnnnnnnnnnnnnnnnnnnnnnnnnntatatnnnnnnnnnnnnnnnnnnnnnnnnnnnnnnnnnnttggg

SEQ ID NO: 42335 - DNA, 361 bp, Macaca Mulatta
acatgtctagaattaaaattttcagagattgtaaaaactagttccaattttttgtcatttctcaaaaaaaataaaataccttataaatcctatatgttactttttgggggtatcaaatttaaaatttagaaatcttcagtcccagtgaccatatttatgaaaagctgtagccctccaaggtgtgggaatttattgagaaactcttcgatagctctgcatttgttttcccttaggtgaacaatgtaggaatcctcaaagtggttttgaatttaatgctccacttcagttaccaaaagtttaaaaatgggttgtgttgtttcctgtgcattctcaaactcatttattagatagaagaattttt

SEQ ID NO: 42336 - DNA, 814 bp, Macaca Mulatta
  misc_feature (1)...(814): n = A,T,C or G
ggatnnnnnnnnnnnnnnnnnnnnattacttgtttttaacagtgtatctgtattttgagaaagaaatggtttttttgaaattaaaactttactttttaaataaatacaactttttctttactcagtactttgtttcatatactttgtttcagtactttgtttctgtttctgctcatagggtgagtatgactaattttactatctgatttttcttttactaatttctaaattgattcaactttatttctatatctctgcctcattggagccagagttgtctttggagtgcctgtgccaatttttgtttccatttcggtatgtggaaactttggatgtggaattcaaataggcctgggttcaaattccatgtgactttgggtaaattaatccatccaccttcacatacctcttctgtgatgtgtggataatgggagcccatgttcataactctgaggtagtgattaaaatgagaaaatgtggccgggcacagtggctcatccctgtaataccagcagtttgggaacctcagcctcccaaatagctgagattacaggcatccaccaccacactccgctaacnnnnnnnnnnnnnnnnnnnnnnnaagggtctcacatgggtggaaccagggcctggnnnttgannnnnnnnnnnnnnnnnnnnnnnnnnnnnnnnnnnnnnnnnnnnnnnnnnnnnnnnnnnnnnnnnnnnnnnnnaaatggggnnatgggtaaaaaattaatttaagaatggggagggtgaaatttagggaggtaagggagaaaagtgtggatttaaatagataagatgtttttaa

SEQ ID NO: 42337 - DNA, 784 bp, Macaca Mulatta
ccagtttgtcactttccccaaattggggtcccgtcggctcccaaaattaatgggttttataaaaggctttttgggggtacccaatggccgcccaaacacacattatctttttttaatttaggtgatataaatttttttgtatttcttattatttttgtcccttttaattacatttattttaacgctgaatttactcccgtgccataagtttttgtttcttcagtttcttctgggatatctttttcttctgggcaacttcctcttctggtttaggaacaatctgttccttttcagtaaggatcatctcaatgtggcagggagagctcatgtatgggttaatgcgaccatgagctctgtaggttcgtcggcgcatcttaggtgctttgttcacttggatatgctcgatgaccagagaatctacatctaaacccttaagttcagcattactctctgcatttttaagcatgtgcagcaaaaattcagcactcttcttgggccaccgaccctgtgtccagccccactgcttggcctgggcacacctgccaactccaccattgtaacgtcggaatggtacgcactgtttctgtaaagtgacatctttcagatacttcgtggcttttcgaatatgcatacccttgatggcctgggcagtttcacgagtgttcttaaagtgaacacgaagattggaacctcttgatttgcatgatttcgtggggttctccgggtcaagtgaatagcgaaccattttcacagattaccccttccgcttagggaaagagagccc

SEQ ID NO: 42338 - DNA, 312 bp, Macaca Mulatta
  misc_feature (1)...(312): n = A,T,C or G
aagtgaacccgaggnaaaagcaggtgtgaaacgatctgcagcggagatgtacgggtcagtaacagaacacccttctccgtcccctctactcaggtccggaaactttattatttataactgcattgtgtccatcagtgggcatcttctctatctgttttctggatgtggggagggttaagtgtactgtgttttatctgtgtataaataaggtttcattatttttgtgttaatatgtctctcttttgccctagcgaaaattactagagaattaaaaatccctgaggtttttgctattgatgtttaggagtagtt

SEQ ID NO: 42339 - DNA, 196 bp, Macaca Mulatta
tcttctttcttaagttggacacgttgtctcaggtagaagaggagtctttgttaagaaacgatcttcgtccagctaataaacttgctaaaggaaacaggttattcatgagatttgctacaaaaggtaaatatgatatttggtattgtttcgtattttcaatcaaaatgagttattatggaatgacatccttcttttt

SEQ ID NO: 42340 - DNA, 621 bp, Macaca Mulatta
  misc_feature (1)...(621): n = A,T,C or G
ggcatggtgggcttgtnnnnnnnnnnnnnnannnnnnnnnnnnnnnnnnnnncnnnnnnnnnnnnnnnnnnnnnnnnnnnnnnnnnnnnnnnnnnnnngcagnnnnnnnnnnnnnnnnnnnnnnnnnnnnnnnnnnnnncagttggaccctcaactcacatacaaaaatgacatcaaaatggatcaaagacctaaaggttaacagtacaaactaaacaactcttagaagaaaatagtaaaaattacgcaggccggatgggcacggtgaaatcccgtctctactaaaaaatacacaaaattggccaggcgcagnnnnnnnnnnnnnnnnnnnnnnnnnnnnnnnnnnnnnnnacgggcgnnnnnnnnnnnnnnnnnnnnnnnnnnnnnnnnnntaacacggtgaaaccccggatctactaaaaaatacaaaaaactagccaggcgtggtggcgggcnnnnnnnnnnnnnnnnnnnnnnnnnnnnnnnnnnnnnnnnnngtgtaaaccggcaggcgnnnnnnnnnnnnnnnnnnnnnncagccactgcagnnnnnnnnnnnnnnnnnnnnnnnnnnncgtctcnnaaaaaanaaaanaannannnannaaaaacatgtcggcc

SEQ ID NO: 42341 - DNA, 757 bp, Macaca Mulatta
  misc_feature (1)...(757): n = A,T,C or G
ggagttttggatcgcttgatagaattaaaagagcatcctgctcatgaacgagtattacaggtaagtgttatctgaaagagagagatcctaaatgaaatatttttcaaatttaggtcattctcaagctttgcccatcttggttaacctaaatgcttgaaaactgagcggtttatattttgatcagctaaagtgttaattatggagtcatcatagacttttggggtattatctttaccataaaaaaaaatttctaaaatggctgggtgggnnnnnnnnnnnnnnnnnnnnnnnnnnnnnnnnnnnnagagatgggcagatcatnnnnnnnnnnnnnnnnnnnnnnnnnnnnnnnnnngtggtaaaacccagtctgnnnnnnnnnnnnnnnnnnnnnnnnnnngtggtaaggtgcatctgtaatcccaannnnnnnnnnnnnnnnnngcnnnnnnnnnnnnnnnnnnnnnnnnnnnnnnnnnnnnnnnnnnnnnnnnnnnnnnnnnnnnnnntnnnnnnnnnnnnnnnnnnnnnnnnnnnnnnnnnnnnnnnnnnnnnnnaaaaaaatcgatattatcttttttatctttttggttggaactgtattgactattccttaggagagtgacatactcctttttaagtttgantataattttaacgtttccggggaaaaatttattataccaatttgtatttaaaaaaacaaaaagttggaatctggatggtctagaaaaaatttattccccccctattttgg

SEQ ID NO: 42342 - DNA, 78 bp, Macaca Mulatta
aaccaaataatggggctgcttttgtcacactagcatagaggatgtgttgaaatttaactttgtaagcttgtatgtggt

SEQ ID NO: 42343 - DNA, 1082 bp, Macaca Mulatta
  misc_feature (1)...(1082): n = A,T,C or G
gtttttttttntnnntnnnnnnntttgtccagtttcaggttttaatcccaaactacaaaaatattaaacgggtggctctactgatacatcatacaaacccagtggcttgcccacaacaccaattcaggccattcctaccaaaggaagaaaggctggtctctccacccccatgtaggaaaggcctgccttgtaacagaccacaattcggctgaatctgaagtcttgtgttttactcatnnnaaaaaaaaaaaaaatacggaagggggtttggttctcaagggctggcccactggcagcctgggcattaaaacaggcctcaggcgctcatttctgcttggagaaaatattctttgctctttgggacatcaggcttgatggtatcactgccaggtttccagccagcagggcacacttcccccatgtttgtcagtgaactggaaggcctgaactagtctcaaagtctcatccacagagcggccaacagggaggtcatttacagtgatctgccgaagaatacccttatcatcaatgataaagaggcccctgaatgaaatgccttcatcagcctttaagaccccataatcctgagcaatggtgcgcttcgggtctgataccaaaggaatgttcatgggtcccagtcctccttgtttcttaggtgtgttgatccatgctagatgacagaagtgagaatccacagaagcaccaatcacttggcagttgagtttcttaaattcttctgccctatcactgaaagcaatgatctccgtagggcacacaaaggtgaagtcaagaggataaaagaagaacacaacatattttcctttgtagtcagacaggctgatatctttaaactgaccatctggcataacggctgtggctttgaagttgggggcagggtgcccaattttagcatttcctgaagacatcttcctattagcagtcctaacacaactcacagatcaacaccacggaagaacaaaacaggcaagaacaaaacgccccaaatccgcccggggcgctgcctttatagccagtagggctctcgcgagagtcggagcggaccaggggttctggaagacccc

SEQ ID NO: 42344 - DNA, 482 bp, Macaca Mulatta
tgatgccagtacacctccttccctcatgtctggtgccaaggctgggagagtcaaatacctggggctaaaagcactggggttcctcagatgatcctatttgcacccctgcatggagtgtctgcccacacagcctcagggtcatgagttttctgcaggcagccacctgacctgcccagccaggcatgtatctcccccatgggtgagtttgagagcaggttgggtcccatgtaaggctcagggctgctgggctttgatgtcacctgttgccacactgactctggctactaggatcagactactcccttcctgggcacactgtatcccgaatccccagaagaaccaaggggatcccccagcacaagccttgttggggagggagtccttggcgcacaggtttgagagagagagtcggggctggccagggggcatggctcgggcagaggagagtgctcatggtgaccctggaggagacccttccttca

SEQ ID NO: 42345 - DNA, 721 bp, Macaca Mulatta
ggccctggctccggacccgtgtggctggacgaggtggggtgccggggcagcgaggcgtccctgcggggctgccctgcggagcggtggggacgcggagactgcgcgcacaaggaggacgcgggcgtgcgctgcttgggtgagtggggggcgttgggaaacgggtcatgaggccggcagaggccgctgggatggggtaggtcttgagtgttgcttccgtcgcttcggtgggcaggagagcacgcccaggctttagcgggctggtttccaccctgggatttttctgggataagctgatttgctgtggaggcctgtttgggacatgcaccccctggggtttcccccaatcttttttgggaagtcccttttgtttattccaatccttgtccatttcgggtatgtgtcacctgggtgttggcaggttcagttgttcccaaagcctgcacctcattctctttgcagcaaacaaacagttaaccacagcgatgaccttagcacaaatagcagcagtgggtaactttccctgagccgcccccattctctgtgctctggtcacctcttgtgacttgccctggcatctgcttgggggccatgttttaccaaggaagggggctgtccctggaaagcagacccccccagtggacactagtcattttggggtgctctgcgcagctgaaagcagcagatgcccccccagcacttccaactcgcaggtcccccatga

SEQ ID NO: 42346 - DNA, 1203 bp, Macaca Mulatta
  misc_feature (1)...(1203): n = A,T,C or G
aggtggtcctgcttgggccancctgcaccatggaagccgggcattcaagtcctcttggaaggtgaagcactggattgtaggagaaagagacgttgttcagagagcccagaagactacagcaaaaagtgtcaactggtgctctcacctgatttcccactacagagaaggactgtcccgggttcttttcggggctcttttctggactattacgccgcagacgtcagctacccatcagggagagccatccaagagggagacctgcaggttgactttccaaaggtgaattatggagacctggaagactgganggaggagacctccctgggcgggaagaggcctgncaagaaaatcctcccagaccggatgagggccgctcgggaccgagacaaccagaagctggtggacttcatcgtgacgagaaagggggccgacccccaccttctggacatcttgcaaggcaggaagcagtccaggtggctgaccgcgtttctgaccccacacagggatgtgctctgcgttgaaacatacctggaggatgacgatcagttggaagtcgtggccaagcatttgcaagaaatctacaagcaagttgacaagaccatgctgactctgataagggatgacaaagtcagttttgttctggaagttcttctcccggaagccatgatttgtgccatcgccgcacttgatgggctggattacaaggcagcagaggagaagtacctgcgagggccacctgtgcattaccgggagaaagagctgtttgacagaaatatcttaaagaaggcaagaagggaaccagcaaccacccgtaaagctaattagctctccccctgcacccatacctttgcagggagccgcctcctttctagaattaatgagaaagcctcctcccttccccaacgcgtgtaagtatgttctggatattcgagactttgggaatgtgcacaattcatctggggcccatctctcgcgtctggtggtggcacattcatcaccatgtcttcatcgcaaactcgtgaagcgctattttcttaaacgagtgcaaacccttgcatttccctcaacgtctttggatgtgtagttgtcctgataggtttgaaggacaagttcatgggtttccacaacatgtcttttgactggacttggtactttaatgcaggacctatattcttttacacaaaaagccactggtatcagctt

SEQ ID NO: 42347 - DNA, 769 bp, Macaca Mulatta
  misc_feature (1)...(769): n = A,T,C or G
gggccgggcgcggtggcgcgtgcnnnnnnnnnnnnnnnnnnnnnnctctgggattatagctgtgagccaccgtgcctggcctcagccccccttgatattacattatttttaaaaatagagaccccaaatacagttaaaacttcctctgtgcataggattttactaatcattggcgtttatacaaataagagtaaaatctagtgggcttgagaccatgtgatatgaaaaaagtgaaaacaatgctgggaaagcacatgaggtgactgctaagtaatataagatcaggagttctaagttttctgcccattgggatcacttttaaagtgtccctaaacgataattgtcttttatgggattacaaggacagagtttgggcatctgtgtgtgtatatatatctctcacctaggtgactgatgtgtaccaaacattgaagataattagtagaaatagtaagatcctagagaagtgtagaggagtgggagtgtcctaaggatggaaagatgggaaagcttctgtacacacattcccaaggtacttctatgtgtttaattgtttaaaggcccctttatctcatcctatctatgccttaatgacctagtacagtacctgacactcagcaacagctttgtgtcaggtactcactaaggcatagcctgtctactttagggagctcacctttattagcatttgaaaacaaatgaccatggtattattaatacctatagaaaccttaaacaagattccttggggagaaataccttaatggtg

SEQ ID NO: 42348 - DNA, 759 bp, Macaca Mulatta
  misc_feature (1)...(759): n = A,T,C or G
ggggccttcgcagcctccgtgatagcgatggcccgctagagtaccacctttctctctcacctctgtctttttctcaatcctttgactccgccggacttcgtcacccccacgacctggtgttagtctgatcaccccaacattcctggctacccaatgtggggtgacaaaaaccccagtgaaggaacgctagagcgggtgaaagcgaaggatgcattgtataaaaacacccgagaacgtcttttcaggcgccccttttagatgtctttttagaagttcggcaggaaagctgagtgctcagaaccagggtgaaaaacgggacaaagtgaaagcagacgttctgcttatttaaatttttgaaggcatttattacgaagtggggggtgaaagtnnnnnnnnnnnnnnnnnnnnnnnnnnnnnnnnnnnnnnnnnnnnnnnnnnnnnnnnnnnnnnnnnnnnnnnnnnnnnnnnnnnnnnnnnnnnnnnnnnnnnacacacacgctcnnnnnnnnnnnnnnnnnnnnnnnnnnnnntgggtttccaccgtgctagccaggttggtctcggtcttctgacctagtgatctgcccacctcggcttccctgaagttcgtgggattacagggcatgagcccaccgtgccccggcccgacatttgaacatttttttaatatatctggttgacccaatttggnnnnnnnnnnnnnnnnnnnnnnnnnntatttccaagtttcctttttgccccatttttgaacttggtttt

SEQ ID NO: 42349 - DNA, 746 bp, Macaca Mulatta
gggccagaaccaaggccagcccttgatgaaatcttggagttttcttttaattgtctcaagtttactttgtgtcctttgccctccgttttgcatccttctctgaggaatcccagactgcttatccaccacctcgcccacgcaacccttatcagtactgtctgagtctagacttccctcaacatcctccgttatgaaaatgcacgtgctgtgcctttcatgttactgaagaaaaacggtctgtgttagaaagatgatgataaaaacacttccctgaataactcttgagtcacagaggaaatcaaatttgcagtttaagagtttttagggggggaaaatagggacatttacgaaactgtatatcaaaatgcatagtctgcaaccaaaatttatttagaaaaaaagttgcgattttatacatgccttaaatattgaactaaaaagaattgaaataagctgagcagaaaatagatgaaaaatattaatgaataactttgagaaagagaaaagagatatataactataacttaaaaattaatattacaaggcaataatgcatataattctacattatttaaattccacacatttttaaaagtattagaaaattttctagaacatttaaatgggacaaaatgactgactgaaaataaaaccttaatatgctaaatggaaattggaaggaaaaaaaggtttaaaataataatgctaaaaaatttcccaggtctagaatggaatggtaaatccct

SEQ ID NO: 42350 - DNA, 531 bp, Macaca Mulatta
gccttctctgttcatcttatttcaggttgatttctttttcccctatttcagggctcctgtgcatattgtgtattatgatccagatgtctttaaaaccaagccagctgctttgaaagcacggtgttctcaaaggatccgggagttgtcacaacctcttacacgttaaatacagaaagccacaacagtcagaccctggttatgtatctagaacacatattagatgacttagttccctgctgtggtactgtcagtttacattcaccccttgcttcccctcccacaaaatgagacctttagggaaaaccaccatgatcattaaatagcagttgttgctgttacctgtcactgaatcttcagcagatttgaagactccagcatgcaataaatgagaaaatgagagactgccttattatccttactgttgcctcacaagcatcttggctgcctcattgctgtagctgacctgaagaaacactcttccttatatttgtgggttttgcttttcctttcccagtgagttccatgttcccc

SEQ ID NO: 42351 - DNA, 877 bp, Macaca Mulatta
  misc_feature (1)...(877): n = A,T,C or G
aggaaaagaagtttgctatgaaaggttagggtgtttcaaagatggtttaccatggaccaggactttctcaacagagttggtaggtttaccctggtctccagagaagataaacactcgtttcctgctctacactatacacaatcccaatgtctatcaggnnnnnnnnnnnnnnnnnnnnnnnnnnnnnnnnnnnnnnnnnnnnnnnnnnnnnnnnnnnnnnnnnnnnnnnnnnnnnnnnnnnnnnnnnnnnnnnnnnnnnnnnnnnnnnnnnnnnnnnnnnnnnnnnnnnnnnnnnnnnnnnnnnnnnnnnnnnnnnnnnnnnnnnnnnnnnnnnnnnnnnnnnnnnnnnnnnnnnnnnnnnnnnnnnnnnnnnnnnnnnnnnnnnnnnnnnnnnnnnnnnnnnnnnnnnnnnnnnnnnnnnnnnnnnnnnnnnnnnnnnnnnnnnnnnnnnnnnnnnnnnnnnnnnnnnnnnnnnnnnnnnnnnnnnnnnnnnnnnnnnnnnnnnnnnnnnnnnnnnnnnnnnnnnnnnnnnnnnnnnnnnnnnnnnnnnnnnnnnnnnnnnnnnnnnnnnnnnnnnnnnnnnnnnnnnnnnnnnnnnnnnnnnnnnnnnnnnnnnnnnnnnnnnnnnnnnnnnnnnnnnnnnnnnnnnnnnnnnnnnnnnnnnnnnnnnnnnnnnnnnnnnnnnnnnnnnnnnnnnnnnnnnnnnnnnnnnnnnnnnnnnnnnnnnnnnnnnnnnnnnnnnnnnnnnnnnnnnnnnnnagaaatggcttccttctttgactgtaaccatgcccgaagtcatcaattttatgctgaaagcattcttaatcctgatgcatttattgcttatccttgtagatcctacacatcttttaaa

SEQ ID NO: 42352 - DNA, 350 bp, Macaca Mulatta
acttctctaagaactgacataaatctaagaagaaggcctttttcgtcactgcaagaaatggcagaataaggatagcaagaagcagctggagcaagacttcagcagcatgaagaagtactgccaagtcatccacgtcactgcccacacccacatgcacctgcttcctgtgcgccagaagaaggccccgctgatggagatccaggtgaacagaggcaccgtggccaagaagctggactgggaccttgtagaggctagaacagcaggtacctgtgaaccaagtgtttgggcaggatgagatgattgacatcttcaaggtgaccaagggcaaagactacaaaggggtcacaagt

SEQ ID NO: 42353 - DNA, 509 bp, Macaca Mulatta
  misc_feature (1)...(509): n = A,T,C or G
gaagctttgtcagcagcatatacacgcggccctgaaacatccttcatttcatgaatcttttctctgaggcccatggccccttgcatcctggctgaccacaggcagctctggtgatttcattagcccatctctccatggtggttacatactcacagtaaagttgtcctatagcttttatgtcatctttcaaatccattttaatattttaaattcttgaatgttactctggcttttgtaaattctctgaggacaaactttttttgtcttttcatggagctcaaggaattcctcagcccacgttcaccaacaaacgacatacatgtaaggcaggtgcagttatgcgttaatatttgtggtcaagctggacaggtagatggtgatcaccctcctggttttatgagtgtagcaacttggaaacttgtgttatattttccattccttttcagataggaaaattanggccaaatgaatgtcacccatcaatcacttgctacctatcagccctctgg

SEQ ID NO: 42354 - DNA, 840 bp, Macaca Mulatta
  misc_feature (1)...(840): n = A,T,C or G
ggggaaaggctggcagtgaaggcctttgtaactccgactcctgctggcagggtgtttttagtgaatcctatccaagtgcaggcagccacccagctctttttagggagtgggcgttccctaggaaagtattcccccaaccctatttggagaatttttaccagagaaactctggctgcgctcctgtctgcgtcctgcaagagatagggaagcagaatctgagcagaaccctccgccacccaccctgagtcttccgccacctagcctgagtcttccgccacccaccctgagtcttccgccacccaccctgagtcttccgccacccaccctgagtctggtcagaccccaggcagccccctgtgtgtgtacataggctcatgnnnnnnnnnnnnnnnnnnnnnnnnnnnnnnnnnnnnnnnnnnnnnnngcacgtgcacacgctggggaagcagcaaggggcttgttcctgttccatcttgtttgattggctttctgtcactcctcctccccacagaagactcccggtcccagggacattttttagcttcccctaagaaattctgtttggaaaaaaatttcgaggagagctcacagccctgaagatgatgtgcccttatgaataccctttaggggtgatttatataaaaacccaaaacgacttccatgtcagnnnnnnnnnnnnnnnnnnnnnnnnnnnnnnnnnccttgttcggccggccctggggcccctcgaagaaagctttttctagaaccaattccgttttggggccccgccgggcccccctttaagggaaaattgaaaactatgggccgctaagcctggtttttcctatagagaaaaat

SEQ ID NO: 42355 - DNA, 892 bp, Macaca Mulatta
  misc_feature (1)...(892): n = A,T,C or G
aggccctgctggagcaatactcggaactgttgcttcgagccgtggaacggcgcatggaacgcaaactctgagttctggaagcctgtcccaagtgaatgaatgcctcagcgattccaaactgcagcccctctgccactcaccaaaacccacggggctgtttggattggaaagcagggagcagtgttcagaggcaaagcagccttcccagccgctcctcatagggcgcctgtatttattaatttatttccctgactgttgcctcacttccttggaactcctgcctccacagcccctccagtggcagggacaggtcttgggtctttgtcatcttggtgctgtgagaggtaggagggcagcttgccccatctcggaatctgggaagggctggccctctcttagaagccatttgaaatttctgcagggatcagctccctggggtggagcatacacagggtactctggggtcgaggtgaggtgatgtggtgttcagggcccttcagccaactgtgggccttcacttctacctccacttcccctctcacaccagctgcactcccctggctgccagagcagggtggttttccctaatacctggcagctcagaaaggcagagccgtcaggccctccagggtgtccccagccatcaggagacttgaattggtattaggacctgagcccccacattccactcctattctccctccaagaagggcccagcattgtctttccctgtgacccctttctctcctggccagaaacttgagcagctgtgggatgttgctgcgggacagtaagccctcacctgggcaaccatgaagctctggcctcctttcctcagcccttggttctccctgttcttccagcttggacccagnccgctgctggagcccaa

SEQ ID NO: 42356 - DNA, 761 bp, Macaca Mulatta
  misc_feature (1)...(761): n = A,T,C or G
gggatataaagaaggaaacagtaactccctaaatcctacacacccagctgtagtcacgactaatattttgggtattttccttccccgcctccaggaaagggttttaaagctgcgcttggagcgtgaaacaaagtgagaaagagttgagcttctcggcgtggggaagacctacttgtgctttcctccttcgcctctggccctgggtgtcctctctgagaagggacgatgacagccctctgctctgaggaactggctcagttgcctgtcacttggatgatgccccatgctgtagctttggacatctccatcagcaccgcgtcccctgccttgcagcatctgacataatgagatgagctctcaccatgtttcccagactggtctagaatgcctaggctcaggcgatcctccctnnnnnnnnnnnnnnnnnngtggtattacaggcgtgagccattgtacccagcctccaaatcttcaccagccctcaaaattaagctcaacttctgtctcctccaagaattttacacaggattccaatctggagggatcagtttcctacaagtgtagactttattgactcttccaccatttggtctcctatgttaccatcaggaaanaataanntgaagactttcaaatggacgaaaaaaagagtaaatgccactgaaatgtccaaccttagagcactcttcccagtttatcactgcccttccattgcccttttgacccatgtttacaacctctggtaaagtcacgagaggaat

SEQ ID NO: 42357 - DNA, 427 bp, Macaca Mulatta
agctcctccctggagatagctacaagctgcccgatggccaggtcatcaccatcggcaacaagcagttccgctgccccgaggtgctcttccagccttccttcctgggcatggaatcctgtggcatccatgaaactaccttcaactccatcatgaagtgtgatgtggacattctcaaggacctgtatgccaacacagtgctgtctggcagcaccaccatgtaccctggcatcgctgataggatgcagaagatcaccgccctggcgcccagcatgatgtagatcaagagtattgctcctgccaagcgcaggtactccatgtgaattggcagctccgtcctggcccagctgtccactgtccggcagatgtggctcaggaagcaggaatacaacaagtcaggcacctccatcgtccaccgcaaatgcttcta

SEQ ID NO: 42358 - DNA, 429 bp, Macaca Mulatta
tactgacttctttatatgattcagtcagagtttcaggggcccattactgatcttcagttgctgcatcttattctggaaacatgaacagaaattaacaagtaaggtgcttaaatcaagccagatagttttgaccaaaataagaggttttaaaatacattattagccaaaaaatatactttctatttgaataacaaagatgtcagaataacttgtttttcttttccaaagggcaaaaaatcaacagtattaaatagataaaattcctgtacaccagctgacacctacgcatgcttcttcattccggttctttggttagataacacaaaaagaacattaagaaaggtcctataaaaagacaaataccatgtagggaaggaagttgtgcatgtgaccttctcttgctaatattccagaaggctttttgttaaa

SEQ ID NO: 42359 - DNA, 802 bp, Macaca Mulatta
  misc_feature (1)...(802): n = A,T,C or G
ggaggccatgagctagacaccagcctgggcagcatagcaagacaccatctctgaaaaacttaaaaaaacaattagccaggtatggtggcaggtgcggccgcattcacctgtagtactagctatcnnnnnnnnnnnnnnnnnnngattgcttgagcacagaagttcaaggctgtggtgagctatgactgtgcaactgcgctctagcctgggcaacagagcaagaccctcatcnnnnnnnnnnnnnnnnnnnnnnatgaaaaatgttttaaggctgtggttttcaaagaaattctggaagccacaaagacattttggaaataactagaggctgggtgcgnnnnnnnnnnnnnnnnnnnnnnnnnnnnnnnnnnnnnnnnacgggcggatcacgaggtcggnnnnnnnnnnnnnnnnnnnnnnnnnnnnnnnnnnnnnnnnnnnnnnnnnnnnnnnnnnnnnnnnnnnnnnnnnnnnnnnnnnnnnnnnnnnnnnnnnnnnnnnnnnnnnnnnnnnnnnnnnnnnnnnnnnnnnnnnnnnnnnnnnnnnnnnnnnnnnnnnnnnnnnnnnnnnnnnnnnnnnnnnnnnnnnnnnnnnnaagggagacctccgcgccgagacgagacagggcagctaacgggcagacgccgcttgtcgtggcgcgccctcggcgcccctgtaagaagccctttcccaacaaaccttccccctgtgtggagcgcgccgggggggccccagggcaggggatgcggagcaagacggtggcagggccggaaatacgcagggtgtgcgcgccgacgggggc

SEQ ID NO: 42360 - DNA, 996 bp, Macaca Mulatta
tgaagtctgcatttatcatgctgaggggaaacaagaataaattgaagagtaatgcacacctaacataaaactgaccaaagtgcaatcccatctcccaccaggcccatccggtgcttcccagacttactcatcatctcccacttccttactcctcctccaactaaagagtttctttagttgctctaatgtatatattttaatttaccttttatctcatttagggttttactttatattcgttgatttaatcagtgaattatttctggagtatgtgtttactattgcacaacaagaatacatgtttacgctttagaaacaatctgaaaaataatgaatgggaaacttttgctccctgtagctgaggtggaaggaataacacttttatggaagagggtttctcataccctcaaagtcaaaccagagatattacagacatgaatgtattatccagctcagtagagcaaggcattgattcagatttttgaatttcaacaattttctgttacataaggaaggcaatttgccagccagcacagtaaatgatagtggactaccagagaaacgattgatctgaaaatgcaatggctgaaaaataaagaattgtttagtctgtttggactgctataacaaaataccataaactgggttgtttataaaaaacataaatttatttcttacggttctggaggctgagaagcccaagatcaagatgctgacagacttggtgtctgatgagggctccctttctgattggtaggtggtgccttccagctatgttctcacatagtgggaggggtgaggagtctcctgtggacctctttcacaaggatgctgaccccgttcataaccactctgccttcatgacctggtcacctcccaaatcccccacctcttaatatcatcatgttgcaggttaagagtgtaatatatgaattttagaggacacaaacattcagcccatagtaaggatgctcactttttgattccaatggtaat

SEQ ID NO: 42361 - DNA, 820 bp, Macaca Mulatta
  misc_feature (1)...(820): n = A,T,C or G
ggatacatagttagcaaattagcaacccagtaagtacagttatcaaaaatactagcaaactacatccatatcgcttttggtgtcagattgtatctgtgcatctaaaaatattttaatactcaagtgctctnnnnnnnnnnnnnnnnnnnnngctttctcattagattactgaaatgctttaattcatactatgattttgttattagtgtgaattttaatgtagagaattcagtgtgctaagtgatatgccagtgcttcactacattcatttattaaaaaaaatcattcttgattatgcatgaaaacctgttttgaaaataaactgcttgggggtggtggttgcctttatnnnnnnnnnnnnnnnnnnnnnnnnnnnnnnnnnnnnnnnnnnnnnnnnnnnnnnnnnnnnnnnnnnnnnnnnnnnnnnnnnnnnnnnnnnnnnnnnnnnnnnnnnnnnnnnnnnnnnnnnnnnnnnnnnnnnnnnnnnnnnnnnnnnnnnnnnnnnnnnnnnnnnnnnnnnnnnnnnnnnnnnnnnnnnnnnnnnnnnnnnnnnnnnnnnnnnnnnnnnnnnnnnnnnnnnnnnnnnnnnnnnnnnnnnnnnnnnnnnnnnnnnnnnnnnnnnnnnnnnnnnnnnnnnnnnnnnnnnnnnnnnnnnnnnnnnnnnnnnnnnnnnnnnnnnnnnnnnnnnnnnnnnnnnnnnnnnnnnnnnnnnnnnnnnnnnnnnnnnnnnnnnnnnnnnnnnnnnnnnnnnnnnnnnnnnnnnnnnnnnnnnnnnnnnnnnnnnnnnnnnnnnnnnnnnnnnnnnnnnnnnnnnnnnnnn

SEQ ID NO: 42362 - DNA, 651 bp, Macaca Mulatta
  misc_feature (1)...(651): n = A,T,C or G
ggggttcttacatgccacctccttcagaattataggggagcttatttaaaaattatccacttcattaataactttaaggtagcatccacacgtccacattcttacagatactgaggtctggtgaccaaattaattcatctttcttaaatttcagatacccgagtaatgctttggcaagtattcctggttatgacgggattctaggttcagcctaaagtcctgatgaagttggtgttctataaataacagaagtacaggaagcagagttgacattcagctgaagaacttttcactgtagaaaggattttgtttttctttagaacacaaaaatgctctcagtcttctggatgccttcttttatgcatccagaaaagttttcagttgtgactcaaaaagttgccattagaaagcaagaatggggagtgagattagccaaaataataaataaataaagcaagaacagctaattttcaccttagtttacgtaatgaaaagagtggcaaagaagcgtagacaaggaaaatcccaggtgacagatattttcagttattttctagggacttgcttaatgagccaattaggatcctgtattgtgtttccagataattctgactctctggcgaatttnctgattannatctgagcagttgn

SEQ ID NO: 42363 - DNA, 235 bp, Macaca Mulatta
tgaaaaatactgtttttctttcactgtaggcccgtctctgtataaattcaatttgaaaacatggcaatatgtatctttcattttcaaatgaacaagctcatagatacaaaaattaaaggcataacaagaaaattagatgttttatgtcctttgatacctttgttttctgctgtggcagttgtcaaaaatactaagtacctaggattttcctttctaaaatcttcactttctttaa

SEQ ID NO: 42364 - DNA, 1232 bp, Macaca Mulatta
  misc_feature (1)...(1232): n = A,T,C or G
ccgcagaggcagtanttctcatgatggtgtggccatgagtaattcatccgacttctctgagcctcacctttaaatctataaaatgggggaggctgggtgtggtggcccttgacatatatcccagcactttgggaggccaagatgggcagatcacttgaggtcaggagttcgagaccagcctggctgatatggcgaaaccccgtctctactgaaaaatacaaaaattagcgaggtgtggtggtgcctgcttgtaatcccagctacttgggaaactgaggcagaagaatcacttgaacccagcaggcggaggttgcagtgagccaagatcatgccattgcattccagactgggcgacagagggagactctgtctcaaaaataaataaataaataaataaaatgggtgatagtaagccctgcctaatagagctgttgtaaggatttgaactggaagtacaataaactgaattgttgttcattactgagggctacatttcataagatgcagcattttatttagaccttcagctccaagaatgcaacagtccttgcagacctcacatctcaaatctaaaagaacatttagagaccatcaaattctgagtcaacaatagggcttggaactcttccacctttgagcctactacagcccctggggttccctgacctctcaacaggctataatgctcaaaacatctcagcatgaaacagtgtttagggacgccatgtccaaaccttaaaaagtatttggatagcttccaattcccagctaacaaaagggcttagaactctccaatttttgagacttctatagtccttgagctttctccaactcctagcatgcaacagtgattggaaatcccatctcccagcatgcaacaattcttggagatcccaggtcccaatctaaaacaatgtttggacacccctccaatctttagccccggctgttgggggttctcccattctttgaaacctactatagccctttgggcttccccctcaacttccaggcggtgccaacaggggccttaaaaaattcccaccttcccaagcatgccaacagtggtggggggaaaccccttactccttcagcatggcaaattaaggccataggaagattccccttcttcccaancatgtgcacaagtgtgctataaaaggagccccatctttccccaacctttggcaacaagtggcccggggaagaaccctctcccaaccatgggcaag

SEQ ID NO: 42365 - DNA, 728 bp, Macaca Mulatta
  misc_feature (1)...(728): n = A,T,C or G
taaggtggaaaatataaaactatgactaaaggatattgagctgcaangaaggtaanccancaatgacagcaccaagctgctatattttagcatgntatcatgtattctgacaaatatcctgacatgaggtatcatttatatttatgagaaaataggacagaacacccttgctttatgaactacgtacagttacttaagctgcctagctccacgtttggttggagtttgtaatacattgtaaagttatgtattaatactttccattctntgttttctgtatatcctntaaggtaaattctaaaaactaagtcattttaattgaagtttccttagctgcaagatgagaattcctgagttaagcctctcataatcgagatgctgttcaagctgcctataataatgtgttctagaaggctcacttgtatatgcccagaagatttggggatacttatgaaacagaatgtggcctgaaaaaaattgtcaggtcaatgaaggaaaatgagacaaggttaccatgtgtcaacattgcctttgttttattctctctgcaggcttgatgcatatgaggactctggaaataagccttccctttctcccagaaacactccccaaaccctaatccatctgtaggattcctgctgatagtgtgctacatccttaaaatgaatcagcttcaagttgcaagttatatagtttataaagacagtgactttatcctccagattaaa

SEQ ID NO: 42366 - DNA, 648 bp, Macaca Mulatta
caagttagagtggggcataatatatagatgtattattgtggcctttttttatataaggactagcccttggaaaccatcgtcctgtgggccccactgtgcaataaccctactggataggttttagatcattctttcctggcagactgctctcttgggtacctagcaggaatctgaaatcttggttttattgaaaagaattttgagattcataatttctgattctagattatagtttgtaacatgtttgaaacagacgcttcgaaagagtgatttctcaacttagtgttaaatgatgttgtctgaagtctgactctgtaagcttgttcgtttcatcaaattttaagtcattgagcacaatcaaaatggaggctcatatctcaggagtttttgaaattttaatttaggggcacttagagacctttttttctaccccatccaacttctttctttccttttgctatgatgtttgtatgtatgttacaagaccttagtgacgggatggcaagtcacgtagattcatcatgatcctttatgtagttaggcaatggttgacagaaggagttgtagtttactgcttttcagagggcgctaagaacagcaggtcagctgggccgtctttaagatgttcttttagacagccgcacattg

SEQ ID NO: 42367 - DNA, 539 bp, Macaca Mulatta
gtgcctcagcctcctgagtagctgggattacaggtgtgtgccaccatgcccatctaatttttatatttttagtagagatggggtttcgccatgttggccaggctggtctcaaactcctggcctcacgtgatccacctcccaaagtgctgggattacaggtgtgagccaccacgcccggccaaaactgtttatacttgagaagttccatcttcatttctgccacagttggaacttcccgaggaaggagggaggcctgaggtttttttgcacaatctgtttcagagcctgtttagactcaaacctacacttcccttggcagcagaatatacttaacctaaagcagtatttggagttgagaaaaacctggcagggtaagtgaaaatgtactgtttggtagagtaggtagagaagccgtgctctgaccctgtgattccatctttttctacattctatgatggtgatgaagctagatacccctagggaagaaagaaggactgggtttagcaaaaatgacttgataattaaagtttatttgaaca

SEQ ID NO: 42368 - DNA, 953 bp, Macaca Mulatta
  misc_feature (1)...(953): n = A,T,C or G
gggaaacccggcctcaccttttcgtgnnnnnnnnnagagattatcgcagtcctggtttctccctccagaagaccctctcccagtcctctgtagctcctggtagtgccctgacccctgctgccaccgtccttctgagagcaacggaagagcttcccggatggcgaggaaaagagggaaagtagccagcaatgtcgaacacaatgtataataagatgtggcatcagacccaagaaagccctcggtgctttactcgataaagaacctcacaagatgggttgaaacccacaaaagaaaatccaggggnnnnnnnnnnnnnnnnnnnntttgggccacctttttaaacaaaaagatgtgtggccnnnnnnnnnnnnnnnnnnnctccggaaaaaagtttttcnnnnnnnnnnnnnnnnnnnnnnnnnnnnnnnnnnnnnnnnnnnnntnnnnnnnnnnnnnnnnnnnttaatacgggggtagaattgggtgccccctttttttgttaatnnnnnnnnnnnnnnnnnnnnngagtgggggagtgtgtgggagcaccactccgggagggggtcctatttttattttcttcattatagtaataatccttagtgaaataaaataaggagagggttgggtgtgcccccctctcacttataatatttgttgttaaattaccccccgttccccctatcttcttactttttttatccagaatgaagctgctgtatgtttgtgtgtttctnatgtttgtgggtagaaattgagaaganatatggaagaactagagtggacacagtataaattatactattatttggagattttgggcatacacggatatatttaagtaggtatttctatagcgaagcaggagagataatataattattcttgtagtaatgataataatataatagtctttaacatgagctgatgactaacgatagatcacacacccc

SEQ ID NO: 42369 - DNA, 248 bp, Macaca Mulatta
ttaggaaagagaaaaagcagcatgcccagtctggaagggcatccatttgccatgatagcaaccctattatatctagcagggctcttccagtcctgcagcacgggcctccagctaccagcagtgcaggcagcgttgtggcatcccaggctccaggcagctctgtcgttgtgctcaaagtgggtctctggccttagcacaccttgagggtattaagaaccacattctctcataatagtaggtactagaaa

SEQ ID NO: 42370 - DNA, 835 bp, Macaca Mulatta
  misc_feature (1)...(835): n = A,T,C or G
ggcatgaccgcgatannnnnnnnnnnnnnnnnnnnnnnnnnnnnnnnnnnnnnnnnnnnnnnnnnnnnnnnnnnnnnnnnnnnnnnnnnnnnnnnnnnnnnnnnnnnnnnnnnnnnnnnnnnnnnnnnnnnnnnnnnnnnnnnnnnnnnnnnnnnnnnnnnnnnnnnnnnnnnnnnnnnnnnnnnnnnnnnnnnnnnnnnnnnnnnnnnnnnnnnnnnnnnnnnnnnnnnnnnnnnnnnnnnnnnnnnnnnnnnnnnnnnnnnnnnnnnnnnnnnnnnnnnnnnnnnnnnnnnnnnnnnnnnnnnnnnnnnnnnnnnnnnnnnnnnnnnnnnnnnnnnnnnnnnnnnnnnnnnnnnnnnnnnnnnnnnnnnnnnnnnnnnnnnnnnnnnnnnnnnnnnnnnnnnnnnnnnnnnnnnnnnnnnnnnnnnnnnnnnnnnnnnnnnnnnnnnnnnnnnnnnnnnnnnnnnnnnnnnnnnnnnnnnnnnnnnnnnnnnnnnnnnnnnnnnnnnnnnnnnnnnnnnnnnnnnnnnnnnnnnnnnnnnnnnnnnnnnnnnnnnnnnnnnnnnnnnnnnnnnnnnnnnnnnnnnnnnnnnnnnnnnnnnnnnnnnnnnnnnnnnnnnnnnnnnnnnnnnnnnnnnnnnnnnnnnnnnnnnnnnnnnnnnnnnnnnnnnnnnnnnnnnnnnnnnnnnnnnnnnnnttatcatcactgataaaacgcctctaaacaacccaccaatctttccctaaggcacaatttccaacccccaattccaacttctaccagagaaactaattttccacaaggcatggctctttccccccaatttccaaaaat

SEQ ID NO: 42371 - DNA, 491 bp, Macaca Mulatta
agcagcagcaacgtggaggaaacgggagtgaacagagagcttagggaccatcatgagcctcctcaacaagcccaagggtgagatgatcccagaggagctgcagaagcgagaggaggaggaatttaacacgagtccactctctgtgctcacgcagtcagtcaagaacaacactcaagtgctcatcaactgtcgcaacaataagaaactcctgggccgcgtgaaggccttcgataggcactgtaacatggtgctggagaatgtgaaggagatgtggactgaggtccctaagagcggcaagggcaagaagaaatccaagccagtcaacaaagaccgctacatctccaagatgttcctgcgcggggactcggtcatcgtggtcctgcggaacccgctcatcgccggcaagtaggggctgcctatccatcaacagaactcactctcctgtcctatgaagaccgttgcctttggtgttgagaatgataaagctctgt

SEQ ID NO: 42372 - DNA, 292 bp, Macaca Mulatta
  misc_feature (1)...(292): n = A,T,C or G
natgcctcacagccaaaagagtcagcactgcaagcttgagcaagggcttcaggtccccaaagacgcacagggccttgtgggtgtgcaggctcctgaagctgagaaggtgaatcacacagcctcctcctcttcctctactctgatccagggcaccttggagaaggtgtgtgcttctcgaacacctggtactccccagagttctcagaaagtctgcttctcctgcactactatcaaagccactccttggaatcaatctgatgggagttccagaagccaggaaaagaaggatcca

SEQ ID NO: 42373 - DNA, 1027 bp, Macaca Mulatta
  misc_feature (1)...(1027): n = A,T,C or G
ggnnnnnnnnnnnnnnnnnnnnnnnnnnnnnnnnnnnnnnnnnnnnnnnnnnnnnnnnnnnnnnnnnnnnnnnnnnnnnnnnnnnnnnnnnnnnnnnnnnnnnnnnnnnnnnnnnnnnnnnnnnnnnnnnnnnnnnnnnnnnnnnnnnnnnnnnnnnnnnnnnnnnnnnnnnnnnnnnnnnnnnnnnnnnnnnnnnnnnnnnnnnnnnnnnnnnnnnnnnnnnnnnnnnnnnnnnnnnnnnnnnnnnnnnnnnnnnnnnnnnnnnnnnnnnnnnnnnnnnnnnnnnnnnnnnnnnnnnnnnnnnnnnnnnnnnnnnnnnnnnnnnnnnnnnnnntaatccttatatccccccatacactttttccggcccgcgagttccaccgctccctttctgcctcccaccctcccatcattactttaattttcctaacacctgccaccgcgcgaaaccaggctcccgttataccctaaggtccccaaagggaggtgcccatggtcactccagccaccggatatcgggaacacctgtacgtcaactcgccggcggtctgcctctgtgctggtgcccaaccttttctgaggttattcctcttcgtgccagcagcgcagatgatccactctccctttgctctattgcccacttctttctcccccgacatttcgttcaacccttctcccccgcttttcctccctttataccctacccccctcccaccattgcccttttgagttcatgcccgtgaccaccgtttaataataccactgcgtctgattttctttacacgactccgcgcccctatatctcattccgcgcaaagtcccctcttttatcccctgtcccctttcccgcccccctttcccttttccccctcgccgtggacccaatgttaatgtccgcccccctttaattttgacgagtcgccgcgctgctcttacactcctccagagacaagatagttttttgcccacgggaggcgactatgcgcttactccggggtgtaacccatgtaccccccccgcctccccg

SEQ ID NO: 42374 - DNA, 771 bp, Macaca Mulatta
gggcattgatgtacattttaagaatggcacttttgatacatgttatcataaaggtgcttaatagagctgaattaaagtttttcaaatctgtaaacaaagcaaaaaagtaaattgtagtcatttgattattttttaaattggtgctttatattttgttctcactcagagtaaaagctgcaatttattgttcaccagctttgatgtattcattactcagtaatgcaatacctctattgttgaattccctttggaaataagtgaaaattctaatggccaccggaagctgctcgctaggttttgcttggtggagaaacacaatctgcacctacccatattaattgggttgtatccccattgaaaaagaaaaaagggaatgtggcctttttagtgtgttttttattgttgttgttttgtaattatcaaacccaggtaagatattggtatcctgcactggattttgaaatgaaattcagcggaagacagttaagattaaagtactatacaaacatttcagaagggtccatactacactctatatgacaacacttaggctggggatctctttcagaaactcggactttaaaagcaacttggaacagttgatccacctccacattcaagtaatttatgaatatgcagaatagggatctgttcatctagaaatttttaccatttgtcttctgtgtagctgcaaggaacactaatgtttatacaactgtcagtccacccagtggtgcaactggttctgattcagtcttccgaattcctttt

SEQ ID NO: 42375 - DNA, 226 bp, Macaca Mulatta
ctctgtgccatgactctcagagataagaccccaccagtccttgttcttttgtctcatgaataatcacttggacgggaagtctgtcctcctagaagtagctaggcacagagagaaacattccctgttaagctggctgagacttccgctgattacaacaaaaaccctgccccataaatattcccacagaaaacaggtctacttcctatgaaagtaaaagacccccccc

SEQ ID NO: 42376 - DNA, 688 bp, Macaca Mulatta
aacgtaaagctgattagagaactcatagaagagattgaaagactgaaagccctgctgctgagctttgaactggtatgcagacagtcagaacctttccatacttaagtgaaattctccttctgagcctctcttcttctccatagagtctgggctctgctgcattccatgttctcagttgactctcatgaggcagagacaggagcaaagacaaaacagagatttatctgatttcttggtgtagcttcaggtggtgtgggcattttttcactttatcatctcttgtcttgtgcctgaatggtccttgccctgtgtacgcaggtacggagaatggggccctctaggaaaatttatttttattttccatctttgtaccaatatgagcccaaatacataggttcctgatttatttctcattttaatgataaagtctttcctttatctgcaccgtatattccttcacaagtgtaagagtgggacctacctgaagttcagaccaggaaaatatcaaagcacatctctatctttgtgcagagaaacttcggttcattgaatgatgaaaaggatgaaaacctgaaggagctggttctccaaaatgagttgaaggtgggtgtgttgggtggactcagtagtgctttacatcaccctgggagctccctccattattcctgagctaggtagggttgctccc

SEQ ID NO: 42377 - DNA, 793 bp, Macaca Mulatta
  misc_feature (1)...(793): n = A,T,C or G
aactcacggggtgtgagtgagagaatttgttagttgtatgggataactaccctgttattcagcttttgtagaagagaattcccagagttcctttccccaaaatattcagggatctcccaaatggtgggtggggggacagccctgggtgaataggtcccaaggcccagtactttttgggcccggaggccttttggtgctggtccggaaaaggtaggctggcagggacatctgagttctcttccttccgcaacggcaactccagcgagccagtgaaatctcccggcctccactcgcccccctctccccaggaaaaaacagggaggtgaaatatgccccatctggtaacttttccagaatgattttgtctccaacttcttttgggtgacacttgggatgtgtggggctggcaagttccacaagggagagcaggcaagtttcacaaacaggacaaaccannnnnnnnnnnnnnnnnnnnnnnnnnnnnntggaaggatagattctgaaacagcatcgggaatacctgttccaactcgctttccattcgcctgtgctgaggcgggttggaaatatggagctgccttccatgggagtgaaagtctctttctaggagtccctgccatggatgaagggaggtgtagcacacatagaaaagtaataacgctgcggaaacaagtccagcagagatgaagcaagccccggaggcctgggtgcatagacttgtggaccggccatggtccaggaacctggacactcttggacctggtccttggaccagtcactactcctgtctgcc

SEQ ID NO: 42378 - DNA, 933 bp, Macaca Mulatta
agttatgatttgtagaggattcagctggaatagcttgtgggtgctggctaagggtggcaaaatgcctgctgagacatgaagattttggccactagttttgcccttgggagcctagggttggccttctacctgcctttggtggtgactacacctaaaacactggccatccctgagaagctgcaggaagctgtggggaaagttatcatcagtgctacaacctgtacggtcacctgtggccttggctataaggaggagaccgtctgtgaggtgggccctgatggagtgagaaggaaatgtcagactcagcgcttggaatgtctcaccaactggatctgtgggatgctccatttcaccattctcattggcaaggaatttgagcttagctgtctgagttcagacgtcctggagattggacaggaagctttccggttcacctggagacttgctcgaggtatcatctccactgacgacgaggtcttcaaacccttccgagccaactctcacttcgtgaagtttaaatatgctcaggagtatgactctgggacataccgatgtgatgtgcagctgttaaaaaacttgagacttgtcaagaggctctattttgggctgagggttcttcctcctaacttggtgaacctgaatttccatcagtcacttactgaagatcagaagttagtagatgagggattggaagttaatctggacagctactccaagcctcaccacccaaagtggaaaaagaaggtggcgtcagccttggggataggaattgccagtggagtggttggtggtgtgttggtgaggattgtcctctgtgtgctgagggggggcctgcagcagtgatagcctcaagaacttgacagccttgctcctgaagatctggctgcccaggaagccaagctagctttttaggggagtgttctggctgctggt

SEQ ID NO: 42379 - DNA, 468 bp, Macaca Mulatta
atggatgacgatgggcttcctctcatagagtcaggcatgacctgaccaaggtgccaactcttcaacagaaaagaacggtgggttttctaaaccaatttgtggtgcacactgtagagttcctcaactgcttttctatggtttgtgaggagaaaatggcagatctttctctttgtatccaacaaattgaaacaactctcaacgttttagacacaaagttgtcatctatctctgacctagatgatgtcacagttgaagtatctcctttaagtgtcactagtgtcacaaatggacttcagcacctctgaagccacttcagagcagttatggaacagtacacaagactctggaccccaggaaagtgagggatcagcaggaaacagctgaactgtagccaaggatccaagatatgccagagatctcaaaatggttcaagtaggtgtaccagcaatggcaatcagaaacaaaatt

SEQ ID NO: 42380 - DNA, 933 bp, Macaca Mulatta
  misc_feature (1)...(933): n = A,T,C or G
caacagtttatactggagaaacttgtgcggtaaagtgcgtagcatgtaatgttgatttatgcgtgagtgggttagacgtncatcggnggaagagaggaggggtagacaaaaacactgtgtatttgtggggcgcgctcttnnnnnnnnnnnnnnnnnnnntgcggccaccttcggccnnnnnnnnnnnnnnnnnnnnnnnnnnctcttgtaagnnnnnnnnnnnnnnnnnnnnnnnnnnnnnnngggcgccctcctttgggggtgtaaaaaagtcgctattatgcacaccccgcggcgggggagaaccccctttggcgcccacacgttgggggtttttttcccttggagaaatttccccgtgtttgtgnnnnnnnnnnnnnnnnnnnnnnttttttgttccccccccccnnnnnnnnnnnnnnnnnnnnnnnnncgaaacacaggggaaannnnnnnnnnnnnnnnnnnnnnnnnnnnnnnnnnnnnnnntataacccaaaatgggggaaaaagcccgggggcgcgggcccttttggtttggccaggaaattttcttggaatgggaaagggggggcagccaccattccctttaaaaccttgaatcccaaacctttttggccttcttacaaaaggttaaacccggtaaaaggaaggtaaaattaggaagggcaatgcttgtgggaaaggtacagtgcaatattggcgggcgcacgcctcaattacgattggcctgcttgcttctccctgttcaatcgtttctttggaaggcagtggatttttctcttgcgtctctgtcttcttcagtttcgacttatcgaatttctcgatctcagccatatcgggtttgtcagacatggttgcggaggaaaagcggagcgaggcgcacgaaaacgagcgaagtctggtctgagcagtggccaccaccgagttccc

SEQ ID NO: 42381 - DNA, 617 bp, Macaca Mulatta
acccagtgacgtaatattggacgaggactagggcttctgacccccatcatcggccgaattaacctcttttcttctgtatgccatagctgtttgttcccaccgagctgtgcttaggaagctggccagccgggcctcctttagctacactgcagcctttttcaaagcgagtgaatgtggcctggcccctacagttcgccaggcccgctgtaaaaaggttagatttcagtctgtagactatcagggggaaggcctttcctaagaggtagccagaacggagagctgtaaactccttgagtgcaagagactgcttctgttacgtgagtggttgtccttcatctttgccttccttacctcgtgatctcaccattctaggtaggtgttaagttagaaaggaaaatagtgatatcgaggaatagagaaagtaacaagagctactggtcactttgaacctttaataaagtgcccatctcacagatggagagaggcacggaaggattacaggcgtgagcaactgcgcccggccagttgtaccagtttatactccaagcaacagagagagaatcatagtcttctcacgtacttaatactactacttaccataattatatctttgctca

SEQ ID NO: 42382 - DNA, 165 bp, Macaca Mulatta
aggtctggtgggaatttcattgaactgtgactggggggaacctgtggacattagtaaccccaaggacatagaggctgccgagagatacctacagttctgtctgggctggtttgccaaccccatttatgctggtgactacccccaagtcatgaaggactacattgg

SEQ ID NO: 42383 - DNA, 214 bp, Macaca Mulatta
tgaagtctgacgcggcaggtcccttggcagggttaatgggaccacctggtggggcaatgccggtctttcccagccacagacaagcttcgcgcctcgatcacccagcgcccccagacgctggatgccgaggcctggtccttcatagccgccgccgcctcctcaggagcaaagccagccatatgccagcaccgccttcggccccgccccgagccag

SEQ ID NO: 42384 - DNA, 876 bp, Macaca Mulatta
tggcggatgacgccggtgcagcgggggggccggaggccctggtggccctgggatggggaatcgcggtggcttccgcggaggtttcggcagtggcatccggggccggggtcgcggccgtggacggggccggggccgaggccgcggagctcgcggaggcaaggccgaggataaggagtggatgcccgtcaccaagctgggccgcttggtcaaggacatgaagatcaagtccctggaggagatctacctcttctctttgcccattaaggaatctgagatcattgactttttcttgggggcttctcttaaagacgaggttttgaagattatgccggtgcagaagcagacccgtgctggccagcgcaccaggtttaaggcgtttgttgctatcggggactacaatggccacgtcggcctgggtgttaagtgctccaaggaggtggccactgccatccgtggggccatcatcctggccaaactctccattgtcccggtgcgcagaggctactgggggaacaagatcggcaagccccacactgtcccttgcaaggtgacaggccgctgcggctctgtgctcgtgcgcctcatccctgcacccaggggcactggcatcgtctcagcgcctgtgcccaagaagctgctcatgatggctggtattgatgactgctgacactcagcccgggggttgactgtcacccttgggaaattcgcaaagccaccttcgatgcatctctaaaactacaggtactgaccctgactctggaagagatgtgttcccagctcccataggaatgctgccacttgttaacccaccgattccgtgaggcaggtccgttggttcacaagtttttcgcaaaaagagcccggtctcaaaaaaaa

SEQ ID NO: 42385 - DNA, 2088 bp, Macaca Mulatta
  misc_feature (1)...(2088): n = A,T,C or G
aaaaaatatcgccaacatccagacacgctcaagtttacctcgattgaagatgctccaattacagtacagtctaaaattaatcaggcccagaggagtgatnnnnnnnnnnnnnnnnnnnnnnnnnnnnnnnnnnnnnnnnnnnnnnnnnnnnnnnnnnnnnnnnnnnnnnnnnnnnnnnnnnnnnnnnnnnnnnnnnnnnnnnnnnnnnnnnnnnnnnnnnnnnnnnnnnnnnnnnnnnnnnnnnnnnnnnnnnnnnnnnnnnnnnnnnnnnnnnnnnnnnnnnnnnnnnnnnnnnnnnnnnnnnnnnnnnnnnnnnnnnnnnnnnnnnnnnnnnnnnnnnnnnnnnnnnnnnnnnnnnnnnnnnnnagtcttcaggatgatcctaaactggttcactacatgaatgtggccaaaatgcagtctgatcgtgagtacaaaaagggctatgannnnnnnnnnnnnnnnnnnnnnnnnnnnnnnnnnnnnnnnnnnnnnnnnnnnnnnnnnnnnnnnnnnnnnnnnnnnnnnnnnnnnnnnnnnnnnnnnnnnnnnnnnnnnnnnnnnnnnnnnnnnnnnnnnnnnnnnnnnnnnnnnnnnnnnnnnnnnnnnnnnnnnnnnnnnnnnnnnnnnnnnnnnnnnnnnnnnnnnnnnnnnnnnnnnnnnnnnnnnnnnnnnnnnnnnnnnnnnnnnnnnnnnnnnnnnnnnnnnnnnnnnnnnnnnnnnnnnnnnnnnnnnnnnnnnnnnnnnnnnnnnnnnnnnnnnnnnnnnnnnnnnnnnnnnnnnnnnnnnnnnnnnnnnnnnnnnnnnnnnnnnnnnnnnnnnnnnnnnnnnnnnnnnnnnnnnnnnnnnnnnnnnnnnnnnnnnnnnnnnnnnnnnnnnnnnnnnnnnnnnnnnnnnnnnnnnnnnnnnnnnnnnnnnnnnnnnnnnnnnnnnnnnnnnnnnnnnnnnnnnnnnnnnnnnnnnnnnnnnnnnnnnnnnnnnnnnnnnnnnnnnnnnnnnnnnnnnnnnnnnnnnnnnnnnnnnnnnnnnnnnnnnnnnnnnnnntgcaaatataaggaggcctacgagaaagccaaaggcaagcaagttggatttcgcagtcttcaggatgatcctaaactggttcactacatgaatgtggccaaaatgcagtctgatcgtgagtacaaaaagggctatgaagccagcaagaccaagtaccacacacctctggatatggtcagtgtgacagctgcaaagaaatctcaggaggttgccaccaacgccaactacagacagccataccaccattacactctcctgcccgatgccttgaatgtggagcactccaggaatgccatgcagattcagagtgatnnnnnnnnnnnnnnnnnnnnnnnnnnnnnnnnnnnnnnnnnnnnnnnnnnnnnnnnnnnnnnnnnnnnnnnnnnnnnnnnnnnnnnnnnnnnnnnnnnnnnnnnnnnnnnnnnnnnnnnnnnnnnnnnnnnnnnnnnnnnnnnnnnnnnnnnnnnnnnnnnnnnnnnnnnnnnnnnnnnnnnnnnnnnnnnnnnnnnnnnnnnnnnnnnnnnnnnnnnnnnnnnnnnnnnnnnnnnnnnnnnnnnnnnnnnnnnnnnnnnnnnnnnnnnnnnnnnnnnnnnnnnnnnnnnnnnnnnnnnnnnnnnnnnnnnnnnnnnnnnnnnnnnnnnnnnnnnnnnnnnnnnnnnnnnnnnnnnnnnnnnnnnnnnnnnnnnnnnnnnnnnnnnnnnnnnnnnnnnnnnnnnnnnnnnnnnnnnnnnntacaaatacaaacaagcctatgaacaagccaaagggaaacacattggcttccggagcctggaagatgaccccaagctggtgcacttcatgcaggtggccaagatgcagtcagaccgagagtacaagaagggatacgagaaatccaagacctccttccataccccagtggacatgctcagtgtggtggctgccaagaagtctcaggaagtggccaccaacgccaactacaggaacttgatccatacctacaacatgcttcctgatgccatgagctttgaattggccaaaactaggatgcagattcagagtgat

SEQ ID NO: 42386 - DNA, 562 bp, Macaca Mulatta
aggaaatatagtgaattcccaaactagatacaggtgcctcaattaaaatatgcattctaaagtgagtttaaaaaaaaatttattggctatgtttgattatccacaacagaattttccttaattagcacaggaaattgaaagttggttataatttaatatctctgctcttgtcttcaacagacatactcagcatttatacttgtaaatagaatgagttttcattgtttcgttttctgtttttgtttccttaggaacaagaggatgaaggaaatatggtcagcattttaataacgccataaatccaagataattaatcctataaagttttccagtttcattaattcagaatttcatcgtataacttgaaatccaattggcttcctcttaaaaacaaaaaccaagaaaacttttttctgaaagacattattttccagtattaggccaatttgtcctcaaattaagtagaatctcaacatcttgttgagccaaaagtaaattccaacttcatttaatgctgctgtggcaggaagttgccctgaagttgactgcagtacatctttca

SEQ ID NO: 42387 - DNA, 808 bp, Macaca Mulatta
  misc_feature (1)...(808): n = A,T,C or G
ggactcttgtatgtgtgtatgtgtatgctgcttctgaaaatataattttcctaagttattgtaatgactttaatttgtaatcagctaaggcttaagatttcatttgtttctcatctaagtttctgtttttcttcccttctttttttcttttacatttagttcagagctagagccagtacaagctctcacagtgaattcaatttgttagttgaaacgttgtactgcatcactagtctttcttaaactgtctgttgacagctgaatatttgttactcagtactcgcaaaaacagtgactaaaatgcactatgttgagtggaaagcacggtcataacaattgattgccatagcaagttccaaagtgaatttcagccttgcttcacatttgtatcaataagtacgcacatttttaaaactttctaacagcatagtctttgggtttgtttttagttatgagccccattctttacttgatttaactcagatttgtcttagcctattgccatatagtactcaccttataactatgtaactttctcataatgtatctgtttgtgcaatatggaagctgtgagtggattcatagctttttggtttaattgtacattattgtgtgtgtacatatgtatatatgtgtatatataaaggaccaaattcttgctcgcttacactgttgctagtgtaaacattgttacacttaattttacagggcacaaattatggaattacttcataaattcctggtaatgttttcataaattatttgcattatatacaatttaccatttaattatgaagtccatcantat

SEQ ID NO: 42388 - DNA, 746 bp, Macaca Mulatta
  misc_feature (1)...(746): n = A,T,C or G
gggatgtggctaagtctgtgttggaatctcaaagtcacttgtccagggattttactaaccattatttttttctatgtttggctgttacaagttggttattttatgttgaaaacatgttttctgctaaaattgaagacagctattcttagttatttggagacagttctttgaaggtactctgtgtgtgtgttaggttgatctgccatgccgccacagcctggccagtctcatttgtcagacagcatccattcgctggtgaactctgacaggtggtaacattatgtattaatagcctctgataccaaattcagcctacaattttatgacaaactattctttactgtaaagctttttttcttaaatagtccactagatggcagcagatccatgtggaatagaatgggtcttcattgctgtagatgaagagccagaaatgggacactgttttgtttttgatgacccagtagtgcctcattttcggatgtgtaggaaatggtattctttttctgttatgaaaaagtgtaacatactctttgaagtcacgtctgtggaagtgagtagtggtacagatagttcaaaattgtagataatgcaaaaataattttttctttgtattctcatagagacacatgttgatttaatcctatctgtatgcattagatgaacttttcttcaagaaactgtttatgctntaaataattcttttttatggttgggaaaaacttgcagccttgttttcatgaaga

SEQ ID NO: 42389 - DNA, 355 bp, Macaca Mulatta
tatccacaagtctatacagatacctccaatttgattaagtctacatatgatatataggtgttctgaaatttcacatgaacaccagtcaaatcctgtaattgttttgtgaaaatatttgaatttttatttgttcaagatagaaaaaaattataataaacattgaatgaatgcacacaaatttcaggaggtaactaatttgttcatatgtatcaccatttccataatcatagcttttaaatatatttatacaagtataaggtgttataatttagttattttgttatcaattttatctgtatattcttactcataaagaatcagtagagtatattatgcattgactcgttttataatg

SEQ ID NO: 42390 - DNA, 1183 bp, Macaca Mulatta
  misc_feature (1)...(1183): n = A,T,C or G
ggcgagtgggatctgagaggctatctagaccaatcctccattacagacgtaaaccttttgatgacttcacttcagagcccaaaatatttgcactgcaggcagaatcacctaaatcacttaatgtgatgttcagtcttcccgtggtatcttcctctctgcatctccctactttcggtcagccatttctcactcatgacaccgaacccttcattcacatcacattattgttcttctccacacacacttgtttgttttctgcctgggttttttgttacattcttccctctactggcaatatcattttccaagatctgactacagaattttaacgtattcctcagaatgactcacatatcacatattcgaccaaatggctgcagattctgtcacttcctctcttgtcctatggcaacctggagaatcttcttctcttagccaataggatttatcatggtccttctttatcttaacaatagtttagcaggactgagaactgggaagtagatttttctcccaggggtgagaactgtcttagtttagcagatctccctgggtctccattctggttgtagaaaagcagcccatagggcatggtggggaggagaagaaggggaactaagctgtgttgcatgaagatggacagttgtgacccttactccagggttgggagttgaggccccctaggaaggagaagctgtaaggatgaagacgaggcataaaaagtgatgcaggccgggtgcggtgannnnnnnnnnnnnnnntnnnnnnnnnnnnnnccaacgtggatggatcacgaagtcaagagttcaagaccagtctgaccaatattnnnnnnnnnnnnnnnnnncnnnnnnnnnnnnnnnnnnnnnntgtggtggcacatacctgtagtccagctactccgaaannnnnnnnnnnnnnnnnnnnnnnnnnnagcacatggaaggtgccgttgaaaaagatcatgatactggcacttccccccgagtgagaaagaattattctttcttctcnnnnaannnnnnnnnnnnnnnnnnnnnnntggatggtcggccgcccttcgggccccnnnnnnnnnnnnnnnnnnntcttttcttttgggccccccggggccccctatagggaaataaaaaaggtgtccctaagctttttttccccaagagaaatctccggggtggaaaaa

SEQ ID NO: 42391 - DNA, 820 bp, Macaca Mulatta
  misc_feature (1)...(820): n = A,T,C or G
gggggggacgttcagcggacacgggagcaagatggcgattccgggcaggcagtatgggcttattttgccaaagaaaacacagcagttgcaccctgttttgcaaaaaaccatcagtgtttggggatgattctgatgatgatgatgagacctccgtgagtgaaagccttcagagggaagctgctaagaagcaggccatgaaacagaccaaactggaaatccagaaggcccttgcagaagatgctactgtgtatgaatatgacagtatttatgatgaaatgcagaaaaaaaaggaggaaaataatcccaaattgcttttggggaaagaccgaaagcccaagtatattcacaacttgctaaaagctgttgagatcagaaaaaaggaacaggaaaaaggaatggaaaagaaaatccagagagaacgagaaatggaaaagggagagtttgatgataaagaagcatttgtgacgtctgcatataagaaaaaactgcaagagagagctgaggaagaaganagagaaaagagggctgctgcactggaagcatgtttggatgtaaccaagcagagagatctcagtggattttataggcacctattaaatcaagcagtttggtgaagaggaagtacttaaatgcagcctttcgtgaagccagatctggtattaagggaagaaaaaatcaagggggcttacttccaaaggaagtaaggttccaaaaagccagaatacccacagggagaaaatgccattcttcaaactgatgtgaaagtagaagaaaaaacccacgattgcggnacaagtgacttttgattgctatagagcaa

SEQ ID NO: 42392 - DNA, 174 bp, Macaca Mulatta
  misc_feature (1)...(174): n = A,T,C or G
tatcagtggtggtggtcagcaatgtgtccacggcttcataccaggaggaagctgtagccaagttcctgaagctcntagncgcccncnnaccttttcgcaccantccagttacttcaatgccagtggccgtgcctatccagatgtggctgcactttnctgagtggctactgggtg

SEQ ID NO: 42393 - DNA, 748 bp, Macaca Mulatta
  misc_feature (1)...(748): n = A,T,C or G
gggtgaggagggggcaatgtaagctaagaggagcgttgcgttcgcggagatgtgagtggtgggacctgcggcggctcccatatgatggtcaccctcctgggcgcgacgaccctagtgctggtcaccttggcgccatgggtgttgtccgcagccgcaggtggaaaaaatctaaaatctcctcaaaaagtagaggttgacgtcatagatgacaactttatcctgaggtggaacaggagtgaagattctgtcgggaatgtgactttttcatttgattatcaaaaacctgagatggataattggataanattgcctggatgtcagaatatgactagtaccaaatgcaacttttcttcgctcaagctgaacatttatgatgaaattaaattgcgtataagagcagaaaaagaaaacacttcttcatggtgtgaggttgactcattttcacattttcgcaaagctcaaattgggtcctcccagaagtacattttaaaagctgaagataaaggcaataagtgatataacatctcctcctccctggaaaagaaagaaaattggcatgttgggcctttggaatcgttccaagcttttactttataaccttagttttatccgggaaaaaaactctttcaagttgttaaaaaaaaagggatttgnnnnnnnnnnnnnnnnnnnnaacctttaaaatttcctaaactctctccccccgaaaaaccacctttatttgttttaaaaagttttaaacccccct

SEQ ID NO: 42394 - DNA, 394 bp, Macaca Mulatta
ggaaataatacatgcaccaactttaaaaatacgagtaagatggaatttcttagatttaattggtacctttaaaagcttaaaattgacttacggttcataaatgtgggcaatttaattgaatttgttttcttttctagacaatgggcaagaacaaattaagagggccgaagtccaggaatgtatttcacatagccagccaaaaaaactttaaggctaaaaacaaagcaaaaccagttaccactaatcttaagaaggtgagtattagttaagtactctgactttattgtttacaagcaaagtgtcattgtaagctactgaacaactgtatgctattactttttaaaaaggttcttagtttttcctagaaaggtaaggatggtttcatgcatttgtc

SEQ ID NO: 42395 - DNA, 1259 bp, Macaca Mulatta
  misc_feature (1)...(1259): n = A,T,C or G
ggnnnnnnnnnnnnnnnnnnnctggccattacgtccggggagaagttagcgatagggagggatgcgtacttgggtgtagttgtgggggaggaagtgaccagttcagggtctcgggacagaccgggagagatggttgagttagatgaaggtgaggaaggggagagggttggttaggtatatagtgtgggtggtaggaaatgcaggttgaagggaaattctctggggctttgggaagttttgtgcggtgggtgagccaagaaaatactaattaataatagtaagtgttggttaagttgttgcttggaagtgaaaagttgcttagaaaggttagaactttaagtgnnnnnnnnnnnnnnnnnnnnnnnnnnnnncaattgttttcctttgctgcaaggtggggaagactgaaaaagtgtaaccgaaaacagatgacacagagtcacccgttttccgagaacccacagggaggggtgtatgatgccatctcacaggcagggcaagtgtctttaccagcttcctcccggtgaccaaggcagcctgttttagagggttgttttgtttggggtgtgggtgttatcaagtgaattaatcactagaaagatgggtgtcagacttgtagacacagcagatcggcatccttcgctgccccttagcaacttaggtggtcaatctgaagctgtgaaggtgtgaatttttcaggagctggaagtccttagaaaaaccttgtaaatgcctacattgtgggctttttgacatatttaagggaccgcttaagacgagattagatgggctcctctggatttgtaactcatttgtcacagataccttgtgattgaaaatcgtgagggaagtggaattgcagtgcatttccagggaattttgtatgtaaatcgtgccttagaaacacttcctgttggcccttctgcggttggccgatatgaatatgggcaaatttttacctacctaggatcctcgaatcgcacttgtgaacaagaccaataccttttggggccgcaaatatatggaccagactgctcgcgaaaaatttgcttagttaacggtcatacaccnnnnnnnnnnnnnnnnnnnnnnnnnnnnnnnnnnnnnncgcngngcncgcgcnncnnnnccccccctncccccncgccnntccgcgcgcgcccgngcgccggcgcgaggcgcagccggccttcggcggccgggccgcgctcgaggggccggcggccgggnggcgcgcgccccgtcctgtccgccctgtt

SEQ ID NO: 42396 - DNA, 4282 bp, Macaca Mulatta
  misc_feature (1)...(4282): n = A,T,C or G
gagccctgtgctctgaccccagggcccagccacctggccctcacgttcctgcccagcaagccgggcgcccggccccagcctgagggagccagctgggatgcagggcctggtggggcaccctcagcctgggcaaatccaggggagggcggcccgagccccatgctcctccctgagggcctgtcttcccaggctctgtccaccgaggctcctctcccggccaccctggagccccggattgtgatgggagaggagacgtgccaagccctcctgtcacccagggctgcccggacagcgctcagggaccgggagggtgggcatgcaagcccagacccaccccccgagttgtgttctcagggtgatctttctgtgccttcccctcccccagaccctgattccttctttacacctccctccacccccaccaagaccacctatgccctgcttcccggctgtgggccccttggagatgcggaggactcagaggctgagctgtgggatgagctgctggactcnnnnnnnnnnnnnnnnnnnnnnnnnnnnnnnnnnnnnnnnnnnnnnnnnnnnnnnnnnnnnnnnnnnnnnnnnnnnnnnnnnnnnnnnnnnnnnnnnnnnnnnnnnnnnnnnnnnnnnnnnnnnnnnnnnnnnnnnnnnnnnnnnnnnnnnnnnnnnnnnnnnnnnnnnnnnnnnnnnnnnnnnnnnnnnnnnnnnnnnnnnnnnnnnnnnnnnnnnnnnnnnnnnnnnnnnnnnnnnnnnnnnnnnnnnnnnnnnnnnnnnnnnnnnnnnnnnnnnnnnnnnnnnnnnnnnnnnnnnnnnnnnnnnnnnnnnnnnnnnnnnnnnnnnnnnnnnnnnnnnnnnnnnnnnnnnnnnnnnnnnnnnnnnnnnnnnnnnnnnnnnnnnnnnnnnnnnnnnnnnnnnnnnnnnnnnnnnnnnnnnnnnnnnnnnnnnnnnnnnnnnnnnnnnnnnnnnnnnnnnnnnnnnnnnnnnnnnnnnnnnnnnnnnnnnnnnnnnnnnnnnnnnnnnnnnnnnnnnnnnnnnnnnnnnnnnnnnnnnnnnnnnnnnnnnnnnnnnnnnnnnnnnnnnnnnnnnnnnnnnnnnnnnnnnnnnnnnnnnnnnnnnnnnnnnnnnnnnnnnnnnnnnnnnnnnnnnnnnnnnnnnnnnnnnnnnnnnnnnnnnnnnnnnnnnnnnnnnnnnnnnnnnnnnnnnnnnnnnnnnnnnnnnnnnnnnnnnnnnnnnnnnnnnnnnnnnnnnnnnnnnnnnnnnnnnnnnnnnnnnnnnnnnnnnnnnnnnnnnnnnnnnnnnnnnnnnnnnnnnnnnnnnnnnnnnnnnnnnnnnnnnnnnnnnnnnnnnnnnnnnnnnnnnnnnnnnnnnnnnnnnnnnnnnnnnnnnnnnnnnnnnnnnnnnnnnnnnnnnnnnnnnnnnnnnnnnnnnnnnnnnnnnnnnnnnnnnnnnnnnnnnnnnnnnnnnnnnnnnnnnnnnnnnnnnnnnnnnnnnnnnnnnnnnnnnnnnnnnnnnnnnnnnnnnnnnnnnnnnnnnnnnnnnnnnnnnnnnnnnnnnnnnnnnnnnnnnnnnnnnnnnnnnnnnnnnnnnnnnnnnnnnnnnnnnnnnnnnnnnnnnnnnnnnnnnnnnnnnnnnnnnnnnnnnnnnnnnnnnnnnnnnnnnnnnnnnnnnnnnnnnnnnnnnnnnnnnnnnnnnnnnnnnnnnnnnnnnnnnnnnnnnnnnnnnnnnnnnnnnnnnnnnnnnnnnnnnnnnnnnnnnnnnnnnnnnnnnnnnnnnnnnnnnnnnnnnnnnnnnnnnnnnnnnnnnnnnnnnnnnnnnnnnnnnnnnnnnnnnnnnnnnnnnnnnnnnnnnnnnnnnnnnnnnnnnnnnnnnnnnnnnnnnnnnnnnnnnnnnnnnnnnnnnnnnnnnnnnnnnnnnnnnnnnnnnnnnnnnnnnnnnnnnnnnnnnnnnnnnnnnnnnnnnnnnnnnnnnnnnnnnnnnnnnnnnnnnnnnnnnnnnnnnnnnnnnnnnnnnnnnnnnnnnnnnnnnnnnnnnnnnnnnnnnnnnnnnnnnnnnnnnnnnnnnnnnnnnnnnnnnnnnnnnnnnnnnnnnnnnnnnnnnnnnnnnnnnnnnnnnnnnnnnnnnnnnnnnnnnnnnnnnnnnnnnnnnnnnnnnnnnnnnnnnnnnnnnnnnnnnnnnnnnnnnnnnnnnnnnnnnnnnnnnnnnnnnnnnnnnnnnnnnnnnnnnnnnnnnnnnnnnnnnnnnnnnnnnnnnnnnnnnnnnnnnnnnnnnnnnnnnnnnnnnnnnnnnnnnnnnnnnnnnnnnnnnnnnnnnnnnnnnnnnnnnnnnnnnnnnnnnnnnnnnnnnnnnnnnnnnnnnnnnnnnnnnnnnnnnnnnnnnnnnnnnnnnnnnnnnnnnnnnnnnnnnnnnnnnnnnnnnnnnnnnnnnnnnnnnnnnnnnnnnnnnnnnnnnnnnnnnnnnnnnnnnnnnnnnnnnnnnnnnnnnnnnnnnnnnnnnnnnnnnnnnnnnnnnnnnnnnnnnnnnnnnnnnnnnnnnnnnnnnnnnnnnnnnnnnnnnnnnnnnnnnnnnnnnnnnnnnnnnnnnnnnnnnnnnnnnnnnnnnnnnnnnnnnnnnnnnnnnnnnnnnnnnnnnnnnnnnnnnnnnnnnnnnnnnnnnnnnnnnnnnnnnnnnnnnnnnnnnnnnnnnnnnnnnnnnnnnnnnnnnnnnnnnnnnnnnnnnnnnnnnnnnnnnnnnnnnnnnnnnnnnnnnnnnnnnnnnnnnnnnnnnnnnnnnnnnnnnnnnnnnnnnnnnnnnnnnnnnnnnnnnnnnnnnnnnnnnnnnnnnnnnnnnngcacccctctctagagtaccggagcctgcagccttggaccaggtccaacgggatgacccacagccagctgcagaagctgggacaccttgggccgcacaggaagatgcggattcgactttgggcatggaggccctctgtctccctgagcctgcctctggtgctggggaggaagtagcagaagccctttctaggcctggatggtaagcatgtctggaagccctagtgcacacaagtgatggggctaagcctgactcaccccaaaaggagaccctggaggttgagaaccagcagggaggaggcctcaagccacaggcacaggaacatggacccgggtcaacacttggaggtgcaggggaggtccccgagacacctcctgctgcctgccctgaggtcagccaggcctggctcctgagcccagccagggaaggaagaggcctgagtggcaagtccacactggagcccacgcttccctcagctgtggccacagaggccagtctggactcctgcccagaatcttcagtaggggctgtgtccaggctggacagaggctgccctgacgcacctgcccccacatctgcaccaacctcccagcagccggagcctgtgctgggnnnnnnnnnnnnnnnnnnnnnnnnnnnnnnnnnnnnnnnnnnnnnnnnnnnnnnnnnnnnnnnnnnnnnnnnnnnnnnnnnnnnnnnnnnnnnnnnnnnnnnnnnnnnnnnnnnnnnnnnnnnnnnnnnnnnnnnnnnnnnnnnnnnnnnnnnnnnnnnnnnnnnnnnnnnnnnnnnnnnnnnnnnnnnnnnnnnnnnnnnnnnnnnnnnnnnnnnnnnnnnnnnnnnnnnnnnnnnnnnnnnnnnnnnnnnnnnnnnnnnnnnnnnnnnnnnnnnnnnnnnnnnnnnnnnnnnnnnnnnnnnnnnnnnnnnnnnnnnnnnnnnnnnnnnnnnnnnnnnnnnnnnnnnnnnnnnnnnnnnnnnnnnnnnnnnnnnnnnnnnnnnnnnnnnnnnnnnnnnnnnnnnnnnnnnnnnnnnnnnnnnnnnnnnnnnnnnnnnnnnnnnnnnnnnnnnnnnnnnnnnnnnnnnnnnnnnnnnnnnnnnnnnnnnnnnnnnnnnnnnnnnnnnnnnnnnnnnnnnnnnnnnnnnnnnnnnnnnnnnnnnnnnnnnnnnnnnnnnnnnnnnnnnnnnnnnnnnnnnnnnnnnnnnnnnnnnnnnnnnnnnnnnnnnnnnnnnnnnnnnnnnnnnnnnnnnnnnnnnnnnnnnnnnnnnnnnnnnnnnnnnnnnnnnnnnnnnnnnnnnnnnnnnnnnnnnnnnaggcaatgtcaaagctgggcttgcggcagattcagggagtcaccaggatcaccatccagaagtccaagaacatcctctttgtcatcgccaagcctgatgtctacaagagcccagcctcagacacttatgtggtctttggcgaggccaa

SEQ ID NO: 42397 - DNA, 805 bp, Macaca Mulatta
  misc_feature (1)...(805): n = A,T,C or G
ggtaccagcagaagctactgattgtgaaatttcaattacaccattatcctgccaagtgaaaaaaaaggagacattaaaacggataagagttggccnnnnnnnnnnnnnnnnnnnnnnnnnnnnnnnnnnnnnnnnnaccaagatgggtgnnnnnnnnnnnnnnnnnnnnnnnnnnnnnnnnnntnnnnnnnnnnnnnnannnnnnnnnnnnnnnnnnnnnnnnaattaacccgggcgtggtggcgggcacctgtagtcctagctaccnnnnnnnnnnnnnnnnnncaatggcgnnnnnnnnnnnnncgnnnnnnnnnnnnnnnnnnnnntgcgccactgcgctgcagcctgtgcaacagagtgagactccttctcaaagatcaaacaaaacaaacaaaaaacaggtaagagtctcaaaatgatatggaatcttgttccagtgtcttcggaaaagctatctacggtatgaaaccatcaacttcttatcctggtttgcagtttgaatgtctctggttacggcattgagaggtttggtgaactttctgtgtgacccatacatttagcaccaagctttggccattaaagttcatctagttttcaacttacagggcttcagggaacagagcagtgcccattttttaaaaatttcagggaaaaaaagttggaattgaaggaatcctaaaatttcggggacctattccggtttaacaattaggttatggggaactccaaaaagcaatggccccagggcttcagttcctattaacaaggtttacccccaannnnnnnnnnnnnnnnnnncaat

SEQ ID NO: 42398 - DNA, 817 bp, Macaca Mulatta
  misc_feature (1)...(817): n = A,T,C or G
cgaggccaaagtgttaccattgtggtagaactttagtcatataactggcctgacgtaccatcagagaaggcatactggagagatgccatacaaatgtattgaatgtggccaggtctttaattccacttcgaaccttgcaaggcatcggagaannnnnnnnnnnnnnnnnnnnnnnaaatgtaatgaatgtggcaaggtctttcgtcatcaatcaacactagcacgccatcggagtannnnnnnnnnnnnnnnnnnnnnnatgtgtaatgagtgtggcaaagcctttagagtacgttcaattctggttaatcatcagaaaatgcatactggagacaaaccttacaaatgtaatgaatgtggtaaagcttttattgaaaggtcaaagctggtgtaccatcaaagaaatcacactggagagaagccatacaaatgtattgaatgtggcaaggcctttggacggttttcttgcctcaacaaacaccaaataattcattctggagaaaaaccttataaatgtaatgagtgtggcaaatctttcattagtcgctcaggcctcactaaacatcagacaaaacatactggagagaatctgacaacaaaactcaatgtggaaacgcctttagatgttctcctaacttctgggttcacataattcacatttacaggtatagttcgtatatttgacgcttctgtctgaacctcatgtggagttgtagtccgccgtatgggaggtggggcctatgggaagtacgggttcccggagtgaattccagaacgtgttatacccgggtttggctctggggaagggatcggggaa

SEQ ID NO: 42399 - DNA, 652 bp, Macaca Mulatta
gggatccctgtcttacagataaggaggccaaggctcagtgacataattaataagttgtagaaacagtagtcacacagccaaattcatgtgggtctacaaagtccacaatcttatctaccgtaacatgattgttgtctcctgcattgtagagattaatattctttattttgataggttctaccccttattcaccttataatgatgctcatcgttctccttgcagcagagatagtgttaggcacaagggtgatatacccttatttcctccataataaaagtggcaactctccccttattttacctctttcctcccagtcagctccaggatgttgaaatagtattctttgcttatataaattggttattactttttcattattatacttagtggggggggggttttataaatatggaaatcccgtggaagaaaagtatctttagggtttgggaccctcccaccatttaaccacccaaaccccaattaacgggcttacccttggacaacaccttggggggttttgttcccaagaaccccctgggccaatttggatcatcccccaaagaaaggcccgggtcccccccaaaaattctttttgggggctctcctcgcaggggccagccattaaaaaaccttatttggggtttaacaccc

SEQ ID NO: 42400 - DNA, 744 bp, Macaca Mulatta
  misc_feature (1)...(744): n = A,T,C or G
ggatgccccagttagatacatcaacatgattcaccactatcatgacgatgcttcccacactatatcttatcatgcagctaaagctactaaacacaaatcaccaccaaccaccccttacaaaaacccccacccttcagtctcacaatgtccgnnnnnnnnnnnnnnnnnnnnnnnnnnnnnnnnnnnnnnnnnnnnnnnnnnnnnnnnnnnnnnnnnnnnnnnnnnnnnnnnnnnnnnnnnnnnnnnnnnnnnnnnnnnnnnnnnnnnnnnnnnnnnnnnnnnnnnnnnnnnnnnnnnnnnnnnnnnnnnnnnnnnnnnnnnnnnnnnnnnnnnnnnnnnnnnnnnnnnnnnnnnnnnnnnnnnnnnnnnnnnnnnnnnnnnnnnnnnnnnnnnnnnnnnnnnnnnnnnnnnnnnnnnnnnnnnnnnnnnnnnnnnnnnnnnnnnnnnnnnnnnnnnnnnnnnnnnnnnnnnnnnnnnnnnnnnnnnnnnnnnnnnnnnnnnnnnnnnnnnnnnnnnnnnnnnnnnnnnnnnnnnnnnnnnnnnnnnnnnnnnnnnnnnnnnnnnnnnnnnnnnnnnnnnnnnnnnnnnnnnnnnnnnnnnnnnnnnnnnnnnnnnnnnnnnnnnnnnnnnnnnnnnnnnnnnnnnnnnnnnnnnnnnnnnnnnncgggccatctggcttaatacaccctggatccggaaaacaccttgttactagccaactaatcaaaccacacccaaacctta

SEQ ID NO: 42401 - DNA, 880 bp, Macaca Mulatta
  misc_feature (1)...(880): n = A,T,C or G
ggaacctatttatttcaagtgttcgtatttgaatttctttgggaagaaagtaaatctgatggctcactgatttttgaaaagcctgaataaaattggaaaggccggaaagttaggagaactgactagccaaactgctacagtatgcaatttctcttacaattggtattactgggggaaagtaaaattatactttacctgaaagtgacttcttacagctggtgcactgcgctctttccacgttcagcagcagttctgtcagtagtgccattgaacctcggtatatttatgatttctttcaatgttaaaaatagacatagtgttgccctttttcttaaagcctcaatgaaattatggaaaattgcttaaaacatgaatacatcatcacagtagaatgtattatgagagcatgtggtatgtatctatagccctaacacacgggatgaacgttttactgctacccccagatttgtgttgaacgaaaacattgtgggattggaaaaggagaatttcgccaattaccagtttgaagtttgtgagattaattgtttttaaaagcttttacaccctgttttaccaatttggaagaacaaaaagggcaaggcctttcattttttcacaatggtttaaatggaaaacctgggcttaaagaaatttttgtaaatagaaatcccaggaggccaaaacctggcccaaaaccttggccccaatttggaaaaaagggccaaccaaacttttcccgggtggattggcggtgtaaaaaaaaaccttacccaatttcctaaaaaaaaaattggaagaaattgtggaagaaccttttaccccccggggcagaaaatnnnnnnnnnnnnnnnnnnagggaaaccaccgctgggtggggaac

SEQ ID NO: 42402 - DNA, 618 bp, Macaca Mulatta
tgcagggcatcaactactgcccctcagaccacaagctctatgtcttcaatgatggttacctgataaattatgacttcaccttcctgaagagaaggctaccaagaccacccaccaagaggccctctggggttcatgctccaccaaaacccgtcaaacctaacaaggcttccagaccctgagaccccagggctgggcagagcattagtagaagtgtgccctcttccttacctccaggaggatcacatcccaaagtggtcattggtcctaatgattggaagacattgattatatctagtgagtcctttatgtaattaatatctcaatcagcatattaaggttccctttaataatggtctaggtggatttgatagggaaaaagtaaaatattagctaagaaaatggtaccctctctttctgatgctttggcatctcatattccttttggagaatcataaatccagcttctggaactcaagagttctgtgatctagaattgtcggtttcaggttgggaacatctgattccagtgcagaagctgtagggcagctggtcattagagtaggatatgaaagttccctttcttatctctaccttcctgtaaggtccctggggagaaaa

SEQ ID NO: 42403 - DNA, 1013 bp, Macaca Mulatta
gaggctgagtttatagagtcacaccatggaccaccgtttatcctccaaggctcagctttgcgtagccactaactccttggggcagtctgagaatgtgggcggagcagaactgtgtggcctcatcctcccccaaggctgtgcctgcagcgggaacacctttccactttctagctggggagaggttgggttttgcttctgtaaatacatgaatccttatgataaaagcctgtcagaaatacatgtatacattatttaatgccagtcctcatgtaacctcaggtatcttcagcttgtggagaataaatttggtttaataaacaccgatgtccagcttcctcgcttcacccaacagtgactgggggaaggtcttgaaaatgacccaggaccattctgaacgggctccttcctcactctaggcaccagtcacgttattttaatgcagattcttcaggtcttttctccatggtgataacttccaagatcttacttgacagggtgttgcgttttaggaaatggtcactcatataaaagagaaaacagacgtgaacgaggtgctagccagggagaacatgtgctgggcaggcctgggttccacattgattctgtgtgatgcaaacagaatcccggccagtgtttactgaaatggaaagggcactctgatgccttcgatgtattacctgtgcttcggagagattccttaggagcgattgtcctggaaatgccccaatgagccggattcatcaccgactgggagccgcctgctctgttaaaactgattaatgggcaacacattcttgtaccgaatttcaaaaatagtttctgcggtttgaccacacaagctttagagggctgtcagccaattccgcccctggagttagagctagccttatatttgtgtctctccctctctctctttctgttcctcgacatccctctccccccacctcttcatcaactcacactatagatataaagacagacataacacacactgacgacagataacaaataat

SEQ ID NO: 42404 - DNA, 718 bp, Macaca Mulatta
ggatcaaaatacaaatatatcaatctatgctgttttgtccttcttgagaatctaaaacataccacaaaaatatgtccccagtcttttgttctgtctgaggttagaaatcattcacattcagaatctcttttgagaaacgcccaggcttagaaaattagaaatggatggatcttctctgaactcaaggagggcacatacttagacacctgcaagacttggaggaattaagagttcacctttgatctcaccaaattttccctatttttctctttcttgcagaaggaaagaaaccatgctctctaacattgagcaaaactcataaccactcatcctaatttctaaggggcacctccatctagggccagtcttctacttctttagacctcttttatctttgttacaggagaggacctgtggatggaaagagttttgacataaaacaatgcccattcacttgctccttcagcacaatgtcacccattgagaaatagatccagatttgttaacaagaaagattttacttcgtgatttgtgaggtctcttccatgtctataattctacattgttaacttttttcttttgtgtgaattactgaaatatttcagtgcaaaactatcaacttggaagaaacagggaattaaataaagggataaacactaataaagagctgtagaaaaaaagggaaacagaaaagtcttttgccctgttttagtaagtg

SEQ ID NO: 42405 - DNA, 322 bp, Macaca Mulatta
aaccaggcctattatatgcaaggtatcccaggcagctgctgccctccctccacccatccccattttcctctatccctctgccttaaaattaacagatactaggaatctggagttattcagcagcccaccagggagcctctctagcatgcaaatttactgagcatgctttgaaatccagcacaaaagtgaatgagattcaaaggagttcatagtctggggaggggagttggcagagtagatgtgtaagcaaatgatgacatcagtacaacaagaagggctgggtgggggagacttctaattgtgcgggggcccaggagcagct

SEQ ID NO: 42406 - DNA, 791 bp, Macaca Mulatta
  misc_feature (1)...(791): n = A,T,C or G
nnnnnnnnnnnnnnnnnnnnnnncnnnnnnnnnnnnnnnnnnnnnnnngnnnnnnnnnnnnnnnnnnnnannnnnnnnnnnnnnnnnnnnnnnnnnncgaaacannnnnnnnnnnnnnnnnnnnnnnnnntagctaggtgtggttgcggacannnnnnnnnnnnnnnnnnnnnntggctggggaaggaaaactgccnnnnnnnnnnnnnnnnnnnnnnnnnnnnnnnnnnnnnnnnnnnnnnnnnnnnnnnnnnnnnnnnnnnnnnnnnnnnnnnnaaaaaaaaaagagtccgcttgcctattgtaaaataattcttattcccaccaatggtaaactaaagaattctagaaatccagtggtggttctttcagaagttacgtctagtgaggttatatattttctgttttctactgatagacccaccaaagatgggccacctgcacttacaagttagttcaactggctgcagtaagcctataaacaattctgggtttgattttgtgaatgctgtgtggcaatagctcacaagggggcaaaaactgacaaaactaccgaagtccatcaggataaccccaactggataccatgggaagaagaaaaaaggtagggaatagggttatggaaaaaacccttccaaacacccaaaaaaaacctggtttatttacatcctgccatggttacctcccgggagcggtaaccccaaagagaaatatttcctctttaggaaaagacgaaacacttttttaaaaaacagggtcttattataaaccagctctaatctacgcgctac

SEQ ID NO: 42407 - DNA, 762 bp, Macaca Mulatta
ggaactgtgaaactattgatttttttgatgaaaacagctgctgataaagtattttgtgtaaagtgtagttcttattaaccaggaaaatgatgacttgattagactgtatatgccctcttggattttattttaaatggattggtgattttcacataggtaaaacacagtccatctgtattcttttttccatcaaaaatcgagtgatttggaattataaaaaaaaattgtgagcagcctatttgaaaggcatcatggaaatttcacagcacataacatggatttatttttttcttgatgtaaatccgcttaattcatattttgatcaatagcccatgcttgccaactctgaagaaatttaatttccagcagtattttaaagctagcctgttaactttttctgaatatttaaagttcctcttttttctatgtctgcacaaactgcagacctgggctggacccacatactcagagtccaccttaagaaattattttgatgtccaagacatcactaaaatatttaagtttaaagataatatgtggtgttaatagattgtggtgctttactatttaaagacaactttcatactttagatgtttttgaaaagaggggaaatgtgaggggagggggcagaacaaggaaggagctgtttgaatgaaattacattcctttatatccatcccggctcaattgggggcatgtctaaaaaaaaggctaaagtttgtgaagaataatattgtaaacccgaaaaaaaaattgactcc

SEQ ID NO: 42408 - DNA, 122 bp, Macaca Mulatta
aatgacgacgcatgccttgttccgaacccaccattgcatctcacaggcctgccggtggagcccccgccatcctaccagagtgtgattcaacaggacacacaacacaagcagcctcagaggtg

SEQ ID NO: 42409 - DNA, 498 bp, Macaca Mulatta
  misc_feature (1)...(498): n = A,T,C or G
gggaaccatgaaaaattagatactgttttgtgagttttatacagtggtaaatatagaaccatgaattctggacacattccatttctatccaacatgaaggatcaaaaaatgtttttcaatgtattctttgttccactggatacttggagtcatgagtttgtgagctgatttggtcaccttcctctgcctttattcaccatgagttctgatgtcttagtgacttagttcatagaagctcatgccctagtttgaaacattctccatggtggcccccaaaacattgtccgcatattcgtaagaattgagcgctatgggtgttaacatgcataaggatcagtgtgcagcagcaagtacaaaaggagaagaggaacatcgtccaatgagtgtgttttgtatataacttcagatacttgtgaacatgccttatatttgtccaacaactgtcagaataaagaacannnnnnnnnnnnnnnnnnnnnnnnnnnnnnnnnnnttgtc

SEQ ID NO: 42410 - DNA, 646 bp, Macaca Mulatta
atttatgacatatgtctgtataacgtggatacctgaaatgggaggaagaccttgtaattttcaaccaatttgggaagagtgaaattgcaactatccattcaggagtggtaggctttggtctgcttccactgggggcagctccctagaggactggcagaggtcccaccccacaagggctcctgctgggggtctcatgtccccttatacttggccacaggcggcagagaaactgtctgagaaggaaagcctgtgtcttctgatagaagaacttggtgggatcgatagaattgaggctttacaactgcatgagaaccgtcaaattggccgggcggctttgaacatcatcgagaagcactttggtgaggtaagtgacttaggagtgcgaaggagtgtccaggggtcctggtggggcagctctgcagcgggtgaccctgccggggcctgggctgttgcgtgtggcaggtgactgggcaggtgggcttctctcccgccacatcctctgaagttaatgtgtctcctctacccgtgctgtatcaggtcatctttgagtagtggcttcttggtgcctggaagctgttcgaattccttaggagcttatcccgctgcctctggcttaaaacttcactttactggtctcctttttggg

SEQ ID NO: 42411 - DNA, 635 bp, Macaca Mulatta
gacacgggcaagttggcctataccggcaaattatgtggaggcgatccagatcgatgagccaggtgtcaggccagcgggggacggaggcggcgggcccaggagcttcagccagccatgtgggcatccactccttttcctgcaagagatgatggttccattgctcttggcttcatggtgtccctggaaggcagatgagctggtcatttcgcctgggtctcggcacctttccgagtgcagctggagggatctgagcgcaggaagacgcagaacaacagaaatagctgcccctccccgcccactgtgcctattggcctatcatggatctctatgttcttgactttgtctcttctttccgagtcaatggtgggttacactgatcttgttccactgattactctctctgacgactccatcacctgcaacttaaatgaacaagcttacatcctattttctgagtgaagattttgaggtttttaatttaaaggctatgtacagttatacttttcttatacacctgttcatttctacttaaattatggcacagattgatgcacaccagtcttgaggaagcgatctccctattcccatgccctgttagccatgccatgtgtagacttagcctcaggtggcagatg

SEQ ID NO: 42412 - DNA, 1037 bp, Macaca Mulatta
gactggcctcagaaatagttggctttcttttttttaattgcaaacatatttcttttaatgactccagtaaaattaagcatcaagtaaacaagtggaaagtgacctacacttttaacttgtctcactagtgcctaaatgtagtaaaggctgcttaagttttgtatgtagttggattttttggagtccgaaggtatccatctgcagaaattgaggcccaaattgaatttggattcaagtggattctaaatactttgcttatcttgaagaaagaagcttcataaggaataaacaagttgaatagagaaaacactgattgataataggcattttagtggtctttttaatgttttctgctgtgaaacatttcaagatttattgatttttttttttcactctccccatcacactcacacgcacgctcacactttttatttgccataatgaaccgtccagcccctgtggagatctcctatgagaacatgcgttttctgataactcacaaccctaccaatgctactctcaacaagttcacagaggaacttaagaagtatggagtgacgactttggttcgagtttgtgatgctacatatgataaagctccagttgaaaaagaaggaatccacgttctagattggccatttgatgatggagctccaccccctaatcagatagtagatgattggttaaacctgttaaaaaccaaatttcgtgaagagccaggttgctgtgttgcagtgcattgtgttgcgggattgggaagggcacctgtgctggttgcacttgctttgattgaatgtggaatgaagtacgaagatgcggttcagtttataagacaaaaaaagaaggggagcgttcaattccaaacagctgctttacttggagaaataccgacctaagatgcgattacgcttcagagataccaatgggcattgctgtgttcagtagaaagacatgtaaacgaaggcttacttgattgtggcatttagagggaactcttggtacctggaaatgtgaatctggaatctacctgtgtcaca

SEQ ID NO: 42413 - DNA, 272 bp, Macaca Mulatta
  misc_feature (1)...(272): n = A,T,C or G
gggggcctcaagtcctattccagggtctgggagctggaggctttgagggtcagctctgggaggattcttcctctcttagacgttagctcagcttgactcacacctatgaatccagagccttctgcgattatgagaagctataagcataagctgtgcatctcacttctgtaccaggatgcgttcggtcttcatggctcagttatgagtatttcttaacatgtcctaacatttatcnnnnnnnnnnnnnnnnnnnnnnnnnnnnnnnnnnnnnn

SEQ ID NO: 42414 - DNA, 87 bp, Macaca Mulatta
ggattttgtgggggctcgtgtcactgtgagcacactgtagtgatagtggctgctcctcccacagtgacacagctccagtccctaagc

SEQ ID NO: 42415 - DNA, 960 bp, Macaca Mulatta
  misc_feature (1)...(960): n = A,T,C or G
ggataatgtttatgagataatagcttgagaatgacaataataatagtaatttttaaaaagagaaaataggctgggcacagtggctcactgcaagctccgcctcccgggtttacgccnnnnnnnnnnnnnnannnnnnnnnnnnnnnnnnnnnnnnnngcccgccacctcgcccggctagttttttgtannnnnnnnnnnnnnnnnnnnnnnnnnnnnnnagccacgatggnnnnnnnnnnnnnnnnnnnnnnnnngctcgtctcacnnnnnnnnnnnnnnnnnnnnnnnnnnnnnnnnnnnnacgcccggccagaaaatcacttttttaaaaaagtagattactaaatcttaatttgctattattcctacacatgggaaaaactagtcatataactaggtaatatcatttgaacctgaaggttaaaatagggaaaaaaatattgaactgtactgaaaagagagggttagatattttttcgattttcaagtatcaccccatcaattttgccattcattttcaaatgggattcaaattcttaatgtttttgggtggctaaaatgaaaaataccaatccggaaagaatannnnnnnnnnnnnnnnnnnnncctttggcaaatttgtgtgtacacacaactaaagtgtacccttttttggatattattttaaaacaagttttaatgccccttattttaccaaaaactttacaaccaattaaatttttatccatgtttccactcataaatgcccaaaaggtgttactactatttcacaaggtctatgggagggtctaatcacagtgatcccagcactcatatgtttatatggcaaatatatattctttgaatatacaagatagatacatgaagcaacgtgtggaattttatttttttatgacgggaccgggtgtatatgatttatctgtttattactgacgtacaaatggagtgtgggtgacaga

SEQ ID NO: 42416 - DNA, 1017 bp, Macaca Mulatta
  misc_feature (1)...(1017): n = A,T,C or G
gggcagttttcttatcttttagttttttaggatgtttttagaaataaccctgaacttatgaaaattttatgtaattaattgatttcaaggttttttttgtttgctttcaaagtagttagaagctcttctagtgtaaggctttggaaaacactagaagggggcacgctttttgaaagcaggtgaccccagggcaaacttgtatcctcactgaactactgcaactgatgctttcttgaaagcagcacctcctggctggaggccatccaacacactaaagaaaactacacacaaggaccctcacaaaatccacttcactcctggcctaactctactggagcaaatgctgatacccatggactgagacacctgtaatacatgtcacatctacaagaattcatcacaatacacnnnnnnnnnnnnnnnnnnngggaattcccaaccaagctcgtgcttgggatgagcttaaaccccnnnnnnnnnnnnnnnnnnncattttatgcgccaacatttgggacttcctctaaaagaaaaaccccctcaaacccccatataatgggcaaaatttagtgtgagaaacaaggcgacgcataacaatactcagtggggagaaagaccacacccctccgacagtcaagtggggccacacaataagatagaacatgcgctgctaaaattaagatacaattctccccctcttgaagaactctttaaggatataccttttcccccttcttcttgtataaattacacggtcttttctttcacccactcatatttaatataaacaggccacaccgctcacacaaaaacaaccacaattatctccacaggggtcaaaacacctcacagcatatacaacccaaaagacactattgttttataaaacaaaaacactccccgaataaaacagaaccctaatatacttaggttatctctaccaaaaagaaacagttgacacatctcccaaaactgtaaatgtcgaacacaaaatccccccccttaaaagagtggcttcag

SEQ ID NO: 42417 - DNA, 891 bp, Macaca Mulatta
gggctttttcgcaacgggtttgccgccagaacacaggtgtcgtgaaaactacccctaaaagccaaaatgggaaaggaaaagactcatatcaacattgtcgtcattggacacgtagattcgggcaagtccaccactactggccatctgatctacaaatgcggtggcatcgacaaaagaaccattgaaaaatttgagaaggaggctgctgagatgggaaagggctccttcaagtatgcctgggtcttggataaactgaaagctgagcgggaacgtggtatcaccattgatatctccttgtggaaatttgaaaaccagcaagtattatgtgactatcattgatgccccaggaaaaagaaacttcatcaaaaacatgattacagggaaatctcaagctgaatgtgctgtcctgattgattgcgctggtgttggtgaaaattaaagctgggaacctccaaaaaaggggcagacccgaaaagcaaggctcttcaggctgacacaatgggggggggaaaaaaactaaatgttgggtgtttaacaaaaaaggaattccactggagcccgacccttacagcccagaaagaaaatccccaaggaaatttgcttaatggaaaaccacccccttttattttattccaaaaattgggactaccaaaacccgaactaataagaacaatttgtgatgcccatttttactggggttgcgaacaggttgaacaaaacagagctggggaaacctaaaaggtcataaccatgcgatctatgggttccaaatgtccatgaataaggccccatccccaataagggaattgcgctaagtcaacatttggaaagaaacaaattatcacttagtagggattattgtgagataggactaaaacataacaacccacg

SEQ ID NO: 42418 - DNA, 1253 bp, Macaca Mulatta
  misc_feature (1)...(1253): n = A,T,C or G
ggctttgagagatcattggaaaccagtattcacagtagcacaacgaatgctgcatcataaaagaggaagtatcattaaacaaatgacattagggagctgctgaggcaagatctatacagctcaacacaaaacagtttctgaagtcatgacattgtaaatcctaacagcatcgttacgcttttatcacagagggagatatgaaattagccaggaatagcacatctgacaaaaagaacacagactatttcctagtcccaaagactagggaacagtctagaaagaattaagaatctttgtatgaactggttggacaataaatatgaaccagtttttttgagacaggggcacccaggctggaatgcagtgtcaccaactcagttcacctccaatctgcacatcctggggatgcgtatttagcaaccccccatgtcactttgggaagaaacatagccggggtggtattaaataacattggatatcaaattgtatgatgaaatgaaagcactagtaatcttttgaattcatggataatctaaaaaaaaggtaatgcgcgtcttgtagctcgaatctcgtacgattgatatttaagacacatatagctgtagtagtaccagatcaagatctgatagagctgagcacggttgcgaacacaacaagaaaacaatcacagagaagttaatatatgtctctttttttctgaattgaaaaaggttatattacaagngtatattcgtacaggtctcaaatactaacagagtccagacatacatataacatnatcaccatttaatattacaaacttatctcatagactttgggaacataaacgcgtgaaacaagatacgttaaattaatattcaacgccgttaaaggaatttcaaaataccaataacgtcgtcccaatccctacgactacaatcatgttagaccacgtatcaagaataattatgacagaatttgtgaaagagcgaattaaatcctcanttctgtggaaattcgtcgatcaacactaagatggtcatcaattataagtaaagccgagagagtacggtcacgaaatacgtccacgtgggtaagtagatagaagttgtatgttagacacagggacatattatgtaaaagatacgaaactttacactctaaaagtatatcgccgaagaggcgaataagagttgtgtcggtctaggagggatgcgtgaagaatacacagattatataacattactgtgtggtacgatgtaccgatccagtga

SEQ ID NO: 42419 - DNA, 260 bp, Macaca Mulatta
atggatgagcagatcagatcgatggaccagaacctgaagtggctgagtgctgctgaaggaaaggactctcacaaagaagacagatatgaagaagcaaccgagattcttactgataagtgcaaggaggcagagacctgggctgagtttgccaagagatcagtaatcaagctggaagagatgattgatgacttggaagataaactgaaatgcaccacagaggagcacctctgcacacaaaggatgccggaccagacctgctt

SEQ ID NO: 42420 - DNA, 787 bp, Macaca Mulatta
  misc_feature (1)...(787): n = A,T,C or G
ggggccttgggcccgtctttctcgagcgggaccggggaacgttgtcgctcatcctatgacgcgaaagtaaccaagactatcaggatcgggagacggaaagggctgaaggccgcagtacttgaccctgtattttgggagttgaacggagaatggaaactgaaagtggaaatcaaaaaaacgtaatggaagaagaaagcacnnnnnnnnnnnnnnnngtnnnnnnnnnnnnnnggtcacgagttaaacaggtgcttgcagatattgctaagcaagtggacttctggtttggggatgcaaatcttcacaaggatagatttcttcgagaacagatagaaaaatctagagatggatatgttgatatatcactacttgtgtcttttaacaaaatgaaaaaaattgactactgatgggaagttaattgccagagcattaagaagttcagctgtcgtaaagcttgatttggaaggcccccagaatcaggaggaaaaaacctctggcggaaagaccaaaagatgaggatgagcgccctgtgtatgtggagttacttcccaaaaatgttaatcacctctggattggaaaaaatcttttgggaaaatgtgggcaaatgttggctttataatcccgtattacccaccatttattaaaagttctaacctgggaaagaattcccaagagagggaatttctgccgcttttttgtggggaaaatttttggaagaacccataaaaggaaaccacaaggccccgccccataaaaaggggcgcacaattttgggagagtttttttt

SEQ ID NO: 42421 - DNA, 793 bp, Macaca Mulatta
  misc_feature (1)...(793): n = A,T,C or G
ggggtggacggtgcagtgagctattnnnnnnnnnnnnnnnnnnngagcgaaactccgtctnnnnnnnnnnnnnnnnnnnnncattaagagagtggtgatgacccaaatgttgaaccgattatgttttggtggtggtgttgttagctgttgaatcctgaatggcttataaagtgaattagctggcttaatgcaaccagcgttctgggcagcagaacatattcattcttactgtaaattctatttgctgcttccaaaggtgatgattttcaagcagacatgttctatatggtctgtgttttaggatctggtgcccagcctccatcagagcttacctacctggcaaagctgcctacccttagagtgggaaaatataatccactgtttaataaggctcaccctctccaccctgtcctaacgaccttttgtgaatgtgctgtaatattttcttgctcaatagcaaggtggtagctctgctttcattttaagaaagtggaggctgagggcattgtatcaatactgtttcaactccaagaagttttccttgtaaaattaaaggaaagatcttgttattgattaaccattttcttatgccttgctattgacatattcatgctcctttcaatgtctagtggctgaaaaatgtttgcatttgttccctttgactaaaggtggggatttttggttccaaaataataaagcctgtaatgtttttaaaaaggactttaataaaaatttggactggaatgtaatgcttctaggcaataccaaggtacttttccaaaactattaaggg

SEQ ID NO: 42422 - DNA, 216 bp, Macaca Mulatta
agatataattgatcctgttccgttagaaactccattatccaaaaatcttgtggcacagattagtgctcttgctcttcagctggattcagaagatcttcataattattcaggaagccaactatttgaaatgcatgagaaactaagtagtatggcaaactgtataataaaaaatctacagtcacgttggagatcaccatcccatgaaaattctattta

SEQ ID NO: 42423 - DNA, 624 bp, Macaca Mulatta
tttcttcaaaaaacacagcccacttatccatctgtcaaaagttcacaatgccatacaggctcttcacccagaggatctggaaagaagaaagatataaaggatcttgtagtttatgagaattcttcaaatcccgtgtgcacgctgaatgacacagctcagtttaaccgaatgacagttgagtatgtctatgaaaggatgacaggcctccgctggaaatgcaaagtgattctagagagtgaagtaattgcagaagcagttggggtgaagaaaactgtcaaatatgaagctgctggggaagctgtgaaaaccctcaaaaagacccagccaactgtcattaacaacttgaagaaaggagctgttgaagatgtgatttcaagaaatgaaattcagggccgctcagcagaggaggcttacaaacaacaaatcagagaagataacattggaaatcagcttctgagaaagatgggttggactggtggtggtttaggtaaatctggtgagggcatacgggagcctatctcagtcaaagagcagcataagcgggaagggcttggtctggatgtagagagggtgaataaaattgccaagagagatatgaacagatcatcagaaactaagcccgct

SEQ ID NO: 42424 - DNA, 2037 bp, Macaca Mulatta
  misc_feature (1)...(2037): n = A,T,C or G
gaaagattctggatcccagggcatctccacagaggagaacacgcaggcagcacaggccatggggcccctctcagcccctccctgcacactgcacatcacctggaaggagctcctgctcacagcatcacttttaatcttctggaacccgcccaccactgcccaagtcacaattgaagctcagccaaccaatatttctgaggggaaggatgttcttctacttgtccacaatttgccccagaatcctgctggctacatctggtacaaagggcaaataatggacctccaccattacattacagcatatacaatagacactgaaagaattatatttgggcctgcatacagtggacgagaaagagtatattccaatgcatccctgctgatccagagtgtgaaccagaaggacgcaggatcctacaccgtaaaaatcataaagcgaggtgacgggactgaaggagtaactggacatttcaccttatacgtggagactcccaagccctccatcaacagcagcaacttaaaccccagggaggccatggagactgtgaccttatcctgtgatcctgacactcagaacgcaagctacctgtggtggataaatggtcagagcctccctatcagtcccaggttgcagctgtccgaaaacaacaggaccctcattctatttggtgtcacaaaggatactgcaggaccctatgaatgtgaaatgaagagcccagtgagttccagccgcagtgacccagtcaccctgaatctcctctatggtccagacgtccccagcattttctctccattcacctattaccgttcaggagaaaacctctacttgtcctgcttcgcggactctaacccaccggcagagtattcttggacgattaatgggaagtttctgcaatcaggacaagagctctctatcccccaaattactacaaagcatagcgggctctatggttgctctgctcgtaactcagccactggcagcgaacgttccacattcaagatgatcaaagtctctgctccttcaggaagaggacatctatcctggcattaatccgatatagcagccgtgatgtcatttctgtatttcaggaagactggcagacagttgctttgattcttccttgaagtatttataatcagctacagtccaaaattgctttttctttgaggagatatatggaaaagactctgacaacgactcttgaatacaagtttctgataacttcaagatcataccactggactctctgagaactttcaaaattttaatgaacaggctgataccttcatgaaattcaagacaaagaagaaaaaaacctcagttttattggactaaataatcaaaaggataatgttttcataattttttatttgaaaatgtgctgattctttgaatgttttattctccagatttatgaactttctcttttaagctatttatactttacagcaatttggtaaagtatacttttgtaaacaaaaattgaaacatttgcttttgctcccaatctgagtgccccagaattgggaaactattcatgagtattcatatgcttatggtaataaagttatttgcacaaggttctcaagcctcagcctcccgggtagctggaactacaggtgcccgccaccatnnnnnnnnnnnnnnnnnnccnnnnaagtagatacagggtttcactgtgttagccaaaacctggcgttaccaacttaatcgccttgcagcacatcccctttcgcagctggcgtatannnnnnnnnnnnnnnnnnnnnnnnnnnnnnnnnnnnnnnnnnnnnnnnnnnnnnnnnnnnnnnnnnnnnnnnnnnnnnnnnnnnnnnnnnnnnnnnnnnnnnnnnnnnnnnnnnnnnnnnnnnnnnnnnnnnnnnnnnnnnnnnnnnnnnnnnnnnnnnnnnnnnnnnnnnnnnnnnnnnnnnnnnnnnnnnnnnnnnnnnnnnnnnnnnnnnnnnnnnnnnnnnnnnnnnnnnnnnnnnnnnnnnnnnnnnnnnnnnnnnnnnnnnnnnnnnnnnnnnnnnnnnnna

SEQ ID NO: 42425 - DNA, 779 bp, Macaca Mulatta
gggggttgaaggtagataaaagtttggaagtccctctgaggtgaaagagcagagagtgaaaggaggttttggattatcgtgcttgggagaaactcttcttttgctcatgaaagattaactgctgcagttgtctttctgagcaagagttttcggacactggtcttcaggaaacacaatactgctattcctgatagacgagaaacaaatgaggtgccccctatgtttgtcccaatttacaggctcttggtagtatctgggcctgacagagggaaaggaacctaaataggatctagcactttcacttgatggaaggagactgagatcagggctggggaggttgatgcagtgagatgttgtagggcagggagctggagagaaacaagatgcacagaaagaaagacctccagagattaacagaggggtcatttcaaattggaatatatatcagttaaaactttaagaggcaggatagaaattcactgaaaagcagtaggacaaacaattctcaaaattcactcagatctgggaactagttggcggttcccaccagccagggctagaaaacctttcacaaagtatttggatagaagtgttcaaaaaagatattgcccttattagtggggacccaaatttggcctttacttccgaaaaggcccacacctaaaccaaaagccttttaaaatttaattcctttgtgtggagaaaattacacttttaatttttatcaccctttaaccagttgtgtgcccaccccccctcccaaaaaaccttgtgggtac

SEQ ID NO: 42426 - DNA, 222 bp, Macaca Mulatta
gctatcagaagaccctcgtgctgctcacctggatcccggcgctgttcatcggcttcagccagttctcggactcgttcctcctggaccagcccaacttctggtgccgcggggccggcaaaggcaccgagctggcgggggtcaccaccacaggccgggggggggacatgggcaactggaccagcctccccaccacccccttctccactgccccctgggaggctg

SEQ ID NO: 42427 - DNA, 657 bp, Macaca Mulatta
  misc_feature (1)...(657): n = A,T,C or G
taggaaaaagagatccgtaattactctgtaatattaggaagggtgtagaaataaggaatgaacattatgtaaagaccataatgctagtcaaaaaatgtcccaatggaaaataatgtttctttctgcctccaggacaaaacttttatgatctaaaggcaaaacaataacaaaaacaacagcaacaaaaaccagcctaacaataccaagtggttttcattgtcatgatcattaaacattttctccaaagtctcaactacagtttgttgaggtttcattgaaaattatactaaaacaaatttgtttaaaagtaaaatggagttattggcatcacaaagatcatagtcaccttcttaagtactgcataatctttaatgactacaaaggattttaaagacgatccttgcgactagttattaatacattttcttgaggctgtagaaatcagataatttgggccaggcacagtggtnnnnnnnnnnnnnnnntnnnnnnnnnnnnnnnnnnnngnnnnnnnnnnnnnnnnntgggagttcaaggccagcctgaccaacatggagaaaccctnnnnnnnnnnnnnnnnnnnnnnnnnnngccaggcatggtggcannnnnnnnnnnnnnnnnngnnnnnnnnnnnnnnaacaggagaatcacttg

SEQ ID NO: 42428 - DNA, 560 bp, Macaca Mulatta
  misc_feature (1)...(560): n = A,T,C or G
aaagagaaggcatgaacaaatcttgcctctcagtcccacacaaggcagctgtctcactctatagaanacatattcatgaaaaaattcacatctgtcacagttaggagtgacactttaaacagcccatcacatgctcaatatatccaagtcaaagaaaccccacagcacagctgcgtccactgttcccccctacaccccacacacatcaggccccccagggtctcgcctttaaagccgtgagagacacatcagaaccttgggcactgtcactgcttgcagcctgagagtagctcccgccttatctatctgagctcttcctcctccacatcacagcagcaaccacagctccagtgaccacagttccaagcagaaccaggccagcaatgatgcccacgatggggatggtggactcggaagacggctcccatctcaaggtgaggggcttgggcagaccctcatgttgcacatgacaggtgtatctctgctcctctccagaaggcaccaccacagccgcccacttctggaaggttccatcccctgtagcctgtctccacgagctc

SEQ ID NO: 42429 - DNA, 1039 bp, Macaca Mulatta
ggagcatattcctaaaccatacacttttatttcaataaagttttattttgttgagatgaataaaatatcaaagttataagctacataagacaaaagttcaattgttcaaaaaaatttactgggatagctttctattatagggattgttagattatattgctctggtaagattactttctaaaaagtttgtacttttctgtaaaataaaagaatatggaatcataaaatggcacgtgttttagggttagcctaaaattgggcattgtcatcgatttcaaagaaggtatgaacgagcaggcttacagcctaatctttggactggtccttggcagcagttccttttcagactcaaacagaattcagatagatgtaagtcaaaacaaaacttcacaaagccaagcatattatcttttgcattaacctatttctccatcatacatgatactagtatgtgcattagcatgatattctcatatacattatattaaaaattaaaaggtggcagctcagggtgagctcttctgttattcatttgttcctaaatttttaagggctttttctcagtcaatagtttgtacaaactggttagtttaacttcattatccatttctttaaagttgatggatcgtggtaagatgcatttaaggccaatagtgatagatttttttaatctcttgaacacaagctttgtctgaatgatactcttttatctcttaaacacaagctttgaatgataactacaggttttaagtgctgttacattaataccataatgtgatgtgttagaaacaaagggatatttcaaaggtaggtatttgaaaattctctagtctcaatgtatatgtgtattgaatatactctaaaaataaatgtgcaatttgctagtaggacaatgcagtgattagcattaggtatgtctcttttatacccaactgtgtcccactttcttctaagtgcaatccctttcatgttcactttgctgttttaattccatctactcttaactgcattttggaaggctttgtcttaagtatagccc

SEQ ID NO: 42430 - DNA, 806 bp, Macaca Mulatta
  misc_feature (1)...(806): n = A,T,C or G
gggtccgnnnnnnnnnnnnnnnnnnnnnnnnnnnnnnnnnnnnnnnnnnnnnnnnnnnnnnnnnnnnnnnnnnnnnnnnnnnnnnnnnnnnnnnnnnnnnnnnnnnnnnnnnnnnnnnnnnnnnnnnnnnnnnnnnnnnnnnnnnnnnnnnnnnnnnnnnnnnnnnnnnnnnnnnnnnnnnnnnnnnnnnnnnnnnnnnnnnnnnnnnnnnnnnnnnnnnnnnnnnnnnnnnnnnnnnnnnnnnnnnnnnnnnnnnnnnnnnnnnnnnnnnnnnnnnnnnnnnnnnnnnnnnnnnnnnnnnnnnnnnnnnnnnnnnnnnnnnnnnnnnnnnnnnnnnnnnnnnnnnnnnnnnnnnnnnnnnnnnnnnnnnnnnnnnnnnnnnnnnnnnnnnnnnnnnnnnnnnnnnnnnnnnnnnnnnnnnnnnnnnnnnnnnnnnnnnnnnnnnnnnnnnnnnnnnnnnnnnnnnnnnnnnnnnnnnnnnnnnnnnnnnnnnnnnnnnnnnnnnnnnnnnnnnnnnnnnnnnnnnnnnnnnnnnnnnnnnnnnnnnnnnnnnnnnnnnnnnnnnnnnnnnnnnnnntccatagctctactagcctctacacttctgggattactaactattctagaaattgcagtagcccctaatttcaagcctaatgtctttcccacttctttaattaacccttttatctaccggaaacaaacaccctaattggaccccacccgaaacccccccgccttaatcccaaataagtttaaaacccccaattcccctcggggcccgcccttgaaaaaggaaaccctca

SEQ ID NO: 42431 - DNA, 773 bp, Macaca Mulatta
  misc_feature (1)...(773): n = A,T,C or G
gggaggagatgatgacaagaaaaggccgaattgcagtgtctccatcagcagtttgctctctctgggcacacgatgacaaaatttcctgaagcgaaccactagtctgacctcagtagcaggattggaagcttcatgccatgggagtggtcaagaaaggcatcccaaagagaactgaacnnnnnnnnnnnnnnnnnnnnacctttaggaataggggattgtccccatatactggggatgaaatacccagtgtaaccaaattccccagtaagatcgcttagtttggcaatagtctcttcttttgagcacgctgaagtttatttgctcaatgaaggctgaaattataagtcagtatatatgtattactaagtagaacttgaggtaattatatgttttagtcaaaagcagtttctggggggctggtataaaccctactttgtgatttgctaaagcacaggatgttgaactcaaccaaaactaggttttgaaggtaaaatatggtgggggttctggggacttaatagccaactaaaaaaagccccctacgacattcccagctaatttaggttttaannnnnnnnnnnnnnnnnnnnnttggccccccgattttgccaaaagaacctaaacctttgggattacctaaggataataaaaagggcgattttcccaacgcggggggcaatcattcaaacccccccccgaggttgggaaaaaacttgccccctccctgtgtacaaacgaaaaagagttgggggagaaaaaagaaatgatttttg

SEQ ID NO: 42432 - DNA, 1363 bp, Macaca Mulatta
  misc_feature (1)...(1363): n = A,T,C or G
cccgcgcccatgacttcgcgcggccgagcgtgcccgcggcgctgcccctccttggggagctgccccgnnnnnnnnnnnnnnnnnnnnnnnnntgcctgccggccgtgtgggctgactgtggccctccccccgctgtacctaatgcccagccagctttgaaaggccttacaagttttcccgagaacaccgtaataacgtacagatgtgatgaaaactttatgaaaattcctggtaagcaggactcagtgatgtgccttccggacagtcaatggtcagatattgaagagttctgcaatcgtagctgcggtgcaccaaccaggctaaagtttgcatccctcaaacagctttatatccctcagagttattttccagtcggtactgttgtggaatatgagtgtcgtccaggttacagaagagacccttctctattagcaaaactaacttgccttcagaatttaaaatggtccacagcagctgaattttgtaaaaagaaatcatgccctaatcctggagaaataccaaatggtcagatcgatacatcaaatggcatattatttggtgcagccatctccttctcatgtaacacagggtacaaattatttggcccgacttctagtttatgtcttgtttcaggcagtggagtccagtggagtgacacgttgccagagtgcagagaaatttattgtccagcaccaccacaaattgacaatggaataattcaaggggaacgtgaacattatggatatagacagtctataacgtatttatgtaatagaggattcaccatgattggagagcactctatttattgtactgtgaatgacgatgaaggagagtggagtggcccaccacctgcatgtagagcaaactctctagtttccaaggccccaccaacagttcagaaacctaccacagtaaatgttcgaactacagaagtctcaccaacttctcagaaaaccaccacaccaaatgctcaagcaacacggagtacacctgcttccaggacaaccaagcattttcataaaacaaccccagataaaggaagtggaaccagttcaggtgctacccatcttctatctgggtacacgtgtttcacgttgacaggtttgcttgggacgctagtaaccatgggctggctgacttagccaaagaagagttaagaagaaaatacacacaactatacagactgtttctagtctcttagacttatctgcatattggatacaataaatgcaattgtgcttttcatttaggatgctttcattgtctttagggtgtgttaggaatgtcaacaaaggagaaaaaaggcagtcccagaatcacattctcagcacacctctacctcttgaaaatagaacaactt

SEQ ID NO: 42433 - DNA, 771 bp, Macaca Mulatta
  misc_feature (1)...(771): n = A,T,C or G
gggaacattgagaccattccgccaggatgatgagtttagtcctggaatacatgtcatacaagtcgggtggtgaactgcactgaacatgcctggagtgatgttaggaagacagcaagctgaaaattagcattccagaagggataaagccatccgcatacaatattagaagattttatgacattatgtttctaggtagtttggactccctgagttagttaagaaacttaattttctttccatcagaaatatcttagggctgttttggttgcaagtaagagaaatatgtacttaatgaaagtgaagggaggtgctttgtaagtgaggcaagatgacctggtagagaaattaggtgttttctctttccttctctcaaacagctggtgaaagactagcttcttattttggaggcctgatgtattctttgctttgagggagaagagaatttttaaaagtcaactttaaatatcagtttcatactctaaaatgtatcagttcaaaaactgtaatttgatgtgctttgacaaagatacacagttgtgtaacgaccaccacaatcatgaaagagatcatttcatcacccccatgagcccctttgcagccagtcccctccaacacctgngccgctggtatcactgatctgctttctgtcactgttttgctttgtgaagattcatagaaatggactctacagtatctgttggtgtctgacttctttcactttgcataatactttttgagagctgttcatgctctcacatgtatcagtaantt

SEQ ID NO: 42434 - DNA, 745 bp, Macaca Mulatta
ggggatttccactttcgtcaggtactggagagagccgctggccgggtgctagggcagagtggcagggcggacggctaggaggccaaggaacatcctggtctgacggaaagactgcagcctgcactgccatgaataagcttttcagcttctggaagaggaagaatgagacccgcagccgtacctcctcagacccgtccataggccagggctacaaccttcgagaaaaggatttaaaaaaaacttcacagagctgcttcagtcggggatttgaagaagctgaaggaatatcttcagctcaagaaatacgatgtaaacatgcaggacaaaaaatacagaacacctttgcacctggcctgtgcgaatggacatagagatgttgtacttttcttaattgagcaacaatgcaaaataaatatccgggatagtgaaaacaaatccccattgattaaggcagtacagtgtcaaaatgaggattgtgctactattcttctaaactgtggtgcagacccaaatctgagggatgttcgttataatactgctcttcactatgctgtttgtgggtcaaagtttctcattagttgaacaactggttgattatgaagctgatctttgaagcgaaaataaggatggtttactccactgttggtgccgttataaccacatcccaaaatgtaaaatttctctggaaaagggctgattaatccttcaaaattatcaaaacacccctttcttcttcatgggaaca

SEQ ID NO: 42435 - DNA, 2960 bp, Macaca Mulatta
  misc_feature (1)...(2960): n = A,T,C or G
agactggaagactacccttgaggagaataggttgaattctgaaaaagatcaggctagggaagaactgtcccaccacgtggaagtgaaacaatgtgtacaggaggagccaccctgtttggtgtcattaggaaaagtgcacaatcagagcaaccagttaagggaacaccaggacaactccttgaggttcatggtactcacctcagagagactgtttcctcaaagagaacactgtgagcctgaacttgggggaagttattctgtaccttctactttaagccttctacctatgacattacctgcacgtacaggttcgactaagcctaactcacannnnnnnnnnnnnnnnnnnnnnnnnnnnnnnnnnnnnnnnnnnnnnnnnnnnnnnnnnnnnnnnnnnnnnnnnnnnnnnnnnnnnnnnnnnnnnnnnnnnnnnnnnnnnnnnnnnnnnnnnnnnnnnnnnnnnnnnnnnnnnnnnnnnnnnnnnnnnnnnnnnnnnnnnnnnnnnnnnnnnnnnnnnnnnnnnnnnnnnnnnnnnnnnnnnnnnnnnnnnnnnnnnnnnnnnnnnnnnnnnnnnnnnnnnnnnnnnnnnnnnnnnnnnnnnnnnnnnnnnnnnnnnnnnnnnnnnnnnnnnnnnnnnnnnnnnnnnnnnnnnnnnnnnnnnnnnnnnnnnnnnnnnnnnnnnnnnnnnnnnnnnnnnnnnnnnnnnnnnnnnnnnnnnnnnnnnnnnnnnnnnnnnnnnnnnnnnnnnnnnnnnnnnnnnnnnnnnnnnnnnnnnnnnnnnnnnnnnnnnnnnnnnnnnnnnnnnnnnnnnnnnnnnnnnnnnnnnnnnnnnnnnnnnnnnnnnnnnnnnnnnnnnnnnnnnnnnnnnnnnnnnnnnnnnnnnnnnnnnnnnnnnnnnnnnnnnnnnnnnnnnnnnnnnnnnnnnnnnnnnnnnnnnnnnnnnnnnnnnnnnnnnnnnnnnnnnnnnnnnnnnnnnnnnnnnnnnnnnnnnnnnnnnnnnnnnnnnnnnnnnnnnnnnnnnnnnnnnnnnnnnnnnnnnnnnnnnnnnnnnnnnnnnnnnnnnnnnnnnnnnnnnnnnnnnnnnnnnnnnnnnnnnnnnnnnnnnnnnnnnnnnnnnnnnnnnnnnnnnnnnnnnnnnnnnnnnnnnnnnnnnnnnnnnnnnnnnnnnnnnnnnnnnnnnnnnnnnnnnnnnnnnnnnnnnnnnnnnnnnnnnnnnnnnnnnnnnnnnnnnnnnnnnnnnnnnnnnnnnnnnnnnnnnnnnnnnnnnnnnnnnnnnnnnnnnnnnnnnnnnnnnnnnnnnnnnnnnnnnnnnnnnnnnnnnnnnnnnnnnnnnnnnnnnnnnnnnnnnnnnnnnnnnnnnnnnnnnnnnnnnnnnnnnnnnnnnnnnnnnnnnnnnnnnnnnnnnnnnnnnnnnnnnnnnnnnnnnnnnnnnnnnnnnnnnnnnnnnnnnnnnnnnnnnnnnnnnnnnnnnnnnnnnnnnnnnnnnnnnnnnnnnnnnnnnnnnnnnnnnnnnnnnnnnnnnnnnnnnnnnnnnnnnnnnnnnnnnnnnnnnnnnnnnnnnnnnnnnnnnnnnnnnnnnnnnnnnnnnnnnnnnnnnnnnnnnnnnnnnnnnnnnnnnnnnnnnnnnnnnnnnnnnnnnnnnnnnnnnnnnnnnnnnnnnnnnnnnnnnnnnnnnnnnnnnnnnnnnnnnnnnnnnnnnnnnnnnnnnnnnnnnnnnnnnnnnnnnnnnnnnnnnnnnnnnnnnnnnnnnnnnnnnnnnnnnnnnnnnnnnnnnnnnnnnnnnnnnnnnnnnnnnnnnnnnnnnnnnnnnnnnnnnnnnnnnnnnnnnnnnnnnnnnnnnnnnnnnnnnnnnnnnnnnnnnnnnnnnnnnnnnnnnnnnnnnnnnnnnnnnnnnnnnnnnnnnnnnnnnnnnnnnnnnnnnnnnnnnnnnnnnnnnnnnnnnnnnnnnnnnnnnnnnnnnnnnnnnnnnnnnnnnnnnnnnnnnnnnnnnnnnnnnnnnnnnnnnnnnnnnnnnnnnnnnnnnnnnnnnnnnnnnnnnnnnnnnnnnnnnnnnnnnnnnnnnnnnnnnnnnnnnnnnnnnnnnnnnnnnnnnnnnnnnnnnnnnnnnnnnnnnnnnnnnnnnnnnnnnnnnnnnnnnnnnnnnnnnnnnnnnnnnnnnnnnnnnnnnnnnnnnnnnnnnnnnnnnnnnnnnnnnnnnnnnnnnnnnnnnnnnnnnnnnnnnnnnnnnnnnnnnnnnnnnnnnnnnnnnnnnnnnnnnnnnnnnnnnnnnnnnnnnnnnnnnnnnnnnnnnnnnnnnnnnnnnnnnnnnnnnnnnnnnnnnnnnnnnnnnnnnnnnnnnnnnnnnnnnnnnnnnnnnnnnnnnnnnnnnnntttgggaggctgaggcaggtggatcacttgcggtctggagttagagaccagcttggtcaacatggtaaaactctgtctctaataaaaataaaaaaattagccaggtctggtggtgggcacctgtagtctaagcttctcaggaggctgaggnnnnnnnnnnnnnnnnnnnnnnnnnnnnnnnnnnnnnnnnnnnnnnnnnnnnnnnnnnnnnnnnnnnnnnnnnnnnnnnnnnnnnnnnnnnnnnnnnnnnnnnnnnnnnnnnnnnnnnnnnnnnnnnnnnnnnnnnnnnnnnnnnnnnnnnnnnnnnnnnnnnnnnnnnnnnnnnnnnnnnnnnnnnnnnnnnnnnnnnnnnnnnnnnnnnnnnnnnnnnnnnnnnnnnnnnnnnnnnnnnnnnnnnnnnnnnnnnnnnnnnnnnnnnnnnnnnnnnnnnnnnnnnnnnnnnnnnnnnnnnnnnnnnnnnnnnnnnnnnnnnnnntggctcatgcctgtaattccataactttgggaggctgaggcaggtggatcacttgcggtctggagttagagaccagcttggtcaacatggtaaaactctgtctctaataaaaata

SEQ ID NO: 42436 - DNA, 954 bp, Macaca Mulatta
aaaaaagaaagagaagaggtatgtggggtggggtgatccctcagcttttcttatagcgtccccggtcgtatgtatgtgccctccgtcagtcttatacctgcttgaggggcgcccccctcctccatgctagacgccgcctgcgtctttttgagattcggagaaattgggtgtataacaggggccacccccgcatccataagcgtttcacaacttggtgggtcaataattcggggtccgcgaagtcacgaatctccagccatagcatcataaccaacttctgaggaactctgcataatggtctcaagtgatcaaagatccttcaacaccggcattcttagcaatggtcattgctggaattttgagtgttcttggaataagttctataccaattttttgatcttcattagctggagtcaatgagtccaaggctggaatgcatcgaagcagggcacaaccccctcccaaaacaatgccttcttcaacagcagctcttgtagcattaagtgcatctgtaactctgtctttcttttcattcacttcaacatcacttgtcccaccaaccttcagcacagctactccatctgaaagttttgctagccgttcattcagtttttccttttcatattcactagttgtgacatctaactgctcaatgatttcttgaatacgtttttcaattttaaccttgtcaccttttccttttaagagcatggcatcgtctttggtcacaatgacctctccaacttttcctaagtcaagggggtggaacgtcttcaacatttatggtcaacccctcttctccaaacactgcaccaccagtagcaatagccatatctttaagctggttctttctattgtcaccaaatcctggagccttgactgccacaacctgaagaccaacctttagcactattcaagacgagtgtacttagagcttctaaatcaacggctcgt

SEQ ID NO: 42437 - DNA, 975 bp, Macaca Mulatta
  misc_feature (1)...(975): n = A,T,C or G
gggggtgaccaagcaagatnnnnnnnnnnnnnnnnnnnnnnnnnnnnnnnnnnnnnnnnnnnnnnnncannnnnnnnnnnnngnnnnggaagcannnnnnnnnnnnnntaattcgagaggacccttagggtgtctgagcccagccacctgagtttttagtactgtgttgtcaggctgttcccaggcctcaggtgttgtcttttgtgctgtgtggggatgcattgctgcctgtatttatgatcttttgccgtggttctgagcattcacctcaccatgtttacaaagaactgttttgtatatagacattttcaggcacgtgctttgcaccaaccctgcgtggctcctgtctgttagctgtcacagtgtgcacactaatctctgttaaagttgtctatggctgttctacttgtaagatagttttctatttccttcagtaatgtgtccacagtaccctgtatttcgagttctattatagtgatgtactcttgttttaatagtgccctccccaaaggcctcacctttggacagaggtccagtcctttgatgccccagccacaggtgaacgttgctaaattgtcacttttccagttttggttttttctctggttaaaggaagaaattttttccaaatttccatctccacttggggctggtgagaacttgttttgaagaccgcttttgttgtgggtctccccaatgtaaggtggcctagtgtttcccgggggacctcccctttgttcctaaaaaccctggggtaaatttccaagggtggcttgcgccctttgagacaaaggggggctctccccccaaaagaaccccatggttctggtgccccttgcgactgaaatgtaatatgttgctccctttgggaatgagacccggggcacgaggatctcgcctcttggtctatgggggtattccaccccggngaaccaattggtggtcgtaacaagatattaccaaatgcgctctctc

SEQ ID NO: 42438 - DNA, 746 bp, Macaca Mulatta
  misc_feature (1)...(746): n = A,T,C or G
ggatcataaaaaagaaagaggatctatgagaatgccattgcatttctaatagaacagagaaatgtctccatgagggtttggtctcattttaaacacttttttttggagacaatgtctcannnnnnnnnnnnnnnnnnnnnnnnnnnnnncaacctcagctcattgcaacctctgcctctttaaacatgctattaaatgtggcaaagaannnnnnnnnnnnnnnnnntatcttgctattaagtggtaatgaatgttcccaggatgaagatgttacccaaagcaaaatcaagagtagccaaagaatcaacatgaaatatattaactacttcctctgactgtgctaaagaattcagaattcagtgaccaatgtgcctcaatatcttattgttcaacttgacattttctaggactgtacttgatgaaaatactaacacactagaccattctttgtattcaagagcactgtgtatgactgaaatttctggaataactgtaaatggttatgttaacgtaataaaacacaaatgttgaaaagtataaaatatatatacatagattcaaatccttatatatgtgtgcttattttatgtacaggattttgtttgctttttctctttaagtgtaggttcctagtgttttactataactgtcactatgtatgcaactgacatatataaatagtcatttataaatggccatattataacatttgaaaaagtcttcatttttcagtatttctctctgcc

SEQ ID NO: 42439 - DNA, 160 bp, Macaca Mulatta
gtgtgtctgctttaaattctaggctgtatagacgtaattgccaagttttaccaattgggacttggggtgtaaatgttctgatgatttagaactcttgtgatgatattctctagcacaggggaaggaaatagtttttttagaaaggtcatcaagcttttct

SEQ ID NO: 42440 - DNA, 636 bp, Macaca Mulatta
  misc_feature (1)...(636): n = A,T,C or G
ggggaaggacagttttctccggttctggcgggtttgccctcctgccggctagcgttctgcgggagtcaagcctggaaagcgtgtgtgcggcgtacaggcgtcagacactggaacgcattcgaatggtgctattctttgtctgccacatagcgagcactttataaggtcacttatagtcctgaatgaatggttaaatcgtggaagccgcaaagaaagccacacagctttgactgaagacctagctcgtgaagcgtgacattcaggaaaacgatgaggaggcagtgcaagtcaaagagcagagcatcctggaactgggatctctcctggcaaagactggacaagctgcagagcttgggggactcctgaagtatgtacgacccttctttgatttcatcagcaaggctaaagcagctcgcctggtccgatctcttcttgatctgtttnctgatatggaagcagctacagggcaagaggtgagctgtgttaaagtgcatcgattggccaatcagaaaaaaactttcttcgccgctttggagcaagatgggtcttgtctttgtccagagtcccggaacttgcctttggtccccctccgggggttaaaaaaggtgaaaccctttggggaataactttaaaaca

SEQ ID NO: 42441 - DNA, 1053 bp, Macaca Mulatta
  misc_feature (1)...(1053): n = A,T,C or G
tcaggctcctggcgacctccctgctgcaggcggccctcccagcggggccgtgcccttctacaaccctgctcagctggcacaggnnnnnnnnnnnnnnnnnnnnnnnnnnnnnnnnnnnnnnnnnnnnnnnnnnnnnnnnnnnnnnnnnnnnnnnnnnnnnnnnnnnnnnnnnnnnntggagccctgacgctgctgttctccccgaggagcccgaccaaccgccgcgatctccgtcccgcccccagggagacacggcagtgactcagagctggtcccacgctgtgcctccctcctcaccgcccatcataatgaattattttgaaaattaattccaccatcctctcagatactggatggaaagactgaatctttgactcagaattgtttgccgaaaagaatgatgtgactttcttagtcatttaggatgatttaaggatgtagcattcctggtcatttaagaatgttcattcggctggagctgtctctgccacaggagagccacacagtcggtagcaaccagggcctctccaagccgagctgtgagtccctgcccagtgagtcccgcacttcctttaaggtgctgggagcaaagagtgactgtctgaggcagaccccgaccctgctctgcagcgcctgggccctcgccgtgtttgaacctggccgaatgcgtggaggtcgctgtgttctcagtcagcgtctctgaggagcctcggggttccttcggcattagttcagtttttgagagaggccctagttactgaagtgaatttctttcctgtaacaaagatgtttccagcctcactttactttctgtggcctgatgaggaccatgggtgattttgtgcacccaaagcaccggcgactgcccaccgtgtggcccagtcactgggaaggagccccagggagccggctgtctgacacgatggctcagggtggtcatccagggtgaaaaccgacggtgtgatgtttgatttgggcttcattttgcgtgtaggagcatggttcgactcattgtgagggggctggatgcagttctctaaaaggctgcacttt

SEQ ID NO: 42442 - DNA, 672 bp, Macaca Mulatta
acgaggctgatgctgacagaaactcaacaaccctacacctaataaaactcacgagtatgatttttcaggacatctgaaatcagtgtatgtcagaaaagtcacatacgacaaacctcagacagcatcctgaatgaccatggcttttattcccaagtcttcctcatcggacaggtaatatcatcagaaatctgacattttaacaaatgtaggaaattcttcacacacacagacacgcacacacacacacccccagaatctcattaaatatttgataatttgattttgaatgtgtaaagttttcaacaaatgatcatattttatatcagagcttgttacaaggggaaaatctatcaatttaagaaaggtaagtaatagcctttatctagatattgctatatcagaactgtcgtttcatatataatatcaaaacttttaatgaaatgtaacattgattaatagacattcagtataataaaaagcttaaaaagaacaagaaataaattgcataaactgaaaagcagtgttgcaaatatgtgagtgttttgtgagttattgattgtttatgtatgtatatgtgcatggtacttaccaggtatttgtttaatatgtttcttagacctcaacattgctataagagaattgtgttcccttgctttataactactttgacat

SEQ ID NO: 42443 - DNA, 933 bp, Macaca Mulatta
  misc_feature (1)...(933): n = A,T,C or G
gggaactcggtggtggccactgctcagaccagacttcgctcgttttcgtgcgcctcgctccgcttttcctccgcaaccatgtctgacaaacccgatatggctgagatcgagaaattcgataagtcgaaactgaagaagacagagacgcaagagaaaaatccactgccttccaaagaaacgattgaacagggagaagcaagcaggccaatcgtaattgaggcgtgcgcccgccaatattgcactgtacctttcccacaagcattgcccttcctaattttaccttccttttaccgggtttaaccttttgtaagaaggccaaaaaggtttgggattcaaggttttaaagggaatggtggctgccccccctttcccattccaagaaaatttcctggccaaaccaaaagggcccgcgcccccgggctttttcccccattttgggttatannnnnnnnnnnnnnnnnnnnnnnnnnnnnnnnnnnnnnnntttcccctgtgtttcgnnnnnnnnnnnnnnnnnnnnnnnnnggggggggggaacaaaaaannnnnnnnnnnnnnnnnnnnnncacaaacacggggaaatttctccaagggaaaaaaacccccaacgtgtgggcgccaaagggggttctcccccgccgcggggtgtgcataatagcgacttttttacacccccaaaggagggcgcccnnnnnnnnnnnnnnnnnnnnnnnnnnnnnnncttacaagagnnnnnnnnnnnnnnnnnnnnnnnnnnggccgaaggtggccgcannnnnnnnnnnnnnnnnnnnaagagcgcgccccacaaatacacagtgtttttgtctacccctcctctcttccnccgatgnacgtctaacccactcacgcataaatcaacattacatgctacgcactttaccgcacaagtttctccagtataaactgttg

SEQ ID NO: 42444 - DNA, 1100 bp, Macaca Mulatta
gggccttggatagggtgagtttggataagtatgtatgagttatagcaaaattaagtaggttgagtcaagtccatgtaaaagcaataaaacagttttaatttttttcctaggttcttttaaaaaatgatgtaacttacatggaagtcttcatagaacttttttctttcctagaactattgaaatgtaatttaggatgatttgatgttccatctcaagttgtcaacatggctgtgtcattctggcttacacatttttgatctaacaattctagtcaagggataagggcagaatgaagacaagcttcagttatgaaagtacaaactatttgtgtgattaatttttaaaaatgacaagaagcccattgtaaaagaatatttgcagtcaaatcacttttcttatgttgtaagtactgttgtagctatgttttgggtagtggttctcatctaccttggagtgcataagacttacctagcaggcttgtttaaaaagttcagattcccagcttcgtacccaggggattgcctcaggtggtatgggctgtggtcctgggagtcatcacttttataaatagtggttcagagcccacagagagagactgcttcatcgaatgggaagtaccaaggaagaaagttacaattctgtgtttgtctgggaggcaagtggacacctttgtaccttgagggtttagaataggtgggtctcttgccagtacagtcccaggcgttttatgtgtttagaagtagtaaggatgcctttaattcagaggattaagctccttaaagctgtttttctccattgtcatagtgccttctctgaaaaacgaatgtacaagtatcctattttctaacagatgtaactagggtttttttaaaagcactttttcatagtttttcttttaaaaagtaaaattccacacctgtgaacttcaatcccccaagatcttttagcatacaggttggaaaccatttaggccaccaaataaaaaattaatggacccagaaagggaagaccaggaccccctaatttcccgggccgtttagccggaacctaaggttacccccctaattcggaaaagccttttgcgcaaagcagaaattcta

SEQ ID NO: 42445 - DNA, 811 bp, Macaca Mulatta
  misc_feature (1)...(811): n = A,T,C or G
ggggctctttgagcatttataagcatgcaatctataaacaatacgcagaatttttcttccttctttccttcacttttcttttgttcttttctctttttttcttttcttgtctttttttcttaccaaatgcatgtttcattgtacaatttgctttttttctttaaaataatgatttagagactgtctctatcattacatgtggtactcactatattccttttagatatggcatagaattctataatatagaagttccatagtttgtttaggttttccttaattggtaggcatttaggttaattccacttttttccgttacaataatactgcaatggatagccttgtaaatggttccttgagcacatgggtggaatatgagaagtagagtgttgtaggccatgtggcttgtacattttaagtcttaatagtagttgccagttgtccttcaaaatgggtacgctgaaggatacttcccacagtataaaagctacctatctccctatgtgaattgctggttcaaagtctgtgaatgtttcanattttggcatgtttttccagactatactccagggaggttacctatttatagtttgccagtagtagaaatatgaatttaacccatgcatttaatatttgtccatctcagaagtttcttgctgttgttttggtttatgtatctttgcttgttaatgagatggaacatccttttcatggttgtcactgtgttttattgtataaaattctctattcaggtcattttactattttttaaataaatgttttctaattaaggattgaaagaagctctctc

SEQ ID NO: 42446 - DNA, 795 bp, Macaca Mulatta
ggggatctttatattgggcttttctattttttaaatgttcacatttctttctgttaattaaaatgccatcataatgtcacatttacactgttgcctcttttaaaagcaaagccactctgttctaagattacatcaagacgagcagtgtgtagtaattaaaatgtatgcttgatgagcataatagattctggttttaggaaataacatatagcttttatatgaatattttcttttgctgtagtgaaaatcaaagatttttttttcctggcttttatggaggaatgaaaagagttgtctccctctaagagtaatttttgattctcatagcaataatgtcaccattcttaccagagggtgaataccccttgtataggaaaacagacgtaatttcctcttgggagttctctttatgacttagcattttcttccaccttgagaaaattcctgtttttccgattatttcatattgaacttttttttgagcttttgtgccatgtaatagtttgttgatccatctttgtacattttcatttcatgtctttcctccacctacctgtcagaatccactataacagaatttgaattctttaagttaaaaaaaacgtgctttaattttgtttccccatgaatttgttaaataacttttgcattttaaccctccaataatgctatggaaatgattatgaagtttaaattcgtcccttttttaagccggccctactcgtgccttttgccattgccaaggggtctaaggaaaaaacagcccaaattaagcgtgccggaaataccttgcag

SEQ ID NO: 42447 - DNA, 620 bp, Macaca Mulatta
  misc_feature (1)...(620): n = A,T,C or G
gcaaaaattccttcagccaggagtttagacgagattgcaatggatttgacagagacaggaacacaaagggcctccaagctggtgacactggaggcgaaaagtcagttcatcatggcaagcaatggcagtttaatctcctcaggnnnnnnnnnnnnnnnnnnnnnnnnnnnnnnnnnnnnnnnnnnnnnnnnnnnnnnnnnnnnnnnnnnnnnnnnnnnnnnnnnnnnnnnnnnnnnnnnnnnnnnnnnnnnnnnnnnnnnnnnnnnnnnnnnnnnnnnnnnnnnnnnnnnnnnnnnnnnnnnnnnnnnnnnnnnnnnnnnnnnnnnnnnnnnnnnnnnnnnnnnnnnnnnnnnnnnnnnnnnnnnnnnnnnnnnnnnnnnnnnnnnnnnnnnnnnnnnnnnnnnnnnnnnnnnnnnnnagtaattttctaatacaacagaagctggtggatgctgcatagaaacttgccaatgagccagacctttgtaaagctgtgaagaaaaagcgaaagcaagattacaccgatgcggtgaataagcttcaggagattgaacatgcaatatacgaataccgaattacgtgtggaaagaaacccagccagaaagcagcagtgttaccag

SEQ ID NO: 42448 - DNA, 132 bp, Macaca Mulatta
tggcccagttttggcatttacacgcttatctctcccctgcaatggggacagtgctaattttatgtcacatttctttttaatgtcttcctaaaagagtgaccaacacatggttgatattcaacaaatgattgg

SEQ ID NO: 42449 - DNA, 586 bp, Macaca Mulatta
agccagcctttttcagatgtgccaggcacacacactacatcaatgtcttgcgtggtggcttcactgctatccaggtgacttaaaagtttggaaaatgtccctggtatacttcaattcctactagatattgtaatgacaatggtgtaggtaaggaagacagagttaaagctaccagttgtggaacagaaatagttgcatgtccaaaggcggcttagaatgattgtgcatatgcatttggctcacataaccagcatgaatagtctcttcccaaatccgttggcgattaccccctggccaagcacagccctaaaacaattctcatccactttcctgttaagaaacacagcagcaatatactttggcagcaaaccagagcatatgatgtgacttgctcaaccttatcttcctttccaaattgtatacgaagcgtctgatgttttttagaataatttcctttggaaagccaaggagaaagcaaattcggaagagaagtgagacattgttgcctggctgaggaacaaggtgcttaacatcttgaatgacagtatcttgagagcagtatttcctgtgctaagggttataagaa

SEQ ID NO: 42450 - DNA, 616 bp, Macaca Mulatta
  misc_feature (1)...(616): n = A,T,C or G
ggagagggaacatgagccntgcagctaggactagctgtcacctcccgcccgccggcccagagacaggccagagcgtcagggaggcaagatgagtccatcgacggtgccatcctgcccttggattcagtaagctgtgaggtccgtaatgtcagacactggcaaacatcacgtgttcttcaagtagagttatgaacacgaagaaactggtcggcagagtaaaacgtcggaattgtcctttccaagatccagagccgcaacattccttgggggaaaatgtggacaagggtgagtactgagagaaaaaaacagacaatttgtgattccccatttttccagtttgctcagcccctgcaataataatacaaatagtggggagttaattgctgcttttatttatttttctggtttgtttatgcttttgtattagttttggtcatacatacctgcaactaacatttggggaaaatactgtttagactgccagattttgctctgttagatgaattttttacatggatacactgatgcccacagggcatcctcttccatcctgaaatctctggggaagcagtcttctgggatgcagattgattattccaaatagcataatggtgcc

SEQ ID NO: 42451 - DNA, 776 bp, Macaca Mulatta
  misc_feature (1)...(776): n = A,T,C or G
ggtgtgnnnnnnnnnnnnnnnnnnnnnnnnnnnnnnnnnnnnnnnnnagggtggatcacttgagcnnnnnnnnnnnnnnnnnnnnnaggcaacatggtgaaattccatttctactgnnnnnnnnnnnnnnnnnnnnnnatgatggcatgcaannnnnnnnnnnnnnnnnnnnngggctgaggtgggaggatcacttaagcccaggaggtgtaggttgcaatgagtcaaaattacaccactgcactcaaggctggatgacacagtnnnnnnnnnnnnnnnnnnnnnnnnnnnnnnnnnngttgaggacaaagataaagatttaaagatcaatctgtagggaagacgtaaagagtaacacaggagtaaaagagatgacatggaagagaatggatgaaggtatgagaaacagacaaggtcagatgacagtccttagaagaaagataatgctcacaaacctagcagagtctaactctagctcataacgcacatccaataaatatcagctgaagtttggacagcatctcagaggatacaaaagacttggagaaaaaaaggaactgtcaagccagttcaaagaaaataaaagctgagtaaaaatcattaaattgaaattaggacattaagctttttgttgacaatgtggcatgggggaggggtgggcagggggtacaagctaaatgttatattatagaaaaatagcccaaaaagaacgtggtttaaaaatgacagccaacaagcctggactacttttttgaagggttttacatgggaaaagg

SEQ ID NO: 42452 - DNA, 393 bp, Macaca Mulatta
taagctgacccacaagtacagactaaagcaaagcaagagaagatgcagacgctgtctgtcggccccagctgagaagaaagctgccggcaaagaggacatccccactaagagaccacctgcccttcgagcaggagttaacaccgtcaccaccttggtggagaacgtgaaagctcagctggtggtgactgatggcacatgacgtggatcccattgagctggttgtctttctgcctaccctgtgtcatataatgggggtcccttactgcattatccatgggaagccagactgggatgtctagtccacaggaagactagcaccaaagctcaaaaagcaaaggctaaagaacttcctactaaactggattaaatgtacactgttcagttttctgtaca

SEQ ID NO: 42453 - DNA, 614 bp, Macaca Mulatta
gcccagggggcaagcggggccataagcgcctcatccgtggcccgggcgaaaatggggatgacagctaggaggctggaatagggccggccacatgtggactgtggggctgcctgccttccgctccctgccaccgtcctccttcctgggctccaggaaagtgtttccaggagggcaggagggctggcggctgaacgcacttgcagcgtccgagggccacggggctggcattttgtgacccttccctgttgctgtccctgcatctcatgtgtgttcccagggtgtccgggaaccctgcctggctggcttaagggggctgggtcaggggcctggcatgaacctggcctcctggggagctgagactagggtcccagcacagcccaaaaacctttggccacaagaggtggggtcagtcagggctggggcaggggtcactgcagtttgggatggttgaatgctgtattttctaaagaataaaatatttttaaatcaagacttgtgcttggccctgagagaccgcctctggccctgggaattgggcagtcttgtgcatgtaactgtcctttcccagtaggggagaggggactgctagcctgtgaggtggagacccagcactc

SEQ ID NO: 42454 - DNA, 311 bp, Macaca Mulatta
gttagagtcaagtttctttagaaaggtaactggtgttattttttaatagcgtttgtcgacgaggaatgttcaattgcacatattatccatgcccagcagtgtgcacaatatatggggaccggcattattattcttttgatggactagaatatgactatatcagtgattgccaggtttttttgataaaggtaggtcacagttacacatttttatttgcatttgtgtaaagatttaatgtaaaaaacaagtatgctgctccctgatatatcgaattcatgtgttatttataaaacctataaaacaattatatc

SEQ ID NO: 42455 - DNA, 943 bp, Macaca Mulatta
tgtgcaggggtagtgacctgcgcccccggccggtgtcactcacaggcctcgctctggttctagtagccgctcagggtccgcaggtacattcggtaaactgtgcgttggtcttggcggtccctgtcttctcctcccaacattccggcccctcctgctccatccacggcgcccgcggctccatcctaggactcgcggcggcgtcgctgtcaaaccgcactaactgcgtatcgtccacttagcccatggagatgaagcgggggcatcccgcggccgggccgggacgtggcggtgtggaaatacctcaaggagtggaagcctgagggcgaggggggcgctgagaccctcccgaccctcctcccggcacagcaaccgggttcccgcgcccccgcggggcggacccctagctactccccacagaagctgtttccctcccgaccccgcactcacccgcacaggtctgggtcaggaccagggctcccgagagcagcagaaggagggtccggggcgccatgaccccatccttggcgactggggagaatcggagtactggtgggtgcgtgggaactttagaacccggaccctggctacattgattgacttctctagaaacccgacactcaataggagtgagaactggggccgcccggtgagtatccaggaagaaggaccagacgcaggttgagagagggagaagagaaacccttcggagatggggaatccccaacgctgggactccccaatccatacaccgccttcggggcctgagattctgagagccacgcctggggctctgggacttcgccctgaccccgctcctcctgtgccaagcgctctgtctcaatgtttccctgagtcttggcacaggagctgtctgacaaaccagggagaaacacacggcatgggccccatccgtctttcttcacttttcatcacggactccccg

SEQ ID NO: 42456 - DNA, 110 bp, Macaca Mulatta
gatcacgagctgctcaggcaagagctgaacacgcggtttctggtgcagagcgccgagcggcctggcgcctccctgggcccgggggctctgctgcgggcggagttccatca

SEQ ID NO: 42457 - DNA, 999 bp, Macaca Mulatta
  misc_feature (1)...(999): n = A,T,C or G
nttctgtcgagaggtttttgtctctcgtcggccgtatgntgtggttgtgcgagcctttgccgcgttccggtgtgtgtatagcttctcgcgcttgtgcattgttcaatctgtnttcttcgctccttcacgcgtgtntttctgggtggttcttggtttatttgcgcctcttttgcctattctnctttggcgtggttctcgggcttgtgtgtcatggtgtgaacttgggtcttgtcccttttctgctgtcttcctatgttctttgttgatttnttnttttgtgcacgttgtcgcatgggngttcttctctcgccctgttttgctggttctctggcgttcgttgttttgctaactgtttgcctgtgttctctcttcttnggttgcatgtctcgtctctatgcgcngtagctgctctcgtctcaaagtgnttcgttgtgggcttcttctgtgggttgtttatggccctctttttctgttctctgtccttcgtgtttgtattcctttttctttttgtctttgttcgttcgggtgtattgttcgtcctgttggctttctttgctttttgtgggttcactctttgtgtgttttttttcgtttcagagtggcatgcttcctcgttgccgtggagtcttttttcagtttggggctttcggcacctccgggggagctttgaatttgtcaacagttactttgattcttttttggagcttgcttgagtaggactggggtacacaggagttaaggtgcacacttgactgccggcacggagtccctggcacgagtgcttccttcactgggcccttggaacccagtggagccaaaaacctgtcggctgtgcccaagagtacaaaatatcttctcaaattgattgtgaatcgagcaatctttggaaccgaccaacgcctactaacgagtctgcgcttctgtagtttgctctgtgacacagctctcatgcaccgtgcttgttttttaagtagtgattctcaaactcgcctgtgcccc

SEQ ID NO: 42458 - DNA, 494 bp, Macaca Mulatta
  misc_feature (1)...(494): n = A,T,C or G
ngcatttttcaagtccgctggagccagtgcccaggaggagcaggcacagttccgagagcaggtgaaagagcacagagtgtgctgccagcgcctggctcacctggtggcctctgcccaacaggagccagacgcagtgatcccagccccagtgactggaggcgagtctgtgagtggggagacccaccaggccctgcaggaggtcatggagaagctggaggtgagtgagtcctggcatggtccaagaaaggcaggggtggggcaggtcgctgccaagatgtgacaccattattttggctccagagtggctttatggacctcctggaggagaagacggacctgagtgagnnnnnnnnnnnnnnnnnnnnnnnnnnnnnnnnnnnnnnnnnnnnnnnnnnnnnnnnnnnnnnnnnnnnnnnnnnnnnnaggtgaagctgctggagctgcaggagatgatgctgtggcttgtggtgactacaacaaggagcacagcaaat

SEQ ID NO: 42459 - DNA, 771 bp, Macaca Mulatta
  misc_feature (1)...(771): n = A,T,C or G
tgggtagagaaaaaggtacagcacagtggtgttcttagtattgctgtttacaatcgcagaaacttactagacgctgaactgctgccctagggggttggttaagcaaactggtgcttccactccatgagataggatgcagtcatttaaaatatttatgaaggtgttggacgtagtcatttggaataatggttttgttggggctcttaacttgtaagccagtagaaaagaaatctggctaatataattctttaagttatttccctacagcccatttttaaggttcccagtaactttcagaatcaaaggagatgtcggatggccaggcctcagtagtggcaaggcccaggcagttccagatccctgcagcctgccaccacccgagtctccaggtcatcagccaggcttgcgggtgatggaggaggactcggtaagggacagttcgactcggcaaatgtttagggagaacttgctgcggccaggcattgccctagaggcggggaatatggcagaaattgcagcagtacaggaaggcaaggnnnnnnnnnnnnnnnnnnnnnnnntcatgggaaggagttatcacacaggtcaggtaagtgtgagggagaactaaagccaggtaatgagatagagggcagtggggctgcagaggctgggatgggccacagactactgtagatatggtagcaatgtaagtctgttaagaaagtgacacacaacataggcctaatcacagcactttgggaggccaaggtggagaggatcactgagacc

SEQ ID NO: 42460 - DNA, 1547 bp, Macaca Mulatta
  misc_feature (1)...(1547): n = A,T,C or G
agatgaaagctcaagaagtagagctggctttggaggaagtagaaaaagctggagaagaacaagcaaaatttgngaaaatcaattaaaaactaaagtaatgaaactggaaaatgaactggagnnnnnnnnnnnnnnnnnnnnnnnnnnnnnnnnnnnnnnnnnnnnnnnnnnnnnnnnnnnnnnnnnnnnnnnnnnnnnnnnnnnnnnnnnnnnnnnnnnnnnnnnnnnnnnnnnnnnnnnnnnnnnnnnnnnnnnnnnnnnnnnnnnnnnnnnnnnnnnnnnnnnnnnnnnnnnnnnnnnnnnnnnnnnnnnnnnnnnnnnnnnnnnnnnnnnnnnnnnnnnnnnnnnnnnnnnnnnnnnnnnnnnnnnnnnnnnnnnnnnnnnnnnnnnnnnnnnnnnnnnnnnnnnnnnnnnnnnnnnnnnnnnnnnnnnnnnnnnnnnnnnnnnnnnnnnnnnnnnnnnnnnnnnnnnnnnnnnnnnnnnnnnnnnnnnnnnnnnnnnnnnnnnnnnnnnnnnnnnnnnnnnnnnnnnnnnnnnnnnnnnnnnnnnnnnnnnnnnnnnnnnnnnnnnnnnnnnnnnnnnnnnnnnnnnnnnnnnnnnnnnnnnnnnnnnnnnnnnnnnnnnnnnnnnnnnnnnnnnnnnnnnnnnnnnnnnnnnnnnnnnnnnnnnnnnnnnnnnnnnnnnnnnnnnnnnnnnnnnnnnnnnnnnnnnnnnnnnnnnnnnnnnnnnnnnnnnnnnnnnnnnnnnnnnnnnnnnnnnnnnnnnnnnnnnnnnnnnnnnnnnnnnnnnnnnnnnnnnnnnnnnnnnnnnnnnnnnnnnnnnnnnnnnnnnnnnnnnnnnnnnnnnnnnnnnnnnnnnnnnnnnnnnnnnnnnnnnnnnnnnnnnnnagggtatacaggaacgagacagtcaaattaagatgctcacagaacaagtagaacaatatacaaaagaaatggaaaagaatacttttattattgaagatttgaaaaatgagcttcaaagaaacaaaggtnnnnnnnnnnnnnnnnnnnnnnnnnnnnnnnnnnnnnnnnnnnnnnnnnnnnnnnnnnnnnnnnnnnnnnnnnnnnnnnnnnnnnnnnnnnnnnnnnnnnnnnnnnnnnnnnnnnnnnnnnnnnnnnnnnnnnnnnnnnnnnnnnnnnnnnnnnnnnnnnnnnnnnnnnnnnnnnnnnnnnnnnnnnnnnnnnnnnnnnnnnnnnnnnnnnnnnnnnnnnnnnnnnnnnnnnnnnnnnnnnnnnnnnnnnnnnnnnnnnnnnnnnnnnnnnnnnnnnnnnnnnnnnnnnnnnnnnnnnnnnnnnnnnnnnnnnnnnnnnnnnnnnnnnnnggccttgaaccaaagacaatgattgatttaactgaatttagaaatagcaaacgcttaaaacagcagcagtacagagctgaaaaccagattcttttgaaagaggcaagtgtgngattgaaagtctagaggaagaacgacttgatctgaaaaaaaaaattcgtcaaatggctcaagaaagaggaaaaagaagtgcaacttcagg

SEQ ID NO: 42461 - DNA, 748 bp, Macaca Mulatta
  misc_feature (1)...(748): n = A,T,C or G
ggggaagagaagagagagacccagagtgattgcagcatctgaaggacttggcctaatgttactgtctttgaggaataaggaagggggttatgagccaagaaacgcaagaagccactagaagctgtaaaaggcaaggataatgattcttccctagagcttccagaaaggagtgcaaccctgccaacaccttaattttagcactatgagatccattttggacttctgaactacagaactggtatccnnnnnnnnnnnnnntnnnnnnnnnnnnnngccatcttggctcactacagccttgatcacccaggctcaagtgattgnnnnnnnnnnnnnnnnnnnnnnnnnnnnnnnnnnnnaaatgtttgacatgggttggatctttggaggaaggaaagctctcacaacaactttggcacagatgtcccagtaagctctcctacatcatcaggaaaggtgattttggctgatcccttctcagaacatgttatttcttcagtaacccaagttttggtgggatgcacatccctgtttcctcagggacaagggctcccattccaagaatctcctattccaaaagaagcgctgtgcctctgtcatttttaaaagcacccatattaacacttggctgaaattcagttttatttatatatatttttttaagtcctggtttctggcatggtttgcattttgtaaaaacctctttttcctactttgggtcaacaacaaagaaggacaggtgccttggaat

SEQ ID NO: 42462 - DNA, 3959 bp, Macaca Mulatta
  misc_feature (1)...(3959): n = A,T,C or G
tgccaagctgttctacttttctggaatgctgcatggagaatatcaaaatcaagaaatgcacaatctgggccgttttattacagttgtgaagtttaggcctctcacatggcaaacttctcacccttatgtcctggcagacaggtaaaaagtgactgtaaactttttcttcctgggccatatatttcaaagctaaaaaggctagaaaaagaacagtgataggatttattttgtgcctgtttgaatagtgggggtagaagtgtagttgatggaaaatgtctatttatatcattgctcaaggatgctgtgcctttgggagtaaattaactatgagatgtttaggacaatgggaggacttggaaacatttaaggctacaggatgtggccccatcctacgttcatcctcagttttcagtgatgctgccttcgtgcccgggtgcttgagtccttcatgtgtgccttcagtttccttcctttgtgctcttctttgtgctgtggttttctcagcctggaataccctttttccacctgccagaatccaagccacagtaaaaattccagagcagaggctcaccctcttccagaaactgattttcttaatatgttcttcactcttccccaaccccaggtagacgtcatctccctgtctggtgtcttccagagatgaatgtcactttcagcctagagacacagttgtgtaaatggcccttgtcctctgctggatggtgannnnnnnnnnnnnnnnnnnnnnnnnnnnnnnnnnnnnnnnnnnnnnnnnnnnnnnnnnnnnnnnnnnnnnnnnnnnnnnnnnnnnnnnnnnnnnnnnnnnnnnnnnnnnnnnnnnnnnnnnnnnnnnnnnnnnnnnnnnnnnnnnnnnnnnnnnnnnnnnnnnnnnnnnnnnnnnnnnnnnnnnnnnnnnnnnnnnnnnnnnnnnnnnnnnnnnnnnnnnnnnnnnnnnnnnnnnnnnnnnnnnnnnnnnnnnnnnnnnnnnnnnnnnnnnnnnnnnnnnnnnnnnnnnnnnnnnnnnnnnnnnnnnnnnnnnnnnnnnnnnnnnnnnnnnnnnnnnnnnnnnnnnnnnnnnnnnnnnnnnnnnnnnnnnnnnnnnnnnnnnnnnnnnnnnnnnnnnnnnnnnnnnnnnnnnnnnnnnnnnnnnnnnnnnnnnnnnnnnnnnnnnnnnnnnnnnnnnnnnnnnnnnnnnnnnnnnnnnnnnnnnnnnnnnnnnnnnnnnnnnnnnnnnnnnnnnnnnnnnnnnnnnnnnnnnnnnnnnnnnnnnnnnnnnnnnnnnnnnnnnnnnnnnnnnnnnnnnnnnnnnnnnnnnnnnnnnnnnnnnnnnnnnnnnnnnnnnnnnnnnnnnnnnnnnnnnnnnnnnnnnnnnnnnnnnnnnnnnnnnnnnnnnnnnnnnnnnnnnnnnnnnnnnnnnnnnnnnnnnnnnnnnnnnnnnnnnnnnnnnnnnnnnnnnnnnnnnnnnnnnnnnnnnnnnnnnnnnnnnnnnnnnnnnnnnnnnnnnnnnnnnnnnnnnnnnnnnnnnnnnnnnnnnnnnnnnnnnnnnnnnnnnnnnnnnnnnnnnnnnnnnnnnnnnnnnnnnnnnnnnnnnnnnnnnnnnnnnnnnnnnnnnnnnnnnnnnnnnnnnnnnnnnnnnnnnnnnnnnnnnnnnnnnnnnnnnnnnnnnnnnnnnnnnnnnnnnnnnnnnnnnnnnnnnnnnnnnnnnnnnnnnnnnnnnnnnnnnnnnnnnnnnnnnnnnnnnnnnnnnnnnnnnnnnnnnnnnnnnnnnnnnnnnnnnnnnnnnnnnnnnnnnnnnnnnnnnnnnnnnnnnnnnnnnnnnnnnnnnnnnnnnnnnnnnnnnnnnnnnnnnnnnnnnnnnnnnnctcccaaagtgctggctttataggtgtgagccaccacgcccagcaaagccaacttttctcatgatttttaaaggtaatttgtaaaatccttgttaggtttgatgacaggtaccatatgaagggcagcattttataacccgtatcttaaacatcgtctctggaagttaagagcctccaatgggttctctgtagagtgcacatgataccgcactcaggcagttcatggagtgtaagaaatatcttagtgctttgtcatttcacattttaaccaagaaaaaatacactttaataagtttagcttatacttcccttccccttcaggtatctactgtgcgtttcagtcaacaatacagctcatgttcgacaatattccttgatgacagcacagccagccagccttatcttacaaagacaataatatcnnnnnnnnnnnnnnnnnnnnnnnnnnnnnnnnnnnnnnatgcagatggatctttgagcatatttgatgaacagttatactcattnnnnnnnnnnnnnnnnnnnnnnnnnnnnnnnnnnnnnnnnnnnnnnnnnnnnnnnnnnnnnnnnnnnnnnnnnnnnnnnnnnnnnnnnnnnnnnnnnnnnnnnnnnnnnnnnnnnnnnnnnnnnnnnnnnacacacccacgcccgttcgcaagcagtccaagcgctggtccaagctgtttacatctgagaaagggagtgacccagacaaagagaagaaagccccggagagccatgctgacaccatcgggagtggcagagccatccccattaaacagggcatgctcttaaagctaagtggaaaatggctgaagaaatggaaaaagaaatatgccaccctctgtgacaatggcatgctcacctattattcaagcttaggtgattatatgaagaatattcacaaaaaagagattgaccttcgaacatgtaccatcgaagtcccaggaaagaggccacccctagccacactggcctgtgcacccatttccagctctaaaggcaatggcctattcaaggacatgaacagtctatgtacctcagccaattcagacaccggactgggtgactccatatgctccagccccaatatctccagcaccaccagccccaagctcaacccacccccctcttctcatgccaacaaaaagaaacaacaaaggaagaaatgcaccaacaacttaaaagacaatggcctgtctggcactgctgaaaaacaagcagaaaactttatcattgtgtccctcactggccaaacgtggcactttgaagccacgtcatatgaggagcgggatgcctgggtccaagccatcgagagccagatcctggccagcgggcagtcatgcgagagcagcaaaagcaagttccggctgatgagccagagcgaggccatggccctgcagtccatctgaaacatgtgtgggaactcccactgtgtggactgtgagacccagaatcctaactgggccagtttgaacttgggagtcctcatgtgtattgaatgctcagggatccaccgtaatcttgcacccacctttcccgagtccgatctctggacttggatgactggccagtcaagctcatgcaggttttgtcatctattggcaatgagctagccaacagcatctggcaagagagcagccggggcggacgaaaccctcagtagattccacaagggaagagaaggaatggtggatccgtgccaaatatgaacagaagctcttcctggctccattaccctccacggagctgtccctgggccagcacctgctgcaggccaccgctgatgaggacctgcggccagccctcctgctgctggcacatggctcccgggaggaggtgaacttgagatctgtggggagggagacagctgcacggcgctccatctggcctgccgcaaggggaatgtggtcctggtgcacctcctgatctggtacggggtggatgtcatggctggagatgcccacgggaacacagcgctggcctacgcccggcaggcctccagccaggagtccatcaacctactgctgcagtactgctgccccgacgagcgcgtgtagtatcaggttaattttatttgactgcagtctccttggt

SEQ ID NO: 42463 - DNA, 246 bp, Macaca Mulatta
aagaaggccaagagaaagaaggtgtctccggcccctgctgtcctgaaaaagcaggaggctaagaaagtggtaaatcccctgtttgagaaaagacctaggaattttggcattggacaggatacgcagcccaaaagggacttaacttgctttgtgaaacggccccactgtatcaggttgcagcagcagagagctatcctcttataagcggctgaaagcacttcctgagattaaccagttcacccaggc

SEQ ID NO: 42464 - DNA, 671 bp, Macaca Mulatta
tcgtcactataggcattatgagaataaatcgcctgattttaaaacggagtccacttcacccaagtttgcttcctctccttcctctccctcccccatcttattcaacttactttttaaaaatatgtttttaaagtttgttttataaatttcatttcaaggaatattagcaatgaggccttgtgagcagaaatatgtttttaatagcaaatcctgtatctcttttttggatgaactatacttctcaacaattagattttgaagatcctaagattttgagaaagttttctgctggcctgtgtgagctgtttcacaaattaatttaaccaagggtagttatagcatcaatatgatgacattatttagaggggacaatagtatactctttttctgttcacatgaaaggctgtctggcctaccccagatcactttgtatttgggtgtcatacatttcagaagacagctgcatggcaagacagtttttctgccaaagtaaagatgaacctagggggaattcactgggtaaatcagaccaaatgctcacctctctctgatttatctggataattgcctattctctcctgtctacatgtccggttcgtgcccaatctgtagaaagcacactcatacgcagacaggctcctagtatgtgcacaacccaattggaccacttg

SEQ ID NO: 42465 - DNA, 322 bp, Macaca Mulatta
aaaacaagatcagactctcactggggtaggcaagagactgaggaagtgaaaccagcccatgtggtgtcccagcacagcgcctgctaaggagggagggtgggaaagcccaggcctccgttgcggggacaggaggacgcaggagagggctgaggtggggaggaacaactggtgtactgggggagatttgggacgagggggaaccatgagcagaacaaacaagccaggaatcatggtaagggtgcaagggcctgaggccagttgtttccataaagaagactccatcattataaaaataatttttagtagttaaaaaacacacata

SEQ ID NO: 42466 - DNA, 776 bp, Macaca Mulatta
  misc_feature (1)...(776): n = A,T,C or G
gggaggcattgaggcagccagcacaggggtttctgctgaagtggcaggcgcagcttgaggaacccgcagataagttttctctctttgaaagacagagattaatacaactacttaagaaatgtagtcagtagcttactaagattttgcttagcattaggttcttaacgtaatttgaataagattttaagagaaaatatgaagagttaaaagtgtagcgtgagnnnnnnnnnnnnnnnnnngtttctaaaacatgacggaggttgaggcgaagcttcttcaagaagtaaaaaaatgtatttaaaagaaaattgagagaagggacgccagagccctgaattaataccagtagaagggcagtgcttttagattaaaatgaaggtgatttaaacagagcttaaacgttgtttgaaaagttgtaggtgattaaaataatttgaaggcgatcatttgaaatgagattaaatcgaaggtcattaaaagaccttgaactccatgacgcagggagagttgcgtcatttaaagcctagttaatcttaacgcgtttgctaaacgcagacgaaaaataggaaagattaattgggagtggtagtcagaaatttctgcagcagtagaacgtgctcgtaaacggcgtgaagaggaagagcgaagaatggaagaacaaaggaaggcggcttgtgcaaagaaactgaaacgattggatgagaagcttggcatcctggaaaaaacaacatctccagagggaaattagggaaagggagcgagaaaaaagaacgggg

SEQ ID NO: 42467 - DNA, 710 bp, Macaca Mulatta
  misc_feature (1)...(710): n = A,T,C or G
caggtgtaaaatacaggcttagtttattcgtaatgctgagtgcatctgccagncccttttttattattaagtagaagattgtatctgtgcccctttttcatagtggaaggtatatagttgagtataaaatgatttccttttgcattatctgtattaaaaaaacagggtagttacattaaagcctaccaaattgatggtgaatttatcagatgaacatttttgtggtgcagatggttctaagtatcaggtgacagggtattctactctttctagtcaattaaaattgataatgcagcatgattcataaactgaccagctgtgcctccttttattttgagcaccctgtagtcactataataaatttctaagccaaatttttcaaacaaaatagttcttatagaaggaaaaataatatatatgtgtgtgttcatgcatgcacacagaatgacctatgaaagggaacttaaattttgccggtaaaacaaacatatctctgcagactatgattatactttataagcatttaaatacagttatatttatttccttgaatatattacttgggtaattaattttatacttgattgcaaagagcactatatagcagttgggaccagctcttgacttggcttgacttggcttattgatgagtctattggatcacgactaacaaatacttcgttattcaaattctacacaaatatagctac

SEQ ID NO: 42468 - DNA, 698 bp, Macaca Mulatta
  misc_feature (1)...(698): n = A,T,C or G
ggctttgtggggagatgggaggtgggagaaaatataaacatttatgtatagatctttcaaaatatatgacggtatacacatatcttctgagtcttgctgtttttacctggtaatatttagaaacatttattttgagataaaggagacagcacttttaagttgaacctgtagttttaaaaagtacatttcaagtaagccaaagcagagaagtaaatgtatttttcattgttgtatcagaattttgaatttactattttaaaaattcaagagttttgtagctgatctatttcctcccctcagccatcccaaataggtcatttgtcaacagatttaagaatgtttaggaacaacaactttgggaaacgggaaacaatttggcataagtgggtgtgccataacctctcatagccattcactctcngatacataccctagagaaactctcacacatgtgtaccagggggatggattttaaccattgcgtgtaatagggagaaaaagaagaaaaaacctggggaagacccctgattgtcccacaaacacgtgcgtttggattaaatactggtggggtatattccccaaccgttggaaatttcccccgaaaaatgaaaacctgaaaccttgccccctctgttattgtgaaaacattgggacccaaaacctcccacccaacccggaaaagggttcccaaaaaaaac

SEQ ID NO: 42469 - DNA, 743 bp, Macaca Mulatta
ggctagatttatgacctcagtttcctcatttctaaaatagagacaattgtgtctacctcctagattgttttgaatattaaatgagcagatatctgtaacatacttgtaaaaaaacaaaatacctgatagatagtaagaactcattacagatagtagtggggttgattatagctattactattgttgttgatattagtgatgactgagtgaaaaaagagccttgtaagccagaaataagccagttagccaaagttaaataccgtaaaacagcaagaagctttttccctctcgctgccagtggttgatcaatgggatgtggggtgatgacactgtggacacaagttacggaggataaaccagacatgcaagcattggcccatggaagttggcagtaaggcggaaagatcatgcctttcctcccacaacatagtaagcagttgcgtggcatccgcggaagcattttgcctgtaaaaccttcctcagagacatgcacagaagggaaagtaggtgctacaagaaagagaaacagataacaggggaggtagagacagggatggagggtggggagaatatgaattaatttggattaaatggatgagaatcagaagtatttatttgggaattggggtgaatttggagcacatgggggaaactgaaaaacaaaaggtgaataattttattgtgggtggttagaatgaaacctaaggaaattaatggaaaaaaaaggcattgtaaagggaatt

SEQ ID NO: 42470 - DNA, 770 bp, Macaca Mulatta
  misc_feature (1)...(770): n = A,T,C or G
gggaagataatggagtggcgtctctgtgtggagcgctgaagcacccggcctgcagcatacaggagctgtggttgatgggttgtttccttacttccgattcctgtaaggacattgctgctgttcttatttgcaatgaaaaactaaagaccctgaaacttgggcataatgaaataggagatgctggtgtcagacagttatgtgcagctttgaagcatcctaactgtaaattagagcaacttggtctgcaaacatgtccgatcacccgtgcctgctgtggtgacctcgccgcggcactcgttgcctgcaaaacactgaggagcctgaacctcgactggattaccttggaacctgatgcagtggcggtgctgtgtgaggcactgagccacccggactgtgccctgcagatgctggggctgcacaaatctggctttgatgaagaaactcagaagatgctgatgtctgtggaagaaaaaatgccccacctgaccatttcacacgaaccctggattgacgaggaatacaagatcaggggtgtgctcctctgatggggaacaccctgaagtagtcttctcacaaaagctttccttggccaccgtgggcccttctcctggcacctctgtcctggtattgtacatcatggcagcaaggctgtgatttcaaggctactccctgggtggtctaacaatatgattatggaaacgtgattcantgtatgttgcttgactgtcttttgccttggggtcctataaccccccttgttcttttagaaa

SEQ ID NO: 42471 - DNA, 766 bp, Macaca Mulatta
  misc_feature (1)...(766): n = A,T,C or G
ggatatgtggtagaaggaaactggcactggaagtcagccggccatgttaactcatagctctgtgaccaaccagctctgtgcctaactggccaccactgctttccgggtgcacaagactatctccaaagccccttctaactctaaacatttcataaaaatcttacaaaatcttcgaatgttttgaaatctcagattattgccttgaaattccatttcccattaaagggtaagattccttggagaaacgggtgattcaggcctggggcacagaatgaacctgcaataatcttgtcatttgagggcatggatatcacagaaaactacacaggtaatgtcaaaatgactaggagctaatgtgaagttcccactggccaagatgagacaatctgagtatcaacagggaaaataaccacagtggattgaaacacatcaaatatatataaatctgagagttcataataataccacaaatgacaacataataataccacaaataccactaattggccaccactgaagggtattaagaaactaacttgtacnnnnnnnnnnnnnnnnnnngggcggatcacgaagtcaggagattgagaccatcctggctaatgcgggtgaaaccccatctccactaaaaaatagaaaaaaaaatttaacccgggccgcaagtggttgggccgccttgtaattctcagcctaactccgggaaggcttgaaagcagggagaaattgggcgttgaaacccccggggaggcccgggaacccttggcca

SEQ ID NO: 42472 - DNA, 209 bp, Macaca Mulatta
ggtcggcccaaggacaacccctcggtcactctgttcctgttgtcctctgaggagctccaagccaacaaggccacactggtgtgtctcattagtgacttctatccaggaatcttgacggtgacctggaaggcagatggtacttccatcacccagggcgtggagatgaccacgccctccaaacagagaacaacaagtacgcggccagcagc

SEQ ID NO: 42473 - DNA, 231 bp, Macaca Mulatta
ccatctcctgcaggtccagtcagagccttgtatacagtgatggaaaaacctatttgtattggtacctgcagaagccaggccagtctccacagctcctgatgtatttggtttccaaacgggcctctggagtcccagacaagttcagtggcagtgggtcaggcactgatttcacactgaaaatcagcagggtggaggctgaggatgttggggtttattactgcatgcaagctc

SEQ ID NO: 42474 - DNA, 381 bp, Macaca Mulatta
tcctggcatccatgatgcaccacgtgctggcaggtgactcaggacggtaagcatttctctgccctgcatgccaagtgagggtgtctttcggatttccaagacgcacaaggagcaggttcttggctaaccactaatggcatggtgacttcctctcctagagtggatgatctgcactcattgctcagtgaacaaaactttatgggggccgaaggtctttaacgtcattggctcacccactgctcggcctgtggtgtcaaacgtcctgcctcttcaaatgtgcttggatcgatgatgagtcccctataaaaacattccttggaaaagctgaacaaaatgagtgagaactcataccgtcgttctcatcggatctgaggtccagca

SEQ ID NO: 42475 - DNA, 973 bp, Macaca Mulatta
  misc_feature (1)...(973): n = A,T,C or G
nnnnnnnnnnnnnnnnnnnnnnnnnnnnnnnnnnnnnnnnnnnnnnacgggcggatcacgaggtcaggagatggagaccatcctggcgaacacgnnnnnnnnnnnnnnnnnnnnnnnnnnnnnnnnnnaactagccgggcgaggtggctggcgggcnnnnnnnnnnnnnnnnnnnnnagacnnnnnnnnnnnnnnnnnnnnnnnnnnnnnnnnnnnnnnnnnnnnnnnnnnnnnnnnccggccactannnnnnnnnnnnnnnnnnngagccagactccgtctctaaaaaaaaagaatagaaagaatgttatatggagggtaaaattaaataacaaaaatataaatttacttgtactgtccctctcaggctctcgtaaaagctattcttaaaacattacatgttgggctcgccgggtccacgataaggtacagttagacttatggaaataatttctttttcactttacagaatatccacatgtcagaggaaattgatagctattgttattcccttacccaaatatgaaatatactcaaagataagggacaccacgaagcggttaccaaatgntaagctcacgaaaagatgacctttataaattgtcttcatatcagtttatacttattgaggaagggtgttagagaaatcgagtgactaccgtgttttacggattacgcacgcatccagaactcattagacgccagatctagttgatccgatatagtaagagatttggttgtagttagctgtggataatcatatgcgccaatatctgctgtcgactatcacgatcaacaatatagtagtaagagaatgtagttgtatatagagagaacattcgtgaaaactgaacatccatctacgatcgatattgttgcctcacctaacgacaacatatgatgtctatgctagctgttctgcactgtgatagcaatagtacttacgatgaaacaagaaacatgatctgctatt

SEQ ID NO: 42476 - DNA, 778 bp, Macaca Mulatta
gggaaggagcagagaggcagggtagaagacagaaagggggtctatgtggtaactaaagaatgtttctgttttgtaattattgtgtgtgtgcgtgtggttttttttgttgttgtttgcttaagagaatcaaaaactgaaaaaaatgagaatacaggaaatggctcttgtatatatttttttgccatgtttaccacttgtgaatgctctgctgtctttgcttcaagagagatttgttcactgcccagctcgttttgtgtcctgagccctatgcccagcccaccttataaatcatgcctgtttagatgtttgattttgttctgtgtgccattgtcatcttaagggtgtataactcagacatgccagacatcaaattaagctcaaattaagctctcgtttaaatgtttaaacacctaatttatattctaattgatccccgccactgatgcatgtactttagctacttctgctaaataagcatattaattttccacatcagaccatcagatcttaagaaccaacagttatctagaattccgtgtctactaatgtttcatctgcatgcagcctttattgattttgtagcaaaatataaagtgatcattatgtagcttctagattaaaaaattttgtgcgtgaagttgctttgtaaagagcatgtgaaattaatgggacagcgtgtcctttgtgttagatgttagagcaaaagaaaggcttatagtattagtattggagcactttgaagataagtatttttcagaaacgatgtaggagtttaaaa

SEQ ID NO: 42477 - DNA, 628 bp, Macaca Mulatta
  misc_feature (1)...(628): n = A,T,C or G
cttaaaacttacattaaataaatttgtaagcttttctcttgttaatctatcctttgttagagacccaatcaaggaccaaaaagagtagaaggaaaaagatatttttcctctcctacaaaccaaagtcaacagtaaaataactgtaacaaaaatctatttcatgttttctgtatctttctgtactaactaaaagccctggttcctactgcctagagtcgactttctaaaaagctttagagaaaccatttgggatcccagaggcttcctaatctgtgctctgctgtaacctatttacaagaaggtcttgtttcaaaatctctcactatacaattaggccagcattccaagtccataataatacctctgagcaatggctttgatataatgggtcttttaaatgaactataataagnnnnnnnnnnnnnnnnnnnnngtttgatttttatgcatcattaataacacatttcttggatttaaatcagcaagtcataactgtatatggcatagtgtttctaccactaaatttgtatcttaattcattctttctagcccttaccttctcttacttttatttctatttaatttcatcactatctaaatctgtaccagcagcagatactgtctgact

SEQ ID NO: 42478 - DNA, 293 bp, Macaca Mulatta
  misc_feature (1)...(293): n = A,T,C or G
tggctactctgatctatgttgataaggaaaatggagaaccaggcnacccgtgtgactgctaaggatggactgaagctggggtctggaccttcaatcaaagccttagatgggatatctcaagtttaacaccacgttttggcaaaacgttcactgctccatcagccttacctaaagctaccggaaaggctttgggaaactgtcagagagctacagaaaagtcagtaaagaccaatggacccagtaaancaaaacagccaagcttttctgtcagaaagatgactgagaagactgtt

SEQ ID NO: 42479 - DNA, 607 bp, Macaca Mulatta
  misc_feature (1)...(607): n = A,T,C or G
gactttttaaagtctgggaatagacttttaaaataagctataacacttaaaaaggagagatatactatgttcccagataggacaattgaaaattctggagatgacagtttttcaaaaatatattgaggccagctgcggtggcttacacctgtaatcctggcactttgtgaggccaaagcgggcagatcagctgaggttgggagttcaagaccagactgaccaacatggannnnnnnnnnnnnnnnnnnnnnnnnnnnnnnnnnnnnntgtggtggtgnnnnnnnnnnnnnnnnnnnnnnnnnnnnnnnnnnnnncnnnnnnnnnnnnnnnnnnnnnnncnnnnnnnnnnnnnnnnnnnnnnngcannnnnnnnnnnnnnnnnnnnnnnnnngagcgaannnnnnnnnnnnnnnnnnnnnnnnnnnnnnnnaaaatcccaacatattgacaaatacatccacataaaaatataaaacttctgtgttctgtgaaagctactataaatgaagtttagagaaagttatttgccacctatgtcaggattaaaatagttaattgatcctatgaatcaattagcaaacaactcgatgaaagatgggcaaatgat

SEQ ID NO: 42480 - DNA, 99 bp, Macaca Mulatta
  misc_feature (1)...(99): n = A,T,C or G
ccccgctgctcagcactcgaccggtagaatctgagcgatgccttccacgctccgtgccctgctctgnnngggctgtgtctgagccagagaatcagcgcc

SEQ ID NO: 42481 - DNA, 791 bp, Macaca Mulatta
  misc_feature (1)...(791): n = A,T,C or G
gggtgacttacgttcttgtaaagcatctctttgcatagattcatggcccaaacaatatataaagagtggagaaggaaccgcagttgcaaatagttcaaatcattgctccatcttaactctgcagttcacaaagtgtgaagaaatttgatcatctcaaaaaagataacaggaaaaaaaataatgttttgttctgtgactttaaagttttgcaatattttacgtacatgataacgggtactttaacaagaacccttgatacttttgttattgtattcaatatatgcttataatacaacaggatcgtattgnnnnnnnnnnnnnnnnnnnnnnnnnnnnnnnnnnnnnnnnnnnnnnnnnnnnnnnnnnnnnnnnnnnnnnnnnnnnnnnnnnnnnnnnnnnnnnnnnnnnnnnnntttnnnnnnnnnnnnnnnnnnnnnnnnnnnnnnnnnnnnnnnnnnnggggcccggggcccaaagggaaaagaaaaaacggccaacttttttccaagaaaatccgggcaaaaaaaaagggtgggatnnnnnnnnnnnnnnnnnnnnnnngggaaacaaannnnnnnnnnnnnnnnnnaaaggggttttagagggtttttccgggttctttcccaaggggatcccaagccaccctccatatttaannnnnnnnnnnnnnnnnnnntgcaatttatttaaaaaaaagggtggaaattaacaaaaacaccttcccccccccaaggtggaaaacccctctccaaaagggggctgtttagagaaacccggaataccccccacgc

SEQ ID NO: 42482 - DNA, 131 bp, Macaca Mulatta
caactgattgctgaaagttcaagtctactatcagtatatagtactcatttcatcatattctacattaaccagggtaaaatatccatttataatattctgcatttggtaaactgggcatgcccctttattca

SEQ ID NO: 42483 - DNA, 1041 bp, Macaca Mulatta
ctgcggtgatttcaggctgccctggcagagagcacagtgcctgcagacatgctgtcactgctccacgcgtcaacactggcagtccttggggctctgtgtgtatatggtgcaggtcacctagagcaacctcaaatttccagtactaaaatgctgtcaaaaacagcccgcctggaatgtgtggtgtctggagtaacaatttctgaaacatctatatattggtatcgagaaagacctggtgaagtcatacagttcctggtgtgcattttttatgacggcactgtcaaaaaggaatccagcattccatcgggcaaatttgaggtggataggatacccaaaacgtctacatccaccctcaccattcacaatgtagagaaacaggacatagctacctactattgtgccttgtgggaggttgagcagtttggcagaaaagtcaagctatttggtcccggaacaaagctcatcattacagataaacaccttgatgcagatgtttcacccaagcccactatatttcttccttccattgctgaaacaaacctccataaggctggaacatacctttgtcttcttgagaattttttcccggatgttattaagatacattggcaagaaaagaagagcaacacgattctgggatcccaggaggggaacaccgtgaagactaacgacacatacatgaaatttagctggttaacggtgccagaaaagtcactggataaagagcacagatgtatcgtcagacatgagaataataaaaatggagttgatcaaggaattatctttcctccaataaagacagatgtcaccacaatggatcccaaagacaattgttcaagagatgcaaatgatgcactactgctgcagctcacaaacacctctgcatattacatgtacctcctcctgctcgtcaagagtgaggtctattttgccatcatcgccgtctgtctgcttagaagaacggctgtctgctgcaatggagagagatcgtaacagacggtggcacaaggacgccatcttttcctcatcggttattgtccc

SEQ ID NO: 42484 - DNA, 795 bp, Macaca Mulatta
  misc_feature (1)...(795): n = A,T,C or G
ggaacccgtggtatctatgcttaatgaaaattcagaagaccctaatttatacagagctatatgtcatctactaattatattctgtaaagggaacaggctggaattgatgtctctttgctattttttagatactctggcttttatgtcttacttggaaaggactgatgtgaggtatgtgtgtgaagtgctgagagtggagagaataaaaggtgtaagagtatttattgacatggccaactttatatttttacttttccatgaaccctactgtgaatcctggcttctatcatggactttaaaatcttttacttacagtataatctgagaacatagttgttcttttattcattggttggttggttttaatggactctctatgcatttgttcaatccttccatcattttatcatttcttcatcacttcatttatatggtcaatacagaaagtatttattgggcatctactatagtgctagtcatgtaacctctgatttattttcaacaatttttgctggtaccattccattcatcattcaacaattactagtacttaaccctatacccagccttaaaggaaataccgaccaagggaatcttttttggaaaggcccattgaacttttgttgactggggggtgggtttatgtggggaatccactccctgggcctggttttaaggcctctaaaaccaggggatcccattttcctatcctaatgaaaaaaagaaaatgcccgggggcctggggccaaggttgggccttacntccctggtaaatccccaaaccattttttggag

SEQ ID NO: 42485 - DNA, 652 bp, Macaca Mulatta
  misc_feature (1)...(652): n = A,T,C or G
aagtgagacaacattaattataggtattatgtccaaaatacattataaaattcttcagtttatcattaaattttttaatgtaattttagtatattttagttttaaaaagtccacattttgatgtttaactttgcctttaatcaggtaagtttttttttatgttattacttatacaagaattaggcttcaaaagtttatccattattaaatgagtgtaatatgtgtgtatgactcttccaaaattatttcataaaatgtgaagttgaatggttattagtttattagatggtgtcagtttttgaattagttcttatatttatgcaaaatgatccaagggaaagatttttagtactattttagttttccttgtctaaactatgttacacatgttaaagtagagaaaattctccatttgcaattttattgaatagttttttacataaggttttcatgttaagttgattttggtctgagatttcatcctaattaatactaacagttcaataaaatatttattttttaatttgagagaaggtcttgctctgccgcctagactgcagtgagccaagattgtgctccagcctanggtacagcaagactctgtctcccccnnnnnnanannnaaaannnnnaanannaaaccctgtcggcc

SEQ ID NO: 42486 - DNA, 829 bp, Macaca Mulatta
  misc_feature (1)...(829): n = A,T,C or G
ggctctgggctaagcctgacacagtggcctgacttggcttctcaggggaggcacaaaagggccaatgggagctggaggaacctgtttccctaagcaatgtggggacccagaaaaatcaatactgcccatcatggggagtcttggaaggtgagattcccaaaggtcttcaggaagatcaggctcaaatgggcatctcagctcctgggaacgctagaaaaggatctaggcctccagggcttgatccttcaactgtaagataggagacttggccagctttcctcatcagggtgtggttagggtgagcacagcacatctcaccccagctcactcactagctgccctaaccccagctttgttttgctttttgaaacaaggtctcactaggtcaccgcctatgcatgctctgggcctctggccagaccagggcaaaaattagcttgttttctggtggtaataatcttctggggtcctgggacgggagagaggaatgccattgcaggcaaaactggggcttttatccaccctcatattccaccttctaaaatggtgcccaagggctgggttgggggacaaatttttatcctacgttacctttccttcnnnnnnnnnnnnnnnnnnnnttgggaacccttttggggaaaaaagtccctggaacccctaaaaaatttaagaaatttttaattttgggccttaaaccttggggggtaattccccacctggttaacctccaccacttttggaaggccccaaggggcgggaaggacccacttttgagggccagaaaatttcgagaaccaaccctgggccaaagtggggagaaaaccccccg

SEQ ID NO: 42487 - DNA, 4097 bp, Macaca Mulatta
  misc_feature (1)...(4097): n = A,T,C or G
agcctctccggatgcccgatcgctgcagcagagaaactggccaaggcacaggaaaagcaccagagctgtgacgtgtccaagtccagccaggcctcggaccgcgtgctcagnnnnnnnnnnnnnnnnnnnnnnnnnnnnnnnnnnnnnnnnnnnnnnnnnnnnnnnnnnnnnnnnnnnnnnnnnnnnnnnnnnnnnnnnnnnnnnnnnnnnnnnnnnnnnnnnnnnnnnnnnnnnnnnnnnnnnnnnnnnnnnnnnnnnnnnnnnnnnnnnnnnnnnnnnnnnnnnnnnnnnnnnnnnnnnnnnnnnnnnnnnnnnnnnnnnnnnnnnnnnnnnnnnnnnnnnnnnnnnnnnnnnnnnnnnnnnnnnnnnnnnnnnnnnnnnnnnnnnnnnnnnnnnnnnnnnnnnnnnnnnnnnnnnnnnnnnnnnnnnnnnnnnnnnnnnnngagcagcttcgactacacgcacgacatggaggcggcccacatggcggccaccgccatcctcaacctgtccacgcgctgccgcgagatgccgcagaacctgagcaccaagccgcaggacctgtgcgccacgcgggaaccctgacatggaggtggatgagaacggacccctggacctcagcatgaacaagcagaggccgcgggacagctgctgccccatcctgacccccctggagcccatgtccccccagcagcaggcagtgatgaacaaccggtgtttccagctgggcgagggcgactgctgggacttgcccgtagactacaccaaaatgaaaccccggaggatagacgaggacgagtccaaagacattacnnnaagacttggacccattccaggaggctctagaagaaagacggtatcccggggaggtgaccatcccaagtcccaaacccaagtaccctcagtgcaaggagagcaaaaaggatttaataacnnnnnnnnnnnnnnnnnnnnnnnnnnnnnnnnnnnnnnnnnnnnnnnnnnnnnnnnnnnnnnnnnnnnnnnnnnnnnnnnnnnnnnnnnnnnnnnnnnnnnnnnnnnnnnnnnnnnnnnnnnnnnnnnnnagcctttcaggttgcccgagagcaaagaaaagcggtatcaggatagcacagagcaaagaagataaggaagatcaagagcccatcaggtnnnnnnnnnnnnnnnnnnnnnnnnnnnnnnnnnnnnnnnnnnnnnnnnnnnnnnnnnnnnnnnnnnnnnnnnnnnnnnnnnnnnnnnnnnnnnnnnnnnnnnnnnnnnnnnnnnnnnnnnnnnnnnnnnnnnnnnnnnnnnnnnnnnnnnnnnnnnnnnnnnnnnnnnnnnnnnnnnnnnnnnnnnnnnnnnnnnnnnnnnnnnnnnnnnnnnnnnncagcctgtcaggatgcccgagagccacgtcagnnnnnnnnnnnnnnnnnnnnnnnnnnnnnnnnnnnnnnnnnnnnnnnnnnnnnnnnnnnnnnnnnnnnnnnnnnnnnnnnnnnnnnnnnnnnnnnnnnnnnnnnnnnnnnnnnnnnnnnnnnnnnnnnnnnnnnnnnnnnnnnnnnnnnnnnnnnnnnnnnnnnnnnnnnnnnnnnnnnnnnnnnnnnnnnnnnnnnnnnnnnnnnnnnnnnnnnnnnnnnnnnnnnnnnnnnnnnnnnnnnnnnnnnnnnnnnnnnnnnnnnnnnnnnnnnnnnnnnnnnnnnnnnnnnnnnnnnnnnnnnnnnnnnnnnnnnnnnnnnnnnnnnnnnnnnnnnnnnnnnnnnnnnnnnnnnnnnnnnnnnnnnnnnnnnnnnnnnnnnnnnnnnnnnnnnnnnnnnnnnnnnnnnnnnnnnnnnnnnnnnnnnnnnnnnnnnnnnnnnnnnnnnnnnnnnnnnnnnnnnnnnnnnnnnnnnnnnnnnnnnnnnnnnnnnnnnnnnnnnnnnnnnnnnnnnnnnnnnnnnnnnnnnnnnnnnnnnnnnnnnnnnnnnnnnnnnnnnnnnnnnnnnnnnnnnnnnnnnnnnnnnnnnnnnnnnnnnnnnnnnnnnnnnnnnnnnnnnnnnnnnnnnnnnnnnnnnnnnnnnnnnnnnnnnnnnnnnnnnnnnnnnnnnnnnnnnnnnnnnnnnnnnnnnnnnnnnnnnnnnnnnnnnnnnnnnnnnnnnnnnnnnnnnnnnnnnnnnnnnnnnnnnnnnnnnnnnnnnnnnnnnnnnnnnnnnnnnnnnnnnnnnnnnnnnnnnnnnnnnnnnnnnnnnnnnnnnnnnnnnnnnnnnnnnnnnnnnnnnnnnnnnnnnnnnnnnnnnnnnnnnnnnnnnnnnnnnnnnnnnnnnnnnnnnnnnnnnnnnnnnnnnnnnnnnnnnnnnnnnnnnnnnnnnnnnnnnnnnnnnnnnnnnnnnnnnnnnnnnnnnnnnnnnnnnnnnnnnnnnnnnnnnnnnnnnnnnnnnnnnnnnnnnnnnnnnnnnnnnnnnnnnnnnnnnnnnnnnnnnnnnnnnnnnnnnnnnnnnnnnnnnnnnnnnnnnnnnnnnnnnnnnnnnnnnnnnnnnnnnnnnnnnnnnnnnnnnnnnnnnnnnnnnnnnnnnnnnnnnnnnnnnnnnnnnnnnnnnnnnnnnnnnnnnnnnnnnnnnnnnnnnnnnnnnnnnnnnnnnnnnnnnnnnnnnnnnnnnnnnnnnnnnnnnnnnnnnnnnnnnnnnnnnnnnnnnnnnnnnnnnnnnnnnnnnnnnnnnnnnnnnnnnnnnnnnnnnnnnnnnnnnnnnnnnnnnnnnnnnnnnnnnnnnnnnnnnnnnnnnnnnnnnnnnnnnnnnnnnnnnnnnnnnnnnnnnnnnnnnnnnnnnnnnnnnnnnnnnnnnnnnnnnnnnnnnnnnnnnnnnnnnnnnnnnnnnnnnnnnnnnnnnnnnnnnnnnnnnnnnnnnnnnnnnnnnnnnnnnnnnnnnnnnnnnnnnnnnnnnnnnnnnnnnnnnnnnnnnnnnnnnnnnnnnnnnnnnnnnnnnnnnnnnnnnnnnnnnnnnnnnnnnnnnnnnnnnnnnnnnnnnnnnnnnnnnnnnnnnnnnnnnnnnnnnnnnnnnnnnnnnnnnnnnnnnnnnnnnnnnnnnnnnnnnnnnnnnnnnnnnnnnnnnnnnnnnnnnnnnnnnnnnnnnnnnnnnnnnnnnnnnnnnnnnnnnnnnnnnnnnnnnnnnnnnnnnnnnnnnnnnnnnnnnnnnnnnnnnnnnnnnnnnnnnnnnnnnnnnnnnnnnnnnnnnnnnnnnnnnnnnnnnnnnnnnnnnnnnnnnnnnnnnnnnnnnnnnnnnnnnnnnnnnnnnnnnnnnnnnnnnnnnnnnnnnnnnnnnnnnnnnnnnnnnnnnnnnnnnnnnnnnnnnnnnnnnnnnnnnnnnnnnnnnnnnnnnnnnnnnnnnnnnnnnnnnnnnnnnnnnnnnnnnnnnnnnnnnnnnnnnnnnnnnnnnnnnnnnnnnnnnnnnnnnnnnnnnnnnnnnnnnnnnnnnnnnnnnnnnnnnnnnnnnnnnnnnnnnnnnnnnnnnnnnnnnnnnnnnnnnnnnnnnnnnnnnnnnnnnnnnnnnnnnnnnnnnnnnnnnnnnnnnnnnnnnnnnnnnnnnnnnnnnnnnnnnnnnnnnnnnnnnnnnnnnnnnnnnnnnnnnnnnnnnnnnnnnnnnnnnnnnnnnnnnnnnnnnnnnnnnnnnnnnnnnnnnnnnnnnnnnnnnnnnnnnnnnnnnnnnnnnnnnnnnnnnnnnnnnnnnnnnnnnnnnnnnnnnnnnnnnnnnnnnnnnnnnnnnnnnnnnnnnnnnnnnnnnnnnnnnnnnnnnnnnnnnnnnnnnnnnnnnnccagcggcactttatactgttcactgtacaaaagcttacggttttccacaaggactttactaactagctgggaaaaagatgatgtaattacttcggggctctgcggaaccttctctgtacagcgccccctttctgttgtgctattggttgcagctgccatgctcagaatgcgtttgagagctgaagccaggtgcttgcagtcacctgaggccgtccgtgtggcccagggccccagccgcctttagggcccccattgtccataacagcatatgcatttccccaccgcgttgtgtctgcagcttctttgccaacatagtaatgcttttagt

SEQ ID NO: 42488 - DNA, 689 bp, Macaca Mulatta
ggggagtagccgcggctactcggtgagtacagagtgctggggggtcgccggcaggttccctctccccggccccagctctggacgcctaccccaatgcaacgcccggagtaacggaaagaggcaggaccgcgcctgcagcgccggctggagggacgttctggtccccagacgctagtatcagggactgtttggcgatcgccggctgcgggaatgccccacgcgggtggggtgaggagaagggagaaggcggaaaactcctcctccggaaaataataaatggccacgataacagcagcatcggtggcagtcatcccgctttacctggagcggaatcgctcggtctgagccaggagccaagacaatgcaaactccagtgaccatccctgtacctgtgctccggctgccccggggccctgatggcttcagccgtggctttgcccctgatggacgcagagcccccctgaggccagaggttcctgaaatccaggagtgtcccatagctcaagaatccctggaattcaggagcagcaggccgagccgcccttcggagcgttactccgcagctgctggcatggtggtcgtcagtgacttccgtgccgaggtgtgctgtggcgcacttcgagcacgacctgagtggcacttctctgccactgcgatccatagggcagcaagcctctcatgatgacttt

SEQ ID NO: 42489 - DNA, 700 bp, Macaca Mulatta
  misc_feature (1)...(700): n = A,T,C or G
ggacagtaagaagtcgacggggtaaaagagcagtgctgaaggaggagatccaggttaaatctggcttattaactcaagccaattgtaaggattttctgtacagattattcatgtcagaccaagaatttaaattattttgagagaggaatttaattctaataaaccagctgttacaaaaattataaaatgatctctgtttttcctgtcagagatttaaaaaactgaaaaggtatacctcaacccaaaagtaaaggtttggtttgttatggcttccttttttttaaaattaccctgtagtgccagtttattatgcaaagcagcttatattcctgtgtttctgataaaatgaagactttaaattagtcagcagtactttacctttcaaggcattagtaaattatttgcaaatagttttaaaaagaaaattcgacctctgttataggctgtcttctctttaagataataattttccacnnnnnnnnnnnnnnnnnnccatattatatatgtatacatatatctatatattcagttgattttataaacatatatgaaggcataaagatatacagaagattattcattttaagattcaaattaaataattcctgcatatatgacattccttacataaactaacactaaatggctagaaatgtctttttctttcttttctgtctttgtataaggtattaagcacaaa

SEQ ID NO: 42490 - DNA, 657 bp, Macaca Mulatta
  misc_feature (1)...(657): n = A,T,C or G
ggatgtgatttatctttccctttaattcaggttgggactcgtttctttctggtggatcacagctgcccagatgttgcaattgatttttatgtttctgtagagaagtatttttctttcatcttcagaatttttttttgccaccaaaagaaaacattggaactctgtgtttcctcttgattgtgacttcccagtgttgacagttaagtccttagtgtcgtaggtcccagcccaccaatactatatcaaacactgttatgcacataatgcagcactgtgatcctatttaaataaaacttttttattatttatactaccatataataatatacttcaaccctttttggctatttaaaccaaagggaataccccccctttttatttacctggccaaaattttgggaaattgggttttaaatttgggggggttaaacccccggttacaaaaaatgtggnnnnnnnnnnnnnnnnnnnnnnnnnnnnnnnnnntttgaaaaaccgggaaaaatgggggaaaaaatccccccaaggggggatttccccgccttnnnnnnnnnnnnnnnnnnnnnnnnnnnnnngggtgtgttcccgtggggggagtatgttttcttcctnnnnnnnnnnnnnnnnnnngtttttacccgcccgcggggggggggt

SEQ ID NO: 42491 - DNA, 292 bp, Macaca Mulatta
  misc_feature (1)...(292): n = A,T,C or G
nagcagctccaggaccaagtgtgttcaggtctctggaactcacttccatatctccactgtgatgtaaggatgtgcacggatcctaaatatgagaagctggcaatcaccaggtccctggcaggcgctcagagtctgagctaccatcaaaatctagggtgcagggggaggctaactgctgctctgaataccctaaggagggcagatctaggccaggtgaccagggcttgcaagtcccaggacagcaggttgggcttggtgcctggaagaactgatgagcagcttcagccatgca

SEQ ID NO: 42492 - DNA, 591 bp, Macaca Mulatta
  misc_feature (1)...(591): n = A,T,C or G
ggattttaatgtgtgtcttcccagtctttttttgggcaaaattgaaaaaatagtgtacccattgttttgtaatctgctttttacttaacatatcatgagcgtttttcacatatcattcaatgtggtaacatacttcttagtggctgtctaatattccatccttctggaggcagctactaagtttttaaaagtaaaatccattttctctgttttcagaattagctctgtaaagaaagaggcnnnnnnnnnnnnnnnnnnnnnngtctctggccaggtgcggtannnnnnnnnnnnnnnnnnnnnnnnnnnnnnnnnnnnnntgggcagatcacttgaggannnnnnnnnnnnnnnnannnnnnnnnnnnnnnntaaccccatcttnnnnnnnnnnnnnnnnnnnagcnnnnnnnnnnnnnggnnnnnnnnnnnnnnnnnnnnnnnnnnnnnnnnnnnnnnnnnnnncctggaacccaggagacagaggttgcagtaagctgagatcatactactgcactccagtctnnnnnnnnnnnnnnnnnntgagactccatctnnnnnnnnnnnnnnnnnnnnnnnnnnnnncatgtc

SEQ ID NO: 42493 - DNA, 768 bp, Macaca Mulatta
  misc_feature (1)...(768): n = A,T,C or G
gggttttcactgcccatagctacttggaaagatttggcaagtaaacttgctaccatggttggggggggataaatgcctttatcctttagtgctcccaacaacgggaccttttatggccaagcacacataaaagtccatgtgattacttaggctcatagagcctagtgccatggagaaaatgttggagaaatagatgttgtgtttgctatatgcacatgctaagtaatttaataagctaatgtatctatactaatgattgcttatgattgttcatggaaaatttttaaaaatcaaatggaataaagtgaattttaaaaatagtttgactttggagaaactaagaaaaaaattcttgaatcttaatgtactgtttatattccacttcattcaagaagaagggagtaaaataaacatccataatttttgctaatcatattttaaaggatactaagatctgctatgacataattaaaaatatctttagatctaatttaatcatttattgacgaacttctctgggactagttcagtgatcaagctttgtttcctaatagagctctgttagttaggcttacttggaaattttaacttcctactccttctctgcagttggccagaaaattaagaagtctcagccatttcagtgttgaaccctataactctactttaagacccaccaggnnnnnnnnnnnnnnnnnnnnnnnngaaattagacattctgaaagtaaaaggaatatctgtatatcttcaagctcttggttttttaat

SEQ ID NO: 42494 - DNA, 665 bp, Macaca Mulatta
  misc_feature (1)...(665): n = A,T,C or G
gggagccgagctttgctcgagccaatagtttgctgaattgaaataaaaatgggatagaaaagtgaatccaaggagaatgtccagagccctaataccggaaggcagtctgcacagccagatgaagtctcgnnnnnnnnnnnnnnnnnnnnnnnnnnnacgatctaagctcactgcaacctctgactcctaggttcaagggattctcctgtnnnnnnnnnnnnnnnnannnnnnnnnnnnnncgtgcgccaccacacctggctaagnnnnnnnnnnnnnnnnnnnnnnnnnnnnnnnnnnnnnnnnnnnnnnnnnnnnnnnnnnnagacctcaagtgacccacccannnnnnnnnnnnnnnnnntnnnnnnnnnnnnnnnnnnnnnnngtgcccggcctcactgatggtttcttagcaaacttcagtagaatatttagaatgtggccctgatcaacttgagtgctggtaggagatgctacctcgctcaatctatgagcacccagccctgtgccctggatgcttggcaggtggagagaaagacagtgttatgtgggcaagcctccaactcaacagttgcagcagagcatctggctctccgtctgctgatgtagccctgtgagtcagtcagacgtgtggtccccaagtcaggttcccaactagcaccct

SEQ ID NO: 42495 - DNA, 685 bp, Macaca Mulatta
  misc_feature (1)...(685): n = A,T,C or G
atgacttagttttataattagaacacaaaatgttattattataattattttaaaagaagttggcttatagaactggagagaggttcatgacacaggctctaaagcagacagcgtaggtaaaaatcctggctccgacaagtcagcaagccactgtccctctctgtggcnnnnnnnnnnnnnnnnnnnnnnnnnnnnnnnnnnnnnnnnnnntgcctaggctagagtgagactccatttnnnnnnnnnnnnnnnnnntgccttgacatggttacattcccaggaccctgcgttctttaggaaaagattaaatggctggtatcattgtttacaaaagtgtcttggacttgatggagcttatgttgaaaaataaagcttatatttttcatttttatcttttaatttaataattttccatgaactttttgaagtcccctctattctgtacacaggaggcttcagttctatcccctaagttttggtatgttgtgtcttcatttttcctcctttcaaagtactttttgcctctcaaattattttcagattctcttttgatttcttctttgttctttgacccatgagttatttaggagtatgttgtttaacttccacatattgtgtttcccagcatttccacaggaaaatgacaatgttaaactgagagtaccacaaggacaccatttggaga

SEQ ID NO: 42496 - DNA, 534 bp, Macaca Mulatta
gctgctggggtggggagaaagggtggcgtgtctatccaaaagggagggacaaaggtcacactgaccttcccccaggtgttccttggggaaatcccccatggagtctaagatatgggggtcctgggtccatccctgtgggctggggagttaaaggaggcctccagggagcagaccctcacagctgggcagcgcttgggctccttgagaaggggagctgcgaaggagcaggttgggagccccaggaggagcaaagctttacatggagccccacagcaagctcacgtcgagcccgggctgccagccttgccaccagagccctctgggcgggggacaaggctgcacagaccagaggcaggggccacagtgactaagtgggaggatttggtgcctgcctcccacagggtacagtgctgcctgccacccccagtacccagtcccaggcctcctgtacttggcgaagggcagctctgtggggttaggagacacagcaggccacaaagtgcctgtgtgttccctctaggccttgggggtccc

SEQ ID NO: 42497 - DNA, 769 bp, Macaca Mulatta
  misc_feature (1)...(769): n = A,T,C or G
agaaaatgcttttatgtaaataacnnnnnnnnnnnnnnnnnnnnnnagcctgtagcaagcaaattttaagcttaattgagcaagggttggcttccaagggtggctgcaataggctgcagctatgtgatttttgtacttgtttttacatataaagcttatctaatttctttaaatatataaactaatgcttaataactgaaagcaagtgagctccaaagatgaaatttcagaaacagtgtacatgaatgagtgtgttctactggtctgctaagagctttaaatggaagtggccgctcaaagcacagtgtcctgttaactcttgagtgctaagtagatctttccaacagtaagcttgattgatcatgggttaaaaagagagaatattgaaatagatgttttaatacaggctggaaatgaactatttaacactatcattgatttactatacaagaaatcatatagattaactgaacctaatagtactcaagtaggatatgcaaaatttatattttacataatctgtgaacatttttagtacctaaaaatgtttcaggtatttcaaagatgggaacaaccagtatctagtcatacattaatgtgaacaggtttattaaaagttaacctctttataaaaagtattaataaaccaagatgtgcctaaatattagggtacttcaagctaaaggtcatgtnnnnnnnnnnnnnnnnnnnnnnnnnnncacatatgagattcaagaaagtaatgtatctgacgggttgctaataagat

SEQ ID NO: 42498 - DNA, 725 bp, Macaca Mulatta
tctgacagcagcatcagggctcaggcaggccgggaggatgcatcacagctggcggccttggatggggcagtggctcccccggcctgaggagtgcctccccctgtggccacgctgcccagcaggccggctccttccctctcgggcgccagcagcagctcctactccttctcacgagtccacttgatcatggtctctggtgagcggtagaggaagatgagcttggcgtacaactcctcctccagctccagctcacgagtctcccgcaccaggaagatgtcctggcagagcttgaggatacggtccacgcacggcagctcctcaaacatgatggagtgtgagatctcgctgaagaatccacgcacgaacttgccgatgaccagcacgatggagacatacagccccatgatcctgcgggggaagctggtgagtcctggggccgcccggagccccctgagctgcggggtgccccccagccactcactcacccgtagccagccaggaagccgaggctcggtgggctgactttgtcgctgaagatgaccatgggcagcaggttgcagttggtccggcactcctgcagctcgatgacccaccattcaaggaagccggtggccccagcaccctgctccctccgcagctggatgcgcacgccgaggtagtcggcctcctcgtctggggcggagcgaggagacggttggggccgcagccacccctctctggcctcc

SEQ ID NO: 42499 - DNA, 614 bp, Macaca Mulatta
gcatgatgttcatctgcaacaattgcaaagtgttcagattttgtaaatctaaatgtcataaacactttaaaaagaagtgcaatcctcacaaaagttaggtggaccaaagcattccagaaagcagctggtaaagagcttacagtggataattcatttgaatttaacaaacatagaaatgaacctatcaaacaccagcgagagctatggaattaaactattgatgcaatgaagagagttgaagagatctaacagaaatgccaagctaaatttataatgaacaaattgaagaaaaataaagagctacagaagttcaggatatcaaagaagtcaagcaaaacatccatcttatccaagcccctcttgcaggcaaagggaaggagttggaagagaaaatgatacagcagttacaacaggatgtggatgtgaagatgtttcttaaacatctctgtaaccatttcttttatgtacatttgaaaatgccctttggagacttggaactgctaaattattagtttatattttatgtaagttcgcttaaatgaaaagtgattaaaatatatctcttctacattgccgtctacaaaacatcatattacggatattagatggcatct

SEQ ID NO: 42500 - DNA, 752 bp, Macaca Mulatta
  misc_feature (1)...(752): n = A,T,C or G
ggcacgnnnnnnnnnnnnnnnnnnnnnnnnnnncnnnnnnnnnnnnnngggaagatcacctgagatcatgagttccagaccagcctgactgacatggannnnnnnnnnnnnnnnnnnnnnnnnnnnnnattagctgggtgtggtggtgcatgtctgtaatcccaannnnnnnnnnnnnnnnnnnnnnnnnnnnnnnnnnnnnnnnnnnnnnnnnnnnnnnnnnnaccgagatcacannnnnnnnnnnnnnnnnnnnnnnnnngagcaaaactccgtcgacnnnnnnnnnnnnnnnnnnnnnnnnnnnnntaaaattttaggcattatcaacacatcaacacctctgtaagtactcttaagttgggccaggcacannnnnnnnnnnnnnnnnnnnnnnnnaatatttattattctccttttacagaggaggaaattaaggctctagaaaagttcacacagctaataactgatagaactaggatttgaaacagtcccatagaccgtaatgtccatgttctaatgacatattacaaaccacatcttcccgatacttaggggctgtctggaccagtcttatccctttaagagtcttgaaactaggaatattaaaggctgggccagatgctccgagcctgttccccatctaaagcaaactctgaacaagggctcctttggggctcagggccttacctaatggaaggctacccccccccctttactggggttaacctgaagggaaaattaactccttc

SEQ ID NO: 42501 - DNA, 759 bp, Macaca Mulatta
  misc_feature (1)...(759): n = A,T,C or G
ggaannnnnnnnnnnnnnnnnnnnnnnnnnnnnnnnnnnnnnnnnnnnntnnnnnnnnnnnnnnnnnnnnnnnnnnnnacgtgccagcacgcccagctcatttttgtatttttcatagagacagggtttcaccacattggccatgagggtctcgatctcctgaccttgtgatctgcccatcttggccttccaaagtgctggagttaacaggcgtgagccatgcgcccggcnnnnnnnnnnnnnnnnnnnnnnnnnntcttgctcctgtcgcccagtctggagtgcagtagcattatctctgcaacctctgcctcctcagttcaggcgattctcctgccttagcctcccaagtggctggaattacaggcacctgccaccacannnnnnnnnnnnnnnnnnnnnnnnnnnnnnnnnnnnnntnnnnnnnnnnnnnnnnnnnnnnnnnnnnnnnnacttcaggtgatccacccannnnnnnnnnnnnnnnnnnnnnnnnnnnncgtatgagccaccacacctggcccaattcataataattttgaatataatttgataattttaaaatggttgcaatggcattgccatttggagtatgggaaagtgcagttggttaattcattgaacagatgagtaaagtcagaagtctttttcataacatatggtcacaattcctttcttttaattaaagatgaaaggttttgtgggtttttggtttgttttgttttagaatggcggggttttgcctggtgtcgcccctgg

SEQ ID NO: 42502 - DNA, 246 bp, Macaca Mulatta
  misc_feature (1)...(246): n = A,T,C or G
caggccctacaaatgttattcaaacctctgggcaaatgtatcagtcacttgaccctccatgaactcctccaaggacttcagggattaatgctgttgccacctggctcctcagagcggccagtcaccgtggtgcttcagaatcanncagtttggaatatctttgctctatgccctactgagtcatggggagcagctggtatcactggattcttccctagaggaacccaacagtgaccatacagcttg

SEQ ID NO: 42503 - DNA, 578 bp, Macaca Mulatta
cgctgccgggggagggagcgagggggccggtcaccatgcgcacaggcaggggaatggccatggaagggttgaggggccgtggcggacagagggcccagccgtgatccagcgacgggtttggggctccgggtggggtggggggcaacgggcggcggcagcagtggccgcacatctggatggaagcgagctttgtccagaccaccatggctctggggctgtcctccaagaaagcatcctctcgcaatgtggctgtggagcgtaagaacctgatcaccgtatgcaggttctgtgtgaaaacgctgctggagaagtacacagcggagcccatcgatgactcatcagaggagtttgtcaattttgcagtcattttacagcagatcctcagccaccgcttcaaagcctgtgccccaacaagtccagtgagctggttcagctcagacgggcagcggggcttctgggactatatccggttggcctgcagcaaagtgcccaacaactgtgtgagcagcatcgagaatatggagaacatcagcacagcccgggccaagggccgggcatggatccgggtggcactgatg

SEQ ID NO: 42504 - DNA, 4169 bp, Macaca Mulatta
  misc_feature (1)...(4169): n = A,T,C or G
tgccagattggcctccctttttggtctggatcaggcagcagctggccatggaaatgaatttttccagtacacagccccaaaacagcctaagaaaggccagggaactgcagcaacaggnnnnnnnnnnnnnnnnnnnnnnnnnnnnnnnnnnnnnnnnnnnnnnnnnnnnnnnnnnnnnnnnnnnnnnnnnnnnnnnnnnnnnnnnnnnnnnnnnnnnnnnnnnnnnnnnnnnnnnnnnnnnnnnnnnnnnnnnnnnnnnnnnnnnnnnnnnnnnnnnnnnnnnnnnnnnnnnnnnnnnnnnnnnnnnnnnnnnnnnnnnnnnnnnnnnnnnnnnnnnnnnnnnnnnnnnnnnnnnnnnnnnnnnnnnnnnnnnnnnnnnnnnnnnnnnnnnnnnnnnnnnnnnnnnnnnnnnnnnnnnnnnnnnnnnnnnnnnnnnnnnnnnnnnnnnnnnnnnnnnnnnnnnnnnnnnnnnnnnnnnnnnnnnnnnnnnnnnnnnnnnnnnnnnnnnnnnnnnnnnnnnnnnnnnnnnnnnnnnnnnnnnnnnnnnnnnnnnnnnnnnnnnnnnnnnnnnnnnnnnnnnnnnnnnnnnnnnnnnnnnnnnnnnnnnnnnnnnnnnnnnnnnnnnnnnnnnnnnnnnnnnnnnnnnnnnnnnnnnnnnnnnnnnnnnnnnnnnnnnnnnnnnnnnnnnnnnnnnnnnnnnnnnnnnnnnnnnnnnnnnnnnnnnnnnnnnnnnnnnnnnnnnnnnnnnnnnnnnnnnnnnnnnnnnnnnnnnnnnnnnnnnnnnnnnnnnnnnnnnnnnnnnnnnnnnnnnnnnnnnnnnnnnnnnnnnnnnnnnnnnnnnnnnnnnnnnnnnnnnnnnnnnnnnnnnnnnnnnnnnnnnnnnnnnnnnnnnnnnnnnnnnnnnnnnnnnnnnnnnnnnnnnnnnnnnnnnnnnnnnnnnnnnnnnnnnnnnnnnnnnnnnnnnnnnnnnnnnnnnnnnnnnnnnnnnnnnnnnnnnnnnnnnnnnnnnnnnnnnnnnnnnnnnnnnnnnnnnnnnnnnnnnnnnnnnnnnnnnnnnnnnnnnnnnnnnnnnnnnnnnnnnnnnnnnnnnnnnnnnnnnnnnnnnnnnnnnnnnnnnnnnnnnnnnnnnnnnnnnnnnnnnnnnnnnnnnnnnnnnnnnnnnnnnnnnnnnnnnnnnnnnnnnnnnnnnnnnnnnnnnnnnnnnnnnnnnnnnnnnnnnnnnnnnnnnnnnnnnnnnnnnnnnnnnnnnnnnnnnnnnnnnnnnnnnnnnnnnnnnnnnnnnnnnnnnnnnnnnnnnnnnnnnnnnnnnnnnnnnnnnnnnnnnnnnnnnnnnnnnnnnnnnnnnnnnnnnnnnnnnnnnnnnnnnnnnnnnnnnnnnnnnnnnnnnnnnnnnnnnnnnnnnnnnnnnnnnnnnnnnnnnnnnnnnnnnnnnnnnnnnnnnnnnnnnnnnnnnnnnnnnnnnnnnnnnnnnnnnnnnnnnnnnnnnnnnnnnnnnnnnnnnnnnnnnnnnnnnnnnnnnnnnnnnnnnnnnnnnnnnnnnnnnnnnnnnnnnnnnnnnnnnnnnnnnnnnnnnnnnnnnnnnnnnnnnnnnnnnnnnnnnnnnnnnnnnnnnnnnnnnnnnnnnnnnnnnnnnnnnnnnnnnnnnnnnnnnnnnnnnnnnnnnnnnnnnnnnnnnnnnnnnnnnnnnnnnnnnnnnnnnnnnnnnnnnnnnnnnnnnnnnnnnnnnnnnnnnnnnnnnnnnnnnnnnnnnnnnnnnnnnnnnnnnnnnnnnnnnnnnnnnnnnnnnnnnnnnnnnnnnnnnnnnnnnnnnnnnnnnnnnnnnnnnnnnnnnnnnnnnnnnnnnnnnnnnnnnnnnnnnnnnnnnnnnnnnnnnnnnnnnnnnnnnnnnnnnnnnnnnnnnnnnnnnnnnnnnnnnnnnnnnnnnnnnnnnnnnnnnnnnnnnnnnnnnnnnnnnnnnnnnnnnnnnnnnnnnnnnnnnnnnnnnnnnnnnnnnnnnnnnnnnnnnnnnnnnnnnnnnnnnnnnnnnnnnnagagctccaagaaacctctgagcaagcacagtccaaattcaaaagtgaaaagcagagccggaaacaactggaactcaaggtgacatccctggnnnnnnnnnnnnnnnnnnnnnnnnnnnnnnnnnnnnnnnnnnnnnnnnnnnnnnnnnnnnnnnnnnnnnnnnnnnnnnnnnnnnnnnnnnnnnnnnnnnnnnnnnnnnnnnnnnnnnnnnnnnnnnnnnnnnnnnnnnnnnnnnnnnnnnnnnnnnnnnnnnnnnnnnnnnnnnnnnnnnnnnnnnnnnnnnnnnnnnnnnnnnnnnnnnnnnnnnnnnnnnnnnnnnnnnnnnnnnnnnnnnnnnnnnnnnnnnnnnnnnnnnnnnnnnnnnnnnnnnnnnnnnnnnnnnnnnnnnnnnnnnnnnnnnnnnnnnnnnnnnnnnnnnnnnnnnnnnnnnnnnnnnnnnnnnnnnnnnnnnnnnnnnnnnnnnnnnnnnnnnnnnnnnnnnnnnnnnnnnnnnnnnnnnnnnnnnnnnnnnnnnnnnnnnnnnnnnnnnnnnnnnnnnnnnnnnnnnnnnnnnnnnnnnnnnnnnnnnnnnnnnnnnnnnnnnnnnnnnnnnnnnnnnnnnnnnnnnnnnnnnnnnnnnnnnnnnnnnnnnnnnnnnnnnnnnnnnnnnnnnnnnnnnnnnnnnnnnnnnnnnnnnnnnnnnnnnnnnnnnnnnnnnnnnnnnnnnnnnnnnnnnnnnnnnnnnnnnnnnnnnnnnnnnnnnnnnnnnnnnnnnnnnnnnnnnnnnnnnnnnnnnnnnnnnnnnnnnnnnnnnnnnnnnnnnnnnnnnnnnnnnnnnnnnnnnnnnnnnnnnnnnnnnnnnnnnnnnnnnnnnnnnnnnnnnnnnnnnnnnnnnnnnnnnnnnnnnnnnnnnnnnnnnnnnnnnnnnnnnnnnnnnnnnnnnnnnnnnnnnnnnnnnnnnnnnnnnnnnnnnnnnnnnnnnnnnnnnnnnnnnnnnnnnnnnnnnnnnnnnnnnnnnnnnnnnnnnnnnnnnnnnnnnnnnnnnnnnnnnnnnnnnnnnnnnnnnnnnnnnnnnnnnnnnnnnnnnnnnnnnnnnnnnnnnnnnnnnnnnnnnnnnnnnnnnnnnnnnnnnnnnnnnnnnnnnnnnnnnnnnnnnnnnnnnnnnnnnnnnnnnnnnnnnnnnnnnnnnnnnnnnnnnnnnnnnnnnnnnnnnnnnnnnnnnnnnnnnnnnnnnnnnnnnnnnnnnnnnnnnnnnnnnnnnnnnnnnnnnnnnnnncccaggagagcctcagcctccacagctcaagaaagatgatgtcactagctccactctttccacgaggagctgttgagcacagaggcaggttccacagttgcaggagcagccctcagatccagccatcattcccagnnnnnnnnnnnnnnnnnnnnnnnnnnnnnnnnnnnnnnnnnnnnnnnnnnnnnnnnnnnnnnnnnnnnnnnnnnnnnnnnnnnnnnnnnnnnnnnnnnnnnnnngagcatgaagggacgcccacccccaacacccctttttggagatgatgatgatgacgatgacattgactggctgggatgaagacccaggaaactggtgcaaaggtttctctgcaacccttccctaagcatgattttgcacagccagccctgggtctaggtgagccacagggtgaggtcaaggtgagcattctgggaacaatagttttggctcagacagtggctcggccaccttctgagccccacccccaccagacctggtgaagaggatcataaccatcttcaaaaacactggattttcagcagcaagttggaagaaggactggtagattcccctccagccagtcacctgtaagagtcttgtcctctgccagacttttaaatctcttcattaactctcagactgacctgggagccctcctctacctgaatccagtgctcaactgtgccccggcaacaagtcaagtcacctgggttgaggtcttcctggtagaaccaagggagattacaccatcttaatcccggtgcagttaacagcctggtctatagtcctgggacatgtatcttcttctctgccttaaatctgatataagaggccaatgactatttgaaaataaaactaaaatgaatgtctataatgaaacttg

SEQ ID NO: 42505 - DNA, 138 bp, Macaca Mulatta
gttactagaaaaggcagaagcccgtgaacgcgaaagagaaaaagaagaggctcggaagatgaaacgaaaagagtctgcatttaagagtatgttaaaacaagctgctcccccgatagaattggatgctgtctgggaaga

SEQ ID NO: 42506 - DNA, 738 bp, Macaca Mulatta
  misc_feature (1)...(738): n = A,T,C or G
ggggccgggcccctttacctttttttaagtattactattactaccaatatacaaannnnnnnnnnnnnnnnnnnnnnnnnnnnnnnnnnnnttaagagagagtcttgtcgtgtcactgaagtgcatgtgcactggtgtnnnnnnnnnnnnnnnnnnnnnnnacctcccaggctcaagcaattcttgnnnnnnnnnnnnnnnnnnnnnnnnnnnnnnnnnnnntgacaccacnnnnnnnnnnnnnnnnnnnnnnnnnngcagacagggtttcgccatattggcctggctggtcttaaactcctagcctcaagtgctctgcctgccttnnnnnnnnnnnnnnnnnnnnnnnnnnnnnaagtattactagcaatattcttaaaaactcagaagctacagttagatttgttacatgttataaaaattgaatgacaaattaagagagagtaaaaaagagaaagaaaagagtgtggtgaatgaacaggggaaaatcaggtagaacaagaaataggnnnnnnnnnnnnnnnnnnnaaaccatttgggaatgtttacaaatcagattttttaaatctgaacaattattgtctataagtagatatatataccctatgtataaatacatatatcatatatacacaaaaatgaaaacaaaccaaataattggtaaaacacaatataaaggaaaataggnnnnnnnnnnnnnnnnnnnnnnaacagggaaggacaaatccagagaaccct

SEQ ID NO: 42507 - DNA, 185 bp, Macaca Mulatta
caaaataatttcagcaatttcaagtgtcattttcctaaagtcctggtaacataacaagcatttggctgctttttccttcacgttcagtgcaacctgacagatgagacacatggactccctcttcctcccattccacctccacgacatttattttaaagactagagctttcctcctccagtatgtt

SEQ ID NO: 42508 - DNA, 266 bp, Macaca Mulatta
ggtctgccggctgctaacaccaccggcttgcctttctaaaagattggaatttattctcgtaagtattgacaccctccagaggcctcccagaacagtgcatataatactagattatctacctcctagatgatcccagagtcactgggagaaattcaagtctaaaatatgaaaaattaataaaagcaagagtaattctctgaacttaagtcatgcaagctcaaagctgtttacctctgacttgtgagatgacatcaacatttcccatt

SEQ ID NO: 42509 - DNA, 825 bp, Macaca Mulatta
  misc_feature (1)...(825): n = A,T,C or G
ggggcccttcaggcagtggttttggttgaagtccagactgattatttaaggaccagctagagaaattcgcgaagcattgagagtaaacatgaggttacgatcctgggaggactcaatgaatttgtagtgaagttttatggaccacaaggaacaccatatgaaggcggagtatggaaagttagagtggacctacctgataaataccctttcaaatctccatctataggattcatgaataaaattttccatcccaacattgatgaagcgtcaggaactgtgtgtctagatgtaattaatcaaacttggacagctctctatgatcttaccaatatatttgagtccttcctgccccagttgttggcctatcctaaccccatagatcctctcaatggtgacgctgcagccatgtacctccaccgaccagaagaatacaagcagaaaattaaagagtacatccagaaatatgccacggaggaggcactgaaagaacaggaagagggcaccggggacagctcatcggagagctctatgtctgacttttccgaagatgaggcccaggatatggagttgtagtagaaaaagcacctgcttttcagaaagactattatttcctaccatgagagcaaaatataaatcagtgatatacatgtcgactnnnnnnnnnnnnnnnnnnnnnnnnnnnnnnnnnnnnnnnnnnnnnnnnnnnnnnnnnnnnnnnnnnnnnnnnnnnnnnnnnnnnnnnnnnnnnnnnnnnnnnnnnnnnnnnnnnnnnnnnnnnnnnnnnnnnnnnnnnnnnnnnnnnnnnnnnnnnnnnnnnnnnnnnnn

SEQ ID NO: 42510 - DNA, 754 bp, Macaca Mulatta
  misc_feature (1)...(754): n = A,T,C or G
gggagttcatgaaaagtttttaataaattttaataattttacttacagagatcttagttatgtaagtattgtcagcagcactttataaagagttgtaaaataaaatggtggcagaaaatatcaactgtttgtagaatgttaagggacttccttccgaaattctctggttttcatttcaatttcaaagctcaaaacagaaggtaaaactattaggatctgtaaaaaatgcaaggtacaaaatcacactgtttataaaccacagattatcttgttattcccatcagtgaaaagaagctgatagacgtttttatgagttagttcatcaatcttcttcttaccccaaatgaatcagtgtgcagcagatacaagtgtatagacattaatatgggctcactctcagctgggagttctcacaactatcactttttactgattatctgttttctaaactttttctgtgacttgaattgactaaaagtgaacacattgataagtaatgagcttaggccgaggatatatatccagtgggggatgaaacatgcttaagaaaatgagtgcatttccttgactnnnnnnnnnnnnnnnnnnctagtttgctatttcaaaacaattgactttaaaaaattatacttcaccacagagacagttgttgttttgtaatgggaggaggagtaacttactaatctagactcttagaatcccagttctgatactttaataattggtgtgttttgagggcaagtgacttatctga

SEQ ID NO: 42511 - DNA, 643 bp, Macaca Mulatta
  misc_feature (1)...(643): n = A,T,C or G
accagacacntgaacaactacttgtctcaaaacctagtaaagctgggacccactgccgccaacttttctgcctctgcagttttggagcccttaacgtgaaggttccagcccagaagcctgcaggctgtttgtagcccgtagatgtgttttcttcccagtagctgatgtacacagtgtttttgtattatttttcaaataggcaatacatttgcgtggttcaaaaattaaagcgctatagaaaggtattcagtgaaatcttatccctgcctccagtggccagtcctgccctgcccgtcccctgtaaatacttttattagtttcctatacaaccttccaggattcctttttgcagataaaagtcagtacaaatatatatctgcctccatccctctacttcttacctaattatagcagactatacacactatgtttaaccttgcctttttcacttaatttatcttggtgatctttccctatctgtatgtggggagcttcctcattctttttttacaggggtgtagtatcccgttgtatggatttaccataatttaacaatcccctactgatgcacacaggttgtttttagtcattttttgtacaagaaacactgcacagaataaacctggcatttcgtgttgaccct

SEQ ID NO: 42512 - DNA, 791 bp, Macaca Mulatta
  misc_feature (1)...(791): n = A,T,C or G
agggggacttgagttcaagtccagcaacatggcaagaccttgtctcnnnnnnnnnnnnnnnnnnnnnnnnnnnnnnnataatataattcaggaggtcatgggatttgggaaagaaagcagactgtgacaagagcatctaactatattacaaatatatgaaacaacctcaccgaaacggatggggagaaaagtgctcccataactttgaaaatgactggagtctgtaaaactaaaggctaaaggaactgtataagagtacttactcaagttgatacaatttttctgcatgggtttataggttaataaatgcattattgctgtacttgtacactaacattgaacaactaagaaaatagacagcagatagtgggagccaggtttctcactgttgaagtggaaattttacagatcaacaagggaggaagctagaatgacccatggtaatggattagcattgaaggtactacaagagctcatatatagttagatagttgcatgtggaaatttttatagatgggtatgtgcagaagttagtatatacatactataaagtttggaagtttacaacaccaccaccacttttgactccaattgtaagtttaggggtccccaagatcaccctcaggttgaataattccctagaagtactcacagaactcactgaaagctgttatatttacagttatggtttattacagtaaaaggataataaaaccagccaaaggnnngagaagagtacagggagaattccctcaatgtgaagcttcccagttttccttctcctcgntgga

SEQ ID NO: 42513 - DNA, 781 bp, Macaca Mulatta
gggggaagctgatgcttaaagaggaaaggctaatctgggattttgccccatttctctggtttttcactcctatatttaattctcacaatcgtgtcatcacatagtgcaaaaaacaaaattcttgtaaagtccccaggagtctatccttgggtgaaagttttaacctgagtgtcttcctctaaaaaaggtgggaaatgagacattgaggaattaacatataaatgtctactatgggtttaagaggactggcgtatttggaatgcttcttatactaacactgtctcattgtaaaatataaaacccctcactctgactacatttttattcctctggtagtgtggtatccaggcaacatatcacttctgctatgtaattctgagaattctcatttctagagtacctgagccaaacaaatacactatggaggctgcagctgtatcatcactagcaatttgctcttatcattatttactacctttgaacctaagatttcctgcctatgcttttgaaagcaaaaatcagtctcctttgcatgaaaaagagccttagatttttaaacgttaattaccagaaaagctaaaatacccagttgactacccaaattattttgggaatctatccataatggaaagtcttaccacaaacgaataaaaccgattacccttaagagctgagaaattcaaaaggaattgaaaattccgaagagaataaaccgtttcaagtccttaccaatggataattgcactttcctcttttgaacggttcctggggctttaaatta

SEQ ID NO: 42514 - DNA, 340 bp, Macaca Mulatta
cggctgtgcgcctctgctaagcatggagctttgctctgggagtacttatcacatgctgacaagtctgagctctgctgaagatggagccacccatgggtgcaagctggtaagaatgagggtgctccacacaccagcgaagccctccagggaatcccatgccatgtaacaagaatctatcctaggattcttcctcctaacatttaaaccacaggcttcattgcatgcagcccagcccataaatctcccgcaagaggacccagagccatgtgccctctagaaaactgttcctcccaggaacatccgcactggcgggactcaggccgggggcaggtgctgtccc

SEQ ID NO: 42515 - DNA, 558 bp, Macaca Mulatta
  misc_feature (1)...(558): n = A,T,C or G
cagagggcggatcgcagggagccggtccgccgccggaacgggagcgtgagtgtgcgtgtggagccggggctcgtgggagacgatcgcgatgaacacggtgttgtcgcgggcgaactcngctgntnntcgccttctcgncnntgagcgttgatgnngcggcgggctcacancttcggctgcttcatcaccaccgccttcaaagacaggagcgtcccggtgcggctgcacgtctcgcggatcatgctaaaaaatgtaaagatttcactggacctagagaaagaagtgatctgggatttatcacatttgatataactgctgatctagagaatatatttgattggaatgttaagcagttgtttctttatttatcagcagaatattcaacaaaaaataatgctctgaaccaagttgtcctgtgggacaagattgttctgagaggtgataatccgaagctgctgctgaaagatatgaaaacaaaatattttttctttgacgatggaaatggtctcaagggaaacaggaatgtcactttgaccctgtcttggaacgtcgtaccaa

SEQ ID NO: 42516 - DNA, 279 bp, Macaca Mulatta
tttttttttcatcaatgaaacccatttctatgaattttctaaagtaaaagaaacaaatttttagaatgttaagtgtgtacacatgacatttacttcattacacaagcatatttaatccaaagatttaatagaaacgctacattttctttgtttaaacacatgcataataaggctgcatttacaaataattaaaataatattatcatgttttctgctaagagataaaaggattctcttacactctatcgtacagttattgagtggtaatctcagagcgat

SEQ ID NO: 42517 - DNA, 542 bp, Macaca Mulatta
cgtgctgtcgccagaaatctgtgtggggaacgatcagtgggcggcagacggaggacatggagaggccagaggagactgtcgggagtgctcaggcaggttggagacagccaagtggatcttcgaaaagaaaccacagctattaaataaagcattaataaacgtgtaatgttggctttcttttcttttagtgctgtgtttacctggacaaacttgttggtggttgtggttgagctggatgggtcagagcaagaagccttggacctggttcccttggtgaccaacgtggtcctggaggaacactacctgatcgtcggagtggtggtcgtggtggacatcggcgtcatccccatcaactcccgtggggagaagcagcgcatgcacctgcgagacgggtttttggcagaccagctagaccccatctatgtggcctacaacatgtagtctcgtctcttggcttccatggacttttctagagatgtagacattgttctccgtgtccactgaagcgtgcagacacagggcaacactcaccagaatgcagc

SEQ ID NO: 42518 - DNA, 670 bp, Macaca Mulatta
  misc_feature (1)...(670): n = A,T,C or G
gcnnnnnnnnnnnnnnnnnnnnnnnnnnnnnacggnnnnnnnnnnnnnnnnnnnnnnnnnnnnnnnnnnnnnnnnnnnnnnnnnnnnnnnnnnnnnnnnnnnnnnnnnnnnnnnnnnnnnnnnnnnnnnnnnnnnnnnnnnnnnnngttggctccctgaagaggcttgcagggatgtttttattagcgaagcgtgggaattgacatcacgagtaaggtgtgcaggctgggccgggcaaagcacgtgaggggtaggggatgcgggtcactgtatctggttgcgttggttatcttgattaatgggccacttggtggtctggctggcgggacgaagactgtcaatcagttgttcagtgttccttcctgaggtgggacactccataaccttggtttcatatttagatttcctaaggccagttcctggaactgccacatcaaaggtgacctgaggctccgtggtgtgatgatgatggagtgtgctgcagtcggagccagggtgctgtcaggcggtgtctatcaatctcatctgaaagcttggtgaggagtagggactggccagggttgcctgccggctgtcctgttttatggaggtcagggcagcctctctgcccagtgaccctctgtcctgcagtatgtacattggctccatccagnggttggctgtcttcgat

SEQ ID NO: 42519 - DNA, 613 bp, Macaca Mulatta
  misc_feature (1)...(613): n = A,T,C or G
ctgcttgaacccgggagatgtangttgcagtgagacaagatcacgccactgctctccagtnnnnnnnnnnnnnnnnnnnnngtctcannnnnnnnnnnnnnnnnnnnnnnnnnnatcatcagaagttttcaaagaaacagtttcaaaataaatgttcctaaaagcacagaaagagggagtgtgaggggttataatagcagtaacaagtggtgttaaaagcatagacttggggctagacaggttgaaatcatggctagccatctaacaagctttgtaactttataaattgttcattttatctgagagttgatttcgtcatttgtaaaatgaagatggtatctgctgaatataaagtcttaacactaagcccaatatactcaaaacctgttgtgaatgatgaccaagatgatgtcattaacataagttaaatgatctcataaaacttagattttcagtactgtgagtaaactaagtgcccaatcatgctgtattacaaatgacaagaagccctcagaccagtacaaggtgcttgatggaaggagagatcacgtgtgaccagggagactaggaaaggggtgataaatgagacggttcctaggggattgtacagagt

SEQ ID NO: 42520 - DNA, 695 bp, Macaca Mulatta
  misc_feature (1)...(695): n = A,T,C or G
ctgttctggcccttactgagctgcgtttggggacatcagattcagcgtcgtatggggagaaacgagtgtaactttacaagcaagaagaagtgtataaaatgcaaaaaacattgatgtgtgcttcaaatgtggcatgaaaaaaaaaggacctctgatcaaaattgacttgagttcaggatttcatgctggaaggaatgttagatgtaacttctaatttctagttccagtaaacatctcttcttggaaaatttccaaaagagagtcctgnnnnnnnnnnnnnnnnnnnnnacattggtgtgatcatggttcactgcagcctcgacctcccaggctcaaacaattctcctnnnnnnnnnnnnnnnnnnactgagactatagaaatatgtgcttcttgaatcaactgcagtctctcctctacataagagctcttaagggtactagcaggatagaagcaaatgaacctgaaagctcatctgcagctcagaaaaacaaagacatggaattttaaagagtgaaggtagcatggtgttggccatgggtgaacaagacacagccagacaatgtggaccaatttcttcaaactacggcttttttgctgtctgcttgcagtgttgatggtggtggtgctggtcatcaatgttactcaggtagagtacttggaccatgagactgtttcagccacattcatcgacagc

SEQ ID NO: 42521 - DNA, 674 bp, Macaca Mulatta
aaatgaaactatgaacaaatagctatacatgtaggtgcatatttatctcctcttgagttgggagaaatctttctaagcatagaagcaatcgtggcaaaagagaagaacagatttggctggattaacaataaaacatttctgccagaaatatggaaattcaatttagacaaaattgaatataaacaaaattaatatagacaaaggtggtaaacataaacaggtggttctcagagaagataaacacatgattatttaacgtaaaaaagcaacgttcaatgttactagaagtcaaataattgcaaacccaaacaagaaatcttatatttgtttgattggcataaattataataatccaacattgagttaggtggaatataaactggtaaaatagttctggaagacaatttggccacaagaggatcctataagatatgtctactgtttaactcagcagtggtcaactgcatggatgtgcatgtgcaaggatattcattggtgctgcatacaatgataaattattgagagttttctaaatgtacactttcctccttctggtagccaccttctcttcgaagagtgactattgcctctttacccagaaatattggaaatgcaggaatggtaagacaattcctaagtgttcttagtcaaaggtaaattcattttcatatgac

SEQ ID NO: 42522 - DNA, 605 bp, Macaca Mulatta
  misc_feature (1)...(605): n = A,T,C or G
gggagagtgttgctttccgttgtaacagacttcatcacatcagaaatcgtactcgttttcatccttttaaggaagttcagacccaggaaaatttccatagtaccttaatgaaaaagatagaaaagatttaacagtgggacgtgtctttcctttcatctccttttcgccttggaaatcagaatgagaaggattgtctttgctggtgtgatcttattctgcctcttaggtgatgttggaggtgctgatatgtacttctttaatcttgcctatctcctttcataggttcactttttgtgcccttcaacttttcttctcccgtatctttctattccttaattctttctctcttcctattcaccacattaatattataatttccttctcttcacatatctatctcctttcacctctccttcttactctttatcatcatccttcttttctcnnnnnnnnnnnnnnnnnnnctttctacctttttaacttctcctttctttttctccctaattcttcattttattttcgttcacttaattttttcctaccacctccaatcttcaccttcattttttgtctcttctcttctccttacttagaaccactcctta

SEQ ID NO: 42523 - DNA, 804 bp, Macaca Mulatta
  misc_feature (1)...(804): n = A,T,C or G
ggtttcaacactgttctatactggggttttcccattagcatttaaaggtgcttaattctctccctgcaccctctgccccaaattatttttctttttatgtctctcatcctatctcattctcacctcacaccctcttcacaaacacacactcatgggaagagtcgcttgcagtagctccacacagccaggagagctcagcactccgaagtttggcaggctcatttccactgaaaccccccgattcaccactgccaatggacttcttgtggcaaaatccagtggatacttttgtatcatactcaacaaagggcatcagaaagattaaattgatgaaaacgttgaatcagacaactggcacccctagaagctggagtccccaaattagtattaaaccaagtgaaattctgagcaaaagctataaaacgggaaaaaggagagtccctttaaattcataaactttaaaatgaacagatacttgatgtgataggtatgcaaattaccctgatttgatcattatacattgtatacatgtagcaaaatatcataccctactccataaatatgtaacaattattaaggggtcnnnnnnnnnnnnnnnnnnnngaaaaatatttaccagaaaaagttaagttgcatattgaaatccttttacaaaaccaaaaatggggcttggtcatttggaaaattgaaactnnnnnnnnnnnnnnnnnnnnnccttgagaaatgtttttttggagaaaaaaaccctgggacccataaaaaccaccttggtaaaagtgtnnnnnnnnnnnnnnnnnnnnnnnn

SEQ ID NO: 42524 - DNA, 689 bp, Macaca Mulatta
  misc_feature (1)...(689): n = A,T,C or G
ttttttttttcctttcanngaagttagtgatgtctgtttgcctgtccatngacaggaaatctgcatgtgtagcagttactttatttattttttagctctttctgtgcagccgacaggtaaaatattgtgcagccattatgtgttaatgattcaaaggtgacaaaagaatgttattaggactataatatcttattttcataaaatacatgtgtagatgtatttatgtacatgtctttctatatttgctgataatacatttatctttgaatgttgcagttacaggtacatttttagtcttacctgcatattattttttctactatgaacatgtattaatcttcaaataaagctgtatacaaatgannnnnnnnnnnnnnnnnnnnnngtaacacctataagaaatcttaaagggactgataccctcataaactaacaaaactccttattttttacatttaaaattttcgttgtgtgtatatatttttgtatataggtctgtttgtttttaactagcatttccaagattgagaatgtgatctctaatttttggtgctttatcttttcctaaaattcattagtgtgaagtggtcagtataatagattttttgcccccatagttctggcttttattatttccttcatagaccaaagaaagagttcacacaggtttatgaaagcttagcatgttt

SEQ ID NO: 42525 - DNA, 979 bp, Macaca Mulatta
  misc_feature (1)...(979): n = A,T,C or G
tgctgttgattctgctgtcagtggccctgctggccctgagctcagctcagaacttacatgaagnnnnnnccaggaagaatctccctccctaatatcaggnnnnnnnnnnnnnnnnnnnnnnnnnnnnnnnnnnnnnnnnnnnnnnnnnnnnnnnnnnnnnnnnnnnnnnnnnnnnnnnnnnnnnnnnnnnnnnnnnnnnnnnnnnnnnnnnnnnnnnnnnnnnnnnnnnnnnnnnnnnnnnnnnnnnnnnnnnnnnnnnnnnnnnnnnnnnnnnnnnnnnnnnnnnnnnnnnnnnnnnnnnnnnnnnnnnnnnnnnnnnnnnnnnnnnnnnnnnnnnnnnnnnnnnnnnnnnnnnnnnnnnnnnnnnnnnnnnnnnnnnnnnnnnnnnnnnnnnnnnnnnnnnnnnnnnnnnnnnnnnnnnnnnnnnnnnnnnnnnnnnnnnnnnnnntctcctccagaacatcaacaaggacaaccccagcaaggaggcaacaggccccaaggtcccccatctccaggagggccacaaggaccaccccaacaaggaggcaagaaacctcaaggtcccccacctccaggaaggccacaaggaccaccccaacaaggaggcaacagacctcaaggtcccccacctccaggaaggccacaaggaccaccccaacaaggaggcaacagacctcaaggtcccccacctccaggaaggcaacaaggaccaccccaacaaggaggcaacagacctcaaggtcccccacctccaggaaggccccagggaccaccnnnnnnnnnnnnnnnnnnnnnnnnnnnnnnnnnnnnnnnnnnnnnnnnnnnnnnnnnnnnnnnnnnnnnnnnnnnnnnnnnnctcaaggtcccccacctccaggnnnnnnnnnnnnnnnnnnnnnnnnnnnnnnnnnnnnnnnnnnnnccccagggaccaccatcccctcctcaagggggcagacccgccggacctccccag

SEQ ID NO: 42526 - DNA, 755 bp, Macaca Mulatta
  misc_feature (1)...(755): n = A,T,C or G
ggcgcannnnnnnnnnnnnnnnnnnnnnnnnnnnnnnnnnaggccgaggcgggcggatcttcaggagatcaagaccatcctggctaacacannnnnnnnnnnnnnnnnnnnnnnnnnnnnnnnnattagccgggcatagtagcaggagctnnnnnnnnnnnnnnnnnnnnnnngnnnnnnnnnnnnnnnannnnnnnnnnnnnnncgnnnnnnnnnnnnnnnnnnnnnngcnnnnnnnnnnnnnnnnnnnnnnnnnnnnnnnnnnnnnnnnnnnnnnnnnnnnnnnnnnnctacctatgagcttgccataattctatttttttttcggccaagtgtggtcgctcatactnnnnnnnnnnnnnnnnnnnnnnntggagacagaaggatcactttagcccaggagttcgagacaaacctgggcaacatagtgagacccctatctctacaaaatatgttttaaatttggccaggcgtgnnnnnnnnnnnnnnnnnnnnntacactttggggagccgaggccggtgaattccgaggtcaggaannnnnnnnnnnnnnnnnnnnnnnnnntgaaactgctttctcttctaataatacaaaaaatttaacccggggcattgggtggccacaacaccccggtggggctctcaaaccttacaaatggggaaaaggcctaaaaagcctaaggaaaaaaaattgtctattgtgaaacacactgggaaaaagggcaaaaaagatttcgtccccaanagatgaacct

SEQ ID NO: 42527 - DNA, 440 bp, Macaca Mulatta
accagtcccgaaaacggcacagaaatggtatcaagaaaccccgatcacaaagatacgaatctcttaagggggtggaccccaagttcctgaggaacatgcgctttgccaagaagcacaagaagggcctaaagaagatgcagaccaaccatgccaaggccatgagtgcacgtgccgaggctgtcaaggccctcgtaaagcccaaggaggttaagcccaagatcccaaagggtgtcagccgcaagcttgatcgacttgcctacattgcccaccccaagcttgcgaagagtgctcgtgctcgcattgccaaggggctccggctgtgccggccaaaggccaagaccaaggccaaggatcaaaccaaggcccaggctgcagctccagcttcaattccagctcaggctcccaaaggtgcccaggccactacaaaggctacagagtag

SEQ ID NO: 42528 - DNA, 799 bp, Macaca Mulatta
  misc_feature (1)...(799): n = A,T,C or G
gggacaggcggggatggtgggcagtgctaagtaatgggtaagggtttccgtttgggaggatgaaaaaattctgaaattagacagggatgatggttgtattgcattgtgaatgtacaaaaagtcactgaattttttaaccacaatttctaagaaaagtttcccctggataacatttatatacaaagtccatttatgtttccttcataagacatttccttaacaagttttagtatttggctctttgacaacctaagagattctgcctggtcaccatggccattagagggttaaagccacacggtggccactctcagccacgggaccagggaaggtgagctcttccagctccagctacgatgcggcaagcaagcagccccttaccttcatcccttcttccttcccactctcaatcaattcatctattcttttcctttcttcaaactgggtggagaaaaagaaaagcagcatcagtatcctctcccaaaccccgtcgtggggaaccttcatggtcttgaaccctgacttgcccaaggccatgccccacggggccaacatccagccctcatttgcgactcactgggagatgaccgggtccccacctggatggcgaaagccccccaaaaatgtcccctcccttttccacaccaccncatccgctttatggaaaaaacctgtccccccaaagatccaacctggcatcccgaaacggcaaaacacttaacgcaaccccaagacaagacaatagggggccnttgataaaaacaagattcccgagatgccccaaagcaaataaacaaat

SEQ ID NO: 42529 - DNA, 679 bp, Macaca Mulatta
ctgagcccccgaatctctacctgcagggtgcctcggccctcttcgacatgatcgagtactacgagtcggccacccacctcaacatctccttcaacaagcacataggcacccggggctggcaggcggccgcccacatgatgcgcaaggtgggcgcctctcggcttccaggaagaggcagctcaggctcctggcacggggaggcactgtctcagggcacggcccgtaggctctgactgcatgagctctttagtgtgggctgttgtggggatgctgggcctggccctcaggccaggaggagaacagggctgagaggtgtcctggcccccaggcccccagccccttctctcattgcgaggcgtttcgtgacctccactttctcccatccacaatgtcatccctccgtgaagtcattccttggaggtggccatggtcgccattcccatgtcactcctgtgtgaaggctgggtgcagggaagggtcggggctatctgggaacctcccagccacacaggagttggggatcctggctgccaccagccctgcctcgctcacccacgagaccccagactgagccttccctccccagccacagtttcccctattgtaaaacgaggcgacatagccagacaacagctgtggcttcgttgctcgttgagatgtggggccacaggtcctgggc

SEQ ID NO: 42530 - DNA, 178 bp, Macaca Mulatta
ggtggaggttgaactgcaggagcaagacttcttggaccgctgcttccaagagatgctggatgaagaagaccaagactggtttattccatcacgagacctgcctcaggccatgggacagttgcaacagcagttaaatggactgtcagtcagtgaaggtcatgattctgaagatattttg

SEQ ID NO: 42531 - DNA, 857 bp, Macaca Mulatta
ggaggcttttgtgtgggtgtggggagcatgagggtgagtttggctttagacatattcaacctgagaggcctacgaacttcagcagatgtttggatgcataaactggagttttaaggagagggctgggctgagataaactcatggcagccattggcataaaaccaatcactgaagccagggaatagttgagattgtatagggagaggtccagtgtgtaaaggtggccgatgtcaggactctaagggacatcaagagtttaaggagtgagtagggaaataggagtcagctaaggagacttaaaaaaaagtggtgagagaagtacagcatcatagaaacttagagaagacagtgtttcagcaagcaagtagttaaacaaactaaatggttgtgtattttgtttcattttgttttattgagacagggtctcaccctattgccctggactgggagtaaataggtactgcctatatctatattttaacctcctaacctccttgcgccattaaagtgacactctcttgccaacattactacctcaaattatatacgtatagactaactgctatttatacttatcttcacttgcgcaagtgggaggtattttattatttattttaattgtaataaaaattattactctataatcagaaagtataaaaataaatatcaaaaaataactatctttaattatcttaaattatctaagtctaatccaatctgattactttattacatatcaaccatctctgcagcccataaacttaacttcatttttaaccattataaaactttccctacgcatcgtagataaacctgttaacatttcattctattatctgttaccactatcgtgtttc

SEQ ID NO: 42532 - DNA, 382 bp, Macaca Mulatta
tgtggttgtgaacaagtgcttgaatattggagagttacatagaatgattttaagctctgaatctgaacaaaagtccttctatatgcaagtatcttgctaggtaaagactctgggtatgagatgaccaagaccagcatcagcattagtatttctcttcattcttccacagctgtcactgtctgtttgataaaataggattttgatttttagtcaaaactaacagcaactggaggatgagaaatctctaatagacttgtaggaagatagaagttctattttattttatatcactcttggtttccaagtggtagtctttcttttgttgcccacatcttccccttccccaatacattcaaccccggtaaacaactaggaagagttc

SEQ ID NO: 42533 - DNA, 832 bp, Macaca Mulatta
  misc_feature (1)...(832): n = A,T,C or G
ggagtnnnnnnnnnnnnnnnnnnnnntnnnnnnnnnnnnnnccgaggcggatggattacgnnnnnnnnnnnnnnnnnnnnnnnnnnncaacacagtgacaccccgtctctactaaagaatacaaaaaattagccgggtatggtggcgagcgcctannnnnnnnnnnnnnnnnnnnnnnnnnnnnntcccaccatgcctggctaattttatatttttagtggagatggggtttctccatgctggtcagcctggtctcgaactcacgacatcaggcgatctgnnnnnnnnnnnnnntcnnnnnnnnnnnnnnnnnnnnnnnnnnnnnnnnnnnnnnnnnnnnnnnnnnnnnncgagcgnnnnnnnnnnnnnnnnnnnnnnnnnnnnnnnnnnnnnnnntagctgggtgtggtgatgttttcatttttacagatattgccaaatggtactcagtggtcttttttacacctcaattgtcttgaggnnnnnnnnnnnnnnnnnngggggtcagggaaacaattactgacaaattgatttccatacagaatgtaccagtttatacttaaccagaaatgtaaagtacatgttcctttaaatgacccctggaaggataagatcaaatttgtgaaaataccttgtgtttcttagaatgggaactccttgttgtgggtttggacttccagaattcacctttcttttttaaggggctttttggggggaaaagggccagcctttaataaaaaaagactttttccccttgggtttggcaagtttccccaagggaaggggagggtaagaagccccctgtgaaaaagaggccctttggctcctttgt

SEQ ID NO: 42534 - DNA, 668 bp, Macaca Mulatta
agggatctccacaaactggtggttgtcctggctgtctgtgtgatagcctctttctacaggtgaggcctcaaatgaattgcagctatcctagtgttcctatgagggcactttgtatgaaaaagggcatgtacttcaaaacatttttgtaggttctttggccagttgccaaagtgtatgaaagaatccaatagaggatgtttcttactgatagcagtcattaattgcagtaaaataaaatacgatcccattagggaatcttgaattctgacctcccatattctgttttgaaataaccactttatatatcatttttaaaaaaatctgatgatctctttgaggcaggtttcagattttggcagtacaacatgaaagattaggaaacgcattaataatgtgtgggtagaaagcttgttaaaaatctgagagtgaagtttgagttaaaagttgtttgaacatggaattgactgggaggccaaagatttaaagaagcagaagattcttctcttaagacatgaggagtaagttgtgtgataatggtgtgtgttttgtgtgcatgaatggacgttgtaaatgttgaattctaggctccgacaatcattgtcaacagaagatcaagctgcaaatatttatgtctttaaacttaaattataaagctagttaagtcttac

SEQ ID NO: 42535 - DNA, 72 bp, Macaca Mulatta
ggccacatcaagaagaggctgttcatgttccgatttggggaccgcaaggcacggatgaactgggtccacgta

SEQ ID NO: 42536 - DNA, 268 bp, Macaca Mulatta
cagcagggcagtgttgagagtgagcatcccagcagggctgcagcctgggagaggctgggagaggctaggagagctgggagaggctgggagggctgggagaggctggaaaagatggcataggccttgagccaggagtgtaagttcgtgaagatagtctgggggagtgagaaatgtgtggggtaagagggaaggcagcagatcgggggtaacccacggggctgtatctggagcagccacgtgggttacttgtacccacagtggaggtgga

SEQ ID NO: 42537 - DNA, 580 bp, Macaca Mulatta
  misc_feature (1)...(580): n = A,T,C or G
gggatcccggaagttgatgccgggggcagatcgcgtgcagcttgccagcggtgtacgctgagaagtctgtgagggctgggcttgcgagaggatcaacatgcctttggctagagatttactacatccatccttggaagaggaaaagaaaaaacataaaaagaaacgcctggtacaaagtccaaattcttactttatggatgtaaaatgcccaggttgctacaagatcaccacggttttcagccatgctcagacagtggttctttgtgtaggttgttcaacagtgttgtgccagcctacaggaggaaaggccagactcacagaagggtgttcatttagaagaaagcaacactaatgattcaaacagcttcctgaattttgtgttatctcacagaaagccttatcataaattccatagttctaattaatttaccaagataatgtaattacatttggttttgtaaggtatacaacagtaatctcctattttggtgtccgtttttcaataaagttttgattatggacaanaaannnnanannnannnnnanaannnaatgtaaanaaaaannnnccctgtcggcc

SEQ ID NO: 42538 - DNA, 320 bp, Macaca Mulatta
aaatagtgggttttcataaacaataagtattgtaaatataaatcattttacagttacttatagatttatttttgaatatatagcaatttagtacagttactagtcttttgtttctgtcccatatgcctgatttttccgtaacagtttaatgagttgaataattccacatggaattatgtttattttccttgggaagtggtatataagatatgtattttcttctcaaatgtaaggatgtagtttctaaacctgaagtcctgttaatgcagttacctgctgattttataatactataatatatgtgtatattttggaacgcc

SEQ ID NO: 42539 - DNA, 796 bp, Macaca Mulatta
gggcaaacagaaatgaaagcatttgtctacacaacgcctaaaagttgttcacagcagctttgttaatagctaacacctagaaacaactcaaatgtccatcaacaggtgaatagataaacaaattgtgctacatccatacaatggaatatggcaaattaaagggaacagactattgatacgtgcagcaatatgaatgaatctcagaataaatatgctaagggaaagatgctagacaaaaagaacacatatgattcaatttttttaaaattctagaaaattggaagtatttattattgacagaaaatggatcagtggttacttgaggacaggactggggaaaggaagggatgctctccaaaacgtcaaaagaaaattttgggggataatggttatgctcattgtcttgtttttggtgatgatttccgtccaaactcatcaaattgtactatataaacttttccagtttgttgtatgtgaattatactgcaatgcaactgtaaacacacacattcacacacacacacatgcacacacaaacatggcctgaaagagtcatttaagaaacattatttaacctaaacccctttattcttacagaatgagggaaacttgagggttcctaaataaaggtcaaggggtcaccacagccttaaatgtcattttaatttagaacctggagcatttaagaattgtggaaaccattagaatgggccccattaatatttgggttgggcccatatgggccaatatcttcttgttaacgtatctcaccttatataagaggtcgcagaagaat

SEQ ID NO: 42540 - DNA, 160 bp, Macaca Mulatta
aacgcgcaacaaaggacaacaaatgggtcacagatgatgaaacctcattatgaaaattgctcagggccatcactaggattgattttcaccatttgaatttagttgacatatggattgattgttaatttaaacagatgcaatctctcccccacctcgcttg

SEQ ID NO: 42541 - DNA, 597 bp, Macaca Mulatta
  misc_feature (1)...(597): n = A,T,C or G
cccgggatgtgcctgtaatcccaggtactcaagggaggctgaggaggaagaaccannnnnnnnnnnnnnatnnnnnnnnnnnnnnnnnnnnnnnnnnnnnnnnnnnnnnnnnnnnnnnnnnnnnnnnnnnnnntgcctcagaaacagacaaatgaaaaaagaatttaaaataaacctttgatgtgtttcagttcagctttcctctcaatgtcagaatcttcactattacattatccacattctccgagcacccaaagagcaactggtagctcattactctgaggacactcttctgttccattgtggcataactctagatgataaaaatgttaatcttcatcaaaaaatgacttttccttcctaaaataccaagtaagtttattgccctcacataagacaaccagcatatattttcacatttctgttgtctgcgtttaagttcaatcaaccccttatcactagctttattcttacttaaaccattcatgagagcattgtaagtgttaaacaatgatgacacattttcagacttataaataatgaaatataaaatgaattatctacatagataaatagaaattgatgaaaatttctatg

SEQ ID NO: 42542 - DNA, 249 bp, Macaca Mulatta
tccattctccctcagtcagtggtaaaccagaccctgtgaagtacttcatgcataaattattacatttttatagattgcttatgtcccttgcatgaaatacctgtccctccctctcatctccaaatactgaaattctttccattatttaaagctttagaaagtgacatctccacctagaaataatttttctttctattgagaatccatcatatttctggaacttcatgtatttagttattaccactttct

SEQ ID NO: 42543 - DNA, 122 bp, Macaca Mulatta
gacttgtaaggccttccttcctgccatgattaaagctaaccatggtcacctggtttgtatttcaagtatagcaggagtatttggtattaatggactatcaggtgagtactttgtttcaccat

SEQ ID NO: 42544 - DNA, 927 bp, Macaca Mulatta
  misc_feature (1)...(927): n = A,T,C or G
ggggattttcctatgtaataaggcagggatgtattctgtttaccccgaagccgttttttggtgcatatctagaggtctgtgaaaaaaattgcgacataaagtgcgggaaacaacgactttttcccatttttttagtaaaatcgtgcggtttggtaagagaaccgctttggtggccaaccttattgggccccgataccctttatttgccattataggggggccattcactgggtttttagccaaaattcaaagtagtttgcgtttgataattattttttgaccaatatacctgaggactttcgaagaaaagcacgtgtagatttttccaggtggttcctaattaaattttaacaaataggtagttggttaaggtagctgttggggtgtttcgggaactcccaaatacttagatttcccaaatgtgccttttcaaaaggaaaaagggaattccttttaccatattttggtgtgatagggcagtaaatcagtttttttttatttgttgctgaattttttgggttagtcaattcatgcattagagaagtaatattaaaaatttaaaaaagtgtctgttaacatatcccccttccattccagtcttagtctatgtgtaatttaagaaccttgggccttgatgtacatagagtttatattcttttaatatcctgctacttcattgttttcatgtttaatctttgggttgaatgtatcacagtttacttgaccgtttcttacaggtgtttgttttnnnnnnnnnnnnnnnnnnnncgctaatgtaaatttgagtgtttggatggtagtcttagcagaatttaaggcagagtctcagttagggtgatggatcgatttatagtccctagtttgaggagggaggtggcaatatgccatttcctctaaaattgatatgttaaatcacaatggacatcc

SEQ ID NO: 42545 - DNA, 3123 bp, Macaca Mulatta
  misc_feature (1)...(3123): n = A,T,C or G
tgccaacagccccgaggtcccagtaaagatcctcaactgtgacaccatcactcaggtcaaggagaagattctagatgccatctttaagaatgtgccttgctcccaccggcccaaagctgcagatatggatctgnnnnnnnnnnnnnnnnnnnnnnnnnnnnnnnnnnnnnnnnnnnnnnnnnnnnnnnnnnnnnnnnnnnnnnnnnnnnnnnnnnnnnnnnnnnnnnnnnnnnnnnnnnnnnnnnnnnnnnnnnnnnnnnnnnnnnnnnnnnnnnnnnnnnnnnnnnnnnnnnnnnnnnnnnnnnnnnnnnnnnnnnnnnnnnnnnnnnnnnnnnnnnnnnnnnnnnnnnnnnnnnnnnnnnnnnnnnnnnnnnnnnnnnnnnnnnnnnnnnnnnnnnnnnnnnnnnnnnnnnnnnnnnnnnnnnnnnnnnnnnnnnnnnnnnnnnnnnnnnnnnnnnnnnnnnnnnnnnnnnnnnnnnnnnnnnnnnnnnnnnnnnnnnnnnnngacccgactcctggccactaaggnnagggcacactgcagaagtttgtggatgacctctttgagaccatcttcagcacggcacaccgtggctctgccctgcccctggccatcaagtacatgtttgacttcctggatgagcaggctgataagcatggcattcatgacccacacgtccgccatacctggaagagcaattcctgcccctgcggttttgggtcaacatgatcaagaacccgcagtttgcgtttgacatccataaaaacagcatcacagatgcctgcctctctgtggtggctcagaccttcatggactcttgctccacgtcagagcaccggctgggcaaggactcaccctccaacaagctgctgtatgccaaggacatccccagctacaagaactgggtggagaggtnnnnnnnnnnnnnnnnnnnnnnnnnnnnnnnnnnnnnnnnnnnnnnnnnnnnnnnnnnnnnnnnnnnnnnnnnnnnnnnnnnnnnnnnnnnnnnnnnnnnnnnnnnnnnnnnnnnnnnnnnnnnnnnnnnnnnnnnnnnnnnnnnnnnnnnnnnnnnnnnnnnnnnnnnnnnnnnnnnnnnnnnnnnnnnnnnnnnnnnnnnnnnnnnnnnnnnnnnnnnnnnnnnnnnnnnnnnnnnnnnnnnnnnnnnnnnnnnnnnnnnnnnnnnnnnnnnnnnnnnnnnnnnnnnnnnnnnnnnnnnnnnnnnnnnnnnnnnnnnnnnnnnnnnnnnnnnnnnnnnnnnnnnnnnnnnnnnnnnnnnnnnnnnnnnnnnnnnnnnnnnnnnnnnnnnnnnnnnnnnnnnnnnnnnnnnnnnnnnnnnnnnnnnnnnnnnnnnnnnnnnnnnnnnnnnnnnnnnnnnnnnnnnnnnnnnnnnnnnnnnnnnnnnnnnnnnnnnnnnnnnnnnnnnnnnnnnnnnnnnnnnnnnnnnnnnnnnnnnnnnnnnnnnnnnnnnnnnnnnnnnnnnnnnnnnnnnnnnnnnnnnnnnnnnnnnnnnnnnnnnnnnnnnnnnnnnnnnnnnnnnnnnnnnnnnnnnnnnnnnnnnnnnnnnnnnnnnnnnnnnnnnnnnnnnnnnnnnnnnnnnnnnnnnnnnnnnnnnnnnnnnnnnnnnnnnnnnnnnnnnnnnnnnnnnnnnnnnnnnnnnnnnnnnnnnnnnnnnnnnnnnnnnnnnnnnnnnnnnnnnnnnnnnnnnnnnnnnnnnnnnnnnnnnnnnnnnnnnnnnnnnnnnnnnnnnnnnnnnnnnnnnnnnnnnnnnnnnnnnnnnnnnnnnnnnnnnnnnnnnnnnnnnnnnnnnnnnnnnnnnnnnnnnnnnnnnnnnnnnnnnnnnnnnnnnnnnnnnnnnnnnnnnnnnnnnnnnnnnnnnnnnnnnnnnnnnnnnnnnnnnnnnnnnnnnnnnnnnnnnnnnnnnnnnnnnnnnnnnnnnnnnnnnnnnnnnnnnnnnnnnnnnnnnnnnnnnnnnnnnnnnnnnnnnnnnnnnnnnnnnnnnnnnnnnnnnnnnnnnnnnnnnnnnnnnnnnnnnnnnnnnnnnnnnnnnnnnnnnnnnnnnnnnnnnnnnnnnnnnnnnnnnnnnnnnnnnnnnnnnnnnnnnnnnnnnnnnnnnnnnnnnnnnncctttgtcaccttcatcaagggtcaacgtgaaatgcagagtgcatctaggagattctacctccagccatctccatggctccatccccaccatccttcctgagaactccatagacggctggggctaacagcctagtccctgttccctctgcagaatctggtgccattgctatgcagatgactttgtcactgggctgtccagacctctttgggaatgatttcatcaacatctcagctgtctctttcatcattctccttcctcatctcttcagcagtcatccttgaaagaaacagacttaagcacagcctcacagagaccacccaaaatgccagccaacctcagcctccagcttgtcaggtctgggagggacaaagaattgagctgatgggcctggctggaattgagaagagggacatacaaatgacctcggccttggcatccatctccccatctgttcttacatctacagatgcacgattttagccaggtgggcaaatgtgtgcctagaaatggatactaggtaagctagaggatatggggagaaatggtctaatggagggttttaggaacctttcatcctaaggagaccttaggtgctgtctggtccggtctcccaccctaagcaggagtctctgttggcacctctgctctggagttgttcaccactatgggagacaaggagaaacatcatcttaggtgaggttaaggagaaggattcacagtcttgccttcactccccaaacatcagacatcattccttgtcaccctctcagaatgagccccacttggggaagaaaccacaccatctccagcaaagtccatggagcatccagtacttttacgaacacttgcccctttggatatgaatatgtgcacatgtgtgtgagcgcatgtgcatgcgtgtgtgtgtctgccccagggtgtaggcagaaagcgcaaaaggattccttgtcctttgtaggaggattttcggtgttccccttctctttccccttgctca

SEQ ID NO: 42546 - DNA, 614 bp, Macaca Mulatta
  misc_feature (1)...(614): n = A,T,C or G
aatggtgtgcaaaatatgcatgnggccgattttacctgctggcttcctttaattttgaattatccccagatgttttcagaaatgtatttgaaattgttagtgttttaagattaatgaaaccacttccttgagctgattcacagtctatatgatgagcagagtagaattactgctgtttattaaacagaattcagagcaaatctccatctctctcccctgccaagcatctaccagaagccatttagagaagaagaatatttgcccatttgattttaggctaatgctaatgagtgagaattctgacacatgcaaacatgttcagaagaggcaaacacgtactttaaacacacacaaattattattgtctcttaggtttggatgttgatgggatatacagagtaagtggcaacctcgcagtgatccagaagctaaggtttgcagtcaatcacggtaagattatatttcctgtcgtcattcacatgcatcactcataactttttgaactggcttcaagtaattttttaaaatgtccaattcctgctgtttctcagatgagaagttggacttgaatgacagtaaatgggacgatattcatgtcattactggagcactca

SEQ ID NO: 42547 - DNA, 744 bp, Macaca Mulatta
  misc_feature (1)...(744): n = A,T,C or G
gggctacctcagtggttctcatttgaggatcttgctaaaagtgctgactttgatttgaaggtctgagttgggaacaaaaattctacctcagcttccccaagtgctannnnnnnnnnnnnnnnnnnnnnnnnnnnnnctatttgtcacattattggtcacatttattttttaatttttgagatggaattttgctttnnnnnnnnnnnnnnnnnnnnnnnnatgcaactnnnnnnnnnnnnnnnnnnnnnnnnccaggttcaagcagttctcgnnnnnnnnnnnnnnnnnnnnttctgattacaggcatgcaccaccacacccagctaattttgtatcnnnnnnnnnnnnnnnnnnnnnnnnnnnnnntcaggctggtctgnnnnnnnnnnnnnnnnnnnnnnngnnnnnnnnnnnnnnnnnnnnnnnnnnnnnnnnnnnnnnnnnnnnnngcacctagccgtcacatttccaaacaagcacgaaaggggttcctttttgtcttcctgcctgccgtcagcatggtagaaatggctctgcctatgcttatgcctctggtgcccaatgccttgcactgtgcccttcaacactatgaagagaaacaagtagccacacctcaaaataatgtgggctgtcaactgacctaaataaacctacacaaaccagntacttgcccttttgctggaaacattgattatgtgcctcctcatgtagtaagaaagtggtatcctggattagtccaacagt

SEQ ID NO: 42548 - DNA, 572 bp, Macaca Mulatta
aggtactcacatctgctgttaataaactacaagtactgctctcacaatatgggactttgaactgtgatgtagtcaacagttgccggcatcctctcagctgatgtgctgcgaagtatattgggtcagacttgcagccagatgcagttttgcaacccaagaaaaatgttgaaccatatggtcaaaaactttcccaagatgaactctggaaaaaaatcagctaaactcccttggcgatcttcaggaacactagtaacgactgtaattactccgtgatctttgatgactgttatacataacagacactctagcaccttaccttactggcatggactacctcatggaccgatacttcatggatgatagcttaattgcttagcgtagggatttaaggtagtcaaggggaaaatatgcagtctaattacagatcttagcatcaggcaactttcaacttcaaaacccttcgtgaaaaatctggtgatcgcactatagctctgatcttcggatggtttcactgtcatatacattgttggcctaccttatcacaacaaactgtgccattaatcctctcacag

SEQ ID NO: 42549 - DNA, 461 bp, Macaca Mulatta
  misc_feature (1)...(461): n = A,T,C or G
atgaactgttctccaggcttagtatctgtgatactcttactgcttggaagaacgcgtggagattcagtgacccagatggaagggccagtgactctctcagaaagggccttcctgactataaactgcacgtacacagccacaggatatccttcccttttctggtatgtccaatatcctggagaaggtccacagctcctcctgaaagccgcgaagactgatgagaagggaagcaacaaaggttttgaagccacataccgtaaagaaaccacttctttccacttgaagaaagactcagttcaagagtcagattcagctgtgtacttctgtgctctgaattatggcggtagtggaaacaagctcatctttggaactggcactctgcttgctgtccagccannnnnnnnnnnnnnnnnnnnnnnnnnnnnccagctgagaggctctaaatccaatgacacgtcgac

SEQ ID NO: 42550 - DNA, 632 bp, Macaca Mulatta
  misc_feature (1)...(632): n = A,T,C or G
gggaaacgcttctgtatgtcaaaggagtccacaacttcagctacacaactttttgtattgaaagaactcatactttttgtagcttttatttcacatttaatttaaaatgacttttagcactaaaatgcctagaagattttactccagacctataaggaaatgtttagtttttatgaaaaatgacaagtcagtggttaaacttctcatgtctttgggtgcttttgggccctaatagcactgggacaacaccacgaaccacatgggaaacatattttttgggaaacaaaaactttaaatttttggaataaaccgtatggctatgggagaaggctaaagaaaaaatttaaagggacttacctgggtttttccnnnnnnnnnnnnnnnnnnnnnnnnnnnnnnnnnnnaaaattcccacctggtgggtttgaaaaaaaactcctttaaaaaaatccaggggggcccttgggccctaaaaccnnnnnnnnnnnnnnnnnnnnnnnnnnnnnnnnnnnnnnnnnnnnnnnnnnnnnnnnnaaattttttgggggaaatttaaaggggggggcccttttcnnnnnnnnnnnnnnnnnnnntgggttnnnnnnnnnnnnnnnnnnnnnnaaacaaacccc

SEQ ID NO: 42551 - DNA, 805 bp, Macaca Mulatta
gggggtctgacccacaggtcctgtgaaggagcagaggggtaaaaagagtagaggacatgatacattgtactttactagttcaagacagatgaatgtggaaagtgtaaaaactcaatggaactgattgagatttaccacagggaaggcccaaacttggggccaaaagcctactcaagtgattgaccagtggcgccctaatgggacctgagctattgggagaagagaactgttctttggtcttcaccatccttgtgagagaaggacagtttcctgcattggaacctggagcaagcgctccatctttcacacaaattccctcacctgagattgaggtgctcctgttaatgggtgtctgtgtgctgtaattctggttttggatatgttctgtaaagattttgacaaatgaaaatatgtttttatctgttaaaacttgtcagagtactagaagttgtatctctgtaggtgcaggtccatttctgcccacgggtagggtgtttttctttgactaagagattgacaccgggatctgttgcccagggcctcccaactcaaccatttctaggtgaaggcagaaaaatccacattagtcactcctcttcagacatttcagctgagataacaaatcatttgggattttctcacccatagaaagagtggtagatattttgaatttagtaggtggagttttatagaaaaaaacagctttttgcctcagttttgattttatcctccatttgaatttggccaagaacgttaggtaaatatggcatcgaattgggctttctgaattcccaattcaaatata

SEQ ID NO: 42552 - DNA, 590 bp, Macaca Mulatta
taactagcctaattttttaaaatttattttaaaaggttgagaaataacattttctgtagtgtttaatactattcagattatcaaattctgggatcaaaagttttctacttgcttaggctaagatacctctgttcacccatctaatctcatatcttctaaaccctgctcttggtatcaaatactgaaatgtaataaatgtcaaatatggtgatgtagagaaaactgtatattatctcttgtgtctaattttggcttttacatggttaatgggaattttaaatgtaaagataattttgatttatatttatttcatctaatgctaagggagttcagaccattgctttagctaagatttcacaaaaagctttctccaagtcagtgtatattcaggatgtggccacacaaatatgaataaatactcttaaatcatgttaaagtctgctaaagcttcctgtatctttaaatagtacctgtgatcggttatgcaattcattcttaggttcaaatatatctaagattatctgacaccatgacttatgaatacagaccacataaagttacctatataattaattggatacggcttatgc

SEQ ID NO: 42553 - DNA, 528 bp, Macaca Mulatta
gtcctcgcttgatgcagaggtctggaatgcgtggggctcaggcatgctgggcagctggactcggcatgacccgaggtcgtgaggccgttccgcaggcttgggacgctcctgagactctcagaatcaagtgcaggccactgcattagcatgggagaaatggtagagacagggcttgagggaaggatgcccgagattaaaggtattaaaggcaagttggtgtcgcggcaaaaccagcgtcggagccaggaaacaagggtttcagtctttcctcgccaattccagagatagctgcatatcacaggaagaaaagcgacgcagccattattcttcattattatcaaatttggctgctgccggacgccgtaagagttgtggcacaccaaaccctcagcccgcgtctccgtggcttatcattaagtttgaacccgagccctcgccgtagagtgtctaatttcggtcccagaagctgacgtacacctcggaacgaaagttaggcgcggaagagcatgcgtagaaatggcgctcggt

SEQ ID NO: 42554 - DNA, 512 bp, Macaca Mulatta
agactttcccttttgtaagatgaggtgaacataggctgaaattagttcacttagttaaatctgttctggaggaactgtttttaaattgctgtccttcctattagatcattcctttctgacaaacgaggagctcgctgtactccctgtcgtcaaagtgcttccctctggtaaatacacgggtgccaacttaaaatcagtcattcgagtcctgcggggtttgctagatcaaggaattccttctaaggagctggaggtaagtggcttctgccaatgattctctcccaaggtgtatgcatttagtttgtaaggaaaatgtatctttactagcccaagattagaagaaattttgaaaattttccaactctaaaagcaccaccttatcacatctagcagaaaattaatttttctgattaggattccaataatagtgatttaaaatgttaactacttggaacttgatacatttccctgaagattatccttcctgcctcatagttaaggtaaaaatgtta

SEQ ID NO: 42555 - DNA, 418 bp, Macaca Mulatta
ttttgcccacgcctttgcgattttggagggccaattgtatgtgagcggtggctgtggtgggactggccaatacctggcctcattcctgcactatgaccccaaacttgagaagccagggacatttctgagccctatgggggtacctcgggctggccatgtcatggctgcattgggtgggcgggtgtatgtggcaggtgggctgggtgagactggggacctgctaagctttgaggcctatgaactaaggactgatagttggactcacctggcacccctaccctccccccatgtgggagctgcaggtgctgtgctgcagggggagctactggtgctggggggctacagtcaccgtacttacgcactctcccaccttatccatgcctactgtcctggcctgggccgatggctttgcctggga

SEQ ID NO: 42556 - DNA, 888 bp, Macaca Mulatta
tggcgagcggagaataataatggatgatgataactggaattagattgaacagtgaatcagaaaatggtgcttacttagataatcctccaaaaggagctttgaagaagctgattcatgctgctaagttaaatgcttctttaaaaacttagaaggagaaagaaaccaaatttatattcagttatctgaagttgataaaacaaagggaagaaccttacagagcatattaaaagtcttcagactgaacaagcatctttgcagtcagaaaacacacattttgaacatgagaatcagaagcttcaacagaaactaaaagtaatgactgaattatatcaagaaaatgaaatgaaactccacaggaaattaacagtagaggaaaattccggttagagaaagaagagaaactttctaaagtagacgaaaagatcagccatgccactgaagagctggagacctatagaaagcgagccaaagatcttgaagaagaattggagagaactattcattcttatcaagggcagattatttcccatgagaaaaaagcacatgataattggttggcagctcggaatgctgaaagaaacctcaatgatttaaggaaagaaaatgctcacaacagacaaaaattaactgaaacagagtttaaatatgaacttttagacaaagatccttatgcacttgatgttccaaatacagcatttggcagagagcattcccatatggtcctcaacatgcgtcggcctcatctgaaagagaccttccacaccccactttgtgcaggcccccaaaccacctgctccagggcgagaaaagcccaggccggagactgcacagacatatacggaaccatgaagaagcacaggccccgaggcggaccacaaccagagaccc

SEQ ID NO: 42557 - DNA, 685 bp, Macaca Mulatta
gccagtgccctcagccccagggtagcaactcacgctcccactacagcaagaaataaaggcaaaagagaacatctttttttaaattgtagtttgttggagaattggtcccacctcagcgcgcaccttgctggatgcgtctccagtagtgctgcctctgtgccaggcatccgctccctgctggaactgaggtggacacaggtgtgggcccttcccgtgcctgtgctcagaggcacttcacgttctccacactttggaattcctgaagacgtggaggaagtcactgttaaatgaatttccacctgatcaccctgtgttcacagcaggcagaagcccgctggtgtgggcctcccaccccttccacatccatgttgtgattggacccgtaagtttactttcttcaaacggttcataggatgtttaaaacaccaacacattgcttaaaatgatgaaatcaaccctcaaaaaacagtctcctaactcatcccctcctgtaggagtgagctgggggtttcgtccatagctttggttgggcctatgtcacatccaggcagccatgtgcagggagtcagggtctgtctggaagcgtccacgctctccctgccccagcctgtgctcccaggggcctaggctaccatggactgaagggcagtcccctcccacccggtgctcaggtcttatgcttgcc

SEQ ID NO: 42558 - DNA, 770 bp, Macaca Mulatta
  misc_feature (1)...(770): n = A,T,C or G
ggccaagaaagcattgagaaaagcatcagaataaagcaattaactgtagataacaagacttaaaatgatcgtgattacctcgtgttaatagagagaaccaaattctnnnnnnnnnnnnnnnnnnnnnnctgagacggagtctcgctttgtcacctnnnnnnnnnnnnnnnnnnacaatctcggctaactgtagcctccacctcccagggtcccacctctgccttctgagtatctgggacgacaggtgtacgccaccacgcctgactaattttgtatactctttttggttagagatgaggttctgccatgttgcccaggctgggctccaaatcctaggctatggcgatctgccctnnnnnnnnnnnnnnnnnnnnaggattacagacgttagccaccgtgcctggcccatcagtgtacttttgatattaatgctcaattnnnnnnnnnnnnnnnnnnagaaaaaattggatgttataaataatttccttttaattttagcttgagcaaacataaaattcctttcacaaaccttttaccatttcctaatcgattccatttgtcttctaatgttcctctttgtcattttggaagaaccatcactctactgtaaaaagaaaaaattagtttcttttttcccttaacaaagtctcatactttaataacttcctatttaaaacgtctcttatttttaaacgttctctaattaccctcacatacagagtttatttccctttctagtttttaagggtcatcctatttaatttagacct

SEQ ID NO: 42559 - DNA, 638 bp, Macaca Mulatta
gggaaaaaggaagtttgtcctgtcctggatcagtttctttgtcatgtagccaagactggagaaacaatgattcagtggtcccaatttaaaggctattttattttcaaactggagaaagtgatggatgatttcagaacttcagctcctgagccaagaggtcctcccaaccctaatgtcgaatatattccctttgatgaaatgaaggaaagaatactgaaaattgtcactggatttaatggtatcccttttactattcagcgactatgtgaattgttaacggatccaaggagaaactatacaggaacagacaaatttctcagaggagtagaaaagaatgtgatggttgttagctgtgtttatccttcttcagagaaaaacaattccaatagtttaaatcgaatgaatggtgttatgtttcctggaaattcaccaagctatactgagaggtctaatataaatgggcctgggacacctaggccacttaatcgaccaaaggtttctttgtcagcccccatgacaacaaatgggttgcctgagagcacagacagcaaaagagacaaatttgcagccaaatgaagagaaaaatcacagtgactcttcgacatctgaatcacaagtttcctcaagtagcctttgaa

SEQ ID NO: 42560 - DNA, 781 bp, Macaca Mulatta
  misc_feature (1)...(781): n = A,T,C or G
ggatgcttatttttaaagtaaaaagttgcctcactgtcatgaaatcctattacttccattaaaaaaatcctgtaaaatggtcaaactggacaatgtaagagataatgatggctttgaggcatttcatactttatcggtttacatttggctaacagactggtaggtaaggtttagggttctctccactaatggaaaattaaatgcaaaatgtcctaagaattatgttttcaaggctttgactcagatttgtactttgatgtatgaaagtgaatatcaaacttgtttatacagaaaagactatatagaaaaataaatccatgttgtgtagagtgatacatgttttatgtttacccaatgcctgtactaaatcttgtgcttggctttgaattatatatgtgtttacatatnnnnnnnnnnnnnnnnnnnnnnnnnnnnnnnnagtcatctaaaaacctaaggttttggaaaagaaaggcttttttcatccttaccattaggtggaannnnnnnnnnnnnnnnnnnnnnnnnnnnnnnnnnnnnntaaacaatgcatttttccctggaatactaccccaattcaaaaaaaagtttggtggacttccccccccccggtaaaataatgtaacactaggtttttcatttatttagaatttgtgaaagcctcccttcaaggggccaaagaaaaatgggtctttaaaccttatggtgtgggattacccgggcacggccaccccctaagtggtgtaaaaaaatggagccccttgggcgaaacagagggggt

SEQ ID NO: 42561 - DNA, 244 bp, Macaca Mulatta
ggcatccctagaacaggttacctctaagttttggtaaattcttcaaacactctttcctttgaaaccctaatacagcacaggctctagcacctgacaaacgtggcttcaaatcctagtggatctgtttgacaattaccatcaacagggtttctcctgttcccacaagctagtcgtctttgtagccagtgggaagaggagaaaagaataaaagcacatgccccttttttataagagcatgaatgat

SEQ ID NO: 42562 - DNA, 330 bp, Macaca Mulatta
ggcggcatgattccatcgcaagccccctagggctgtccagtgacaatgattgccaagtcatccccgcatacacgtacgtacctctttatgtattttggtcctgtttttaatttcagctactatcattcccacaatggcacctctgtaggtcgcagcaagggaaaagaacttcttgttggatgtgatatcacgataccatgagtctgggtacctgacaaagagaacatactcgggtgaacctgccataggtcaagtccaactaaggtcgtgctctagacatgagaaccacagggagctctgggccacttccgcctgctgctctaaggctga

SEQ ID NO: 42563 - DNA, 844 bp, Macaca Mulatta
ggggtagtaaccaggggaaagaagagtgggaaatacatcaccagtagcctgagatcaaaatggctttcttagctctcgttggtttggagggtaagaaactaaagaggaggtgattgaaatgcaggtgacacatctttttggaatattatgatcctcgtggagactgcatagtaccatggagcaaatcttatggttgaagatagtagacctgtagttcatacaccaaagaattaaggaatcacacatgcctattggaacaaaggggtaggtagtatacctggccttgctttttcctctgtggtggacatcaggtgtttgtgctatatactgccacctcccttagagaactgctgcttccccaaatcttgatctggtgagattgccaagcacagctctccattcccctggccacagtgagggcagaagatccaggcctgaccagtcagactgcatattccaatcagcccagggggatccatggtgagcacatggctcataattcaagcaggcaagctccgctctgaattttgttcatttccggctgggaaaaaaaagatctttcctccactccccagaatacccccagttttccctcccgggaagggatccttggcccaccccaaaaatccttttttggttttgcttttttgattttataaggggttaggtttcggtgttccctttaagaaaaaaaaaacgtttttttacatttttaacctggccattttttggaccctatgaaatacctccttttttgttccaagatatttaaccggtatggaaaacaccttaaaacaagaactctttctaaaattttccaaacccctgtcaaacaagtttttaa

SEQ ID NO: 42564 - DNA, 1397 bp, Macaca Mulatta
  misc_feature (1)...(1397): n = A,T,C or G
tccttcactgtgtggacagcatgcaagcaaacagtgagatttcccagttaaaactgagtccctcaagcacatacaattatgttcaacttcagttgctagacaccattgattcagaatgcacttccaaaaacagatacccttgtggcaagtttttatttctgtctagaaggttattcatggaattatnnnnnnnnnnnnnnnnnnnnnnnnnnnnnnnnnnnnnnnnnnnnnnnnnnnnnnnnnnnnctgtacatacatacatatcttggagtcctctcactttgctgaaatgcatgcctttaacatatgagagtgttctatacacataatacccagtttcagctttctttctggagcaattatacctacaaaagcatcttcacagcatgcatatgctctggtgaaattctttttttctttcataacccatggaagtaaagacacagaagaagagaaataatacagtagtcccaccttacctgtggtttggctttctacagtttcaattacctacagtcaactgtggtcagaaaatattaagtagaaaatttcagacataattcataagttgtaaatgtatacagtgttctgagtaacctgatgaaatattgggcagtcccaccctattctgcccagagtatctgctctataggtgctccctgcttgctagtcacttagggttatcagattgcctgtaccagtatttcagtgattctgttcaagaaactcttattgtatttcttaatgaccccaaagcacaagagtagtgatgctaacaattagatataccaaagagaagccatagaatgcttcctttaatttctttcaacttaatnnnnnnnnnnnnnnnnnnnnnnnnnnnnnnnnnnnnnnnnnnnnnnnnnnnnnnnnnnnnnnnnnnnnnnnnnnnntaagctggctaagatctacattgtaagaaccaacctttatctgtgaaattgtgaagaaagagaaagaaattaatgcatagcgtacacagggtttggtactgtcctcggtttcaggcatcaactaggcatcgtgaaatgtagtccccattgttaagtgcaggctacttattacttaatctacattattctccactagctctatatacacagctctatcctaacagaatctgaatcttgctgtctcacaatagttaagaagattcactctggctatgaagctcctcaaatactagtggataaagtaatttttaccaccacacacactccaagatgtgtttttctttaaaagagtggcaggttagataatggtgtctttgctgggtgactttcctcaagatctggttggaatgtcattcttaatgtgtttgcatccaggatataattctttgtcaatatataccaaaaagccttgatgtttgcaggcca

SEQ ID NO: 42565 - DNA, 697 bp, Macaca Mulatta
cactgtctgcccggacaccctgcctactccgtgcggctctgcgtctgcttgctgaggaggcggattaggggcgcagagtctcttcctttgagtgcctaggtcccggttagtagaggctttgagtccgcatcgccacagctgacggctgcgagggactaagagcagaatatatctttagaaatgagttgcacaattgagaaggcacttgctgatgctaaagctcttgttgaaagattaagagatcatgacgatgccgcagaatctctgattgagcaaaccacagctctcaacaagcgagtagaagccatgaaacagtatcaggaagaaattcaagaacttaatgaagtcgcaagacatcggccacggtccacgttagttatgggaatccagcaagaaaacagacaaatcagagaattgcaacaagaaaacaaagaattgcgtacatctctggaagaacatcagtcggccttggaacttataatgagcaagtatcgagaacaaatgttcagattgctaatggctagcaaaaaagatgatccgggtataataatgaagttaaaagagcagcactccaagattgacatggtacatcgtaacaagtccgaaggattcttccttgatgcatctcgacacatccttgaagcacctcaacatggactggagagaaggcacttggaagcaaatcagaatgaactgc

SEQ ID NO: 42566 - DNA, 722 bp, Macaca Mulatta
ggggagagggcagggagccggagcggcggaggagccgtcagcagcggcgcggcgggccccaggcgaggcggtcgacgctccctgaaaacttgggcgcgcgctcgcgccactgcgcccggagcgatgaagatggtcgcgccttggacgcggttctactccaacagctgctgcttgtgctgccatgtccgcaccggcaccatcctgctcggcgtctggtatctgatcatcaatgctgtggtactgttgattttattgagtgccctggccgatccggatcagtatcacttttcaagttctgaactgggaggtgactttgagttcatggatgatgccaacatgtgcattgccattgcgatttctcttctcatgattctgatatgtgctatggctacttacggagcgtacaagcaacgcgcagcctggatcatcccattcttctgttaccagatctttgattttgccctgaacaccttggttgcaatcactgtgcttgtttatccaaactccattcaggaatacatacggcaactgcctcctaattttccttacagagatgatgtcatgtcagtgaatcctaccctgtttgggtccttattattctttctatttattaagccttatccttgactttttaaggggttaccttgaattagcctggggttttgggaaacatggctacccgaaaaacattcaaagggggcaaggggaaccttcctttcttt

SEQ ID NO: 42567 - DNA, 326 bp, Macaca Mulatta
gaggagaaacgagaagcggacgatgcctagaagaagtgctagaccaaggtgcaggaaaagcgcccgccgccctgtaagaagaggacgtgagagtccgcgggtgcttgacgtggggttcgagggcagggggaggccgcggggctgggcaccatggccgctcccgggaccacccggccgcgtgcgtttccacgctgactctctaggatgctcccaggaaggggctgggggagccacattgattcgcctgacaccaaccaccctaggaatcagtacacctagcgggcatgtggccttaaagactccctttagaatacctcaatgaagat

SEQ ID NO: 42568 - DNA, 685 bp, Macaca Mulatta
acaaacacccgcgaaagagtcggccgacttcgacagtctttggtcatgcttcaagtgttaccacaagcagtcacccagtttgaagaattggttggtatggctgaggctctgcttaagggtggaggaaccatgtctacatctgcatccaccctctggagagcaacaaacaactcctcaccagattcatttgcctcaacgtgcagtaattctaactccagttcaccagattccttaaagcctgaagaagagcatcagactgatgagaaacagttccagattgaaaaatggcagattgcccgttgtaacaagagcaagcctcagaagtttattaatgatttaatgcaagtactttacacaaatgaatacatggccactcacagcctgacaggggcaaaatcctctacttcaagggacaaagccgtaaaaccagctatgaatcagaatgaagttcaagaaatcataggagtaacaaaacaattatttcccaatacggatgatgtttcaattaggagaatgatagggcaaaagctaaacaactgtaccaagaagccaaatgtaagcaaaaatcttaactctcaggatattaaatagatccttttggtattacaggtatctgaaacaaagcaccttcagttctaaatctagcactggatattgttggagaaatcggcagccttcctggcag

SEQ ID NO: 42569 - DNA, 764 bp, Macaca Mulatta
gggtttgatgatgagtgccctcaaagagttttaaagcattttgagattggagaggtgggctcagttaatctgaacgtgaaatcaggaagatgattttggggaagacttccttgatgaggatgacctccaagctgggccttgaagaggtcaagtgaaaatggtatcaggcagagggaacacagtgttgtgttattaccaaatacggtttcttcgctgaaggacttttctcagctagaaacgagtcagaaaggaaaggccaccatataacccaactctcttagttatctcatcggaatagtgtagaagtgctccagtgagttgggcctccagaaaggagggagttcagcttatttttaactagaccgatatgtgtttgactgagaagttacaggtgagtaatgtttattttggtgtccctgtaatggtttttactttctccctttcttccttttttatctcactgtgtaattgagtcacatttccttatctatcaaagaaaggattgagcagatccaggacaaggaagggtgctaggctcactctgggacggcagagaaatcacatcataatgttttataaatacaactgataactattcataaggctgcatttttactcaggtgcctttcaagatggagctcagattacagagcttgagaataaatttggttaaccccagtcgcaaagaagaatacttgaaaataaatggttatggttggtcctatagcttttcggttcacaaaaaaagaaaagtagggaccttc

SEQ ID NO: 42570 - DNA, 542 bp, Macaca Mulatta
  misc_feature (1)...(542): n = A,T,C or G
acgaggcgaacagctgacangatggattaaagacttacatgttaacctaataccataaaaaccctagaagaaaacctaggtaataccattcaggacatcggcatgggcaaggacttcactaaaagcaacagcaacaaaatccaaagttgacaaatgggatctcattaaactaaagagcttctgcacagcaaaagaaactaccatcagcgtgaacaggcaacctacagaatgggagaaaatttttgcaatctactcatctgacaaagggctaatatccagaacctacaaagaactcaaataaatttacaagaaatgatctgtttctgcttgaatctgcctctaggtggggaccacgtgactggctcaaccattagtcatgggtatggatgaggtcagccggttgccagaatgcaaagaatgagaaacatctcaaaagaccaatctcaggttctacaatagtggtgttatttataggagtaattagttacaaattttgaaaactctggcccaatgacatttgagcagtaagggattataaaaac

SEQ ID NO: 42571 - DNA, 788 bp, Macaca Mulatta
  misc_feature (1)...(788): n = A,T,C or G
ccatttttggaaaagttttaccccaattatttttaataattatttaccttgaaaaaagaggggaaaccaaaattttttcaccgatgtttgtgcaatacatgattcaaaagaaccaaaacaaaaaattttatcaatctgcattcccttcagagagataaaatattgctctgcaaaaaatctgattttccaccatatgctaatcataccttcttccacagacctcttctcttacttcataaccttccgtcagaacaaacaacacaaaaacatcctccaagaaaaaaagaaattacaaaatacaaaagcaattcacaaagccagaaataaatgtttatttagttaaaaaaaatatatgaatgttgatgacttcaccattgaaaatgatgcctcaatatacaacttggcttcaaagatccttagccttgatttggtcatcatgagttattctctccattttagcttcccccatagcatgtaaacatcagactttgtcatcacacatgacaatgtagccagcaccaagatctcaagctctgaatgtgcccttgtacccacaaccatcctcacacagcccttgcctctggcacctgtttttctgttgccctcattatgaccttacccttacccttcctcatcttatttatttataagacannnnnnnnnnnnnnnnnnnnnnnnnnnnnnnnnnnnngtnnnnnnnnnnnnnnnnnnnnnnnnnnnnnnnnnnnnnnnnnnnnnnnctgtctcagcctccaaagtaacagattacaggcatgtgccatcacacc

SEQ ID NO: 42572 - DNA, 768 bp, Macaca Mulatta
  misc_feature (1)...(768): n = A,T,C or G
tatcatacttcctgcctctccccctcccccagtttcttcttccctaaaataaaaatagtggtcaactttagtaatgtaaaaggctcttggatgctgagattccacattaacacatggttgtcaaaattggatcttcaggatcttagaaaaacagcaaccaccagaatagcatatatctaaaagtagtcttcagctttaggcagatgcaaaagaatagaaactggaatattaagaatactgttcaactcctttagtatctattccccaacttaccctttaggaacctcattattaaccagtgttccagtcttaaagtagacaaaatactcagagccattggnnnnnnnnnnnnnnnnnnnnnnnnnaaatgaagatgatactgtgggttttttatgccccaatgtagcatatctagactacctatttgaaaggaaccctataaactgtcttatgttcgtatacatgattttcttacactctgtaatttggctgaggtgcaatttggaactttgcaagacctactagattgaatttctttagtgaatgctccttaataaatttgcattcatcttttagagtagctgtatagttttcaaatgctatttgccataaaagtttttgccatattatactttatggcaaacatggtatcacgtgattgtcacgactgaggactcataaaagcctagggatggaccgcactcaaagatgcacaggatccaaagggcggcaacactggacctaaagcctaaacttttcccggggaac

SEQ ID NO: 42573 - DNA, 954 bp, Macaca Mulatta
ggcacttcctctttgaagccttcccagctggccctttgtgcgcctctcattacccatcacctttgtgttgccaactctcttcccctagctaatgcggcccattgaagtcgaggttagaagccatcttgctttctcacattttttattattgcaggccttgcatggtttgccttttggtagttggtatgtttcaaggatttggtctttttaactaagccgtcaaatgtgtggctatagtgttcatgatattcttttatcctccttatgagatctatgggaccagtagtgatgatagcttgctgttggtcatttctgacattgtaatttatgtctcgtctctttttttctttggttatcctggctagagttttatcaattgtattgatcttttcaaagttcaactttttgggttttgtttgattttcccctgttggttttcctcaaagttcgattcataaatatttatataacaaactatccttccatgcttgcactttatcggattaaaaattgtctccatactgtttccacaagttttacaaagtaaagtccgcaaagcctctaaaaagggaacttggatctttaaaagaacacctttctattgccctagaataacaacccccttccttcaatggcccgaccaaaatttctcccccctggaaaaccaccacaatagccacattattacagggggcacggcctttctaccacacccgtctcccacatacaatattatcgcaaaagttgaacaagtgccttcacattctttattcatcgggttaacaaaatatatattttaatgttcgttaccgagaaggaaaaaacaatcgtatactactccatttaagaaataaggacataggaaataaatgcacctattaatcaacactattggtacgccatcgccagtacttatacagaccgtttcgatattactacattattgttaaaccg

SEQ ID NO: 42574 - DNA, 193 bp, Macaca Mulatta
gtaagtagacagggaataacagctatcacagaagaggaattgcatgcagaagtctgttatgctgagtgtttgatgttgaaatcctttatgtcacttatacaggaggagagcatgcttgcttttcttaaaagcgggatcagtgttgggtcaagttaccacatatacaaagactgtgaacaagtataacacagat

SEQ ID NO: 42575 - DNA, 621 bp, Macaca Mulatta
tttgcttttgttttcaacaaatgtttggccttagaaatgcagcaacttgctctgttgccaggagcttccctcccaagtgtcttgtgcacagccctctcctgggtgagctcctggacaaagcctcatgccctggtaaaccctgcaaaccgcagccactattctggcctaggtcatagtcttgagcaccagctctgctggggctacttaggcattgtagttgtctgcaggtgttaggaatttacgttactgaagcgtgagcaatgtcattgtgagagcatgtgcaaaagcaagctttcctgcaggtgcttgtacctaaagaaaagcaaggggaatagtaggacccagaacagcagtcctaggcccattaattctccttgcccctctgacagaatttcaagctcgggattcctcaaatactcagatgcagggttgccattgtaacagagtaacagtggctggggtacacccattcagtggctcttcagaaagaacaaattcattggttggatataacacttaaggaaaatgctcaataagccacccattgagtctcagagcaacctgaccaacaaggtgaaaaccatttaccagacacattgtcttgctggagaactttcctcc

SEQ ID NO: 42576 - DNA, 177 bp, Macaca Mulatta
  misc_feature (1)...(177): n = A,T,C or G
aagaagaaatcctgcctcagaattggaacatcttctttctgcgttttcagcctgctagcttatcctgcagattttcagacttacctccctaataatcacatgattaaatagcatcatatgaatacaaannnnnnnnnnnnnnnnnnnnnnnnnnnnnnncctattggttctgcttct

SEQ ID NO: 42577 - DNA, 228 bp, Macaca Mulatta
gtgttgctccacaccgcctcgtgttgtctgttggcgcgttctcggggttccaaccaatgcaagagccttgcatccagtgctgagacccgcgaggggcttcggtccacgtccgccatggacctaccacccctccatcccggagagcaggccacagcagccggacacaggaagctcctcagcctctagttgcctctctgggcctgcacatcggtcactgatctcgcctac

SEQ ID NO: 42578 - DNA, 179 bp, Macaca Mulatta
  misc_feature (1)...(179): n = A,T,C or G
cagctactcgggagctactcttcctgttggatggccttagcacggcacacaaggcccgtgnnnnnnngatgccattgttttggctgtgaagtccctcccgcctcagacgcttatcaacctggccgtgtttgggacgttggtgcagccactcttcccagagagccggccttgcagtgatg

SEQ ID NO: 42579 - DNA, 1860 bp, Macaca Mulatta
  misc_feature (1)...(1860): n = A,T,C or G
agatccccctagcccagtcggaggcgttcctaacggaccttttggagaaagtctgtgagcgaatgaacgactacaagcttgaggaagaccctgtgacgaaggagagaactttcaagagatttgctcctaggaaaggagacagaatataccaagaatttaaaaaattatatttnnnnnnnnnnnnnnnnnnnnnnnnnnnnnnnnnnnnnnnnnnnnnnnnnnnnnnnnnnnnnnnnnnnnnnnnnnnnnnnnnnnnnnnnnnnnnnnnnnnnnnnnnnnnnnnnnnnnnnnnnnnnnnnnnnnnnnnnnnnnnnnnnnnnnnnnnnnnnnnnnnnnnnnnnnnnnnnnnnnnnnnnnnnnnnnnnnnnnnnnnnnnnnnnnnnnnnnnnnnnnnnnnnnnnnnnnnnnnnnnnnnnnnnnnnnnnnnnnnnnnnnnnnnnnnnnnnnnnnnnnnnnnnnnnnnnnnnnnnnnnnnnnnnnnnnnnnnnnnnnnnnnnnnnnnnnnnnnnnnnnnnnnnnnnnnnnnnnnnnnnnnnnnnnnnnnnnnnnnnnnnnnnnnnnnnnnnnnnnnnnnnnnnnnnnnnnnnnnnnnnnnnnnnnnnnnnnnnnnnnnnnnnnnnnnnnnnnnnnnnnnnnnnnnnnnnnnnnnnnnnnnnnnnnnnnnnnnnnnnnnnnnnnnnnnnnnnnnnnnnnnnnnnnnnnnnnnnnnnnnnnnnnnnnnnnnnnnnnnnnnnnnnnnnnnnnnnnnnnnnnnnnnnnnnnnnnnnnnnnnnnnnnnnnnnnnnnnnnnnnnnnnnnnnnnnnnnnnnnnnnnnnnnnnnnnnnnnnnnnnnnnnnnnnnnnnnnnnnnnnnnnnnnnnnnnnnnnnnnnnnnnnnnnnnnnnnnnnnnnnnnnnnnnnnnnnnnnnnnnnnnnnnnnnnnnnnnnnnnnnnnnnnnnnnnnnnnnnnnnnnnnnnnnnnnnnnnnnnnnnnnnnnnnnnnnnnnnnnnnnnnnnnnnnnnnnnnnnnnnnnnnnnnnnnnnnnnnnnnnnnnnnnnnnnnnnnnnnnnnnnnnnnnnnnnnnnnnnnnnactcttctggtttgtttgtttttcttctaaannnnnnnnnnnngctcacatttagtgtgttgagtttactactaaataatcttccattcttctacaggaatggaaagagagttgggacctggtgggaaattatcctttgaccacacttaatatacaaagtctagtaacagtcactcccggaaatttatttatctctgttaaatttgcattcaatggaatctgactttaatgatgaaaaatgtcagggtatagtctacaccagtttctacaaagagattctcattgtctttggtgacaatcaagtgggtaggatgctacannnnnnnnnnnnnnnnnnnnnacctaaaactctttgccatattgttactcagttgcttaaaaagcacattatgtgtttaaatcattctcctgactcttcagcaggaaacaatccttatatttaggaaaatttaacaaagctaagggaaagggctttccatgccccctccccacctcaactctgattaaaagttagtgagttaatatcacttaattatttgggtgcnnnnnnnnnncttgtctgtagctgcttaagtatgatggctccttacataagccaatgaactcgcactctagctgacacacgatggaaatagaactgaataataattaacactattttccagtagggtaggacaattgttatttaaaacgtagtccctatagctttatttaaatgtacctagttaaggttaatttggcatttaaagtagtaaatcaggaacattctcctaacttgggttttcttgg

SEQ ID NO: 42580 - DNA, 495 bp, Macaca Mulatta
gggtgggaacacttttttcaggtcctctagcacggtgagccgtgtgcctggtccaaagaactgctcacccctcagtccacccgtcctaactgctggcacagaagtacacagatgtctgggagggagcagccgactccagtctgagtgggaaatcctctgtgtttgatctggtgacattgtagccatcggggacttctcctttctcagtgctaccttcaccaactgagtaatgaatcagcctcagccccatgcctgggtcttgtcgataccagtacatgtagtcatggttcatatcctgggcacactgcagtgtcatgctctgtcctgttttcaggacctggaattttggggtctgagtgacaccagcattcactggacctgcccacaggagacaaaaggccgcacagcacaggaggccgatgctgcatggcagatgctggcatgacggaggggtcttctgggtctgtggcattgatgaaacgggaacaggactcc

SEQ ID NO: 42581 - DNA, 212 bp, Macaca Mulatta
tgaaggagacagaagacaacaccatacttgtgttcactgtagatgtcgaggccaaaaagcataagatcaaacaggctgtggaggagctctatgacaccgaggtggccaagatcaactctttgatcagggctgatggaaagaagaaagtgcatgttcaactggctcctgagcatgctgcttttagatgctgccaaaaaactgggatcatctaa

SEQ ID NO: 42582 - DNA, 822 bp, Macaca Mulatta
  misc_feature (1)...(822): n = A,T,C or G
ggacttcaggcaatattatgcacatttctgggtttgtgtttaaacacatatccagaatgtggtaaataggttagttgttgttttcnnnnnnnnnnnnnnnnnnnnnnnnnnnnnnnnnnnnnnnncatcatgatctcgactcactgcaacctcaagcggtcttcccacctcagcctgctgagtagctgagactacaggtgtgccaccatgcctggctaattctttaatattttgcagagacaaggtctcactatgttgtctaggttagtctcgaactcagacttctggactcaagcgatccttctacctcagcctctnnnnnnnnnnnnnnnnnnnnnnnnnaccactatgcctggctgtaattaagctttggagagtgtctagtaactgttatttgaacagtggtccaaaaacaataggcatcttcaccttagtgtaaaagctgagagactttcagtcagatgagtccacnnnnnnnnnnnnnnnnnnnnnnnnnnnnnncatggtcggccgccctcggcccctcgaagaagcttttctagaccaattccgttttggccgcgcggggccccatgagggtaaggggaaacatgggcccatagncctgtttccctaaggaagatccctgggggcaatggaactaaaggggcttggggaattcccgccccnnnnnnnnnnnnnnnnnnnngcggccggggaaaagccgagagacgggttcgtggaaaaacaaattccccaagaagggggaaggttgcctgaagagggtccatttgaccgcggggaattcccaatcgcgagaacaaggggggaagtccccacaga

SEQ ID NO: 42583 - DNA, 795 bp, Macaca Mulatta
  misc_feature (1)...(795): n = A,T,C or G
ggtnnnnnnnnnnnnnnnnnnnnnnnnnnnnnnnnnnnnnnnnnnnnnnnnnnnnnnnnnnnnnnnnnnnnnnnnnnnnnnnnnnnnnnnnnnnnnnnnnnnnnnnnnnnnnnnnnnnnnnnnnnnnnnnnnnnnnnnnnnnnnnnnnnnnnnnnnnnnnnnnnnnnnnnnnnnnnnnnnnnnnnnnnnnnnnnnnnnnnnnnnnnnnnnnnnnnnnnnnnnnnnnnnnnnnnnnnnnnnnnnnnnnnnnnnnnnnnnnnnnnnnnnnnnnnnnnnnnnnnnnnnnnnnnnnnnnnnnnnnnnnnnnnnnnnnnnnnnnnnnnnnnnnnnnnnnnnnnnnnnnnnnnnnnnnnnnnnnnnnnnnnnnnnnnnnnnnnnnnnnnnnnnnnnnnnnnnnnnnnnnnnnnnnnnnnnnnnnnnnnnnnnnnnnnnnnnnnnnnnnnnnnnnnnnnnnnnnnnnnnnnnnnnnnnnnnnnnnnnnnnnnnnnnnnnnnnnnnnnnnnnnnnnnnnnnnnnnnnnnnnnnnnnnnnnnnnnnnnnnnnnnnnnnnnnnnnnnnnnnnnnnnnnnnnnnnnnnnnnnnnnnnnnnnnnnnnnnnnnnnnnnnnnnnnnnnnnnnnnnnnnnnnnnnnnnnnnnnnnnnnnnnnnnnnnatcctttgtaatcacggacctcaatttttcctgaatccctatatcacccattatggttgacaagggcttaaatatacctaaattacggggcccttctacttcttctccaacataatttccattaacaacctccaacccaaggc

SEQ ID NO: 42584 - DNA, 203 bp, Macaca Mulatta
gcacctgtgtcaacgggtccctggtgtgaaaaaaacaggggtgtccagtccttgggccttggtcagcctggagcagttgctcggccccctgtggtgggggcactatggagcgacatcggagctgcgagggaggtcctgggatggcaccatgccaggcccaggacacggagcagcggcaggagtgtaacatgcagccttgccct

SEQ ID NO: 42585 - DNA, 389 bp, Macaca Mulatta
gttagaatgcccatttggacagaatttagcttttgtgctattgattacttctgtactaaactggtagccagttgttcacttctaaatggaagggaaaaaattacccacacaagttagaaaatgatttgccaaattatttttttgagttagtatgtatgtactgttttaaatcagtaatgtttgttccttttgctgcccatttgggagtatgtggcaattcctagtgctcttgtatgacattactcttcctgagacttgtatatgcaagaaagtatatatataaaagataaatggtggtaacttatctgagttctgattcattatggacttttagaaatctagataattggttcatactaggtgctcaattactctgaccttgtgtggct

SEQ ID NO: 42586 - DNA, 775 bp, Macaca Mulatta
  misc_feature (1)...(775): n = A,T,C or G
ggggtaataaactggcaggtatctttgtaactataaatagtgcatgctcagccatgtacactgtaaatagcctttaccaaacgtgtttgacaaggaccataattaacatcacttagtgaattgtgataaagaaaaacaagccatgatttattcgatgtgattggcttaattgtttttatgtggcgccaagaatgaacctgtttaacagctgtaaccaatggtactgatctgtccatccaatgttgtcattatatttgattgtggttcaatagtattgcattgtcagactaggaaagctaaacaaacaaaatggttttagttttgctgaagactggccttattaatggacagctttcctaacaagagattattaacttttatcaggtgttaacatctgtttcaggaacatggcagtatgtttacatgtcagaagttttgtttaattctatggtatttctaaattgacttgtttaaataaattcagcnnnnnnnnnnnnnnnnnnnnnnnnnntnnnnnnnnnnnnnnnnnnnnnnnnnnnnnnnnnnnnnnnnnnnnnnnnnnnnnnnnnnnnnnnnnnnnnnnnnnnnnnnnnnnnnnnnnnnnnnnaaaattggggggccctctggnnnnnnnnnnnnnnnnnnnnnnnnaattttttttggggcgccgggccccccttgggaaaaaataaaacggggcnnnnnnnnnnnnnnnnnnnnnnnnnnncnnnnnnnnnnnnnnnnnnnnntgggattnnnnnnnnnnnnnnnnnnn

SEQ ID NO: 42587 - DNA, 198 bp, Macaca Mulatta
gaaagggagcaaatagatacctaactgtgaagaagaaagatggatcagaaacagctcatgcaatgatgacctgtaatttgactcataatacaaaacatgctgttaggagcctaattcaaagatttcctgtcaccaataaagagcgtacagaacttctgcctaaaacagaaagaggaaatgtgtttgcagttgaagctg

SEQ ID NO: 42588 - DNA, 741 bp, Macaca Mulatta
  misc_feature (1)...(741): n = A,T,C or G
gacgaggcctcgtgttggactaattttctttatttttaaatttttgtagagacgtgttctcactttgttgagcaggctggcnnnnnnnnnnnnnnnnnnnnnnnnnnntctgcttcagcctcccaaaatgctaggattacaggtgtgagtcactgtacctggcctgtttnnnnnnnnnnnnnnnnnnnngtttgttctttcaaacagtatttcagaaagcttgggaagagttaccctggaaagagatttcctttgctagtgggttttcattttcaggtaaagactgctttccttttttttcagtatgctttccttttttttcagtaacttaataaacttcatagctttcctttagtaacagtgttcattgacctacagcaatagactattttcagttttctgacctcttgtttcaattccccttaagtcctgtgccagttatgctcctaccaacacagagtctcctgtcctctaatgtttaaaatagtatttactgttctgagctttatccttccctgttaagcataaagaacactggtctgagaactaggagacctaagttctagtcctggctttcctggtaactagtattatgccctttgacaagtgtcttcatgtctctgcttattagcactgtcatctgtaaaatgaagaggttggcccaggttctttctaactctgattctgtaatttggactcttggttccaaaaatcttgatttccccactccaaacaccaaga

SEQ ID NO: 42589 - DNA, 124 bp, Macaca Mulatta
ttggtactgatcttggcaccacctacttttgtgtgggtgttttccaacacggaaaagtagaggcaattgccaatgatcagggaagctgaactactccaagctatgttgcctttacagacaccaa

SEQ ID NO: 42590 - DNA, 229 bp, Macaca Mulatta
cctctggcttccaacattctttctccctctgcctgtcctgacagggagagacgcccctggcatccacacgatggccatccagagcatcacttcctgcagcgccgacctccagaacgtcctcttcggccacatgctgctgtcgggagggacgggctcctgccccggcttgagattccggatgcagagagaaatatctgagctggtatcccctacagttcatgtgaaggtg

SEQ ID NO: 42591 - DNA, 190 bp, Macaca Mulatta
aagctaggtgaaaaggaaggagtgaatcaagtatgtgggcaatcacaatgagcaaagacgtggaatgtattagagatggtgaaaagattggcttggctaaagcagaacattagtaacgtagtctgaggctatttcagagcttggctattctctctgttgcagggaggaaaggtaattgaagagttttctg

SEQ ID NO: 42592 - DNA, 159 bp, Macaca Mulatta
  misc_feature (1)...(159): n = A,T,C or G
atatgatggaagtcagatatgccatggagactatgtgaagggcagattctccatctccaaggacaatgctaagaactcgctgtatctgcaaatgaatagtctgagagctgaggacnnnnggacacggccgtgtattactgtgcgagagacacagtgagg

SEQ ID NO: 42593 - DNA, 2131 bp, Macaca Mulatta
  misc_feature (1)...(2131): n = A,T,C or G
atggatgcatctggaccctcagatagtgatatgccaagtcggacgcgacctaagagcccaagaaaacataattataggaatgaaagtgcccgtgaaagcctttgtgattctcctcatcagaatctctcaagnnnnnnnnnnnnnnnnnnnnnnnnnnnnnnnnnnnnnnnnnnnnnnnnnnnnnnnnnnnnnnnnnnnnnnnnnnnnnnnnnnnnnnnnnnnnnnnnnnnnnnnnnnnnnnnnnnnnnnnnnnnnnnnnnnnnnnnnnnnnnnnnnnnnnnnnnnnnnnnnnnnnnnnnnnnnnnnnnnnnnnnnnnnnnnnnnnnnnnnnnnnnnnnnnnnngaagaacatgaaacagatgagaaaagaggtaaaatctataagccatcttcaagatttgcagatcaaaaaaatcctccaaatcagtcttccaatgaaagaccaccatctcttcttgtgatagaaaccaaaaaacctnnnnnnnnnnnnnnnnnnnnnnnnnnnnnnnnnnnnnnnnnnnnnnnnnnnnnnnnnnnnnnnnnnnnnnnnnnnnnnnnnnnnnnnnnnnnnnnnnnnnnnnnnnnnnnnnnnnnnnnnnnnnnnnnnnnnnnnnnnnnnnnnnnnnnnnnnnnnnnnnnnnggacgcaccttcaagaagaaatagatcatctggtgngttcttgatgattacgcacctggctcacatgatgtaggagatccaagcactactaatttataccttggaaacattaatccacagnnagatgaatgaagaaatgctgtgccaagaatttggaagatttggaccgttagccagtgtgaaaatcatgtggcctagaactgatgaagaaagagccagagagagaaattgtggctttgtggcctttatgaatagaagagatgctgaaagagctttaaaaaatttgaatgnnnnnnnnnnnnnnnnnnnnnnnnnnnnnnnnnnnnnnnnnnnnnnnnnnnnnnnnnnnnnnnnnnnnnnnnnnnnnnnnnnnnnnnnnnnnnnnnnnnnnnnnnnnnnnnnnnnnnnnnnnnnnnnnnnnnnnnnnnnnnnnnnnnnnnnnnnnnnnnnnnnnnnnnnnnnnnnnnnnnnnnnnnnnnnnnnnnnnnnnnnnnnnnnnnnnnnnnnnnnnnnnnnnnnnnnnnnnnnnnnnnnnnnnnnnnnnnnnnnnnnnnnnnnnnnnnnnnnnnnnnnnnnnnnnnnnnnnnnnnnnnnnnnnnnnnnnnnnnnnnnnnnnnnnnnnnnnnnnnnnnnnnnnnnnnnnnnnnnnnnnnnnnnnnnnnnnnnnnnnnnnnnnnnnnnnnnnnnnnnnnnnnnnnnnnnnnnnnnnnnnnnnnnnnnnattctccaactaaatggcggacggaagattttcgtatgttcaaaaatggatctttttggaggccaccaccgttaaatccatacttgcatggaatgtcagaagagcaagaaacagaagcttttgtagaggaacctagtaaaaagggagcacttaaggaagnnnnnnnnnnnnnnnnnnnnnnnnnnnnnnnnnnnnnnnnnnnnnnnnnnnnnnnnnnnnnnnnnnnnnnnnnnnnnnnnnnnnnnnnnnnnnnnnnnnnnnnnnnnnnnnnnnnnnnnnnnnnnnnnnnnnnnnnnnnnnnnnnnnnnnnnnnnnnnnnnnnnnnnnnnnnnnnnnnnnnnnnnnnnnnnnnnnnnnnnnnnnnnnnnnnnnnnnnnnnnnnnnnnnnnnnnnnnnnnnnnnnnnnnnnnnnnnnnnnnnnnnnnnnnnnnnnnnnnnnnnnnnnnnnnnnnnnnnnnnnnnnnnnnnnnnnnnnnnnnnnnnnnnnnnnnnnnnnnnnnnnnnnnnnnnnnnnnnnnnnnnnnnnnnnnnnnnnnnnnnnnnnnnnnnnnnnnnnnnnnnnnnnnnnnnnnnnnnnnnnnnnnnnnnnnnnnnnnnnnnnnnnnnnnnnnaggatgttccagatgaccttgatggtgcccccattgaggaagagcttgatggtgcacctctggaagatgtagatggaattcctattgatgctactcccattgatgatcttgatggagtccctataaaaagtcttgatgatgatcttgatggagtgcct

SEQ ID NO: 42594 - DNA, 1113 bp, Macaca Mulatta
  misc_feature (1)...(1113): n = A,T,C or G
ggggttcacatgatttggatgagaaaaggagggttcaaactttatagacaaaacccagctgtgtgcaaaacaggattaatgccagtgattggggatgatcaaagagaaaccttactttttctccccctaatactcattccactaaagggcgaactggcagagttctgcatgcctgggaggaaagaggagtgctagaatcgtgcattgtgtgagtgactgtcattccaagatcaaaacttccacgcctcatctgctaactcttacggtgagggtttcttgccatagatgctatgtgggtctaaacagaatcaaaatattaccccagttgaaaaaaaaacacgcgatcaagcagatttaaagggtaaaaattgttgtaaatttaaataacccttaaaaataaaatcttcttctctccttcnnnnnnnnnnnnnnnnnnnngacaaaaagaacaaaaaaacaatgaaataggccaaccccaccagaacacnnnnnnnnnnnnnnnnnnnnnctctcagaccacgaccttccaatttttcgtggccaccacaacgagggcgacacccgcagagggaaaggggtttaaaaatgttcttataaaccacataggggggttacaacatataaaaaaagacaccggggggaatattccccacgccctctgggggagagaaaaatgctttcccccctttgggggggattctcccatagtggaaaaaaccctctcaatgtggggctctatatgtagagaaaaaaatataaacaacacaaaacgcaaagataaagagattaacatagatatagaatatgtctcccgcagagcgaaagaagaaagcataaattccgcacacgagaaacaggagcctcctccgccgggaaaaaacaacacaacatatacccacaaataaagatgggtgtaacgattatattacggtgaaaaaagaatatcatattaataatacggcggaggttatttatatttctcttaacacgagtggaaaatttctcaaaaagacatctaggaacgtccaccaaattatattaccaacatttatatcatagagactcaagatacccccagagagataagaactatgacctgaacaataaaataag

SEQ ID NO: 42595 - DNA, 477 bp, Macaca Mulatta
ttccttatctacaatcaagatgacaatataattgaattatctcatttagaacatggtgcgatgattcatgattacaagtagaaaatatgtcatattcctcacctccaaataagtgtgtgtgtgtgtgcgcgcgcgtggtggagagggagagagtggggaaggagagcaatgttatcatatatagagaggctaaatgtgccccatccctcactgtcagctttgtaaaggagttagactccatccgcagaagaatgttttataagactaggaaaacacgttgaaaactaggaaaaacagcaacaaaaatcaactaaatatgtcgtcactgtcgctaaggattatctccttagaataatttaggattttcaaaaattgctgtctgccaaatactgtagataaacggccaggttcttcctatccctaggatatcctttttcaccaatacgtcccttcacagatttagagaacaagggggag

SEQ ID NO: 42596 - DNA, 792 bp, Macaca Mulatta
  misc_feature (1)...(792): n = A,T,C or G
ggaagctttttgtgagccagttcttataataaatctcttcatatatatatatatgcatatatatatgagaagagtttatatatatgtgattgtttctgtttctctggaaaacctgaactaatactttgttcaaaagttgaggcaaaataaaaacgtttccagataagcaaatactgagagaattttttagcaggcttgccttactaaaggaagtccctcaagctgaaacgatatggtaccagatggtaacttgaagaaaaagaagagcagaagttaatttcagaggtaaatatgaatgacaataaatgtttcttttattatcttaactgaatcaaaggcatttgccagctgggcatggtgactcctgtaatcgcaacacgttgggagactgaggcagctttgcttgagccccagaagttggaggttgtagtgagctatgtttgtgccaacccactctagcctgggtgacatagtaagacactaagacactgtctcagaaaaaaggggatttctcataagacgataattataaaactgtttaagatacgagaaggcaatataaaaggaacagaagaacaaaagatatgagacagagaaagcatatagaatgagagacatgtctaacagtgacagtgaattgttgacataaagatatatgtatagattaatggaaacagtattgagaatctagaaataatgcccgacatttatgggtcaagtgaatatttgattaaaggtactaaaagcaattcagttggggcaaaaaaattgnnnnnnnnnnnnnnnnnnnnn

SEQ ID NO: 42597 - DNA, 801 bp, Macaca Mulatta
  misc_feature (1)...(801): n = A,T,C or G
gggctcagcaagaagagagaggcttagttctaggctcctcttgttttaattcattcctgctttttggggtctgtgttttgggttatgtatggaatttcatttagaagaagtttctggtagaacaaggcttaaaaacgtatttagatattaaaacttttaaaatcaataaaaactacaaaataaggggttctctgccccactgatctctagtctacctagttcctctccctaaagacatgctttttgctctttttagctatttcctctggcgttacttgcatatagaaatattattgatttttatatattcatcagttcactattctagtaggtggtcttgttttgctattttttaaatatatcttagaattttctatatgcacaatcatgtcacctatgcataaggacagttttgcctctttctgatctttctttgcttggctttactgcattgcttanaaccttcccccatttttgtctcctgccacccaaaccctagtcctggtacagtgttgaatggaattagtgatagcagaaactcttgcctagttcctgatcgtagaggaaagtattttgtcgttgaacattaagtacaatgcaccctttannnnnnnnnnnnnnnnnnnnnnaacttcctgttaccaagttgaagaaacttttcttccattcttagttgaccaaggatttttttagccttttattttgttgatgagattnnntnnntntnnttntttttaaatataaatgcttttttgaattttgtcaacttcccttttctgcatcctattgagatacggattt

SEQ ID NO: 42598 - DNA, 227 bp, Macaca Mulatta
  misc_feature (1)...(227): n = A,T,C or G
ggcnnnnnnnnnnnnnnnnnnnnnnnnnnnnnnnnnnnnccacgaaatatttacttattctattacagagcaattctgtcctatttacccaggagaaatgaaaaaatatgtccataataaagtctgtgtatttttagttgctttactaatgataaccaagatgacaaacagcccaggggtccatcaannnnnnnnnnnnnnnnnnnnnnnnnnnnnnnnnnnnnnnn

SEQ ID NO: 42599 - DNA, 391 bp, Macaca Mulatta
attgtttctagttgttcatgagctgcgccagacaacctctcactgcctgactgtaacacctggcaatctcctgtgtgggcaacagttgttagtcctaggaatcctctcatcatgcccacgtagccgtggccaccctttagtcactagggtgaccttaaagccaaagaacagcttttcctcctgcatcattttaggagactgactcgacgttgaggtgtgtcagctgcatgtgaggaggcaaattgtcacgcagggtgtgcccttctccgcagacctcctgagtctcatgagtcttagccccaactcctactccagtcccccacctgcccagcagtccctcctttccctgtaacatcctcttcccattataggtcaatgggcccattatcac

SEQ ID NO: 42600 - DNA, 768 bp, Macaca Mulatta
  misc_feature (1)...(768): n = A,T,C or G
ggagtttgagtgtcagtcactggtatcaaatatgtgacacttattttcttgtcttttaagaaatgttctctggttatctgtaaaagtatattctttaactatgaaatcaaactctgaagtgtaaaaacattattaaaacaatattgtcattttcatcattgtcaaaagacattcctataattccaactaactggctggaattaatgtacaaagtacatggattaattccctaaaggaacttacagtttaagactaatatttggtggtgacacataggtaggaaaatgtagatgcaaaacgcccaaatcagggaattatgagaaaagtgaaaaaacagcagcaataatatcagtcacagtagcttctacagcagtagagatgatcttgatgacagcaactatgtttaaggagtgcattttatatatactattgtactgatccttacaaccactctataacacagttacttttaccattatctatttataaattactaaagtgatggctgagccaggcacataactctctcaaggtgacacatttttcactggtgaacactgaattttatcatagctaggtagagagtacaagtaataaggcatattgttagagtaggagacaaaggtaaatatttataattagccttgatttttattcattatacatacactactttgctcccaaaatgatttaanggtggttcttgcccacaatcatggaataatattctgggataaaatcttctctgaatccaatctggaaaagtgt

SEQ ID NO: 42601 - DNA, 4451 bp, Macaca Mulatta
  misc_feature (1)...(4451): n = A,T,C or G
aggtggggccatctccaagccactcacagatcagaccgtagctgaatcccaggaagctgtgtttgaatgtgaagttgccaacccagattccaaaggtgaatggttgagggatggcaaacacctaccactgactaacaacatcagaagtgagtctgatggccacaaaaggagacttatcattgctgccaccaaattagatgacattggagaatatacctacaaggtggccacctccaaaacatctgccaaacttaaagttgaagnnnnnnnnnnnnnnnnnnnnnnnnnnnnnnnnnnnnnnnnnnnnnnnnnnnnnnnnnnnnnnnnnnnnnnnnnnnnnnnnnnnnnnnnnnnnnnnnnnnnnnnnnnnnnnnnnnnnnnnnnnnnnnnnnnnnnnnnnnnnnnnnnnnnnnnnnnnnnnnnnnnnnnnnnnnnnnnnnnnnnnnnnnnnnnnnnnnnnnnnnnnnnnnnnnnnnnnnnnnnnnnnnnnnnnnnnnnnnnnnnnnnnnnnnnnnnnnnnnnnnnnnnnnnnnnnnnnnnnnnnnnnnnnnnnnnnnnnnnnnnnnnnnnnnnnnnnnnnnnnnnnnnnnnnnnnnnnnnnnnnnnnnnnnnnnnnnnnnnnnnnnnnnnnnnnnnnnnnnnnnnnnnnnnnnnnnnnnnnnnnnnnnnnnnnnnnnnnnnnnnnnnnnnnnnnnnnnnnnnnnnnnnnnnnnnnnnnnnnnnnnnnnnnnnnnnnnnnnnnnnnnnnnnnnnnnnnnnnnnnnnnnnnnnnnnnnnnnnnnnnnnnnnnnnnnnnnnnnnnnnnnnnnnnnnnnnnnnnnnnnnnnnnnnnnnnnnnnnnnnnnnnnnnnnnnnnnnnnnnnnnnnnnnnnnnnnnnnnnnnnnnnnnnnnnnnnnnnnnnnnnnnnnnnnnnnnnnnnnnnnnnnnnnnnnnnnnnnnnnnnnnnnnnnnnnnnnnnnnnnnnnnnnnnnnnnnnnnnnnnnnnnnnnnnnnnnnnnnnnnnnnnnnnnnnnnnnnnnnnnnnnnnnnnnnnnnnnnnnnnnnnnnnnnnnnnnnnnnnnnnnnnnnnnnnnnnnnnnnnnnnnnnnnnnnnnnnnnnnnnnnnnnnnnnnnnnnnnnnnnnnnnnnnnnnnnnnnnnnnnnnnnnnnnnnnnnnnnnnnnnnnnnnnnnnnnnnnnnnnnnnnnnnnnnnnnnnnnnnnnnnnnnnnnnnnnnnnnnnnnnnnnnnnnnnnnnnnnnnnnnnnnnnnnnnnnnnnnnnnnnnnnnnnnnnnnnnnnnnnnnnnnnnnnnnnnnnnnnnnnnnnnnnnnnnnnnnnnnnnnnnnnnnnnnnnnnnnnnnnnnnnnnnnnnnnnnnnnnnnnnnnnnnnnnnnnnnnnnnnnnnnnnnnnnnnnnnnnnnnnnnnnnnnnnnnnnnnnnnnnnnnnnnnnnnnnnnnnnnnnnnnnnnnnnnnnnnnnnnnnnnnnnnnnnnnnnnnnnnnnnnnnnnnnnnnnnnnnnnnnnnnnnnnnnnnnnnnnnnnnnnnnnnnnnnnnnnnnnnnnnnnnnnnnnnnnnnnnnnnnnnnnnnnnnnnnnnnnnnnnnnnnnnnnnnnnnnnnnnnnnnnnnnnnnnnnnnnnnnnnnnnnnnnnnnnnnnnnnnnnnnnnnnnnnnnnnnnnnnnnnnnnnnnnnnnnnnnnnnnnnnnnnnnnnnnnnnnnnnnnnnnnnnnnnnnnnnnnnnnnnnnnnnnnnnnnnnnnnnnnnnnnnnnnnnnnnnnnnnnnnnnnnnnnnnnnnnnnnnnnnnnnnnnnnnnnnnnnnnnnnnnnnnnnnnnnnnnnnnnnnnnnnnnnnnnnnnnnnnnnnnnnnnnnnnnnnnnnnnnnnnnnnnnnnnnnnnnnnnnnnnnnnnnnnnnnnnnnnnnnnnnnnnnnnnnnnnnnnnnnnnnnnnnnnnnnnnnnnnnnnnnnnnnnnnnnnnnnnnnnnnnnnnnnnnnnnnnnnnnnnnnnnnnnnnnnnnnnnnnnnnnnnnnnnnnnnnnnnnnnnnnnnnnnnnnnnnnnnnnnnnnnnnnnnnnnnnnnnnnnnnnnnnnnnnnnnnnnnnnnnnnnnnnnnnnnnnnnnnnnnnnnnnnnnnnnnnnnnnnnnnnnnnnnnnnnnnnnnnnnnnnnnnnnnnnnnnnnnnnnnnnnnnnnnnnnnnnnnnnnnnnnnnnnnnnnnnnnnnnnnnnnnnnnnnnnnnnnnnnnnnnnnnnnnnnnnnnnnnnnnnnnnnnnnnnnnnnnnnnnnnnnnnnnnnnnnnnnnnnnnnnnnnnnnnnnnnnnnnnnnnnnnnnnnnnnnnnnnnnnnnnnnnnnnnnnnnnnnnnnnnnnnnnnnnnnnnnnnnnnnnnnnnnnnnnnnnnnnnnnnnnnnnnnnnnnnnnnnnnnnnnnnnnnnnnnnnnnnnnnnnnnnnnnnnnnnnnnnnnnnnnnnnnnnnnnnnnnnnnnnnnnnnnnnnnnnnnnnnnnnnnnnnnnnnnnnnnnnnnnnnnnnnnnnnnnnnnnnnnnnnnnnnnnnnnnnnnnnnnnnnnnnnnnnnnnnnnnnnnnnnnnnnnnnnnnnnnnnnnnnnnnnnnnnnnnnnnnnnnnnnnnnnnnnnnnnnnnnnnnnnnnnnnnnnnnnnnnnnnnnnnnnnnnnnnnnnnnnnnnnnnnnnnnnnnnnnnnnnnnnnnnnnnnnnnnnnnnnnnnnnnnnnnnnnnnnnnnnnnnnnnnnnnnnnnnnnnnnnnnnnnnnnnnnnnnnnnnnnnnnnnnnnnnnnnnnnnnnnnnnnnnnnnnnnnnnnnnnnnnnnnnnnnnnnnnnnnnnnnnnnnnnnnnnnnnnnnnnnnnnnnnnnnnnnnnnnnnnnnnnnnnnnnnnnnnnnnnnnnnnnnnnnnnnnnnnnnnnnnnnnnnnnnnnnnnnnnnnnnnnnnnnnnnnnnnnnnnnnnnnnnnnnnnnnnnnnnnnnnnnnnnnnnnnnnnnnnnnnnnnnnnnnnnnnnnnnnnnnnnnnnnnnnnnnnnnnnnnnnnnnnnnnnnnnnnnnnnnnnnnnnnnnnnnnnnnnnnnnnnnnnnnnnnnnnnnnnnnnnnnnnnnnnnnnnnnnnnnnnnnnnnnnnnnnnnnnnnnnnnnnnnnnnnnnnnnnnnnnnnnnnnnnnnnnnnnnnnnnnnnnnnnnnnnnnnnnnnnnnnnnnnnnnnnnnnnnnnnnnnnnnnnnnnnnnnnnnnnnnnnnnnnnnnnnnnnnnnnnnnnnnnnnnnnnnnnnnnnnnnnnnnnnnnnnnnnnnnnnnnnnnnnnnnnnnnnnnnnnnnnnnnnnnnnnnnnnnnnnnnnnnnnnnnnnnnnnnnnnnnnnnnnnnnnnnnnnnnnnnnnnnnnnnnnnnnnnnnnnnnnnnnnnnnnnnnnnnnnnnnnnnnnnnnnnnnnnnnnnnnnnnnnnnnnnnnnnnnnnnnnnnnnnnnnnnnnnnnnnnnnnnnnnnnnnnnnnnnnnnnnnnnnnnnnnnnnnnnnnnnnnnnnnnnnnnnnnnnnnnnnnnnnnnnnnnnnnnnnnnnnnnnnnnnnnnnnnnnnnnnnnnnnnnnnnnnnnnnnnnnnnnnnnnnnnnnnnnnnnnnnnnnnnnnnnnnnnnnnnnnnnnnnnnnnnnnnnnnnnnnnnnnnnnnnnnnnnnnnnnnnnnnnnnnnnnnnnnnnnnnnnnnnnnnnnnnnnnnnnnnnnnnnnnnnnnnnnnnnnnnnnnnnnnnnnnnnnnnnnnnnnnnnnnnnnnntcccgcagttgaagcagttgactcagagcaggaaattgcaacgtttgtaaaagacaccattctgcaagcttctttaattacagaagaaaaccagcaactatcttatgagcatattgctaaagccaatgaattgagcagccagcttcctttgggagctcaggaattacaatccattttgaagcaagacaagtccactcctgaaagcaccagggaatttctttgcatcaatggcagtactcactttcagcctctcaaggaaccctctcnccaacctacaactgcagactgtacagtcccagaaaaccttctccaaagaaagcattctaatgcttgaagagcctgagacacaggcggttctatcagagactgagaaaatcttcccaagtgccatgttcatagaacaaattaattcattaacagttgagcctctgaaaactgtattaactgaacctgaagggaattatccacagtcttcaatagaacctccggtgcattcttatctaacctctgtggctgaggaagtgcttttaccaaaagaaaagacagtgtctgatgccaacaaagaccaaagagtgactcttcaaaagcaagaggcacaaagtgcactcatcttgagtcagagcttagcagagggacacgtggagagtctccagagtcctgatgtcatgatctatccaggtaaactatgagccccta

SEQ ID NO: 42602 - DNA, 619 bp, Macaca Mulatta
cccgggaacacaggccgcttgattcctctgtacttagatcgactttaccgtactaaaatcactttctgttttaaccagttaaacatgcctcttctacagctccatttttgatagttggataatccagtatatttgccaagagcatgttgagtctcccgtgactgctgcctcgtcgatactccatttagctccagaaagcaaagaaaactcgagtaacacttgtttgaaagagatcattaaatgtattttgcaaagcctaaagttatatatttaacagtttttatatgttgtatattcgtagaaaatcctatttaacaattaacgcggcagtcccggccgtcctgagagtcgggctgagccccgtgtgtttctgaagactctgggggttggacatggtggggaggtggcgcccctcagaccctggggtgccaggcgtggaaggcaggactctgggagaagcgtgtggaggactgtggcgtcggtgtcccagaggcatcggtcgtgcccggggaggccgggttcccttcgctgcgggccaggtttggtggctcgattccccctttggtctctgtgttggtcaacactgagtgtacaatattttgaacatgcttcttccaat

SEQ ID NO: 42603 - DNA, 704 bp, Macaca Mulatta
  misc_feature (1)...(704): n = A,T,C or G
ggagaataaccatcagaatcacctggtatgtgaggcagaattaggatttctaagagatggctccaagaagatgcaattttaacttctcttaaggcagttcttcctgtaatagtaaaccaaatacctggactatgttatttaataccttttaatacctagaagaagtgtcatcactgattannnnnnnnnnnnnnnnnnnnnnnnnnnnnntgannnnnnnnnnnnnnnnnnnnnnnnnnnnnnnnnnnnncgagctcggcacactgcaagctccactcgccannnnnnnnnnnnnnnnnnnnnnnnnnnnnnnnnnnnnnnnnnnnnnnnnnnncgctgtaatttttgtacnnnnnnnnnnnnnnnnnnnnngccatcttggccaannnnnnnnnnnnnnnnnnnnnnnnnnnnnnacctgcctcggcctgccagagtgctggggnnnnnnnnnnnnnnnnnngtgcccagcctcatcttttaatttatagcttctgaagtatttggttgtcaacttagtgagatccagtaggtattttgaatagatagtgtagtgcttgttggagaagggttctggagttggggtccccggacttggattctggctctgcctaattcttatggacttaagcaggtgacttttaactctctgagccctcattttcctcnnnnnnnnnnnnnnnnnnnnnnnnnnnnnccatgtc

SEQ ID NO: 42604 - DNA, 463 bp, Macaca Mulatta
atcttctgcagaaatagcgctggaagctagagtgaggcctgagtactgccttggcccaggatggctagagagttaagtgaaagcacagccctggatgcccagcctacagaagacaagatggagcttctggtcataaaggtggaggaagaagaggcgggttttcccagtagcccagatctgggctctgagggctcccgcgagcgcttccgaggcttccgctacccggaggctgcaggtccccgcgaggcgctgagccggctccgagagctctgccgacagtggctgcagcctgagatgcacagcaaggagcagatcctggagctgctggtgctggagcagttcctgaccatcctgcctgggaaactgcagagctgggtgcgggagcagcatccagagagcggggaggaggtggtggtgctgttggagtatttggagaggcaactggatgagccggcgccgcagg

SEQ ID NO: 42605 - DNA, 1229 bp, Macaca Mulatta
  misc_feature (1)...(1229): n = A,T,C or G
cgagatcagttcactgcagtagttcatcacacttttctttgaaatctaacaagggtggaactcatatcagacagtataatagtggttaccataagccagggatgggggaagggagggactgggggaagggagggactggggaaatgtttcacagggtataaagtttctgttagtaggagtaagttctggagagcagggtgatgacagttaataataatgtattatataattcaaaactgcttactttaaatgttcacaatacccaaaaagcatgtatgcaattttatttgccaattatagaataacttaataaagctatgggaaaaaaatatacccacatgactactgactaattgtaaaaggtgaggaaacctatgggccccagatacaactcaacagtccatcaacggttgaatacaacatgtacatccaaacaactgagtatcataaacataaaaaagaaatgaaagaatgatctagacaccattatgaagtgacttccagaacacactattaagtcaaaaaaaattaacaggagaaaaggcagccaggcgcactgcctcatgcctgtaatcctagcactttgggaggccaagacaggtggatcacctgaggtcaggagtcgagaccaacctggccaacatggtgaaatcccatctctactaaaaaaatacaaaaaattagctgggtgtggtggtgcgcacctgtaatcccagctactcatgaggttgaagcaggacaggtgcttgaacccaggaagcagatttttttcagagattttcatatggggagaaaggagacaggaagtagaagaaaggaaaacatacggcctgaatttaattgtaagcatcagtacaacctatattttgtctttnaacataaaactaaacaggtctgtctaaaaaagcttaaaacaatgacaaaacccgtctacccaacactacttgtgtctaggtaggggtacaccaaatacatttccccatataatggcctaaggacttaaaaaactggttgaatcagggctcttgcatgaatagggcaaaacctggaacatctgaaaactgcccgcaggtaacagtaaaactgcttggctggctgggcccagggctccccctgtatcttaccttgggaaggcgaggggggtgatcaaatcgaaaaaacactctggccaatgggaaaactctctctaaaaaaaaaatatctgggggtgggggccgtgtcccaccctg

SEQ ID NO: 42606 - DNA, 1145 bp, Macaca Mulatta
  misc_feature (1)...(1145): n = A,T,C or G
ggcaactgtgtaaatgaatatatatatatatacttacnnnnnnnnnnnnnnnnnncttgaaattagaaaataaaatgtataatagcactaaaaacaatagactactttggggaaatctcataaaagcataaaaggcctgagtattaaaaactacaaaacattactgagtataatttaagtatattgagacgatggactaggtaaagaaaatgtggtacatatacaccatgaaatactatgcagtcctgaaaaagaacaaaatcatgtcttttgcaacaacatggatggaactagaggccattatcctatgcaaatcaaccgaaaataaacaaaaccataaacccacattgttctccctttaaaatcgaggaacttaaacatgagagtggcacaagggcacactaataaaagggataaccaataagacacctggagggccctaactttgaaaggtgggaaaaagtgggcgaagaaaaggtaaggaaggnnnnnnnnnnnnnnnnnnnnggccctggtccatgaggataactaatttgcccaataattataactcagggggattgtgaaaccagaaaactttcaatccactgggttacaccaactcaaaaaaaaccccaccccttgtggcacaacaacagagttnggtcaaacaaagtggtgggataaccgcttccgacgcgtatcctcatatgaataaaacagtcccccctcgtaaacccatttgagcggtgcgtgatcaccccgctcacccctcgtaaaaaactcaccccttgttagaatgtgccaacaagacagagtccactactctatatagagtggcacacactaataaatatttctaaaacgctcgcaaacttttaatctgaatgatnctccactcacatagtatattatcgccactctcaatatttatccaatacacccacagagagggtgtctcatttaaataacgaaaacaaagtgattcccaatatacacctatttctctctatgcggggggnaaaattctggaggaacgccgcgagagaaaactgtcgattggtgaattacttctcatgaccctccaagagcgaataattctcccagaagacaatgtattttgttgggcgcacaagcctccacaaggcgcctcctcgtgtctctcg

SEQ ID NO: 42607 - DNA, 1190 bp, Macaca Mulatta
  misc_feature (1)...(1190): n = A,T,C or G
gcgccgacattcctaagggagctctcagatgagactgtggtcctgggccagtcagtgacactggcctgccaggtgtcagcccagccagctgcccaggccacctggagcaaannggagcccccctggagagcagcagccgtgtcctcatctccaccaccctcaagaacttccagcttctgaccatcctggtggtggcagctgaggacctgggtgtgtacacctgcagcgccagcaatgcgctggggacagtgaccaccacgggtgtcctccggaaggcannnnnnnnnnnnnnnnnnnnnnnnnnnnnnnnnnnnnnnnnnnnnnnnnnnnnnnnnnnnnnnnnnnnnnnnnnnnnnnnnnnnnnnnnnnnnnnnnnnnnnnnnnnnnnnnnnnnnnnnnnnnnnnnnnnnnnnnnnnnnnnnnnnnnnnnnnnnnnnnnnnnnnnnnnnnnnnnnnnnnnnnnnnnnnnnnnnnnnnnnnnnnnnnnnnnnnnnnnnnnnnnnnnnnnnnnnnnnnnnnnnnnnnnnnnnnnnnnnnnnnnnnnnnnnnnnnnnnnnnnnnnnnnnnnnnnnnnnnnnnnnnnnnnnnnnnnnnnnnnnnnnnnnnnnnnnnnnnnnnnnnnnnnnnnnnnnnnnnnnnnnnnnnnnnnnnnnnnnnnnnnnnnnnnnnnnnnnnnnnnnnnnnnnnnnnnnnnnnnnnnnnnnnnnnnnnnnnnnnnnnnnnnnnnnnnnnnnnnnnnnnnnnnnnnnnnnnnnnnnnnnnnnnnnnnnnnnnnnnnnnnnnnnnnnnnnnnnnnnnnnnnnnnnnnnnnnnnnnnnnnnnnnnnnnnnnnnnnnnnnnnnnnnnnnnnnnnnnnnnnnnnnnnnnnnnnnnnnnnnnnnnnnnnnnnnnngggcctcctactcagaatcggaggtgaaggactacctgtggcaaatgctgagcgccacccaatacctgcacgcccagcacatcctgcacctggacctgaggtctgagaacatgattatcaccgaatacaacctgctcaaggtcgtggacctgggcaatgcacagagcctcagccaggagaaggtgctgccctcagagaagttcaaggactacctagagaccatggngagctcctggagggccagggggctcttccgcagacagacatctgggccatcggtgtgacagccttcatcatg

SEQ ID NO: 42608 - DNA, 770 bp, Macaca Mulatta
gggtctctgaaggaaacgaatgaactcagccctagtctgacagtcctgaatttctgtgaaataagagtattcttcaagttaatgctcacattcacataccatgagggttctctgcaggggtttcctgaatctgaaagttttttcaaggcctatttttgggtaaaacagttgaaaaggcagacaccaacaaagtctgcaaagtaaactgtccagattaagaatattaagaagctgtaaagttagcttgtagaaatgggcatatccttaagttttaaagttaggaattgctaaaaatgttagggttcctgcacaagtggctatgtttatttaatggctagtgaacatgggaatatatttttatcctagctagtggttctatttggcaaactagactagagtgatttgagaggggtaaggagaataggcaggaccttccttctgtagctttacatatttcaaatgttaattcttaatgacattgaagttactttgaaatgattgataagaggattattagtatcatttaagggaatagggaggataggattttggtgccttcttcagcagacttgctccaagacaaagattctattttgatagtgcaagacaaaaggacttggaaaaaaactgggccatatgcctacagaacattacaactcttgtggaactaaaattggttttttacctttgtggaaagcctgccttaacttttaccggaaaagaacttttgggatttttaataagttttttggtttttttaaatatttgcc

SEQ ID NO: 42609 - DNA, 836 bp, Macaca Mulatta
  misc_feature (1)...(836): n = A,T,C or G
ggaagcagtcgtatcaacgcagactggccattactgccgggattttcttaaatttcttgaatgttctttatggtagtgttactaaaaagtttatgatcacatttccattgtgaacataatttgaactcattatcacacacttggaaattacagaaaagtggaggaaaaaaaatcatattcccaccatccaaagacagatatagtctcctctgtcttgtttatgcttgtttctgtgcacaggtttatgattataactgtgtcaaaatgtatattcaaaatagcttgttacgttacctttgtggaattatggttaaaatactttcaccttaattttttcaaatgttccctataataatgtcctgataacagtgtattatgtatgtctccattgtgtgcataatacatacccagaggaaaaattagaaaatagcagtannnnnnnnnnnnnnnnnnncctatattcccaacacccaacaactactgctaacatcttgatcaatttcctccgtcctgtttcagtgcacaagtttgtgattataacactgttaaatatgtgtgcataaagtctgaaatgaaaaaagtggaaaataccaaaatagtgtgctgtggtggaacttgttaacaattgcccaatcctaaatacttgggccgaaaaattagatgattcccccaaatacccaaatgattaactctcccaacttctggttgtaaaaaaaccncnccnacncccagcccantacaaaaancacaccacaaactccnaccaccccnaaaaacaagcccccccatctcacacacatacaccaccccccacgcagaacaacacccaggaaccg

SEQ ID NO: 42610 - DNA, 1205 bp, Macaca Mulatta
  misc_feature (1)...(1205): n = A,T,C or G
gggcgctgcccggtggctctggccccgcggggccattggcccagcccgccggcccctgagctccagtagcccgccgctgcaggagctgttcgcccagggcgggcccttgcggaccttcctccagcgccaggcggggtctgaagcccatttgaaggtcaggaggccggagttggcggcagtgatcaaactgctgaacgagaaggagcaggagctgcgggagaccgagcccttgctgcacgatgagaatgaagatttaaggaaacttgcagagaatgaaataactctgtgtcaaaaagaaataactcagctgaagcatcagattattttacttttggttccctcagaagaaacagatgaaaatgannnnnnnnnnnnnnnnnnnnnnnnnnnnnnnnnnnnnnnnnnnnnnnnnnnnnnnnnnnnnnnnnnnnnnnnnnnnnnnnnnnnnnnnnnnnnnnnnnnnnnnnnnnnnnnnnnnnnnnnnnnnnnnnnnnnnnnnnnnnnnnnnnnnnnnnnnnnnnnnnnnnnnnnnnnnnnnnnnnnnnnnnnnnnnnnnnnnnnnnnnnnnnnnnnnnnnnnnnnnnnnnnnnnnnnnnnnnnnnnnnnnnnnnnnnnnnnnnnnnnnnnnnnnnnnnnnnnnnnnnnnnnnnnnnnnnnnnnnnnnnnnnnnnnnnnnnnnnnnnnnnnnnnnnnnnnnnnnnnnnnnnnnnnnnnnnnnnnnnnnnnnnnnnnnnnnnnnnnnnnnnnnnnnnnnnnnnnnnnnnnnnnnnnnnnnnnnnnnnnngattggaagtaaaggaagatcagagaaaataagaacatataattttccacagaaccgggtcacagatcacagaataagcaagacactgcatgatcttgaaacttttatgcaaggagatgatctactggatgaacttgtacagtcattgaaggaatacgccgattatgaatctttagtagaaattatttcccaaaaagtttaagttgatttgttatttatagacttttgtagcttagaaaaattctacagcacatccacatagggtgaaaatacccttattctcttaaaaaacatgagttaacacagttggaggtaatatgcatattttgaagtcatagataatttacacagatctctctcaatgcattagcaaaaatcatacaatgtacagatggtcctcgatttatattgtggttaattc

SEQ ID NO: 42611 - DNA, 781 bp, Macaca Mulatta
  misc_feature (1)...(781): n = A,T,C or G
gggctctcttgcttcccaccgtgtaagaagtccctttgctcttccttcatcttctgccgtgattgtgaggcctccccagccatgtggaactgagtgtgtaagcctggaagcttgaaaaagctactgcccttgtgacagtccttaagcactggtgaggtcagctggtacaaatgttccagcctccctcttcctgggctgacaatcccagaaagtcagttcacttccntgggaagaactgctgaaactgagccctcattccctaccagaaatcactgaagacagatacagtcatctgtacactgtttcaggaagaaatttcccccccttccggttcccaatttcaatttcactggggttcataaaaatgggtcaaagctaccgaaccctttaacaaacttacggggcttttataaaagccatttctccggccccctttttaaaggcttaacccatgggaaaccaaagggggtttcaaaatttgcctaaggcaagtgttaacccctaaaaccccttccaagaaccctttaaaagggaaaaaaccctcaaaaaaaagctaaaaacctttgggggaacctcnngaaaaacccggggggggaatccccgtgnnnnnnnnnnnnnnnnnnnnnnnnnnnnnnnnnnnnnnttaaaaatttccccccccaccccccgggtattttggttttggtgggagcccccccgggcttttgggaaaacctggggcgcnnnnnnnnnnnnnnnnnnnnnnnnnnnnnngggggccnnnnnnnnnnnnnnnnnnnnc

SEQ ID NO: 42612 - DNA, 398 bp, Macaca Mulatta
atggtgaagatccggcaatttttgttggctattttgtggcttcaggtaagctgtgtaagtgccgccaaaaatgaagtggagcagagtcctcaggacctgactgcccaggaaggagaatttatcacaatcaactgcagttactcaataggaataaattccttacactggctgcaacagcatccaggaggaggcattgtttctttgtttatgctgagctcagagaagaagaagaatggaagattaattgccacaataaacatacaggaaaggcacagctccctgcacatcacagcctcccagcccagagactctgccatctacatctgtgctgtgtccgggaatgtgttgcatttcgggtccggcactcaagtgattgttttaccacatatccagaaccc

SEQ ID NO: 42613 - DNA, 578 bp, Macaca Mulatta
aaatgtgcctgtggcatccttacagctatacattaagttgagccttctctagatatgtactccagtggcacccaaacaaacatgaatttcagacttgatatcaagtaaatagaaatagtgatgtataattttaggcttaaaatctaatctgataatgacattcttttacactggtagaaaaacttggtaaaagaaacatacctaatatataaaattgccaattttgtaaaattggaccattaagctaaggaaataatgctgtttttagtaacaaaatgtaaaccacaaatgaatagtaacttggaaaatagatttttcctaaaggaaaagaaatattgttaagaaacaaatgaatggctattcttacagctaaaaatagaaaataagttcttacaatcaaaatattctctgctactagttttagcactggagagaactgactccctattgctgagtggtttattgatcttaatgctgcaaatatttcaaaatattctgtggaattaaaggataaattgacaaaactttacatataatatggcttagttaagatgtatggtatattctaatggtgtgaa

SEQ ID NO: 42614 - DNA, 864 bp, Macaca Mulatta
  misc_feature (1)...(864): n = A,T,C or G
agccaggatagctcgatctctgacctcgtgatccacccgcctcggcannnnnnnnnnnnnnnnnnnnnnnnnnnnnnnnnngtgcccggccaatgaatttcttaaaaaatcaatttaatgccctaactctcttattaaggagaaatagaaaagaataaatttataatgaaaagaagatgaatttcattatgtaaatgctcaggcatgactccgctgtttgaaacagacagatgtttactcttccttgtaatgagtaggtttggatttaagagccgattagcggctacttcctgtaaacaagtacaggaaaatgaaactagagggatgggggacactagaatgaaaaccagtgttagggtaaagtcaaaacagaccatatacataatctgtgtatgggaaaagaaagagcgaagttaccttacttaaagataataggacaagacaaattacagattgtctcagagaaaacagatgagttactctctcggacaagctgtaggtcctacataaatgtccagcaggacattagacagtcgtacagggtacagaataattcttcgttgtgtggcactaacccacacactgcaggacatcgttctccctggctgcatccactcagtgccgggagtagtccccagttattatgaaaccaccaacaacccactgaccatagtgagaaccacagatttttttccactgacctagcgaatatctagcatccttagattggctcaactgttacttacctaaggagtccttctatagaataggtcagatacttgcctcccgaactccttatttttaaaatacttggcgccttgctttgataatttgtattatgtatccaaactgaaattatctgct

SEQ ID NO: 42615 - DNA, 618 bp, Macaca Mulatta
ggattttgacacttcatgacatgtcattatttagagcaataatgaatattgatctgttttggattagttgatgaccttcagaaatgatccaataatatctactatagagaagctgaatatactccatttggagtgaacaactagattgttacagaattttcaagatgacagatccaatgatggacttttttgatgatgccaatcttttcggtgagaccttataaggcttgtcggatgatgcatttgtacaaccaggacctgtttcactagttgatgaattgaatttgggtgcagaatttgaaccattgcacatagattcactgaaccatgttcaaagtactccagcacatcagaagatgactgattttgaacagttaaatcaattggattcaataaaatttcaccacgttaatcaatctagtggtagcccagaagaacaagtattatctccgcactctcagtttgactgttatccaatccacccccaaaaccaacccaatggtttgtttccagatgtatcagatggcagtccaatgtggggccatcagacatctactagcatttcaaatcaaaatgggggtccttttcatcaacaaggacattcacactctatgcatc

SEQ ID NO: 42616 - DNA, 615 bp, Macaca Mulatta
  misc_feature (1)...(615): n = A,T,C or G
cttcaacacttccctgggagtattcttgctggacagggtttcacggaaattgagagagaaaactgggacctgcttggagcatccactcttgtctccgggtgaaaggaaggccagctggctttatggccctgctctggccaaccacatcagcatccatttgtgtgtgtgtgggaaagagagagtgtgtgtgtgagagagagattgtgtgtatgtaaatgtgtggagagagggcgaatatgcatggtggtagtgtcagagtgtgtatgttagagtgtgtgtgattgtgtgagtgtacatgtgtagagagannnnnnnnnnnnnnnnnnnnngatgcacccctttgcttgtgctttgttttgtttttgaggaaccaaatttgtcatttatgtatctataagattgactcttggccaggcatggtggctcctgcctataatcccaacagtttgggaggccagggcaggcagatcacttgagcctannnnnnnnnnnnnnnnnnnntaacatgannnnnnnnnnnnnnnngnnnnnnnnnnnnnnnnnctagccagctatggtggtgtttacctgtagacccagctactctagaggctcagttgggagaattgcttgagc

SEQ ID NO: 42617 - DNA, 835 bp, Macaca Mulatta
  misc_feature (1)...(835): n = A,T,C or G
gggccaatannnnnnnnnnnnnnnnnnnnnnnnnnnnnnnnnnnnnnnnnnnnnnnnnnnnnnnnnnnnnnnnnnnnnnnnnnnnnnnnnnnnnnnnnnnnnnnnnnnnnnnnnnnnnnnnnnnnnnnnnnnnnnnnnnnnnnnnnnnnnnnnnnnnnnnnnnnnnnnnnnnnnnnnnnnnnnnnnnnnnnnnnnnnnnnnnnnnnnnnnnnnnnnnnnnnnnnnnnnnnnnnnnnnnnnnnnnnnnnnnnnnnnnnnnnnnnnnnnnnnnnnnnnnnnnnnnnnnnnnnnnnnnnnnnnnnnnnnnnnnnnnnnnnnnnnnnnnnnnnnnnnnnnnnnnnnnnnnnnnnnnnnnnnnnnnnnnnnnnnnnnnnnnnnnnnnnnnnnnnnnnnnnnnnnnnnnnnnnnnnnnnnnnnnnnnnnnnnnnnnnnnnnnnnnnnnnnnnnnnnnnnnnnnnnnnnnnnnnnnnnnnnnnnnnnnnnnnnnnnnnnnnnnnnnnnnnnnnnnnnnnnnnnnnnnnnnnnnnnnnnnnnnnnnnnnnnnnnnnnnnnnnnnnnnnnnnnncnnnnnnnnnnnnnnnnnnnnnnnnnnnnnnnnncggnnnnnnnnnnnnnnnncnnnnnnnnnnnnngaaccattccttttggcgccgcggggccccgtaaggtaaaggtgaacttgggtcataaacctgtttcccctaaggaaaatccccggtccatgaacaaagggctttgggatttctccccnnnnnnnnnnnnnnnnnnnncgggcgggcaaacccaagccgttctttggaacaaaatctccgaaatgggaattttccagaaggtc

SEQ ID NO: 42618 - DNA, 195 bp, Macaca Mulatta
cgctgaggcagcggcagactagagctcttggtcccattttcatctgcagaccccggggcatgttgggccccacactttagggccaaacagaggcctctgcatcccttggcctttcacctcttgcatgcacctgctaaatggttttgtgtattatattctatataggcactaacaattatgaaaaacttggagggc

SEQ ID NO: 42619 - DNA, 279 bp, Macaca Mulatta
ctgctttgtcaacatgtgtcatgggagaaatatctgcctatgccccccaaacacaggttttgaaagggatagaaaacatcgttttacaagatggattatgctttaagggtattgggaaatggacagaggatgtgatgtggtgataataggggaagaaaactaggacaggtagtaggtgagtgagactgatgtgcagtccagcaagacttgctggttaagcttcatgctgtttgaaagggcctcctttcctattgggcaagtggcacttctatgcttatt

SEQ ID NO: 42620 - DNA, 161 bp, Macaca Mulatta
caataagaagtgaaaaataaaataggaaacatgaagtgtggatgagaatctggaatgaaagagtttccgtgggggaatattgcaggctctatgccagatgctggaggacccctgtcctcaaggaattcagcgtgtgtgaagcactgtaaatattttgttta

SEQ ID NO: 42621 - DNA, 981 bp, Macaca Mulatta
gcgaagtcggctgcggaattattgcctagttgctgcttctcccaccgccccttaaacttagtcagttttcttctcttctttgacattctaagaacttatagataacttaaaacttttgtgaggaagattaatgtggccaataaaacctttaaatgttaagtgtcaggaaaccgcacactcccttaagaactgcttaaagtctaaaatacattcaaatgcaatttttggaagattttttaatgttcgtttgtttattaaactaaccctaagtgatttcttcaaggaccgtaatcagggtatcgattcgctttcccaaaggctcttccaactcgtgggttttggggtccaccgccaccaccagagaggcttttgaacaggtgcctggctacgttcagaagaaagctggcttgtgtgcttctctccggtgggctcagccgacgtgtgagactcattctgttaccaaatgaactgggctgccacgctgtgacaggtgtttgtcctctgctttatttttattttgaagctaaaatgtgagtactaagtgttcacctcagcatacgaatcattggcctgtaaccctgtgggctgcttcacgagaattcaggacctgcattttcattttaaaaggaaatgaacagcttgtgaaggatttttttggctttgtagtttctattcatgaggtagtgttaacttctttatccccctaaagacaaaattaagataacgggggattgccaggaatgggtttaaaagcacaagtttggtagcttatcatctataccatggacagtgaacccttttacgaaatgaaagtcaaacgagaccatcctagaaaaagaagatgctcataggcatttgtaccataatcaaccccacgcataatgaaaactatgaccaagtgacgtgcctgggagctttgacacatgagccatttgaattcactaggaaacctgtgataaggtaatgggagagaaaatcgtg

SEQ ID NO: 42622 - DNA, 5015 bp, Macaca Mulatta
  misc_feature (1)...(5015): n = A,T,C or G
ccaccccatgcccaacggtgatgagagcagaagttcccaaccacacagtaggtcaacagatagtaatcatacaggcagctaatcagaatcctttgccactcctctctgctccacctcctggttctgttcgactccctattaatggagccaatactgtaatagggtctaataattcagtgcaaaatgtttcaacaccacagacttttggaggaaagcatcttgtccacatattaccaagaccttcatctttatcagtgtctaactcaacacagactttttctgttaccatgtcaaaccaacagcctcaaaccatttctttaaatggacagctctttgctttgcagcctgtgatgtcttcatcaggaactacaaatcaaacccctatgcaaannnnnnnnnnnnnnnnnnnnnnnnnnnnnnnnnnnnnnnnnnnnnnnnnnnnnnnnnnnnnnnnnnnnnnnnnnnnnnnnnnnnnnnnnnnnnnnnnnnnnnnnnnnnnnnnnnnnnnnnnnnnnnnnnnnnnnnnnnnnnnnnnnnnnnnnnnnnnnnnnnnnnnnnnnnnnnnnnnnnnnnnnnnnnnnnnnnnnnnnnnnnnnnnnnnnnnnnnnnnnnnnnnnnnnnnnnnnnnnnnnnnnnnnnnnnnnnnnnnnnnnnnnnnnnnnnnnnnnnnnnnnnnnnnnnnnnnnnnnnnnnnnnnnnnnnnnnnnnnnnnnnnnnnnnnnnnnnnnnnnnnnnnnnnnnnnnnnnnnnnnnnnnnnnnnnnnnnnnnnnnnnnnnnnnnnnnnnnnnnnnnnnnnnnnnnnnnnnnnnnnnnnnnnnnnnnnnnnnnnnnnnnnnnnnnnnnnnnnnnnnnnnnnnnnnnnnnnnnnnnnnnnnnnnnnnnnnnnnnnnnnnnnnnnnnnnnnnnnnnnnnnnnnnnnnnnnnnnnnnnnnnnnnnnnnnnnnnnnnnnnnnnnnnnnnnnnnnnnnnnnnnnnnnnnnnnnnnnnnnnnnnnnnnnnnnnnnnnnnnnnnnnnnnnnnnnnnnnnnnnnnnnnnnnnnnnnnnnnnnnnnnnnnnnnnnnnnnnnnnnnnnnnnnnnnnnnnnnnnnnnnnnnnnnnnnnnnnnnnnnnnnnnnnnnnnnnnnnnnnnnnnnnnnnnnnnnnnnnnnnnnnnnnnnnnnnnnnnnnnnnnnnnnnnnnnnnnnnnnnnnnnnnnnnnnnnnnnnnnnnnnnnnnnnnnnnnnnnnnnnnnnnnnnnnnnnnnnnnnnnnnnnnnnnnnnnnnnnnnnnnnnnnnnnnnnnnnnnnnnnnnnnnnnnnnnnnnnnnnnnnnnnnnnnnnnnnnnnnnnnnnnnnnnnnnnnnnnnnnnnnnnnnnnnnnnnnnnnnnnnnnnnnnnnnnnnnnnnnnnnnnnnnnnnnnnnnnnnnnnnnnnnnnnnnnnnnnnnnnnnnnnnnnnnnnnnnnnnnnnnnnnnnnnnnnnnnnnnnnnnnnnnnnnnnnnnnnnnnnnnnnnnnnnnnnnnnnnnnnnnnnnnnnnnnnnnnnnnnnnnnnnnnnnnnnnnnnnnnnnnnnnnnnnnnnnnnnnnnnnnnnnnnnnnnnnnnnnnnnnnnnnnnnnnnnnnnnnnnnnnnnnnnnnnnnnnnnnnnnnnnnnnnnnnnnnnnnnnnnnnnnnnnnnnnnnnnnnnnnnnnnnnnnnnnnnnnnnnnnnnnnnnnnnnnnnnnnnnnnnnnnnnnnnnnnnnnnnnnnnnnnnnnnnnnnnnnnnnnnnnnnnnnnnnnnnnnnnnnnnnnnnnnnnnnnnnnnnnnnnnnnnnnnnnntgcttcagagccttctgaagcatcatcattagagggagacccacctttctatcacagatacctaaagagaatggcacaggacaggcagaagcaacaccaaatgaatttaattctcaggattcaattgaagcaactatggagaggccccttgaaaaaccgagctgttctctaggaattaaaacatcaaatgcacctttacaggcttcaccttctcagcccccaagcatcaccagtttaagcgtgaataatcttatccatcagagcagcatcagccatcctctggccagctgtgcgggtttatccccaacttcagagcaaacaactgtgcctgcaacggttaatctgactgtttcatctagctcctatgacagtcaacctcctggaccatctctgatgaccgaatattcccaagaacagctaaatactatgactagtaccataccaaattcacagattcaagagccactcttaaagccaagtcatgaaagccgtaaagattccgctaagcgtgctgtccaagatgaccttttannnnnnnnnnnnnnnnnnnnnnnnnnnnnnnnnnnnnnnnnnnnnnnnnnnnnnnnnnnnnnnnnnnnnnnnnnnnnnnnnnnnnnnnnnnnnnnnnnnnnnnnnnnnnnnnnnnnnnnnnnnnnnnnnnnnnnnnnnnnnnnnnnnnnnnnnnnnnnnnnnnnnnnnnnnnnnnnnnnnnnnnnnnnnnnnnnnnnnnnnnnnnnnnnnnnnnnnnnnnnnnnnnnnnnnnnnnnnnnnnnnnnnnnnnnnnnnnnnnnnnnnnnnnnnnnnnnnnnnnnnnnnnnnnnnnnnnnnnnnnnnnnnnnnnnnnnnnnnnnnnnnnnnnnnnnnnnnnnnnnnnnnnnnnnnnnnnnnnnnnnnnnnnnnnnnnnnnnnnnnnnnnnnnnnnnnnnnnnnnnnnnnnnnnnnnnnnnnnnnnnnnnnnnnnnnntaagagagaggcatcacttatatcaaatgcagcatcatgtacctcatgcagagagctctgtccactctcagccccataatgtccaccaacagaggactctgcaacaggaagttcagatgcagaaaaagaggaatcttgttcagggcacccaggcctctcagctttccttacaacccaagcaccatggaactgaccagtcccgatccaagagtgggcagccacatccccaccatcagcagatgcagcaacaaatgcagcaacactttggaagctcccagacagagaagagctgtgaaaacccttcaactagtcggaaccatcataaccatccccagaaccatctcaatcaagatattatgcaccaacagcaggatgttggaagcagacagcaaggttcaggggtttcatctgaacatgtatctgggcataatccaatgcagaggcttttgacatcaagaggcttagagcagcaaatggtgtcccaaccaagtattgtgactagatcttcagacatgacctgtactccacacaggccggagagaaatagagtttcaagttattctgctgaggcactcattggaaagacatcttctaattcagagcagagaatggggatatcaattcagggttccagagtttcagatcagcttgaaatgagaagctatcttgatgttcccagaaataagagtttggctattcataatatgcaggctcgtgggaccaaacggtagcctcagatatccgcctttccgattgtcannnnnnnnnnnnnnnnnnnnnnnnnnnnnnnnnnnnnnnnnnnnnnnnnnnnnnnnnnnnnnnnnnnnnnnnnnnnnnnnnnnnnnnnnnnnnnnnnnnnnnnnnnnnnnnnnnnnnnnnnnnnnnnnnnnnnnnnnnnnnnnnnnnnnnnnnnnnnnnnnnnnnnnnnnnnnnnnnnnnnnnnnnnnnnnnnnnnnnnnnnnnnnnnnnnnnnnnnnnnnnnnnnnnnnnnnnnnnnnnnnnnnnnnnnnnnnnnnnnnnnnnnnnnnnnnnnnnnnnnnnnnnnnnnnnnnnnnnnnnnnnnnnnnnnnnnnnnnnnnnnnnnnnnnnnnnnnnnnnnnnnnnnnnnnnnnnnnnnnnnnnnnnnnnnnnnnnnnnnnnnnnnnnnnnnnnnnnnnnnnnnnnnnnnnnnnnnnnnnnnnnnnnnnnnnnnnnnnnnnnnnnnnnnnnnnnnnnnnnnnnnnnnnnnnnnnnnnnnnnnnnnnnnnnnnnnnnnnnnnnnnnnnnnnnnnnnnnnnnnnnnnnnnnnnnnnnnnnnnnnnnnnnnnnnnnnnnnnnnnnnnnnnnnnnnnnnnnnnnnnnnnnnnnnnnnnnnnnnnnnnnnnnnnnnnnnnnnnnnnnnnnnnnnnnnnnnnnnnnnnnnnnnnnnnnnnnnnnnnnnnnnnnnnnnnnnnnnnnnnnnnnnnnnnnnnnnnnnnnnnnnnnnnnnnnnnnnnnnnnnnnnnnnnnnnnnnnnnnnnnnnnnnnnnnnnnnnnnnnnnnnnnnnnnnnnnnnnnnnnnnnnnnnnnnnnnnnnnnnnnnnnnnnnnnnnnnnnnnnnnnnnnnnnnnnnnnnnnnnnnnnnnnnnnnnnnnnnnnnnnnnnnnnnnnnnnnnnnnnnnnnnnnnnnnnnnnnnnnnnnnnnnnnnnnnnnnnnnnnnnnnnnnnnnnnnnnnnnnnnnnnnnnnnnnnnnnnnnnnnnnnnnnnnnnnnnnnnnnnnnnnnnnnnnnnnnnnnnnnnnnnnnnnngggcaagaatccacaataaaagctaatgctctttccatccacagggtattcagcctagtgccactcgaactccagccctcatcccggtagatccgcaaaatactctgncctccttctatcctccatactctcctgctcatcctacactgtccaatgatatttcaatcccctattttcctaatcagatgttctcaaatcccagcacagagaaggtaaacagtggaagtttaaataaccgatttggatcaattttatctcctcccagacctgttgggtttgctcaaccaagttttcctcttctcccagatatgccaccaatgcacatgaccaactctcatttatccaattttaatatgacatctttgtttccagaaatagctacagcgcttcgtgatgactcagcaatgtcacctttgcttacgatagcaaattcctctgcctctgactcgtcaaagcagtcctcaaacagacctgccgataacat

SEQ ID NO: 42623 - DNA, 844 bp, Macaca Mulatta
  misc_feature (1)...(844): n = A,T,C or G
ggcacagtggctcatgtctataatcccagctctttgggaggttgaggccggagaattagttgaagctaggaatttgagaccagccttggcaaagagcgagagaccctgcctctnnnnnnnnnnnnnnnnnnnnnnnnnnnnnnnnnnngtgtgccggtggtcctagatcctnnnnnnnnnnnnnnnnnnnnnnnnnnnntggcctgaatatgtttttaaagtgtggctgaccatattcgctgagggattaaatgtaaggtatgaggggaaaatacgaatcagacaccaggatttactgcctgagcaattagaagaatgaagttcctcatatggagatgaggaagaacgtggaacagcaggtaaatagcatgtgcttgctttgttggggggtgtgcagaagagactgatgggaccaacgtgctcaggttctggaaacattaaacttgaaatgccaatttggcaccaagggaaatgtatcaggtaagcaaaaggataaatgaatccaaaaatgcaggggacaagctgagaggggcaaatatgaactatgggaattttccagctctaaaaattagatttatggctactataaccggggtgagggtggaaatagagatctaaggatagaattttcggccgggacccaaaaggctaccagccctggaatacccaacaacctttgagaaggtccgttaacaggatgcatccctaatttcagtgggataaagaaaaacctaacctggagataagaaaggggtaagctggaaaaacaaaggttaaaaaacaaaaagtgaacgttaccagaggcggagtgagagtaagggaatctcttttatacctacaaatc

SEQ ID NO: 42624 - DNA, 539 bp, Macaca Mulatta
cgctcgctgcctgcgcgacctccaggccccgggaggcggggcgcgtcctggctccggcggggtcacacggagcagcgggcgctgggatccagggtggccttggggacgcaactttagggaagtcacctacccctgtgtgtgcgctggccccctgggacactgggagcgaaatgaggtggtcgtgagccagttattttccaaaatatgcaccaggcaccagaccgaggaagccggagccccggagagcacggaggggcgggtgggggaggaaggcgggggaggctgctcagcgggtgctgggagaccgcagccgcgggggactcgcagaagagccaagactagccacccagcctgggaagggagggaaggaccgcgagagggtgcccgatttcagcccggggagacgcgtgtcccggctgccagtctctcttcccggcagagggccccggtgctgaccccagccccttttccacgctcgatgcttcttacaaagaggcccggcgaggagtgtcgctctccaagaggccaggcccttacta

SEQ ID NO: 42625 - DNA, 528 bp, Macaca Mulatta
tgctctgaggagggcacgtgtgccgctgtgtcctgtctctctcagcacagtcatggtgtagtgcacggggggctgcgcagcacggccattcctgaaggaaagtggggtgctccacccagacagacgcctgctctccagtggggagccgggggtggtcctccaaaggaaggcagcgggtaacgcaaagggaggaggagagtgggtactgaacgggcaactaccacaactgggccagaagcttgggcctcacgtgttaggggatgcatttcccgtggagagccagttagtcgtcccggggtggaatctgcgtgtaggaatgtgtcaggagggccaggcctcggatgctgacccctctgtcctgggggctgctttgcctgtgtctctgccacagtccctcatcccctgcggtggggctgctgtggtccagcacggccacaggcttccattttccctttgggaagcctgggtgtgggtccttgttggtccgtggtgaaccgcgtattgttttacatacttgatttgaagaaa

SEQ ID NO: 42626 - DNA, 502 bp, Macaca Mulatta
ttgttgtgtgttttcccgtgatgaaattaaatgctcaatataccaaacctgtttcttttttcctctgattgaagatttggtttgagaatagaagagccaagtggaggagacatcagagggcattaatggcgagaaacatgccgcccctcatggtcgtgggccagcctgtcatggtaactgcagttgaggccataatggcacccttgtccatcagcaggatgagagatggttacttctggggctacagccatcccagcaccctgtgtttctccatgtcaccctttcctcctccgtccttgccccttccaactgtgtttcttccacctatgcctccctctgacgaggcccaatttggccggttcccttttgttatcgggcattctttcacattccccaatgtgtaagggataccctctgtgctactttttgccagagtgtgtttgagccagattcgtagtttgcgtagcaccccatcaagagtagttcatcaaatgtctattag

SEQ ID NO: 42627 - DNA, 614 bp, Macaca Mulatta
  misc_feature (1)...(614): n = A,T,C or G
ctaagtatgcttttatactctctgctatatttctgtatcaataaagtgtgcctggcagcatgaagcaaagtcagtataacaatggttctctctgttttgcaaaactgaaattggaagtgggtaacccaacaatggcacagcagcttcacaagatcctgagggaccagcctccttctttcttgctgcctcactaccctcaacccttggcttctgcctcagggtctgaaatggctacttcagatccaggcaccaagcccccatcattacatcatctcattnnnnnnnnnnnnnnnnnnncaatgacaagtgttccctctccctgtaaagacactccctagaagtccaaaataacatttctccttccattctttgttgcgaatgagactggaaaatacagtttgtatttgggaggcttattactaagaaggaagaatgtgatactaaaggtcaccagcaggttttgccacagtgtaacaatgagggtttcatagatatccagaatttttcagtaagtgattttaaaatcattccatacaaatccctcttgatcagacgagggaagagaaacacagaagttaagtgatcagttatgatcatgtattggtaggagcatg

SEQ ID NO: 42628 - DNA, 617 bp, Macaca Mulatta
  misc_feature (1)...(617): n = A,T,C or G
nttagtttctttacaggacgaaagaatgtgaattctaagttatgcactcctgaaggagagttgctatgggatagataattgaaagcgaatcatcatttgcttagcttctataagctgtatcccctaggacatttaaatctggcaaattagtttcctagttataggttacttaatattaatttgacaacagtgacataagtgagccattgaaagttgggtcaaggaacaacaacatgctagaagaggaagtggggagaaaagaattccattttttgggattagtctatatgtatctactatgttaaccattagaatacaaagtaatcttggatgtagctcataataaaaccactgtcaccattttgagtcaggatgttggctcaaagcattaacaattagaataatagcatttggaagaattatcttctggtataatagtattaagtggaaatttcttgttgactacatttttatttttaggtttataaaagacctaaaactgaagcttttggattttctttttatttagattaccaaatatgacattttagtcctaattcatttaaattatatttctaagaaggtaattaagtattccacaatttaaaaattaagtt

SEQ ID NO: 42629 - DNA, 565 bp, Macaca Mulatta
  misc_feature (1)...(565): n = A,T,C or G
ggactctcacagaaggaggaagaggaggacacttttattgaagaacaacaactagaagaagagaagctattggaaagagagaggnnnnnnnnnnnnnnnnnnnnnnnnnnnnnnnnnnnnnnnnnnnnnnnnnnnnnnnnnnnnnnnnnnnnnnnnnnnnnnnnnnnnnnnnnnnnnnnnnnnnnnnnnnnnnnnnnnnnnnnnnnnnnnnnnnnnnnnnnnnnnnnnnnnnnnnnnnnnnnnnnnnnnnnnnnnnnnnnnnnnnnnnnnnnnnnnnnnnnnnnnnnnnnnnnnnnnnnnnnnnnnnnnnnnnnnnnnnnnnnnnnnnnnnnnnnnnnnnnnnnnnnnnnnnnnnnnnnnnnnnnnnnnnnnnnnnnnnnnnnnnnnnnnnnnnnnnnnnnnnnnnnnnnnnnnnnntttggaatggagcagtgcagaagggatgactatgaccctgatgcaagcctggagtacagcgaggaagaaacctaccagcagttcctagatttctacgaggatgtgttgcccgagttcaagaacgtggggaaagtgattcagttcaagg

SEQ ID NO: 42630 - DNA, 661 bp, Macaca Mulatta
ctgtgaaagcgggcgtgtgggggagaccggaagtacagtcacggagaggtattaagaaatggagagaaaaataagcagaatccatcttacttctgaacccaatattgctcattttctacaagtatcttgggagaaaacactggaatctggttttgttattacacttactgatggtcattcagcatggactgggacagtttctgaatcagagatttcccaagaagctgatgacatggcaatggaaaaagggaaatatgttgatgaactgagaaaagcattggtgtcaggagcaggaccagctgatgtatacacatttaatttttctaaagagtcttgttatttcttctttgagaaaaacctgaaagatgtttcattcagacttggttccttcaacctagagaaagttgaaaacccagctgaagtcattagagaacttatttgttattgcttggacaccatcgcagaaaatgaagccaaaaatgagcacctgcagaaagaaaatgaaaggcttctgagagattggaatgatgttcaaggacgatttgaaaaatgtgtgaacgctaaggaagctttggagactgatctttataagcggtttattctgggtgttgaatgagaagacaacagaaatcagaagtttgcataataatattaatacagc

SEQ ID NO: 42631 - DNA, 635 bp, Macaca Mulatta
gggtgtcaactactctaccagccagaagatctcccgccccggggactcggatgactcccggagcgtgaacagtgtgcttctctttaccatcctgaaccccatttattcgatcaccacggatgttctttacactatctgtaatccttgtggccctgtccagagaattgtcattttcaggaagaatggagttcaggcgatggtggaatttgactctgttcaaagtgcccagcgggccaaagcctctctcaatggggctgatatctattctggctgttgcactctgaagatcgaatatgcaaagcctacacgcttgaatgtgttcaagaatgatcaggatacttgggactacacaaaccccaatctcagtggacaaggtgaccctggcagcaaccccaagtcgctacggcccccagtatgagctgggagtgaagcggccatcttctgtgaaagtattctcaggcaaaagtgagcgcagctcctctggactgctggagtgggaatctaagagcgatgccctggagacgctgggcttcctgaaccattaccagaatgaaaacccaaatggtccataccctgttgcactctgaagttgtgtttctccaccgctcagcacgcctctttaataggtgcctagg

SEQ ID NO: 42632 - DNA, 731 bp, Macaca Mulatta
  misc_feature (1)...(731): n = A,T,C or G
ggaaccctnnnnnnnnnnnnnnnnnnnnnntgcaccattgcactccagccttggcaacaagagcaaaactctgtannnnnnnnnnnnnnnnnnnnnnnnnnnnnnnnnttgtgaaactagtgttttatttctaagcttgcagatatttctagaattccacttagtgttacatctaaatgtatggtgattattggttaaataataagcaggtctgtaaacattttgttctctaacctcttttcacatttgtatgagtatagaaaaactgtggttgtgaatattttttactttttgatagcttttaaaaactcagatatgtgataatcagagatttcaagtttacttacagtgtaaattaggaaaatttttataaagattccatccagtattgatcaaaagtttaaattgtatgtctttttaagcagcagtttggcaatgacaatcaaattgatactatgtaaaagttttgaaatgttatagctggctactggggttttatctattccaattcttgaaaatttaccaagtacaggttgggctataaaatcataactgaggtatctgtcagtaaatcaaagattgcaatgattatagcttctttaacatgaatggtaattctaacactaaaaaattttctgtatggaaatatggtttttgtagtccttaaatttgatatttttaaatcaattttttcaatgaaacaactagcctggttttacagaagtcctggg

SEQ ID NO: 42633 - DNA, 610 bp, Macaca Mulatta
  misc_feature (1)...(610): n = A,T,C or G
tcttttgctgccatcantgtggctggatcacacagagatccggtcgtcaggncaggagccaggaccagggagtgcgctacactcggaccttcagggctctgtaggacatgacagagaacagttgatgactgactctgctaccacaaagattcntgagctagattctcaaattcatgccnttagccagaaagcagctctgtccgctgtagaaggattgatcacccattgctatctctggcctggagcaggaccagcctgcacgaagggcaaacaaagatgccacagctgaaagaattgatgagttcgttgtcaaaccggaggagctgaagcaagcagtctcccctttcactctgatcattgatgatccctcagggaacagctccgtggaaaacccacgtgctgctcagaaagatgatgccctggtgatcacacactacaactggacccgacagcagaaagagatgctggggctccaggcagagcacccacagagaagccagaggaggaagatgtcagaaatgaagtgctccagtttaacacaaacggcccagaatgaaatgcccccgctcagaccaacatgaagctagtacaaatccctccctttaaggag

SEQ ID NO: 42634 - DNA, 91 bp, Macaca Mulatta
tgaaaaccattttctttatagcaactgagctctgtcttctttgtactgaacagtttagaacacagtcccatggtataaaatttggaaaatt

SEQ ID NO: 42635 - DNA, 744 bp, Macaca Mulatta
caccaagcttgttttcgcctgttggcttggaaaaaattgaacagggcaatttagggggatactccaaggaaaaccatttgagataccatcgggggcaccacccaagattgaccaaataggaaggaggtccagcctccaggttcccagcatgagagccacagaagcaggggggatttctgcattttcaaatgagggtaccgggttcatctcactggggcatttcggacagttgacgctgggttccatgggtgcagctcaaccagcgagagctaaagcagggcgaggcatcgccctcacctgggaagcacaagggggaagggaattcctttccctagccaaaggaaattgagacacacaacacctggaaaattgggtaactcccaccctaatactgcactaaaccaagggtcttagcaaacggcacaccaggagattatatcccacacctggcccggaggtcccatgcccacggagcctccctcattgctagcacagcagtctgagatctaactgcaaggcagcagcgaggctgggggaggggcacccaccattgctgacgcttaagtaggtaaacaaagacaccaggaagctcgaattaggtggagcccagcacagctcaaggaggcctgcctgcctatgtagactccacctctggggacagggcatagctaaacaaaaagcagcagaaacctcggcagaggtaaatgtccctgtctgacagctttgaagagagcagtggatccc

SEQ ID NO: 42636 - DNA, 762 bp, Macaca Mulatta
  misc_feature (1)...(762): n = A,T,C or G
ggttgaaatcacttctgatttagttgttttatgcttattatacttcacatataaaccagcattgtcctttagatttgctgaatggtgaaagatttccaagtatatcatttgtggttgaattgttgatatgtctgatctgtttgaatttagaaaaaatgacaaattctcaagataaaaggtataaaggcatattcctcctatagttattattgaacagccttgtttggctggatttctgtttgacctactacagctgtagtaaatgattaagctcctggccagtttgttgaaggtaatgttaaatgaccatgtgatataatgtgttgtcatggctgtcattgttcttaattcaatttgtaaaccactacttgtnnnnnnnnnnnnnnnnnncagtgctttaaaataagatttgaaatccttataaaatgccttttccttctcattcttttcttttggttgactagtttagtatcttcttatgtaatggtaagagatgaaaaaaacaatcaagttaatattaatagacagggcagggacacagattatgtaaaatgtcagttttacttgcatctcagtgctgaggcatactttttttagtatggacatattcggagaaaaagaagagaataccngtttgcaaaaggttaggtaagtgttggccatattaccccgaatagaaaaaattcaggttttaggctgaaaaatatccttgttttaatacaccccatttcccttaatttaatggtaccaatttttaaccag

SEQ ID NO: 42637 - DNA, 730 bp, Macaca Mulatta
  misc_feature (1)...(730): n = A,T,C or G
gggttgtggggctacaacacagtttgcttattcattcacttggtgaaagacatcttgggtacttccaagttttggcaattatgaataaaattgctgtaactacttatgtgcaggattctgagtgaacttaagttttccagagtgactgtacccttttgatttctactggctatggagagttctggttgctcctcatctttgagagcatttggtgtgttcacctttttgcattttagccattctaataggtttccactgatatctcattgttgttttagtgtgcaattccctagcgccaaatgattttgagcatctttttcatatacttatttgccatctgtatatcttattagtgaggtgttcagatctttcacctannnnnnnnnnnnnnnnnnnnnnnnnnnnnnnnnnnnnnnngctttgtggtgtttagttctcagaattcttcatatattttggacagcagtttttccatcagattattttgtaaatattttctgccagtctgtgacttgctttttccattctcttaacagtgtctttcacagagcagaagtttttaatttgaacgaggctccccttaattttttttcattagtagaatgtgccttttggtttttgtatctaaaaaaaccattcatccgaaccccaagaattccccggaaaaacttttccccccaatggtttatccctccctaagggaattccttaatggggttttttgcccacc

SEQ ID NO: 42638 - DNA, 850 bp, Macaca Mulatta
  misc_feature (1)...(850): n = A,T,C or G
gggattggaggcggtagctttttcggcgtctagactggangcagagtgctaaactgtgtggggcgcgaatgggatccggctgttagtcgggattggattcagcatcaaaatacatctactcatattgagagctgtcgacagttacgtcaacagtaagaacttttttttctttgttatagatagcatatttacaacataatgttcagatgtgactgttaaatacctttagtataatactttggagaaaaatatttttggaaagctattgttttttaaaaaatagtagttttgtggaagtatatttaatatttttccaaaatggtagaattcaatatatcctttgctcttacaattttctagcttaattcccagtaggtaaactttttatgtcattagttcattatttgctggcttaccttccccaggatcttttatctatatcagagcaagtatccttttcttctcctatctccacctcttccccataggacaaataactgaaaatcagtgcaaaccaaaacacccagtattttaattttggggaactaaagcctccttcttctgaccttagaaaccagttttcaaaaattatacccttaagttaaggggatgggaccaagactaagatggtccttgccttcccttaaacatttgggcttttcagtttcttcccacctttttttcttaataaagggcaagggccgccccgttgaaaaggttttcccctacctggcccataagaaggttgaaaaaagtgttgaattttaaccacctaatgggttccctggtatcccccttgaaattaaccggtaagaaatttaaaacttctggttccttcccctaaaatacn

SEQ ID NO: 42639 - DNA, 635 bp, Macaca Mulatta
  misc_feature (1)...(635): n = A,T,C or G
cctagagtcaatttggatttcctgtcttgtgagagatggcatgtctcttgatattttaagctatttgactgaagttttttgcttcctcattttaaacgtgatctagatctatcaaatgttaccatttttgacagggctgaagacatagtagtgtagaaaagggaacagggcccttgtttgtgatataattctttgtaacactgtaagtcctggagaggcagccagggaagtgtgggtgatgcgatgaaacatatccatgaacaataaaccgcagaaaccctgcctctcccacctcctggtacctgctggggatgaagctgcctggtcatgagtcaagacaaagctccagttcacctggacaccttgtgatcccccccagttcctccaggctgtcaggactctgcaaggcatagtctgagcctgtgcagtttaaatgggaagagggtggagaatgagaaacatttatgggaggcattaaacacctctgggcattctgggggaaaaaatggaatcttaacctgttttcacagccaaattccaagaatatgcttancagtttggtctctctggggtaatataccctatttttgtgttgntgntcagntaaatgttcagagaactgaaagctcagttta

SEQ ID NO: 42640 - DNA, 741 bp, Macaca Mulatta
  misc_feature (1)...(741): n = A,T,C or G
gggagatactgcttctagaagcgggtgtcacttcctctctattacctcttctctgaagtgtgtggctatctccttgtgtttaaatttggcagttactcgccatgtatgtcagcatagaaaaggaaatgtttttaccttatctcctgtatgtatgatagaacttaaaagaaatgtgcatttgttttcatagccccagcagagaaaatcctcttcatagattacatgcgctgctgtggacaggagggaacaaaaccctctacatatttaaaagcaccaaatgtaatagctgacactgttaagatgcccaaaagagcaaagttgtagtggagatgcagggtcgtttccccatgccatccacagtgttagtgagtccagggctgacttgcagtgatgaagaaaagcagggagcttttctgccgacaatggtggctgcatctgtaagtgcttcaagccctggattgtgtgtagnnnnnnnnnnnnnnnnnnnnnnnnnnnnnnnnnnnnnnnnnnnnnnnnnnnnnnnnnnnnnnnnnnnnnnnnnnnnnnnnnnnnnnnnnnnnnnnnnnnnnnnnnnnnnnnnnnnnnnnnnnnnnnnnnnnnnnnnnnnnnnnnnnnnnnnnnnnnnnnnnnnnnnnnnnnnnnnnnnnnnnnnnnnnnnnnnnnnnnnnnnnnnnnnnnnnnnnnnnnnnnnnnnnnnnnnnnnnnnnnnnnnnnnnnnnnnnnnnnnnnnnnnnnnnnnnn

SEQ ID NO: 42641 - DNA, 853 bp, Macaca Mulatta
aggtggcgacggttgttataagtttttctattcagtttcactgatcaacttgcagtgggtaaatacggcataagttaataacccttttccccaaaatggtgcttcggatttgaaaagggtctgatggggagaaggagaacgtatcatcctagcttcctctcttaataaacctagaaaaacgggtagtaaactgtggatagtcaggaaaacacccagcaagggacacagctgttaggaaaggaatcctccccaccgcgcccccctccccacgcagacggatagacagactctttcctgacttgtcatgaggattaggggcctccgttggatttgtgtttcttgaagaatagctggcagagtggtaccaaagacacgaatctctcctggtctgtaaggatactctgatttggggtttgcatttttcatagttttcatttccggttccccctggggttttccattagtgagtttttgtgcaaggatcttatttatgatggcttttctcccctagaaagattttgtgcaatatattaaatggggacagaattctaaatgataaaacaatggctggttctagctctgagtgacagtcttaaagctaggtccctcccatagtatcatctgtcctctggaatgactctcctatgcctaaaggggttaagagagagatcacctagaaatcccactggacacttgtgggttctcaaggggagagattctctttcccttgagcttcgaaaggagaactggccggttaaatctgaacgttactcactggtgaaaaccccgaggacttggcccccacttgtggggaaaacctcaaggatcctccatcatcaggggtaagggtcaa

SEQ ID NO: 42642 - DNA, 612 bp, Macaca Mulatta
ctttacccggtgcttccaattcctgagccttgtgcagggtttcactgtgtgcatcaggttgcttcatggcctgcttggaattcctacttttcaagtctgctaaggtgaactctgatcctatgaataaggctgaccacaagttcactgagaccctggaacccactgttgattgactcttttacagtagatggcaaggaggaaaacatctataattagagtctcaaggtaatgagcaatttagtctatgtaacagaagagtggcccatttggatatatctgtactgatgggacccatatgatgcaatgagagttatcaggatgagaaataactttctagctgtaaggagctccatctctgtctctcactctgatgtctgcttagggaccttggtgtagaggttcccgctgaagagtgtactggtgatgtgaaggtggtcagggagctggagagtcctcctcaccacttatcctcttcagaatccacttactttcccctgaagttgatgatatattgccagcatcttcttttcagatgtgtaaaatgtgcagaacgaggtcattgtgcacatgatcctcacgggaagctgaagcatcatcctcatcgctgctgaa

SEQ ID NO: 42643 - DNA, 120 bp, Macaca Mulatta
cagcctgagtcagcgccccacccgggggtcccgggtgcggccctgggcgcctcctgctcgggacggtaaaggacgcacgctgctgccgcgttcacccgacgcgctgctgccgcgattacc

SEQ ID NO: 42644 - DNA, 795 bp, Macaca Mulatta
gctgagatggcggcgcccggggtctgtggtgcggctgcagagggtgccgccgccctaggcgaagtagggccgtcctgcgcgaaagaaccgcccccagcagcagcaccaccactggcttagcaaagaatcccagaccccgcccgggacggcagccgcaccatggagtctcccagttcatctaactcttatttctccgttggtccaaccagtcccagcgctgtcgtgctcctctactcgaaggagctcaaaaagtgggatgagtttgaagatattttagaagagaggaggcatgtcagtgacttgaaatttgcaatgaaatgctacacacctcttgtctataagggaattactccatgtaaaccaactgatattaaatgtagtgttctcagttctgaagagattcattatgtcattaaacagctttccaaggaatcccttcaatctgtggatgtcctccgagaggaagttagtgagattttagatgaaatgagtcacaaactgcgtcttggagccattcggttttttgccttcaccctgagcaaaatatttaaacaaattttctcgaaggtgtgtgtaaatgaagaaggtattcagaaactacaaagagccatccaggagcatcctgttgttctgctacctagtcatcgaagttacattgacttcctgatgttgtcttttattctatacaactatgatttgcctgtgccagttatagcagcaggaatggacttcctgggaatgaaaatggttggtgagctgctacgaatgtcgggtgcctttctcctgcggcgtact

SEQ ID NO: 42645 - DNA, 1736 bp, Macaca Mulatta
  misc_feature (1)...(1736): n = A,T,C or G
ggcacgaggaaaactattctgtcaagagacggtgccaaaaggcaaaaacaaaggaactgatggcaaagaaagtagctgtgatcggagctggggtcagtggcctgatttctctgaagtgctgtgtggatgagggacttgagcccacttgctttgagagaactgaagatattggaggagtgtggaggttcaaagagaaggtggaagatggccgagcaagcatctatcaatctgtcgttaccaacaccagcaaagaaatgtcctgttttagtgactttccaatgcccgaagattttccaaacttcctgcataattctaaacttctggaatatttcaggatttttgccaaaaaatttgatctgttaaaatatattcagttccagacaactgtccttagtgtgagaaagtgtccagatttctcatcctctggccaatggaaggttgtcactcagagcaatggcaaggagcagagtgctgtctttgatgcagttatggtttgcactggccaccactttctacctcatatcccactgaagtcatttccaggtatcgagaggttcaaaggccaatatttccatagccgccaatacaagcatccagatggatttgagggaaaacgcatcctggtgatcggaatgggaaactcgggctccgatattgctgttgagctgagtaagagtgctgctcaggtttttatcagcaccaggcatggcacctgggtcatgagtcgtgtctctgaagatggttatccttgggactcggtgttccacacccggtttcgttctatgctccgcaatgtactgccacgaacagttgtaaaatggatgatagaacaacagatgaatcagtggttcaaccatgaaaattatggccttgagcctcaaaacaaatacattatgaaggaacctgtactaaatgatgatgtcccaagtcgtctactctgtggagccatcaaggtgaaatctacagtgaaagagctcacagaaacttctgccatttttgaggatggaacagtggaggagaacattgatgtcatcatttttgcaacaggatatagtttctcttttcccttccttgaagattcacttgttaaagtagagaataatatggtctcactgtataagtacatattcccagctcacctggagaagtcaacctttgcatgcattggtctcatccagcccctaggttccattttcccaactgctgaacttcaagctcgttgggtgacaagagttttcaaaggcttgtgtcacctgccctcagagagaactatgatgatggacattatcaaaaggaatgaaaaaagaattgacctgtttggagaaagccagagccagacgttgcagaccaattatgttgactacttggatgagctcgccttagagataggtgcgaagccagatttctgctctctcttgttcaaagatcctaaactggctgtgagactgtttttcggaccctgcaactcctatcagtatcgcctagctgggcctgggcaatgggaaggagccaggagtgccatcttcacccagaaacaaaggatactgaagccactaaagactcgggtcctgaaggattcatctaatttcccagtttcctttctgttgaaaatcctgggccttgttgctgttgttgtggcctttttctgccaacttcaatggtcctagtcagcataacactttgggctttattatcttgtcagtcactacctccnnnnnnnnnnnnnnnnnnnnnnn

SEQ ID NO: 42646 - DNA, 612 bp, Macaca Mulatta
  misc_feature (1)...(612): n = A,T,C or G
atatacacgatcctcctcaaaaagagatgacttgttttcctttgcaggttgtgacctcattggagttctgagattgttagcttttccctttgtactnttatttgctgtgtttacagctctgcacnctggacgtgttgattcctgatntgagacaaagagaggtgacatttagaaaagtggaacttttcctgagaaatgaaactagctctacctttgtacctaaataagaaacacagaactttagagcaacctacatcataggttgctctggttagatggataaatgtgttattcaaaggctcagaaaggaaatttaattatatacgtattttttccaaatgacatttttaattaaaaaactatgtagtagagccagaagggtggacaaatgaaagtagaccttaacattttaatgtccttcctgggacttctaatagcagatattgaaataattaggaataaaatcagatggttataaattcagaggctttattcacttacttagcccctgaaaataaaaggcaaaggataattggagcctgttatgctatagacattatttttaaaaagttaagattgttagatttgtgtgttaatactgaaaattaatat

SEQ ID NO: 42647 - DNA, 617 bp, Macaca Mulatta
  misc_feature (1)...(617): n = A,T,C or G
gggggaatcattaacttgggtgctaattacaagaatgaaaattataatggaaaaggataaaataatataccagctggtttgttactatagtccatgtattaaaatactgttgaaatatgttaaaggtaaatttttaaggtttaaaaacttttagtaactttcagggatgcagaatttagatgttggaggtggggagatttatttttataaggtaatttttatcctgataaagactttaaaaaaagttttgcaactgaaattttaaagtaaacatgttaaacacaaaaagtaaaataagcattatagtaaatagtggattctctggtgtgtattttttatcttagtgttataaaattggaaaagaatggactgaagtgtaaaaactagaattatgaaggacactaaacgcctttattgtaatactatgtttgtagtctgtaaataacagcttaaaccaaaaaagtctttcaattgaactttatccacttttttggaaagttctttcccttgcccaggcgcnnnnnnnnnnnnnnnnnnnnngattaaaaacccttccctttccaaaatacttggaaaatataatttatccgttttgcccggcttctttctcaaatatg

SEQ ID NO: 42648 - DNA, 397 bp, Macaca Mulatta
  misc_feature (1)...(397): n = A,T,C or G
cgtccaccatggtggagacgtccaagaagacagtgagcgcccaggagtttgcacgctgtttagactccgtcttgggcgagttcgccttccccgacgaatttgtggtggaggtgtgggccgccatcagcgaggccagggaggcctgtggctagtctgccctgggggagcccagcacagccccagcctggagccccgccccctgccccnnnnnnnnnnnnnnnnnnnnnnnnnnnnnnnnnnnnnnnnnnnnnnnnnnnnnnnnnnnnnnnnnnnnnnnnnnnnnnnnccagaacccagcccttctctataatgcggcccagatctgaggcctagctttgtgctagagcccaggccagctctgagaccaagcccagcattgagaacaagccgtgttcta

SEQ ID NO: 42649 - DNA, 748 bp, Macaca Mulatta
ggggaaagtatgtagtgcacagcggtccacagtctacaaggttgagaaggtagggtacaccttttcatctggctccaaggccataattattgctctgttcccatttgaggtgtggaaaatagaagagtctgcgaaagcccattttgccaagtctgaggattacaaattgaggtctgaagttagctcatcatggaagttatgatgaaagtcaccaattaaagaacctttagagttagggagaaagaaagcacttttcccacaaatacacataatttcaggcttgacaacagtgtacctaatgggcttctggatgcttggaaccaagctttgttttggttttctacttactttcccactaagctttcaggaagtgggtaggtgatccttttccaccctttagttgggaagaatacagatggctgagaaacagttccagagcattttgggtcagcaggcaagcactgagggaccagataattccagctcacaccaaagtcagtagaatactgcacatgaatttgattctgggcaattttttcagacaccttacatccaacagagatctaataaacagaaaagcaagatccaggtattaaaactatatgattcttctccaaggacttggcaacaaaaaaagctgctgatcactttgatacccaccgttaccacatttcatcctgtatttttcagatttcattatttggttccgctaaccggaacgaaaaattgattgccccccagtgacaaa

SEQ ID NO: 42650 - DNA, 721 bp, Macaca Mulatta
gggatttaaattttatttatgcacatacttaaaggacagaaatgtctgggaaagtaattgttaaataatgatatgtaactttttaactttttaaataaataacaagatttttaatgtgtgtctccctcagggttgtttaaagttttttttctccctcaagtttaaatagtggtaactatatgttttgtatcttctagcaccaactgctgtaaagcaatgctgcaaataatgcttgaataaaagtggctaagccaacaacaaaataaatactttttatagtagttttgtaatccttaaattcgaaagctttccaaattgcacttgcatctaaacaaaactgttgcagtttttactctatttattttgttccccatgtttgtgaaagtcctgcacagtttcaaaggcatggtaaataatatatcaatgtttatgtagtctgttacaaaaacagctatagataacattatccagtgaaaagcaaaattcaagctttagaaaatactcatgcatgcaattttgacatatctaaaaatagatttttgtatatttatggtgggaggtggttgggaactttcaacaaaatggggtgttaatttttgtacagtctgtgggcatttacacattttttaatgtattaaaaattttgggtaatttatgtggtaccattaaaatttaaataaaataagctaactttcctgggtttatggattttgttgaaatt

SEQ ID NO: 42651 - DNA, 228 bp, Macaca Mulatta
tggaaaatgccataaaatccgtccagattgacctgttgaagctttcacagtcacatagcaatacagggcatatcattaacaagttgtttgagaaaacccgaaaagttagtgctcacattaaagatgtgaaagcccgggtagagaagcaacaaattcatgttaaaaaagttgaagtcaagcaagaggaaataatgaagaagaacaaatttcgcgtggtaatattccagg

SEQ ID NO: 42652 - DNA, 800 bp, Macaca Mulatta
  misc_feature (1)...(800): n = A,T,C or G
gggccgatagtgccaagaactggtcagttgcgttaaggagctgagtttgattctagagtccaggtttatagagaaaccatggttagattgagattacccatggggagacgattgcaagacaggatgagatctgggaagaattttgttgtcatctgccagggaaattgtcataggacccattgaatgcaataacatgtgagtaagttcccttttgattctgggactcagcgattttccctgtggattaagacaaaccaacgcctgaaggtctcctgtgcttattttaaccatctgctcccgtcatgaacactggagcatgcatttccttgaagtggtttcacagctcctgtgtgttagtggaaaaggggagtataacgatggggatcctggaagttattttaatgttttccaaaggaaaggaacccacactgctccccagagttcctctccaatggccctgcagtgngaacggaggacgatgtattgctgggtgcttaaaatcctccctcagcgaagcataaagagacactttgtaaagaaaaaaagagcaagcataggttctctgtgggaccttgtggagtggtgttttcacgttggtctctttggctccattatgcataatcagaaagaaatgtgggttactgggaagagacaaaaagcagtggctaaaataccaaagttggcatggtgnnnnnnnnnnnnnnnnnnntgcannnnnnnnnnnnnnnnnnnggttaattttaaaangtnnannnanaaannanaaaaananaannnnnnacttgttcggccgccctcct

SEQ ID NO: 42653 - DNA, 911 bp, Macaca Mulatta
  misc_feature (1)...(911): n = A,T,C or G
gtctacatctaacaagataacccggttggaacagagaagggagccatggactctaggtctgcattcctctaacaagagaagtatcctacgaagcaactacgtcaaggaaaagtcagttcatgctattcaggtccctgcaaggagtacaggaaaaacatggagagagcagcagcagtggggtttagaagatgaaaagatagcaggtgtccactggagctatgaggaaacaaagactttcctggcaattctcaaagagtctcgcttttatgaaacacttcaggcctgtccccgaaatagccaggtgtatggtgctgtggctgaatggttgcgagaatgtggcttccttcgaaccccagaacagtgtcgaaccaagttcaaaagtctccagaaaagctatcgaaaggtgagaaatggccacatgctagaaccctgcgccttctttgaggacatggatgctttgttgaaccctgcagcccatgcttcgtccactgataagccaaaggagatgatacctctccccagactgaagagaattgccatcagtggtaaggaacacatcagctnnnnnnnnnnnnnnnnnnnnnnnnnnnnnnnnnnnnnnnnnnnnnnnnnnnnnnnnnnnnnnnnnnnnnnnnnnnnnnnnnnnnnnnnnnnnnnnnnnnnnnnnnnnnnnnnnnnncactggagctatgaggaaacaaagactttcctggcaattctcaaagagtctcgcttttatgaaacacttcaggcctgtccccgaaatagccaggtgtatggtgctgtggctgaatggttgcgagaatgtggcttccttcgaaccccagaacagtgtcgaaccaagttcaaaagtctccagaaaagctatcgaaaggtgagaaatggccacatgctagaaccctgcgccttct

SEQ ID NO: 42654 - DNA, 1042 bp, Macaca Mulatta
gggtctctcggccttagcgccatttttctggaaacctctgcgccatgagagccaagtggaggaagaagcgaatgcgcaggctgaagcgcataagaagaaagatgaggcagaggtccaagtaaaccgcttagcttgttgcatcgtggagtccacaggagcagaaacatggaatgccaggcgctggggatgctggtacaagttgtgggacttcatgctactgtctagagcttgtctctatggatctagaacttcatcgccctctgatcgccgatcacttcttagacccaccttgctcataaacaaaactgcccatgttggtcctctgccctggacttgtgacattctggactatttccgtgtttatttgtggccgaatgtaacaaccctaaaataaaatcacctctttcagctctttttagctggagtaacaattacaaacatatccccgaaaaactttacctacctattacatctaaccaaaagacgaatagaaagaaaatgttgtttaaaaacacaatcccgcaatgaggaagagtggatggaatcacagattaaggataacgactcaaaccaaaatgtgccgagaacaatgaaaagactttttttgtatgaaaagagacataattttcctctataatcaggattatcgcgccactgatcgtagtgcttatgatatattatatttccatcttttaacaaattccatattggttccccctacactacctcctatgtccggtccccacacctaagtcaaacacaaccccttgtgttccataaactcgtatatatagtgtatacaggtcatagatgggatatatttcacttgcacaccgcatatcactagattagaaaaaagagctctgagcactgatatattggccctaccgagcttttgtttcaatctgatcttcgctgaactgcattatacacagcgctctcgcgtcataagagagggacggcgctttattctcagctgaggggacgaaacaattataactcataagccaacgtaagcttcattaaaacgttctaattagag

SEQ ID NO: 42655 - DNA, 917 bp, Macaca Mulatta
  misc_feature (1)...(917): n = A,T,C or G
gacgaggaaacaactaaaaacagttactaactaagagggagcaatcattttcatttgctctacggccttagattactgtttctttagcaatagtgaatatcgaaattttttctcttatggtgttaatttcaggtgtcagagatttcctgacccttatgtatgccgggtagtacgttttagcagccctgcccctgagccaaattagatagcacatctgaagctaataagccaaagggtgttacctggcaccaatccttgagggtttctgccagcaagttcaaatgagttgatacatatttcaatggttaatattactaattgcatgcttttttttgctgttcagtcccaataaaattacataatggaattagctcatgtaaagaaaggattctgaatccaacaaaaaatattagattgaaccacatattgtcatactcatagataaaaaatagttgacaattgtcagttctgtatagtccaacctaatatgaatgaatgaaacatctgtgtatacttggatcaaattttaatcttattcatcctcccatttcgccattgttaccagaataaacttgatgtagtctgcatgaatatggacttctgattattgtcccaggattattagcaagtttaaaaaatttgctgggcgtgggnnnnnnnnnnnnnnnnnnnntnnnnnnnnnnnnnnnnnntgggcnnnnnnnnnnnnnnnnnnnnnnnnnnnnannnnnnnnnnnnnnnnagaaatctgtgtccgaaatacaaaattagtgggcagatggcggtgcctgtaatccagtacccggaagtgaggcagaaaagctgaccacgaggggagtgcggagccaaacctctgctccccgcgaagaaaactcccaaagttctttcacagccggcccgacactgggggggcgggg

SEQ ID NO: 42656 - DNA, 743 bp, Macaca Mulatta
  misc_feature (1)...(743): n = A,T,C or G
gggaaggaactaagaagacagaggcaacgtggagaggctgaaaacagtgcagattcgacaatgagtcagtagcacaaaagagatgacatttacctagcactctaaaccctggttgcctctgaagaaactgccttcactgtatatatgtgactatttacatgtaaccaacatgggaacttttaggggaacctaataagaaatcccaattttcaggagtggtggtgtcaataaacgctctgtggccagtgtaaaagaaaatccctcgcagttgtggacatttctgttcctgtccagataccgtttctcctagtatttctttgttatgtcccagaactgnnnnnnnnnnnnnnnnnnntactgaaaagaagttgatgtatgtcccaagttttgatgaaactgtannnnnnnnnnnnnnnnnnnagtataagtattgtcatacagtgttcaaaaccccagccaatgaccagcagttggtatgaagaaacctttgacattttgtaaaaggccatttcttgggagttttttggtgtgtctgtttttttaaagtattcaagatactaccagtcaacatctttttggaagaaaatgcctttgggtttagaagattttcttaaaaggggagtagatggttgtagattgactaaagtctaccacacttcaaggggactacagctgcaccctacctctgggatcaaaagaccttctagggacattcaagcccaatttatccttcgtgtaaaacc

SEQ ID NO: 42657 - DNA, 688 bp, Macaca Mulatta
  misc_feature (1)...(688): n = A,T,C or G
gggggccttggctgctggggtttcagttggggttagggaggcaagtggggtcatgaagacagcttagggctgggattgggaccccttggatcctagtcctgacaagtcctggatcaagaatctgtcactcagattattccagagcccctgcccagtgctacttatgcctcctggatgctgagctgacaggcatgacagggtttcatnnnnnnnnnnnnnnnnnnnacaatctcctgacttcaggtgatctgcccacgtcggtctcccaaagtgctgagattacaggggaatgagtgaagtgatcacaggaacgagagagagagcagaaaaaggaaaaagatggaatggtgcactctccaagacttctccaacctcaagaaggatagcaaacagatgaaaatgctgagactcagaatcaaaggaaagacttttccacagtaaggcagccatactggcaggaccaagactgggactccttgctcttcgtggagggctgtggtcacttaagccatgacctgngatttttcacttcctcaggaccaggccggaactccacttcagaccagaataccgcatctgaaggatgggttgctccccttcaccatgattgtaatttcctgacggcccccccccctatggactgtgaatcatgaacctctttttcttatnnnnnnnnnnnnnnnnnnnn

SEQ ID NO: 42658 - DNA, 142 bp, Macaca Mulatta
gtggcaatagtgcttcgaagactgagggagctacagctacaggaagtggctttgcggcaggaaaacaagcgtcccagtccacggaagctctcttctgaaccccttttgcctctggatgaggaggctgtggatatggactatg

SEQ ID NO: 42659 - DNA, 306 bp, Macaca Mulatta
taaaatgacttgttcagggctccttttgggattttaagtgagaaaaactctatttcataataatgttaccacgctaatccaataacacttcatagatggttagccatctctaaaattaaattttgtagttgaggagcatggaaaataccacctatatttggatttctgtttaacacttcaaaatccattattatcataatttaaaattagatttaaatacaaacctctttatagaaaagctgataaatgtgattttatttgtttgcttgtttttttgcagggagggatattcccttgataccactc

SEQ ID NO: 42660 - DNA, 319 bp, Macaca Mulatta
  misc_feature (1)...(319): n = A,T,C or G
atgcttttcttggccatccagaaaaggtcggccttaacatagatcgatggtggacaatccagagtgttgaacagccntacaagcttgctactcgatgccatgttttgaaaaaagaatggatagaatgtgcacatggaattggtgctatccgggcagagaaagagtgcaagatagaatatgatgattttatagagtgtntgcttcggcagaaaacgatgagacgtgtgaatgccatcaggaggcagcgggataagctgataaaggaagggaagtacacccctccacctcaccacattggcaagggggagcctcggccctg

SEQ ID NO: 42661 - DNA, 816 bp, Macaca Mulatta
gggggtggggcctggtgatctgactgcagcaccaggcatttaacctcaatagatggctggcagttcacacttcagaagtaacagtcatcagtggaagttgtatgaaaatcactatagctatgtttatcatggtctttgttcgttataacacttcacctacacagcctttttggggtaatcttaccactcgtgttacatcccttaccatgtatagattctatctgaatttcttcatggtcactcatatttgggttttgcatgacttttgttattgttgtttttcctcaaacataatacatatttacttacccacatttgaaattcgaaagatcacagacagtgtcttttacgacttgtcaatttttcacaaaacacatggaaaaacagtagagtaaggacttacaaatatgtgatgggcccggtatggtggctcactcctgtaatccaaactctttgggacactgaggggagtggatcacctgacgtcaggagttcaacaccagcctgaccacccttgttaagaccttggtcctactccggagacccgccccttccctttacacccacctgtcgggtgcccccgccccttgaaacaactttttaaaaccatcccgttttgctccgccgggcccaattccattcagttaacccctggtccataaccttggttcccctatgaggagaccccgcggctgttaacctaacatggcgtcgggatctcctcccctagttctaaaaaatgcgccctccgttgtgggcatatcctccacagcctccttttttaatacccatgttctagtcagcggccatgtcccg

SEQ ID NO: 42662 - DNA, 320 bp, Macaca Mulatta
tccaggccttttggaaaacgtggaattgttcctttggccacgtatatgtgaatctgtaagaaaggtgacactgtagacatcaagggaatgggaactgttcaaaaaggaagccccacaagtgtcaccatggcaaagctggaagagtccacagtgttccccagcatgctgctggcattgctgtagacaaacaagttaagggcaagactcctgccaagggaactaatgtgcatattgagcagatgaagcactctaagagccgagacagcttcctgaaacgcgtgaggaaaatgatcagaaaaagaaagaagccacagagaaag

SEQ ID NO: 42663 - DNA, 886 bp, Macaca Mulatta
  misc_feature (1)...(886): n = A,T,C or G
ggggtttcactgtgttagccaggatggtcttgatttcctgacctcatgatccatccnnnnnnnnnnnnnnnnnnnnnnnnnnnnnnnnnnnnnnnnnntgcgcccggctgagatgtgtgttttaatcaactgtttttctggcatgtgccacatatgacatgctccaatattttcttcagacttaatacatatcttatatccatttattcatttatctgtttacttattcaacagttactgtctacactgtggtatcaaatagggtagtcactacccacaaatggttaattaaatttaaattaacatgaaatgaaacaaaattcagttcctcacttggactgggcacgtttcaaatgctcagtggccacatgtggatatatgggatggtgcagatagagaacattttcatcatttcacagagttctgttgacagtgctaagtgtgccacgttttaatctctgctgtggatgctgggtaattgttaaaatttattaatttttcagacaggcacgtgttatataatggatcgagatatggttctaatacatggtgtcattaaggggaattttatcctcgtggtaaccatccctaggaacacttcacccaaccctacgagggacagcccacatactcacctcaggccgtgcggggcatacaatgctccctgcgccgccaccgctggtccgcggtggctggcgcccgaagcaccactaggtcctcccgcctccccactttgggtgagttcgtccccgtaaccccactaggtgcttcgccgtgtcgtcgactccgcgtcgcgcggccgatgtcccccgcgcccttcaggaacgcatacctccttctcgcccctctccctcgtttgtctcgacccggtcgccttggccgcggc

SEQ ID NO: 42664 - DNA, 697 bp, Macaca Mulatta
  misc_feature (1)...(697): n = A,T,C or G
tttatttcangtcttctggnttgtagataccagatgacagtgagttgaggtgtgattggaggctaaggatgtggaggaagtaagtgtgggctcttttgagaaattctgtggcaaaagcagggcaagatggggaagttatcttgttttatggggtaggaggttagaggaataagaataagccactgcaagttacttagtcacagatatggaggtatacagatctggaactagatattaacacctttagcgtctgagagatttagaaacctagttcgcaggtgagcatatgcctttctgatgggggagaatggcgcagtgcagcttctcaagactatctgcattgtagggccaggttaaaaggttgttagtctccagtgttgtggactgatactttgctaaatgttgtaaaaaatgaattatttggaaaataatcattctcctatatatcatggcagtgtcaaattaaaagtttctgaacacttgctttcagtttctttatcatttgtggatgttatcaggctgcaggtcttgatttgggcagcactagtgtagtgagtggggaagggagcaggagagtcaagtgtctttcacaggtggctcttttgacttcttctgtaggctagtgattccagattaggaccactgaggaacagttgcattccaacactagaaaaagaggaagatgcttataccaatt

SEQ ID NO: 42665 - DNA, 1055 bp, Macaca Mulatta
  misc_feature (1)...(1055): n = A,T,C or G
gggtggctcccacctataatcctagcattttgggagaccaagatgggcggattacttgaggccaggaatttgagacctnnnnnnnnnnnnnnnnnnnntnnnnnnnnnnnnnnnnnnnnnnnnnncactctggtgtggtggtgggctcctgtaatcccagctacgtgggagactgaagtaggagaatcacttgaactcgggaagcagaagttgcagtgaactaagattgcaccactgcaannnnnnnnnnnnnnnnnnnnnnnnnnntgtcaaaagaaggcaaggaagggcagggcatgnnnnnnnnnnnnnnnnnnnntattggcataacttaaaatgttcaaacagtatggtgggtacatgggggtttaattatattacatccaaaatatatttttaaaattttcccggaagtaccnnnnnnnnnnnnnnnnnnnnnnnnnnaaatctaagaaagggaaggccccggctcaaaattgggcttcaccacccctggttaaattcccccaccactcctctagggggaagagcccatcaaggcaacccggatttgnaattccaccaccaagggaaaaggttcaccagggtaagatattaccaacaagaaaaaatccagtacaccccttatggctctccataataccaattaggaggatgggaagatatatcacaccctgaggtcctcaccataaaancccaagagaaatggatttgaacccatacaaagacatatttctcatccccaccttaacccttatggagtatagggcccctcgagatgcgagaccctaaataaaaaaactccccccaataacatctagtctttgcgagggacaaaggcaaagttaaaataaggaccttgttgataaaacacacttaggctcttagagaaaacacccacggggtacaggatcaccactataganctatgcccctggccgggtaaacccctctacaataataggtggccaaattagtaatatactctaacaagacctatgaggggttcaaacatatacacctgctgagtagagtccctccaacaaaattaaaan

SEQ ID NO: 42666 - DNA, 455 bp, Macaca Mulatta
tcactggtggatgtcaacgtgtacttgatcatcgccgtctgcgcagtgtctagtctgttggtgctcacactgctgctatatactgctctgaggtgctctgcgccgccaaccgaaggcgcgtgtgggccgggcaagcccacgctggtgtgctccagcgcggtggggagctggtcatactcgcagcagaggcagcagagggtgtgctctggagaggagttgcccaagaccgacctcatggcttttagccctagccttcctccttgtccaattagccgggatagagaggagaaacaggatgtggacgttgatcactcagtcaaaccacgacagcccaaccctgactggcgttactctgcttccctgagagcaggcatgcacagctctgtgcacctagaggaggctggcattctacgggctggtccaggagggcctgatcagcagtggccaacagtata

SEQ ID NO: 42667 - DNA, 961 bp, Macaca Mulatta
gggctctcgtcttctgtccaagttggtcgcttctctgcgccaaagtgagcagtagccaacatgtcagggtgggagtcatattacaaaaccgagggcgatgaagaagcagaagaagaacaagaagagaaccttgaagcaagtggagactataaatattcaggaagagatagtttgatttttttggttgatgcctccaaggctatgtttgaatctcagagtgaagatgagttgacaccttttgacatgagcatccagtgtatccaaagtgtgtacatcagtaagatcataagcagtgatcgagatctcctggctgtggtgttctatggtaccgagaaagacaaaaattcagtgaactttaaaaatatttacgtcttacaggagctggataatccgggtgcaaaacgaattctggagcttgaccagtttaaggggcagcaaggacaaaaacgtttccaagacctaatgggccatggatctgactactcactcagtgaggtgctgtgggtctgtgccaacctcttcagtgatgtccaattcaagatgagtcataagaggatcatgctgttcaccaatgaagacaacccccatggcaatgacagtgccaaagccagccgggccaggaccaaagcaggtgatctccgagatacaggcatcttccttgacttgatgcacctgaagaaacctgggggctttgacatatccttgttctacagagatatcatcagcatagcagaggatgaggacctcagggttcactttgaggaatccagcaagctagaagacctgttgcggaaggttcgcgccaagagacaggaagcgagcatcacaagtaagagaactcacaagatatggaccccgggggcgcaaaccggccaaggccaagctcccaaaagccacggaaaaagaccggacacaaccgacaaagaaagagaagaacacacccagcaccatggccacaagg

SEQ ID NO: 42668 - DNA, 755 bp, Macaca Mulatta
gggagagaagagtcacacagcatgaatcagacaatgaaaatgaaatacaaattcaaaataagttaaaaaaagactttcctaaacagtttgatcaggtttctgtctttaaatcaatacggaaagattttagtctagtaagagaaaacagcaaagagacattttctggaaaggagaaaaatagagacctaacttatgaacgtgaaaaacggttggataaaccccataaagatttggattcaaggttgaaaagcagtttttttgataaagcagagtgactgaatttctcccagtaacttttggtaatggtataaatggttgaaaatagctctaaacctcatttctccctcccctggttgcaatgttttgatgagaaaggcaagatacttgaatcacctgttcattttctttggttgaacattggaacctgaagttggatttaacttctttgtgctctaatcaagttgaagaaacattacatacccatttaccacaaaccccagaaacaaactttagggattccagctacccatttgccaataaagaatccattgggttcggaactgggggaattcctttgcatcaaatattagaatttaaagaagaaccttttggatgaatgagtatggacaaagccaatgggcaccacgggccggggacctactaaaaccaaaatttaagagatgaaaccttggacaatggcctccaagaaataataagttccatggggcccaaaccgggccaaaaaaaacctcccg

SEQ ID NO: 42669 - DNA, 660 bp, Macaca Mulatta
  misc_feature (1)...(660): n = A,T,C or G
taatcctgtcagccagtacagaacctgctcgtttttcccatgacagattctgaacagttgttttttttcctgaccctgaatttcattagaagctgtaaattgtgtcttgtgacgtgtcagcctgatgggggagacctgctccttttatgattttgtactctgtgtttgtcagaaactgttgaagctcagtggagacttgttttactactaggcagggacagtcttgggaagatcaagtttactgggatgttgatgtaaagatactagaggtatgaaagtaagctttttgtattcaggaggctgaagtgggaggattgctgnnnnnnnnnnnnnnnnnnnnncagagactcctgtctctttaagagaaaagaatatagccaggcgtggtagttcaagcctataannnnnnnnnnnnntnnnnnnnnnnnnnnnnnnntgcgccggccttattactaatttttttgaacaggcacgtcttccctaactaaactaagtactttaaagacaaagaccacatcttattcatctttttgtctctggggtctaatagaatttcaggcatacaggaatacagtgcgtatttggtgatgttagtgaatgagtaaaacaaaatcccagattttatttggatttttatactcccctctagtgtctgaaaca

SEQ ID NO: 42670 - DNA, 120 bp, Macaca Mulatta
  misc_feature (1)...(120): n = A,T,C or G
ngctgacctggaagttccaatccccaaatacttcctgttggagcagtctaccgccgtgcgggagcgacggctgatactggccgagatcctgtccagactggagccagagtcctcccagaa

SEQ ID NO: 42671 - DNA, 805 bp, Macaca Mulatta
  misc_feature (1)...(805): n = A,T,C or G
ggnnnnnnnnnnnnnnnnnnnnnnnnnnnnnnnnnnnnnnnnnnnnnnnnnnnnnnnnnnnnnnnnnnnnnnnnnnnnnnnnnnnnnnnnnnnnnnnnnnnnnnnnnnnnnnnnnnnnnnnnnnnnnnnnnnnnnnnnnnnnnnnnnnnnnnnnnnnnnnnnnnnnnnnnnnnnnnnnnnnnnnnnnnnnnnnnnnnnnnnnnnnnnnnnnnnnnnnnnnnnnnnnnnnnnnnnnnnnnnnnnnnnnnnnnnnnnnnnnnnnnnnnnnnnnnnnnnnnnnnnnnnnnnnnnnnnnnnnnnnnnnnnnnnnnnnnnnnnnnnnnnnnnnnnnnnnnnnnnnnnnnnnnnnnnnnnnnnnnnnnnnnnnnnnnnnnnnnnnnnnnnnnnnnnnnnnnnnnnnnnnnnnnnnnnnnnnnnnnnnnnnnnnnnnnnnnnnnnnnnnnnnnnnnnnnnnnnnnnnnnnnnnnnnnnnnnnnnnnnnnnnnnnnnnnnnnnnnnnnnnnnnnnnnnnnnnnnnnnnnnnnnnnnnnnnnnnnnnnnnnnnnnnnnnnnnnnnnnnnnnnnnnnnnnnnnnnnnnnnnnnnnnnnnnnnnnnnnnnnnnnnnnnnnnnnnnnnnnnnnnnnnnnnnnnnnnnnnnnnnnnnnnntcttcttttgtctgccttcaatccggccaactactacacccactttcacattcgaaaccaatcccctttcgggcttctaaaagcccgccggctttgaataattgaacaccttttccgggaatgtttttcctggaaatacctcctcctatatatttccg

SEQ ID NO: 42672 - DNA, 734 bp, Macaca Mulatta
  misc_feature (1)...(734): n = A,T,C or G
ggcaccaacctatccataatattattatgtaattcgtgcattactgctagtcagcatgtataatatatagtactatatatgtttaactgtacataacacatatcattacatatcaacttaacatcctaaacaacatgcttacaagcaggtaccctaatgtaagcttcaacagcagtacataatacagctccttcaaactcaacttgttctcctcatgaatatcaaccgaaccagtccatggccagtcgtcccataatacatttaagtccgttcatccggaacttagccaccttannnnnnnnnnnnnnnnnnnccccccctccccccacgcgggaatggcttccccccccccccacctttaaggggggttcccccccttgggcttacccccaaattccccctccccgggggggaaaaaatccccaattaannnnnnnnnnnnnnnnnnnnnnnnnnnnnnnnnnnnnnnnnnnnnnnnnccnnnnnnnnnnnnnnnnncgggttctcccgccgggggggggcgnnnnnnnnnnnnnnnnnnnnnnnnnnnnnnnnnnnnnnnnnncctttataaannnnnnnnnnnnnnnnnnggtgtttctcccggggggaaaatgggggggggttttttttaacannnnnnnnnnnnnnnnnnnnnnnnnnnnnnnnnttttcaagaaagttgccgcgcccccccacaacaggggtccccccccccgataaaaaaaaaaaaa

SEQ ID NO: 42673 - DNA, 232 bp, Macaca Mulatta
tctgaactatcttaatcctgaccctgctaatatggttttctttctgctgatgagtttgaggcattggataaagcaaagcaagtcttttcacctctgcctctactgacctctgtctcaagcaatgaggaggcaggaggggtactgggagtccagatgcaagagccagacagctgaggttataaagaagaaaatgcatggaagggaaactgaggggaaggtctgggccctagct

SEQ ID NO: 42674 - DNA, 1825 bp, Macaca Mulatta
  misc_feature (1)...(1825): n = A,T,C or G
atgatggtgagagttttggcaaaggcttcaaagaattaccttcaattaaatgtgaagttactaagctacannnnnnnnnnnnnnnnnnnnnnnnnnnnnnnnnnnnnnnnnnnnnnnnnnnnnnnnnnnnnnnnnnnnnnnnnnnnnnnnnnnnnnnnnnnnnnnnnnnnnnnnnnnnnnnnnnnnnnnnnnnnnnnnnnnnnnnnnnnnnnnnnnnnnnnnnnnnnnnnnnnnnnnnnnnnnnnnnnnnnnnnnnnnnnnnnnnnnnnnnnnnnnnnnnnnnnnnnnnnnnnnnnnnnnnnnnnnnnnnnnnnnnnnnnnnnnnnnnnnnnnnnnnnnnnnnnnnnnnnnnnnnnnnnnnnnnnnnnnnnnnnnnnnnnnnnnnnnnnnnnnnnnnnnnnnnnnnnnnnnnnnnnnnnnnnnnnnnnnnnnnnnnnnnnnnnnnnnnnnnnnnnnnnnnnnnnnnnnnnnnnnnnnnnnnnnnnnnnnnnnnnnnnnnnnnnnnnnnnnnnnnnnnnnnnnnnnnnnnnnnnnnnnnnnnnnnnnnnnnnnnnnnnnnnnnnnnnnnnnnnnnnnnnnnnnnnnnnnnnnnnnnnnnnnnnnnnnnnnnnnnnnnnnnnnnnnnnnnnnnnnnnnnnnnnnnnnnnnnnnnnnnnnnnnnnnnnnnnnnnnnnnnnnnnnnnnnnnnnnnnnnnnnnnnnnnnnnnnnnnnnnnnnnnnnnnnnnnnnnnnnnnnnnnnnnnnnnnnnnnnnnnnnnnnnnnnnnnnnnnnnnnnnnnnnnnnnnnnnnnnnnnnnnnnnnnnnnnnnnnnnnnnnnnnnnnnnnnnnnnnnnnnnnnnnnnnnnnnnnnnnnnnnnnnnnnnnnnnnnnnnnnnnnnnnnnnnnnnnnnnnnnnnnnnnnnnnnnnnnnnnnnnnnnnnnnnnnnnnnnnnnnnnnnnnnnnnnnnnnnnnnnnnnnnnnnnnnnnnnnnnnnnnnnnnnnnnnnnnnnnnnnnnnnnnnnnnnnnnnnnnnnnnnnnnnnnnnnnnnnnnnnnnnnnnnnnnnnnnnnnnnnnnnnnnnnnnnnnnnnnnnnnnnnnnnnnnnnnnnnnnnnnnnnnnnnnnnnnnnnnnnnnnnnnnnnnnnnnnnnnnnnnnnnnnnnnnnnnnnnnnnnnnnnnnnnnnnnnnnnnnnnnnnnnnnnnnnnnnnnnnnnnnnnnnnnnnnnnnnnnnnnnnnnnnnnnnnnnnnnnnnnnnnnnnnnnnnnngaacattgtaacccaccttgtcaacatggtggcacatgcttggctgggaatctctgcacttgtccttatggttttgtaggaccaaggtgtgaaacaannnnnnnnnnnnnnnnnnnnnnnnnnnnnnnnnnnnnnnnnnnnnnnnnnnnnnnnnnnnnnnnnnnnnnnnnnnnnnnnnnnnnnnnnnnnnnnnnnnnnnnnnnnnnnnnnnnnnnnnnnnnnnnnnnnnnnnnnnnnnnnnnnnnnnnnnnnnnnnnnnnnnnnnnnnnnnnnnnnnnnnnnnnnnnnnnnnnnnnnnnnnnnnnnnnnnnnnnnnnnnnnnnnnnnnnnnnnnnnnnnnnnnnnnnnnnnnnnnnnnnnnnnnnnnnnnnnnnnnnnnnnnnnnnnnnnnnnnnnnnnnnnnnnnnnnnnnnnnnnnnnnnnnnnnnnnnnnnnnnnnnnnnnnnnnnnnnnnnnnnnnnnnnnnnnnnnnnnnnnnnnntatctgcttgcagaaatgtagaaacggtggtgaatgcattgctcccagcatatgccattgtccttcctcctgggaaggagtgcagtgtcaaatacn

SEQ ID NO: 42675 - DNA, 699 bp, Macaca Mulatta
  misc_feature (1)...(699): n = A,T,C or G
aagtactgaatgacgtttaatgaacaaatgaggaattggttatttatactctgggggacgtttattaaggctctggcaaccctgtggagctggtctgtgnnnnnnnnnnnnnnnnnnnnnnnnnnnnnnnnnnnnnnnnnnnnnnnnnnnnnnnnnnnnnnnnnnnnnnnnnnnnnnnnnnnnnnnnnnnnnnnnnnnnnnnnnnnnnnnnnnnnnnnnnnnnnnnnnnnnnnnnnnnnnnnnnnnnnnnnnnnnnnnnnnnnnnnnnnnnnnnnnnnnnnnnnnnnnnnnnnnnnnnnnnnnnnnnnnnnnnnnnnnnnnnnnnnnnnnnnnnnnnnnnnnnnnnnnnnnnnnnnnnnnnnnnnnnnnnnnnnnnnnnnnnnnnnnnnnnnnnnnnnnnnnnnnnnnnnnnnnnnnnnnnnnnnnnnnnnnnnnnnnnnnnnnnnnnnnnnnnnnnnnnnnnnnnnnnnnnnnnnnnnnnnnnnnnnnnnnnnnnnnnnnnnnnnnnnnnnnnnnnnnnnnnnnnnnnnnnnnnnnnnnnnnnnnnnnnnnnnnnnnnngtggtacctgcaataacatgatgtcattacggatggtctgctgattatatcgagggtggcggatggctctgcgtgcagtgatatgttgctgggtgttttcccgtctccggatattgtgggcgcccagggtgacatttat

SEQ ID NO: 42676 - DNA, 798 bp, Macaca Mulatta
  misc_feature (1)...(798): n = A,T,C or G
ggtgcgnnnnnnnnnnnnnnnnnnnnnnnnnnnnnnnnnnnnnnnnnnnnncaaatcacctgaggttgnnnnnnnnnnnnnnnnnnnaccaacatggagaaaccccatctctacaaaaatccagaataagccaggtgtggtggcacatgcctgtaattccagctaannnnnnnnnnnnnnnnnnnnnnnnnnnnnnnnnnnnnnnncggaggttgtggtgagccaagattgagnnnnnnnnnnnnnnnnnnnnnaacaaaagcgaaactccgnnnnnnnnnnnnnnnnnnnnnnnnagacccaaaagtatgtagaatacatactctagaattcaagaatagacaaaattaatccatggagacaaatcagagcagcagttgtctctggggaagggaattgatcggaaaggggtacaagagaaatttctagaacagcatggtctatatggtagccctagtcacatgtggctatggggcactttaaatgtggttagtctgaattaagctgtgttgtatgcattaaatacacattcgacttggaagactttatgaaaaaaatgtaaaatatctcaatagtaatattcaaaggttgattacatgttgaaaatattttggcctgccctaggctaaaaagtgtatatcattaaaaataatgtatctggcccggccatggtggcctcatacctttaatcctagcacttttagaagaactgaaatgggaaaaatcccttgaaatctagggagctcaagaaccagcccggggcaaacttagttgaaaactccatcttttataaaagaa

SEQ ID NO: 42677 - DNA, 209 bp, Macaca Mulatta
ttcttgtctacttgattttagagtcgtttcttactatcaggcagctactaattagttgatattaaaaccagcccttgtttaggcattttacttcaataatatagttttcattgtttagacattttataaacttaacctttctcttgctatctctctagaaagatgacaagactgcatttatagttttgcagctacagataattgtacaa

SEQ ID NO: 42678 - DNA, 647 bp, Macaca Mulatta
  misc_feature (1)...(647): n = A,T,C or G
gggaatcttannnnnnnnnnnnnnnnnnnnnnnnnnnnnnnnnnnnnnnnnnnnnnnnnnnnnnnnnnnnnnnnnnnnnnnnnnnnnnnnnnnnnnnnnnnnnnnnnnnnnnnnnnnnnnnnnnnnnnnnnnnnnnnnnnnnnnnnnnnnnnnnnnnnnnnnnnnnnnnnnnnnnnnnnnnnnnnnnnnnnnnnnnnnnnnnnnnnnnnnnnnnnnnnnnnnnnnnnnnnnnnnnnnnnnnnnnnnnnnnnnnnnnnnnnnnnnnnnnnnnnnnnnnnnnnnnnnnnnnnnnnnnnnnnnnnnnnnnnnnnnnnnnnnnnnnnnnnnnnnnnnnnnnnnnnnnnnnnnnnnnnnnnnnnnnnnnnnnnnnnnnnnnnnnnnnnnnnnnnnnnnnnnnnnnnnntcaagccggccatctgctaatacccctgaatcgaaaaactgttcttacccttttcaacccccaacctctcccataacttttacaaccccctaaccttctgggatatactactattccaaaaatttccaaaccccctatttaaaccttttttttccaccttttattcccctttttccggaaaaccccatagtccccccaacccccttttcaaaattaaacccactctgcgccgaaaagaactttn

SEQ ID NO: 42679 - DNA, 787 bp, Macaca Mulatta
acacttggcctagcgattctttaccctcaacccagaattttgttaggaaagcagcagctcatggaagctgaaaagcagaggaaatttgcatggtcccatgcatccttgtggtacatagactttggagctgcgctggagttcaacccaaaggtgaagcaaagatatctgaaactgtagttcaccattttcacagctcaaactctgaaagaataaaaagggtagtgtggtggggtgggtggactaagcacagtgaactcaaagtaaagcagcttctgctcaacctgactctaggaggaatcttaatggccagtccctgaccctaaccaccagacaaaagaaaggaaaataaacaaaaagaaagtaaaatctgttatagacaatgtttgaagtacaataataagttattaggccgcaaagcagcaggaaaatgtgaccccaaatctaaagaaagcacaatcagtgaaagcagacttagagatgaccagttactggaattaaccaagatttaaaaacaactgttataaatgtggttaaaaaattcacaaagagaaagccaggggacgtgggctcatgccttgtaatttccaacacttttgggaaagctgagggcagggggatttgctttgaaacccggaaattttcaaaaccaggccctgggccaacataaattgaaaacccgtgttctctacctaaaaatatacaaaaatttagcgccagggcctaaagggggtgccatgggtctggtaaacccccaccttaccttgggagagggtgaaaaaaaaaaaat

SEQ ID NO: 42680 - DNA, 249 bp, Macaca Mulatta
  misc_feature (1)...(249): n = A,T,C or G
acaggcatgagccactgtgtccggcctgtaatttcctatgcgggtggattatgggagctgaggtgaggggggacttagcccagtcaggaaaacttcctgaagagagtggcacttgagctgagccttaaagggagaagtaacanttaaccagtgaatttggtgtggagangaatattccagacaaattnggtgtaatgtnattaggatncnagcnaccctacaagngcgtgggacattttngngaggggc

SEQ ID NO: 42681 - DNA, 489 bp, Macaca Mulatta
ccatggcaggtcgtccaggcgccggcaccccctgccacctgggccacccctgttgggctctgctgcctgggccttcatcttcagcagtcgctctacggccacctgtaaaagccaaggactaagataggcaaaaaattcgaggaacctgggcccatcaaatattccaaagtaagcctgcttggctgctaagctcatgcaggggagggaggctggaaggggatggtactcaccagaatggctccatagactttgtgcccatctgctttgacctgtgcattagatactgaataatcatccagcacagcctgcaagtttgtccagtacgtggacaggtgtgggtacaggactcgttctactgcctggaagagaaggaatgcagttagcgtctctttgacacttactccctctctaggaccctttcccatgaaacacctacctttatttctgatcctagacagagctcaatcctcctaaattccctgactggca

SEQ ID NO: 42682 - DNA, 982 bp, Macaca Mulatta
  misc_feature (1)...(982): n = A,T,C or G
ggnnnnnnnnnnnnnnnnnnnnnnnnnnnnnnnnnnnnnnnnnnnnnnnnnnnnnnnnnnnnnnnnnnnnnnnnnnnnnnnnnnnnnnnnnnataaccctgcccactctcttccctcctaacactcctctcccaccccaataaaacctcctccaaaaacaactccttacccanccnnnnnnnnnnnnnnnnnnnnnnnnnnnnnnnnnnnnnnnnnnnnnccccaaactcccccccacaacacaccccccaaaccatcctccttacacatcacaacctacccctcacccgcctctcccctcatcacactaaacaacaccaacttccacacaaccaaaccgccgttccccgcatcttctttaacgccggggctcgcaggccccgctacacaaaaccgggaacccgcgtccccgccccgaccccgctgtgcctccccgcaacgtccccccctgcctggtcacgcctcccgtcccgtagcagccccagcccactactgtccacgacatcgtccccgccccaccaaccctttccaccccacaacgagctaccgttgcccagcgtgggccagcgcatcctccaccgtacttacgccgctaattcgtccccctcacagacggtgaccgacgagtaattctagcggtcggggccgcgccggcgacagagcgtgcccgccgcggcccgaccgccagcgccctggcccgcggatgagatgtgtattagaccgccgtgggcccgccccccgtgctgatccctgcttccgttgcccctgccgaccgtaacgctgcacgatccccaccgcccaatccgcagatctccctctgcgcgtatataatcgcgcgctcttgcatatatttatcccgcaccgcngcgaagacgtgttgacacacagcttctaccgctgcatcactgtgtgtgcgctgcttgcggcccctcgccacaaccatacacgagctgcacccactcaaataatccgcgctagcgcg

SEQ ID NO: 42683 - DNA, 794 bp, Macaca Mulatta
  misc_feature (1)...(794): n = A,T,C or G
ggggacaaagatgagattcgccactggatcctccctcaagattatgatcatgcacaggctgaggccaggcatctggtatatgagtcagacaaaaacaaggatgagaagctaactaaagaggaaatattggagaatggnaacatgttccgttgaagcccagctacccattatggggaaagatcttcccaaaaaatcattggatgagcttttgataagaccccttccccgaaattttgggaaaaacggttcctaagggcattccggggtaaatggccccttggaaaattggttgcgccaccaatttgggcccaaaattttccaccannnnnnnnnnnnnnnnnnnnnnnnnnnnnnnnnnnnnnngtttttttggctccccccccgcaaatttgggggggnnnnnnnnnnnnnnnnnnnnnnnnnnnnnnnnnnnnnnnnntttttttatcccnnnnnnnnnnnnnnnnnnnnnnnnnnnnnnnnnnnnnnnnnnnnnnnnnnnnnnnnnnnnnnnnnnnnnnnnnctcctcctcctaaaaacaaccctcgttnnnnnnnnnnnnnnnnnnggtggagaaaaaataatggggggggttttttcccttcctctgggggggagaaaatatttttcttggggggcaccaacacaaacggnnnnnnnnnnnnnnnnnnnnnnnnnnnnnnnnnnnnnnnnnnnnnnnnnnnnnnnnccctcccccccccccccttcttaaaaaaatcctccttnnnnnnnnnnnnnnnnnnnnnnnnnnnnnnnnnnnngatgacacccc

SEQ ID NO: 42684 - DNA, 681 bp, Macaca Mulatta
ctgagactacacggccatcttatatctttaaatcattcatcttaggcagagaacttttccgtcaaacattctttttagaattagttcagtcgttcctaaaacatccaaatgctagtcttccaccatgaaaaatagattgtcactggaaagaacagtagcaatttccataaggatgtgccttcactcacacgggacaggcggtggttatggagtcgggcaaaaccagcaatagagtatgaccagccaagccaatctgcctaataaaaagaaggaagacagtaaggtagccactaagagtctgagtctgactgggctaccgaataaagggtatttatgtaccgaatgtcattacatgcctgtgggaataccagtcatatttggaagatttgcagatttctcttcagcagaggaaaggctcactttcctgttttcgattctcactaggttagtgtgtgttcctagaatcacagctctgactccaaatgactaaatttctcaatcagaaaaaatagaagctttctaagcaacttggaagaaaacagtcataagtaagcaatttgttgattttactacagaagcaacaactgaagaggcaatgttttcatttttcggctccaggattcccatattgtagtctctctacttttaaagacctcctttttgcatagatgccaaccagat

SEQ ID NO: 42685 - DNA, 94 bp, Macaca Mulatta
cagttgctgtcagccttgctgccacccgacttgctatcaaactacctgctgcaggaacacctcttgccagcccacctgctgtgggtccagctgc

SEQ ID NO: 42686 - DNA, 475 bp, Macaca Mulatta
cgccagccgcgtccgctctctcaccgctccggacgcgcctcgtcgctgaccgccacacacaggaaccgcttccccaccagctccggccgcgtctccaccgccatagccgtcgctgccgaagcgaccgctgcctcctccagtgcgagggaaccggtgaaacctcgctcctaccggccgctcatgctgaggagagcgaaccggggcacggcagcggccccgaacgagcgcagactcggggcgcactggccgctctgccccggacacagcgacctcggtccctcccccaaacactcctctggaatcccagattcgcagcgttgggctgcagcgccacacaagaaaactgagagaaaacccaacacggccgtcgaacacccagaggcagcccagccgccgccaccgcaccgcggccagtactgctccgtctccgtccccgggcagcggcgacgcgcagcgcgtctccttccgccggcgc

SEQ ID NO: 42687 - DNA, 783 bp, Macaca Mulatta
  misc_feature (1)...(783): n = A,T,C or G
ggcannnnnnnnnnnnnnnnnnnnnnnnnnnnnnnnnnnnnnntaggtggatggatcacctgaannnnnnnnnnnnnnnnnnnnnnnnnnnntatgccnnnnnnnnnnnnnnnnnnnnngnnnnnnnnnnnnnnnnntgtggtggtgtgnnnnnnnnnnnnnnnnnnnnnnnnnnnnnnnnnnnnnnnnnnnnnnnaaacctgggaggcnnnnnnnnnnnnnnnnnnnnnnngcaccattgtnnnnnnnnnnnnnannnnnnnnnnnnnnnnnnnnnnnnnnnnnnnnnnntgctcaacatcatatgttattagagaatttcaagttaagacaaccattacacacctatcagaatggccagaatccaaaacacttgacaacacttaatgttgacaaagatgtgaattcttattactgtcccacctaacaggaactctcattcattgctggtgggaatgcaaaatggtacagccactttggaagacagtttggcaatttctttcttttttaggcacatgccactatgcnnnnnnnnnnnnnnnnnngtagagtcagggtttcactatannnnnnnnnnnnnnnnnnnnnnngtggactcaagagatccacctgccttgacctcctgaagtgttgggaattacagggcgttcagccacgggcactggttcccagtttggcaattttcctacccaaaggaaacataatccttacccgtacgattctgccccctaaactccatagtaacctacccaaagtgaggtggaaaaaccttatggtccaccc

SEQ ID NO: 42688 - DNA, 759 bp, Macaca Mulatta
  misc_feature (1)...(759): n = A,T,C or G
ttggagttaccaatggtagtgaagaatacacagggtcacagaggtaaagctgttttcttggctccagataagcaccatttatttggctgatctaagccatcttaatcatcatgaagctctgtacccattccagaagctagaagagtntcatggacaggatatatgttccattgtcatgggaggctgtatggttggcatagatgttcaatagatggaaggatgcaaagcaactgctcactaagtggtgtggggataatgtgctcagagtgaacaaaggaaggagctagctgtccaggtgtctaatatccttgggatggatgtgtgtggcattgacctcatgacgaaagatgatggctccttctctgtctgtgaggccagtgaaatttgctattttccttcagatggaccttgtannnnnnnnnnnnnnnnnnnnnnnnnnnnnnnnnnnnnnncacgnnnnnnnnnnnnnnnnnnnnnttttaagagaggtttgatcatacttacttgtacaatttttccccattttaaaaagaagtgttataaaatttttttccatagactaaaatattaaaattgagtgaaaggttgattattaatgaacagaataatacttcttgtctgtacagtatctcatttcacttcataaaaaagatatgaaagaggagtttctaacttaggataccctaatcatacctaaaagaatttatcttgcacagggtaattgagggactcacaagtatattagtacctccgactccc

SEQ ID NO: 42689 - DNA, 548 bp, Macaca Mulatta
cgggcagaccctatccaagtgcgggtgccctaccgcgtggtggggctcgtggtggggcccaagggcgccacgatcaagcgcatccagcaacagacgcacacgtacatcgtgacacccagccgggataaggagccggtgttcgaggtgaccggcatgccagagaacgtggatcgcgctcgagaggagattgaggcgcacattgctctgcgtaccggcggcatcattgagctcacagacgagaacgacttccacgccaacggcaccgatgtgggcttcgacctgcatcatgggtccggcgggtccggtccaggcagcctttggagcaagcccagccccagcatcactcccacccccggccgcaagcccttctccagctaccgtaacgacagctccagctcgcttggcagtgcttccacagactcttacttcggaggcgggaccagcagcagcgcagccgctaccccgcgcctggcagactacagcccccccagccccgccctgaactttgcgcacaacggaaacaacaacaacaacggcaatgggtacac

SEQ ID NO: 42690 - DNA, 635 bp, Macaca Mulatta
  misc_feature (1)...(635): n = A,T,C or G
gggctcaagaatttcatttttcaattttaagaagaaaagggattttggtcacattttgcttgtaaatgaaaattacatcctcattctttgtgtagtatctacacattgttataagccaaaaaacaaagtctgtcttgaatccttgtacatatttgtatgttgctgtaattgttatttttatcttcattattgtgcaaaatataaatgagcatttgtacattgactgtataagaaaccatgggccgggtcctnnnnnnnnnnnnnnnnnnnnnnnnnnnnnnnnnnnnnnnnnnnnnnnnnnnnnnnnnnnnnnnnnnnnnnnnnnnnnnnnnnnnnnnnnnnnnnnnnnnnnnnnnnnnnnnnnnnnnnnnnnnnnnnnnnnnnnnnnnnnnnnnnnnnnnnnnnnnnnnnnnnnnnnnnnnnnnnnnnnnnnnnnnnnnnnnnnnnnnnagattgaggctgcagtgacctgtgaatgccccactacactctatcctgggtgagaagtcaggcccctttcnnnnnnnnnnnnnnnnnntttcggacatgttttttcagtttccgggattgggatcaagtgcataaagggtaaaaaaacgggaatccaatnnnnnnnnnnnnnnnnnnnnnnnnnn

SEQ ID NO: 42691 - DNA, 719 bp, Macaca Mulatta
agagtgacacaaataatattcctcaactcttacaaactgaagaaaatgtaatgggagtaaataagttactaccagaagagagtgatttataccaaagtaaaatcaatggcttgcttccctgccttcaacgtgaaaaaaataaatattcaatagaggagagcagtgttgggcgaaaacccaggaaaaggatgaagttgtctgaaaaagcggatgaaacagttactcagatgaacttctctaatgagtataacaagtctgagttgatgttgcaagaaaatcaaatgattgctgatggtaaagaagcagaggctaaaagtcctttaaatgttttgagaaaagtaagccataatacagtctctttgatggatcatttattaagtgtcccagaaatggtagaaaaagaaacaagttctgaacatcatgtaaatgctgtgtttcagaaaaccatcgaaccacttttgaaagaagaaacagagaatgcttcagagcccttaggatatgaaaacatggcgctgaaagaggattttaaatcgaaaagctgcatagggaaatcacctgagtaccatattgaaaggagatcttcacgggaagatttaagaagtgactctgaagaattgaagttaagctgtcagagaacaatacctatgactggtaaaagaacttggccatattattcatgtgctagaatatctgcctggtgttggaaaaaggcttccttg

SEQ ID NO: 42692 - DNA, 253 bp, Macaca Mulatta
caggagtctcatagaagagaaagtcaatgaaattaaagaagacagtcattgtggagaaacttttacccaggttccagatgacaggctgaacttccaggagaagcaaacttctcctgaagtaaaatcatgtgacagctttgtgtgtggtgaagttggcataggtaactcatcttttaatatgaacatcagaggtgacattggacacaaggcatatgagtatcaggaatatggaccaaagccatataagtgtcaa

SEQ ID NO: 42693 - DNA, 252 bp, Macaca Mulatta
atgtttggttaaccctgctgcaatgtagcttctgtctcctaagtatgtattcaaaattgcagatgactatgaaaatacagtaatagcagaaagccaataaagttgatatataaaacttccaaattagcagtgaagggagaaaaggttattaggaaaaatcaaccctggcagaaagtaggaggggaaagcaaagaaaattacattagacaatacaaaagatgggtcaaaagaactgtattaaatgtatttgta

SEQ ID NO: 42694 - DNA, 801 bp, Macaca Mulatta
  misc_feature (1)...(801): n = A,T,C or G
ggctcataagcaataggagacgttggagttatgaaaatcatacgaacaatttaaaaaaatcattggagactaatgtttcagcctaagtgtttctggtctttgaagtaatttaaaacatagtcggacagacagatacgatattccaataatgtggtaaactctaatattagaatattcacaaagtattttttcagtaatagaaacatttagcccaagttcatggacattctgtcaagcttataaaaagctttnnnnnnnnnnnnnnnnnnnnnnnnnnnatcacaatctcaacgattaaataagaattgtccaagtaaattagagaaagatttggaggaagagtgtattaagcggaagaagagttcagcgaaaaaggacagacatgtgggtgggaactagcatgacacatggcttagtatttcactgaaggaagaattaagtgcttggtttcaggtagcaaaatgtgaggttaaatagtgtgtaagggcaagcaagggagaccatattttactgtgtatgtgatgaggtggttggtagatctatcttactgaaagatgccatgtagaccaaaagcagaataggattatgaccagaataggtaaaacccaacattaatcttaaaataaatccacaaagtacacgaatttcatagaatgacgatcccaggttggacacttatgttctaaagttatttgattttaacagaaaaatttagtttctgatttacaactctgcctaactagctgtgataatttcctaattcctcagttctttttatctctaaaataaaaacagtggtta

SEQ ID NO: 42695 - DNA, 817 bp, Macaca Mulatta
ggagtaggaaaataaaaataatgcaaattttaaaattaactctcccctgactttttttcttttttttggctagctcatttcttctcacactttttagcactggagatttttatagctttgacacagaaatgacttaaaatagtaaatcaccaaataagaaataaactgttccttatgcacgtggttttaggtaccttcaaccaatgttctccttcgctagctaatactgaatatctgttgtagaatcacctcttttaagctctgtgtgtgattaaaatgtgatttgtttaatgaagatttaaaatatatttggaaggtgtaggaacattagaattcaaggtaaaattaaaaccaaaccctaacttaatgcaaaacatttttgatcatttacttccaatgataggacattttagaaacattttctcttgcttactctccttctcttctctctgctaggcaggcaaattatttatatcaaaacctctcacaagttctaatagattatatcaattattattagaaataattggtatatgataattcccaaatatggatcactttatacatttacaactatagggaaaacccattaagctaagtcacatgaagctcttttttccttcttttggatatctacatataaatggtgtgaaatctgaaaattactctatcagcccttggggtatttggtaacagccctgaagtcccccaaaaaagaaaatactggttccttcaaagaaaaggatttggaccaattttcaaatgcctggcggaccctaaaggcttttcaactccatggccccaaatattttagcga

SEQ ID NO: 42696 - DNA, 866 bp, Macaca Mulatta
  misc_feature (1)...(866): n = A,T,C or G
aggcacctacggaacagtgttcaaggccaaaaaccgggagactcatgagatcgtggctctgaaacgggnnnnnnnnnnnnnnnnnnnnnnnnnnnnnnnnnnnnnnnnnnnnnnnnnnnnnnnnnnnnnnnnnnnnnnnnnnnnnnnnnnnnnnnnnnnnnnnnnnnnnnnnnnnnnnnnnnnnnnnnnnnnnnnnnnnnnnnnnnnnnnnnnnnnnnnnnnnnnnnnnnnnnnnnnnnnnnnnnnnnnnnnnnnnnnnnnnnnnnnnnnnnnnnnnnnnnnnnnnnnnnnnnnnnnnnnnnnnnnnnnnnnnnnnnnnnnnnnnnnnnnnnnnnnnnnnnnnnnnnnnnnnnnnnnnnnnnnnnnnnnnnnnnnnnnnnnnnnnnnnnnnnnnnnnnnnnnnnnnnnnnnnnnnnnnnnnnnnnnnnnnnnnnnnnnnnnnnnnnaggtggtcacactgtggtaccgcccaccggatgtcctcttcggggccaagctgtactccacgtccatcgacatgtggtcagccggctgcatctttgcannnnnnnnnnnnnnnnnnnnnnnnnnnnnnnnnnnnnnnnnnnnnnnnnnnnnnnnnnnnnnnnnnnnnnnnnnnnnnnnnnnnnnnnnnnnnnnnnnnnnnnnnnnnnnnnnnnnnnnnnnnnnnnnnnnnnnnnnnnnnnnnnnnnnnnnnnnnnnnnnnnnnnnnnnnnnnnnnnnnnnnnnnnnnnnnnnnnnnnnnnnnnnnnnnnnnnnnnnnnnnnnnnnnnnnnncagaaccttctgaagtgtaaccctgtccagcgtatctcagcagaagaggccctgcagcacccctacttctccgacttctgcccgcccta

SEQ ID NO: 42697 - DNA, 840 bp, Macaca Mulatta
  misc_feature (1)...(840): n = A,T,C or G
acttagtacaaaaggatccccgttgttcttttttcccccccagaaatttttaacaatgttaacgcctgggcccacgcgctaattggaaaatgggccccgggggttttccagacgcctttaccggggcttgaggccagggagggtttgctttaagccccccaagtttcaggggtgccagtgagccatggtttgcccccattgcattcccagctgaggcaatgaaacagtctcnnnnnnnnnnnnnnnnnnnnnnnnatgggaagttgctttctgcatcttagatgggcctaggagtatttcaggccccagcagatctctcgaggattccaggatggtggctgaaggggagcaggcgggctttccaggcagctctctgtgtatccacaccccctgccccaccccgcccgcagtccaagcggaaggtgaaacatgtcgtcctaactgatggcacagagagcagggggctctctcaggcctctgctcatcntacgtcccagcctggcctgcaggggctgcttagggtgagccgttggaacctgtagggagacctgctggaactgtctgaggtgggcagcacggcaggaaccatgcagctgcgccccacatgccctgagtagagcagcacagcaggagccatgcgggtgtgtcccacatgccctgagcagagcagcaaggcaggagccatgcggctgcgtcccacatgccctgagcagacagaggaccctgtccagatgggttttggggtcactgctgcagccctttcccccacccttgagctctggggtctttgcatctgcaaggatgtcatctctgcttcccagatagaccccctcagacacc

SEQ ID NO: 42698 - DNA, 870 bp, Macaca Mulatta
  misc_feature (1)...(870): n = A,T,C or G
ggcatgaccacgatannnnnnnnnnnnnnnnnnnnnnnnnnnnnnnnnnnnnnnnnnnnnnnnnnnnnnnnnnnnnnnnnnnnnnnnnnnnnnnnnnnnnnnnnnnnnnnnnnnnnnnnnnnnnnnnnnnnnnnnnnnnnnnnnnnnnnnnnnnnnnnnnnnnnnnnnnnnnnnnnnnnnnnnnnnnnnnnnnnnnnnnnnnnnnnnnnnnnnnnnnnnnnnnnnnnnnnnnnnnnnnnnnnnnnnnnnnnnnnnnnnnnnnnnnnnnnnnnnnnnnnnnnnnnnnnnnnnnnnnnnnnnnnnnnnnnnnnnnnnnnnnnnnnnnnnnnnnnnnnnnnnnnnnnnnnnnnnnnnnnnnnnnnnnnnnnnnnnnnnnnnnnnnnnnnnnnnnnnnnnnnnnnnnnnnnnnnnnnnnnnnnnnnnnnnnnnnnnnnnnnnnnnnnnnnnnnnnnnnnnnnnnnnnnnnnnnnnnnnnnnnnnnnnnnnnnnnnnnctcaacacgactcatttacaaccacaggaaacatcctatggactccctccctacccaatcatgaaccccctaacccaataaatatggatttcaccttcccacacctaagccagaaaccaaaccccgaggccccctttttggaatctcctaagaggggcgaaattcgaaacctaggtaatccaggccttttaacagattggaaataacgccccccaaggttcccattttcgccccttatttctttccataagccccgaaatacccccaaatcattccttccattaattaaaagaggcccctttgaccaaccccaccatttgtttcctatagggcaacatttcccacgcgcgcttctccatttcccccggaaaactttn

SEQ ID NO: 42699 - DNA, 792 bp, Macaca Mulatta
gggatgttgctgctgtaaaaaaaaatcctgcttaaagtaaacactttgttttaaaatgatcagtatcagatttttttagatgctagaaatggattctaaaatttggaactgtggaacacgttctatatttaagatagcacacaagtaaaaatatttaaaagcagtcttattcacagatttcaataattctgtatttccattaagataatctgctttgtgccaaaacggtaatttctaaacctctgttaaccgtgaaaaggcaatcttaaagtttgctatgtaaaactaattataaacaggacccaacttatattaatagatcctctcaagtattatatacagtttaaaaattactgttccaaagtcctgtcttaactattgaaacaccttccagcaaattcaaggaaccaggctacaactaagaatttagatggaattgatgtctgggcaattaaaataaatgccataagagcctgaaaaccaaagttgtgccagtggctttcaaatagaggcagtaacctgtccttccagaggatgctgagaaatgtgtaggggcacttttttggttgtcatatttactcggggcttctgttggcatttaaggctaaagacactcatgccctttcagtgcatggggacagcctggcaacaaaggaagaattatcccctcccaaaaatgtagattaatttccaaggggataggggcaccttttaaccatttagaaagccaaaaaattaaaaagttgcccacggtgggaacaaaacctggacctgtaaattccttaccattta

SEQ ID NO: 42700 - DNA, 718 bp, Macaca Mulatta
ggatcaatcttgagttacagtttatccttatccctcggtgcaatagaaaaaattgtttgctattctcatggtcttacttaatttccctactactggttataacattgttagtgattctcaatacgctgtttatattacttcttatatttctcaggccactttacctctttgtgctacttcgtctcttcagaaactcttttctttgttatcctttactttgagccaatgtcgagctcctttattcatcactcatcttcgttctcattctcaacgttctggaccattactcatacctgagtattcatggtaatactcagattgatttgcttttaatcggccacctacatgctgcagaacaaaaatatactctacatgacactaatagttctggccttcaacgacggtttcatttaactcataaacaagctcgttctcttattcgagcttgtccttcctgtgctcctttaaacattccatgcttccatcctggggttaatccatgagatgtcccttcttttggacgattaaaatgttcatcataccattgataccttttctcattttcaatgggccactccgttgccatctaaaaaagctaattctggtattacacatctcttggtttgtttcgccatcatgggcattcctcttatacttaaaactgataatgcccctacttatgtctctccgaaaattacaaggttttctttacagcaac

SEQ ID NO: 42701 - DNA, 1663 bp, Macaca Mulatta
  misc_feature (1)...(1663): n = A,T,C or G
tgctgtgccacttttcctgaggcttctccattcaccccatcagaatgtctgtgaacaagcagtgtgggcattgggaaacatcataggtnnnnnnnnnnnnnnnnnnnnnnnnnnnnnnnnnnnnnnnnnnnnnnnnnnnnnnnnnnnnnnnnnnnnnnnnnnnnnnnnnnnnnnnnnnnnnnnnnnnnnnnnnnnnnnnnnnnnnnnnnnnnnnnnnnnnnnnnnnnnnnnnnnnnnnnnnnnnnnnnnnnnnnnnnnnnnnnnnnnnnnnnnnnnnnnnnnnnnnnnnnnnnnnnnnnnnnnnnnnnnnnnnnnnnnnnnnnnnnnnnnnnnnnnnnnnnnnnnnnnnnnnnnnnnnnnnnnnnnnnnnnnnnnnnnnnnnnnnnnnnnnnnnnnnnnnnnnnnnnnnnnnnnnnnnnnnnnnnnnnnnnnnnnnnnnnnnnnnnnnnnnnnnnnnnnnnnnnnnnnnnnnnnnnnnnnnnnnnnnnnnnnnnnnnnnnnnnnnnnnnnnnnnnnnnnnnnnnnnnnnnnnnnnnnnnnnnnnnnnnnnnnnnnnnnnnnnnnnnnnnnnnnnnnnnnnnnnnnnnnnnnnnnnnnnnnnnnnnnnnnnnnnnnnnnnnnnnnnnnnnnnnnnnnnnnnnnnnnnnnnnnnnnnnnnnnnnnnnnnnnnnnnnnnnnnnnnnnnnnnnnnnnnnnnnnnnnnnnnnnnnnnnnnnnnnnnnnnnnnnnnnnnnnnnnnnnnnnnnnnnnnnnnnnnnnnnnnnnnnnnnnnnnnnnnnnnnnnnnnnnnnnnnnnnnnnnnnnnnnnnnnnnnnnnnnnnnnnnnnnnnnnnnnnnnnnnnnnnnnnnnnnnnnnnnnnnnnnnnnnnnnnnnnnnnnnnnnnnnnnnnnnnnnnnnnnnnnnnnnnnnnnnnnnnnnnnnnnnnnnnnnnnnnnnnnnnnnnnnnnnnnnnnnnnnnnnnnnnnnnnnnnnnnnnnnnnnnnnnnnnnnnnnnnnnnnnnnnnnnnnnnnnnnnnnnnnnnnnnnnnnnnnnnnnnnnnnnnnnnngtttcaattcatctgccaatgcaccaacagaagggatccagttttagaaagatgttgtggaagttaggtacaatgcagcactgagatatannnnnnnnnnnnnnnnnnnnnnnnnnnnnnnnnnnnnnnnnnnnnnnnnnaggtttgatccatcaagcttggctcatgggatctgctgctgcattaaatggggaaataaaacgtgaagatttcatttgaaattacagaaaatacccaaatgaggtcaagatggagaatgggtgcaagagagaatgagtggcaaaatgtaatggaaacttcacatgaatgcttatttaggttgttcaaagtaaaaagggctacaggtcacaggtcatcagtgcctgagaaagaacattgactttatatcagttgaggggaaagtgtagtactgtcatcttcaaccttgtaagcataaaagaaaataagctgcccatataagtcaaaggaaaatgagcccaggccttgctatgaagcaatgtgtgaatggacaatgttgaatgaatgtctggctcagtgatggacagccaggttcatctttaagatctaaggctcatccctcatgaaacagactcctagtcctggggtgactgtgta

SEQ ID NO: 42702 - DNA, 1182 bp, Macaca Mulatta
  misc_feature (1)...(1182): n = A,T,C or G
tggccgctgnnnnnnnnnnnnnnnnnnnnnnnnnnnnnnnnnnnnnnnnnnnnnnnnnnnnnnnnnnnnnnnnnnnnnnnnnnnnnnnnnnnnnnnnnnnnnnnnnnnnnnnnnnnnnnnnnnnnnnnnnnnnnnnnnnnnnnnnnnnnnnnnnnnnnnnnnnnnnnnnnnnnnnnnnnnnnnnnnnnnnnnnnnnnnnnnnnnnnnnnnnnnnnnnnnnnnnnnnnnnnnnnnnnnnnnnnnnnnnnnnnnnnnnnnnnnnnnnnnnnnnnnnnnnnnnnnnnnnnnnnnnnnnnnnnnnnnnnnnnnnnnnnnnnnnnnnnnnnnnnnnnnnnnnnnnnnnnnnnnnnnnnnnnnnnnnnnnnnnnnnnnnnnnnnnnnnnnnnnnnnnnnnnnnnnnnnnnnnnnnnnnnnnnnnnnnnnnnnnnnnnnnnnnnnnnnnnnnnnnnnnnnnnnnnnnnnnnnnnnnnnnnnnnnnnnnnnnnnnnnnnnnnnnnnnnnnnnnnnnnnnnnnnnnnnnnnnnnnnnnnnnnnnnnnnnnnnnnnnnnnnnnnnnnnnnnnnnnnnnnnnnnnnnnnnnnnnnnnnnnnnnnnnnnnnnnnnnnnnnnnnnnnnnnnnnnnnnnnnnnnnnnnnnnnnnnnnnnnnnnnnnnnnnnnnnnnnnnnnnnnnnnnnnnnnnnnnnnnnnnnnnnnnnnnnnnnnnnnnnnnnnnnnnnnnnnnnnnnnnnnnnnnnnnnnnnaaacacaacaaaaaaactccaggggggcccggacacaatccgccaaacgatcctttccaaacacatggacggccacttcgaacgnagaccccaggacaatacctacccgcaggaaacaaactcagcacaacggatcacgcaagcaaactgagcgacaagaccacaactacgacgatacacagacccaaacgagcatccgctttacacaccttgttgtttaacanacaaagactacaacacgatgaagacagactaaagaacagaagagacaacaacacgactcagatacaacgacaccaagacggaaagagacacagaacgacacacagagcgaacagccacacgcgcggggagacacagcagcaaggagcaagaaccgcaaagagagagaacggaaagaccagagagacaggaggagcacagacgaatgcgaaggaagag

SEQ ID NO: 42703 - DNA, 703 bp, Macaca Mulatta
  misc_feature (1)...(703): n = A,T,C or G
gtggctcttcattctacaacaagagtcctaacattttctggaggtggaatcaatgttgtatgattctaatgagatatgtgattgtcaagagcctagtgtgctgtctaaggtctagcagtcacttcactagtgggcagagacaagttctaattgtattacggcacaaacaaaactgactcgtttttaaattgcnnnnnnnnnnnnnnnnnncaagaatcattttctggatatgtaagtgtaaatgtagatgcaaatttggctgcacctctttatcatgcctgtattggcctataggtctgcactttagtgttttttaattgttttatttctgggtatttacgaacagagaaataacccaaatattatttctgattagtgtctttatttataaagcccatgagttatttgtatgcgtatttcctacttgtaaagatgagtaaaagtatgcagttttaaatgtgtaatattattggatgttctttgctttggtagtctttccagaaaggataaacagtgggtttcgtatagtatagtcttattgtttaagtgggaccacttagcttcccatttccttactagttagagaacagacattaattttcagtggaatgtatttttgcaggcatcatgttgttacagggccatttacacctattcaccaaggtttaaatctaactttgtgggactgaaagtgctcttaaga

SEQ ID NO: 42704 - DNA, 258 bp, Macaca Mulatta
ggtaaaataggtgctccagtttcttactaagccggctgaagaaatcaaagagagcttatcatacaagctaagattcaaattgtttctgaaggattagcaaggttttaataccttaattgaatttatagggcaactatgaaagaaagggcatttctagactccaaaattataaaagataactcaaggttttagttatagcaacttaccatacaagaggaaggagttggttatagtcaccaaaactattctataaaatga

SEQ ID NO: 42705 - DNA, 520 bp, Macaca Mulatta
  misc_feature (1)...(520): n = A,T,C or G
cggcgtcgagtctttggacgccgttaggttgaagatgctgttgttaccgacgctacaccggccacaacgccagacaggggtcacttttcgagaccaagtagagacggacagtgaggaggataggacccacttacacgcttttatgtcagccgcgatctcacccccacaagtctctgcaaaacgcttcctggggccttggcgccagccctgtgtccccacggcgcgcagaggcggcgccgcgaaccttgtgcgcattttacacggcggcgaggactgaggtccctcgcagcccagagccggagcccggggtcggccgagccagcaggaccggcttcctcgccgactctcacggcctcaccccgccccctggnnnnnnnnnnnnnnnnnnnnnggcattagtatcatttgaagacgtggttgtgaccttcactggagaggaatgggggcaactggacctggcccagaggaccctgtaccaggaggtgatgctggagacctgcaggctcctagtctcactggg

SEQ ID NO: 42706 - DNA, 320 bp, Macaca Mulatta
  misc_feature (1)...(320): n = A,T,C or G
cctccgcctgcccatagttacatcgtatagacaggacagagtattataaatggtatttatgctcctagactataggtcaaatgtttccatttcaaattatttaaaattcttatgtgtttaaaattcatgaatttctaaatcaatcattaagaactgtgccatgagcagctccacctatatcaagacggtatacactaacaagaagaaaaatatggtcaagtctannnaaatggctannattgtcctatcantggnnctattatcatagnaanctaatgacttttcaacacaatgctttagaaaataatgtgactacggta

SEQ ID NO: 42707 - DNA, 1800 bp, Macaca Mulatta
  misc_feature (1)...(1800): n = A,T,C or G
agactaggaggattccgacagagcccacattctcactgactcttgtattcagggagactagaacctctgaagagaccagctcctttacagaaacaagtgcagtcctttttggagtgcccactagtgctactactgaggtctctgtgacagaaatcatgtcctctaacagaacacacatccctgaccctgatcagtccacaatgtctccagacatcatcactgaagtgatcaccaggctctcttcctcatccatgatgtcagaatcaacagaaatgaccatcaccacccaaacaagttctcctggggctacaacacagagtacccttaccttggccacaacaacagcacccttggcaaagacccattcaactgttcctccaagatttttacactcagagatgacaactcttatgagcaggagtcctgaaaatccatcatggaagagctctccctttgtggaaaaaactagctcttcctcttctctgttgtccttacctgtcaagacgtcaccttctgtttcttccacattactacagagtatctcttcctcttcttttcctgtgacttcgctcctcaccccaggcatggtgaagactannnnnnnnnnnnnnnnnnnnnnnnnnnnnnnnnnnnnnnnnnnnnnnnnnnnnnnnnnnnnnnnnnnnnnnnnnnnnnnnnnnnnnnnnnnnnnnnnnnnnnnnnnnnnnnnnnnnnnnnnnnnnnnnnnnnnnnnnnnnnnnnnnnnnnnnnnnnnnnnnnnnnnnnnnnnnnnnnnnnnnnnnnnnnnnnnnnnnnnnnnnnnnnnnnnnnnnnnnnnnnnnnnnnnnnnnnnnnnnnnnnnnnnnnnnnnnnnnnnnnnnnnnnnnnnnnnnnnnnnnnnnnnnnnnnnnnnnnnnnnnnnnnnnnnnnnnnnnnnnnnnnnnnnnnnnnnnnnnnnnnnnnnnnnnnnnnnnnnnnnnnnnnnnnnnnnnnnnnnnnnnnnnnnnnnnnnnnnnnnnnnnnnnnnnnnnnnnnnnnnnnnnnnnnnnnnnnnnnnnnnnnnnnnnnnnnnnnnnnnnnnnnnnnnnnnnnnnnnnnnnnnnnnnnnnnnnnnnnnnnnnnnnnnnnnnnnnnnnnnnnnnnnnnnnnnnnnnnnnnnnnnnnnnnnnnnnnnnnnnnnnnnnnnnnnnnnnnnnnnnnnnnnnnnnnnnnnnnnnnnnnnnnnnnnnnnnnnnnnnnnnnnnnnnnnnnnnnnnnnnnnnnnnnnnnnnnnnnnnnnnnnnnnnnnnnnnnnnnnnnnnnnnnnnnnnnnnnnnnnnnnnnnnnnnnnnnnnnnnnnnnnnnnnnnnnnnnnnnnnnnnnnnnnnnnnnnnnnnnnnnnnnnnnnnnnnnnnnnnnnnnnnnnnnnnnnnnnnnnnnnnnnnnnnnnnnnnnnnnnnnnnnnnnnnnnnnnnnnnnnnnnnnnnnnnnnnnnnnnnnnnnnnnnnnnnnnnnnnnnnnnnnnnnnnnnnnnnnnnnnnnnnnnnnnnnnnnnnnnnnnnnnnnnnnnnnnnnnnnnnnnnnnnnnnnnnnnnnnnnnnnnnnnnnnnnnnnnnnnnnnnnnnnnnnnnnnnnnnnnnnnnnnnnnnnnnnnnnnnnnnnnnnnnnnnnnnnnnnnnnnnnnnnnnnnnnnnnnnnnnnnnnnnnnnnnnnnnnnnnnnnnnnnnngaactgatggcattatggagcacatcacaaaaatacccagtgaagcagcacacagaggtaccataagaccagtcaaaggtcctcagacatccacattgcctgccagtcctaaag

SEQ ID NO: 42708 - DNA, 87 bp, Macaca Mulatta
acagatgaaagaaagattacctttggttcattttcttctagtctttttcctctgcatttgtttgcatagtaggtattgatatatata

SEQ ID NO: 42709 - DNA, 726 bp, Macaca Mulatta
  misc_feature (1)...(726): n = A,T,C or G
agnnnnnnnnnnnnnnnnnnnnnnnnnntggaaggcaaagggttttggtcccttttaatttcccttcattttaattttatttccagtttacctttatttcataatccagtggggtacttaaatggttaatttataaaaacaacccttgtgatatcatttactgcctttggtacagaggcttctgacagggagggtacattgttttttaaaaataaccctttctatttttaaaaagaacctttattttgaaataatttaagatgtagagaaaagttgcaaacacaatacaaataattcacatatacatatcccctcagttccccaagtggcaacattttaccgtgtttgctttatcagtctctcttaagctattttgtatgtaatttttttcttaacatttaagagtaggttgtaccatagtgcccctttacccataaacacttcagtacgtatttcttaaaaatannnnnnnnnnnnnnnnnnnnnnnnnnnnnnnnnnnnnnnnnnnnnnnngctnnnnnnnnnnnnnnnnnnngtctnnnnnnnnnnnnnnnnnnnnnnngnnnnnnnnnnnnnnnnnnnnnnnnnnnnnnnnnnnnnnnnnnnnnnnnaactacaggtgcttaccaccacannnnnnnnnnnnnnnnnnnnnnnnnnnnnnnnnncgttttgctgtgttannnnnnnnnnnnnnnnnnnnnnnnnnntgtgatccacctgccc

SEQ ID NO: 42710 - DNA, 144 bp, Macaca Mulatta
cagcacggaggccagataagtccccagagccccccagtgcggaggccagataagtcccgagagtccccagcacggaggtcagatacgtcccgagagtccccagcacggaggccagatacgtcccgagagccccccagcatggag

SEQ ID NO: 42711 - DNA, 815 bp, Macaca Mulatta
ggtaaaggaaggtggtatttctagttttggcagaaatggaaagtgtctcacaagagacatcactacccacatggggtctggctgctttctaccaaagacatttagaaaagtgaattgagtcagggtgatggtgaacactatgtattttatagatggttaagttgggaagtgattgtgtttatcatggcggctactaataccaagctcatgattgctgacgcctcagcatcttaggcagtaagacttgtctgcagcactaaagggggggaaacccttatattttgcgaactgtccattcattaaatttattgtaacctaataccaaaaacagccatttttcatatttccccacctcctacatttttttttcgctacttgtaaataatccctcctagaaaataagcattaactggaatgtttcaaatgattttgcttcattttactatcagccactagtgaactcttacagagatgtatgtacatttgagataaaattagcttgtgctaagtgttgtaaaaaccttgtttactgttgaaggagaattgcacattatatttaactgggattgctcctccctcagttctttaaaaaacagtcaaggctcacaccaacttctaggctgtgggagctttgccataagtagatacaatgtagaaatatacttttttttaagcatgaaaaagacaaggaacttcatttatatgttaccggttaaggaacattattatttcaagggattatgcaccagctcagtgaaagaatgaagtttacagttttttcttgcagctttggttactacttttcttctgcaata

SEQ ID NO: 42712 - DNA, 1978 bp, Macaca Mulatta
  misc_feature (1)...(1978): n = A,T,C or G
ctgtgggtgtgtgtggcggccgccaccctgctgcacgcaggcggcctggcccgcggggactgctggctgatcgagggtgacaagggcttcgtgtggctggccatctgcagccagaatcagccgccctacgaggccatcccacagcagatcaacaacaccatcgtggacctgcggctcaacgagaaccgtatccgcagcgtgcagtacgcctcgctcagccgcttcggcaacctcacgtacctcaacctcaccaagaacgagatcggctacatcgaggacggtgccttctcgggccagttcaacctgcaggtgctgcagctgggctacaaccggctgcgcaacctcacggagggcatgctgcgcggcctgggcaagctggagtaccagtgcctgcaggccaacctcatcgaggtggtcatggccannnnnnnnnnnnnnnnnnnnnnnnnnnnnnnnnnnnnnnnnnnnnnnnnnnnnnnnnnnnnnnnnnnnnnnnnnnnnnnnnnnnnnnnnnnnnnnnnnnnnnnnnnnnnnnnnnnnnnnnnnnnnnnnnnnnnnnnnnnnnnnnnnnnnnnnnnnnnnnnnnnnnnnnnnnnnnnnnnnnnnnnnnnnnnnnnnnnnnnnnnnnnnnnnnnnnnnnnnnnnnnnnnnnnnnnnnnnnnnnnnnnnnnnnnnnnnnnnnnnnnnnnnnnnnnnnnnnnnnnnnnnnnnnnnnnnnnnnnnnnnnnnnnnnnnnnnnnnnnnnnnnnnnnnnnnnnnnnnnnnnnnnnnnnnnnnnnnnnnnnnnnnnnnnnnnnnnnnnnnnnnnnnnnnnnnnnnnnnnnnnnnnnnnnnnnnnnnnnnnnnnnnnnnnnnnnnnnnnnnnnnnnnnnnnnnnnnnnnnnnnnnnnnnnnnnnnnnnnnnnnnnnnnnnnnnnnnnnnnnnnnnnnnnnnnnnnnnnnnnnnnnnnnnnnnnnnnnnnnnnnnnnnnnnnnnnnnnnnnnnnnnnnnnnnnnnnnnnnnnnnnnnnnnnnnnnnnnnnnnnnnnnnnnnnnnnnnnnnnnnnnnnnnnnnnnnnnnnnnnnnnnnnnnnnnnnnnnnnnnnnnnnnnnnnnnnnnnnnnnnnnnnnnnnnnnnnnnnnnnnnnnnnnnnnnnnnnnnnnnnnnnnnnnnnnnnnnnnnnnnnnnnnnnnnnnnnnnnnnnnnnnnnnnnnnnnnnnnnnnnnnnnnnnnnnnnnnnnnnnnnnnnnnnnnnnnnnnnnnnnnnnnnnnnnnnnnnnnnnnnnnnnnnnnnnnnnnnnnnnnnnnnnnnnnnnnnnnnnnnnnnnnnnnnnnnnnnnnnnnnnnnnnnnnnnnnnnnnnnnnnnnnnnnnnnnnnnnnnnnnnnnnnnnnnnnnnnnnnnnnnnnnnnnnnnnnnnnnnnnnnnnnnnnnnnnnnnnnnnnnnnnnnnnnnnnnnnnnnnnnnnnnnnnnnnnnnnnnnnnnnnnnnnnnnnnnnnnnnnnnnnnnnnnnnnnnnnnnnnnnnnnnnnnnnnnnnnnnnnnnnnnnnnnnngactgtgagctgggccggccggggcctgacagccagagctcagtggccgagatctccaccatcgcctttaggaggacaaggtcaaccagatcatcaacaactgcatcgacgcgctcaagtccgagtccacttccttccagggcgtcaagtcggggcccgtgtccgccgccgagccgccgctggtgctgctgtccgagccgctggccgccaagcatggcttcctggcgcccgggtacaaggacgccttcggccacagcctgcagcggcaccacagcgtggaggcggccttttcccctcgagccagcgcctcgtccggaagctccgcgcgcagcccccgcgccttccgagccgaggctgttggggcgcccaaggccgcgtccgccgaggcccagtacatcgagaagggctcccccgaggccgacgccatcctcactgtgacgcccg

SEQ ID NO: 42713 - DNA, 660 bp, Macaca Mulatta
  misc_feature (1)...(660): n = A,T,C or G
tgatctaccataggatcctatttttaagtttatttactttatttttaaggagtattgtcatcacttttcaaggtgtcttgacttctacacaaagtatatatattcaggactttaaaaaatagcagtacacatttaacagtagcaaattacaccaaaatgatttactttgagatttgaataatttgcatagcagtaaaatgtgctttgtgtaacatacaaatagaagaatgacccagtatcttaactgatacttactggagagtatcagaattacccagtagctcttacagaatgccataaattctttaagactaaatattgtaatcagttatttgaagtaatgtttctgatttgctgttaaaagttgccgagctcagtttttggagatatcgtttctgcctgcctgtttccttatgagagcaaggccttctttggttccagctagtatgatgatcatggattctgctttagttgatgagaagtggttcctatgaacgcctctgtttaatttctnnnnnnnnnnnnnnnnnnnnnnnnnnngggtctcgctatattgcccagactggtctccnnnnnnnnnnnnnnnnnnnnnnnnnnnnnnncaactccccatnnnnnnnnnnnnnnnnnnnnnnaccatcacgcctggctctctgttct

SEQ ID NO: 42714 - DNA, 220 bp, Macaca Mulatta
  misc_feature (1)...(220): n = A,T,C or G
acaagcatacgtgaggcggcagctcttactgaaggagcacttactcacaggggctgtcgacccctcttagtgttaaggtctcttttagttagcctggctttttggcgcaggtatgatctttgaagctcaggcaagtccctgatgccataaaaaggtgnggncaggcnccccacccaccctcttcttagtgtgtccctgaccactctgtcctctgttcgat

SEQ ID NO: 42715 - DNA, 803 bp, Macaca Mulatta
  misc_feature (1)...(803): n = A,T,C or G
attgttggttaaagggttttacccatggaaatttgcaggcaattgccaggttcaacttgttccggtggttccccttttttaatttaccagtttttccttggctgtgttgttcccaccatcaaacaggtttctttttttccacggaagccctcgaacccccttcaaaaatctttccgggagggattggaattcaactttaggactcctgtttaaggttaaaattttgacctccttcccaggaaatttnnnnnnnnnnnnnnnnnnnnnnnnnnnnnnnnnnnntannnnnnnnnnnnnnnnnnnnnacactagaacgatcttggttcattgcagccctgacctcccaggctcaagtgatcatcctactnnnnnnnnnnnnnnnnnnnnnnnnntaagcatgtgccaccacacccagctaacnnnnnnnnnnnnnnnnnnnnnnnnnnnntgccatgttgcccaggctggttttgaactcttgagctaaagcagtactcccannnnnnnnnnnnnnnnntnnnnnnnnnnnnnnnnnnngcactgtgcctggccatgaatnnnnnnnnnnnnnnnnnnnnnannnnnnnnnnnnnnnnnnnnnnnnnnnnnnnnnnnngtnnnnnnnnnnnnnnnnnnnnnnnnnnnnnnnnnnnnnnnnnnnnnnnnnnnnnnnnnnntcctnnnnnnnnnnnnnnnnnnncacaccaccatgcccagctaagttttgtatttttttagtnnnnnnnnnnnnnnnnnnnnnacccagctggtctcgaactcatgaccttgtgatctgcccgccc

SEQ ID NO: 42716 - DNA, 797 bp, Macaca Mulatta
gggggctgcgccatttcctgtccaaagctgagcgagtcaggttaattcactggactgggcctctgttccttgggagttgaaaagatttgacctggaagaaaccctaccgatcattcagttaagccgcaaccccaccccgttttatatagggattccggttcacaatggatgctgatcaagagaaagatctgcagaaatttcttaaaaatgtggatgaaatcaccaatttaattcaggagatgaattctgatgacccagttgtgcaacagaacgctgtcctggagacagaaaagagactactgcttatggaggaagaccaggaggaggatgaatgcaggaccaccttgaataagactgtgatcagtcctccacaaactgctgtgaagagtgccgaagaagtaaactcagaggccttcttggcatctgtggagaaggatgcaaaggaacgagccaagagaagaagggaaaacaaagtcttagcagatgccctaaaagacaaagggaatgaagcatttgctgaaggcaattatgaaacagctatcctgcactatagtgagggtttggagaagctgaaggacgtgaaagtgctgtacaccaaccgaagcccaggtttatatgaaaacttaagaactatgagaaaggcccctggttggattgtgaaatgggcctcttaagtgtgatgaaaaaatgcacaaaaagcatattttcacatgggaaaaagcccaaccctgggccctgaaaaaaactacagggtgtgctcagagaagtggttataagaaagatccttaaaaataaac

SEQ ID NO: 42717 - DNA, 792 bp, Macaca Mulatta
  misc_feature (1)...(792): n = A,T,C or G
ggggggatggcatcaattcttggtgcaggacataaaagtgggaggagaggtggggggagaaagaaagatgagaaggaactgaaaatctcacaagagatctcttcgttaatgcaatcctgctcttaacagggaaggaattctcataaaacgcggctgttgttaaacatatagtaagcattcattaaatttggcatttgttttcttctgcagcaggcttaagaaacaaagcttagtggaaattaaacaaattaatagaagcaagtgcagataggcatcatgctnnnnnnnnnnnnnnnnnnaaattgccttcattcctattccatgccctctaacactctgtgctttccaatcagcaacatgaattgtgctattactggcaaagatggacaatatatcctaacagaagacttttacaaagagtaaaactatatgaacgcacataataaaattgacttggccaattcctttaagcagaagtttggtccttccagatcatgttaaaagataaaaaaaggaaagagaacagacccctaggcaattatttgtggaacaaatttctgctttgggagggtgaacagggaagcaagcaggtgggagaacaattaagattagaacaatccaaatgaactcaaataaaagcctggttgaactattgaaagttttttaggttttgtccaatgtggtaaccatttttttaatccctttaaccctgtaaaaaaaggattctttgggtaaattaccaaatgtggcttacaagtgaatgccctggcggtttttccccagggattgatt

SEQ ID NO: 42718 - DNA, 796 bp, Macaca Mulatta
tgtggggttttggggggcggagtgttaccagggcagagagatgcacctggggaggcctttccaggacgacagctattgatgggtgcagtccctttcattccctgggctgtttctcccatgcatagcttcttatgaaatgtttttgccctgatgctgctaccaggttctgtgggtgatttctgtccctgttagggtggtcactgaagctgagagctgcgacatgtgtggaaacagctccacctgcagtcttctgctttcccacacaggagcttccccatctgcccctgcccaccttttgcagcccttgcctgccatcactgccaagggcatgcagcacgtggtcctgactgggcagggcctgagccttccctctttgtgttccctctcagccctccaggaactacagctggacccggatcccggggtcaggcgggcagccctggagacactcgaagtcttggatagctgtagtcagcacgggcttctggcttcaccccaaggaatgtcctaggtggtccaaatgtaagatgtaaactgtcttcttagtgccaaatgccagcccttttaaatttagtttgtaagaagtttagtctgtaggaaaaacactattgtaaaataactagtatccttttctttccttctgttgaaataaacccccattctcactggagtacaacagatgtgtgactgtaaggtggtgacagcccagaaccaagacaatagggcaaagggaacttcagccttaatgagccacttcatttccgatttccccccaagtacagcgtgtctgacagcc

SEQ ID NO: 42719 - DNA, 755 bp, Macaca Mulatta
gggtctgagacttgactgaatatatggttaattatagaaacaacaattttaacagttactctgttgactgctctttatgactatacttgtatgccaggaggcagcagcctatacaccattagactctttacaagcaaccaatgaaccaattgcagtggatgcagtcgtcacagtagtcttgcctgggctggactgggctgggctgtggggagcattccccttcaggggagtttccacagctcagcccaggctccagtctggctagaaagcatccagcccattccttgcctcagtgctacctttttctgggcaagtagccaagaagtgactttatacgcagtgagtaattcagataaacttaacagctatagctgccgaagagtggagaaggttgaccaccattgatttaattctctagcgtaaaagcaatggagagcagtgtgtgcatgagcccacagtcacctgtgtttctgggagctctcacagtggtggattcataggcacttgggctgtactttgaatgacacacttgtggctttattagattcactagttttttaaaaattgttgtttgtttcctttcattaaaggtttaatcagacagatcagacagcatcattttgtatttaatgacagaaacgttggtacattttttcatgaatgaacttgcatttctgagcaagagcctacaaaaagcacctgtttataaatggaaagttctggcctctgggaggcccagtactctgttggaagtt

SEQ ID NO: 42720 - DNA, 1537 bp, Macaca Mulatta
  misc_feature (1)...(1537): n = A,T,C or G
aattcagaatgaactttatttaaaccaagaagacttcttcattaatggcaatgtaaaagtctttccagatcctcccccaccgatacgtcctccacctgtagaaaaggaagaagatggcaccctgaccatcgaacatcttgacaatcttcgggatcagttcttagatatggcacctaaannnnnnnnnnnnnnnnnnnnnnnnnnnnnnnnnnnnnnnnnnnnnnnnnnnnnnnnnnnnnnnnnnnnnnnnnnnnnnnnnnnnnnnnnnnnnnnnnnnnnnnnnnnnnnnnnnnnnnnnnnnnnnnnnnnnnnnnnnnnnnnnnnnnnnnnnnnnnnnnnnnnnnnnnnnnnnnnnnnnnnnnnnnnnnnnnnnnnnnnnnnnnnnnnnnnnnnnnnnnnnnnnnnnnnnnnnnnnnnnnnnnnnnnnnnnnnnnnnnnnnnnnnnnnnnnnnnnnnnnnnnnnnnnnnnnnnnnnnnnnnnnnnnnnnnnnnnnnnnnnnnnnnnnnnnnnnnnnnnnnnnnnnnnnnnnnnnnnnnnnnnnnnnnnnnnnnnnnnnnnnnnnnnnnnnnnnnnnnnnnnnnnnnnnnnnnnnnnnnnnnnnnnnnnnnnnnnnnnnnnnnnnnnnnnnnnnnnnnnnnnnnnnnnnnnnnnnnnnnnnnnnnnnnnnnnnnnnnnnnnnnnnnnnnnnnnnnnnnnnnnnnnnnnnnnnnnnnnnnnnnnnnnnnnnnnnnnnnnnnnnnnnnnnnnnnnnnnnnnnnnnnnnnnnnnnnnnnnnnnnnnnnnnnnnnnnnnnnnnnnnnnnnnnnnnnnnnnnnnnnnnnnnnnnnnnnnnnnnnnnnnnnnnnnnnnnnnnnnnnnnnnnnnnnnnnnnnnnnnnnnnnnnnnnnnnnnnnnnnnnnnnnnnnnnnnnnnnnnnnnnnnnnnnnnnnnnnnnnnnnnnnnnnnnnnnnnnnnnnnnnnnnnnnnnnnnnnnnnnnnnnnnnnnnnnnnnnnnnnnnnnnnnnnnnnnnnnnnnnnnnnnnnnnnnnnnnnnnnnnnnnnnnnnnnnnnnnnnnnnnnnnnnnnnnnnnnnnnnnnnnnnnnnnnnnnnnnnnnnnnnnnnnnnnnnnnnnnnnnnnnnnnnnnnnnnnnnnnnnnnnnnnnnnnnnnnnnnnnnnnnnnnnnnnnnnnnnnnnnnnnnnnnnnnnnnnnnnnnnnnnnnnnnnnnnnnnnnnnnnnnnnnnnnnnnnnnnnnnnnnnnnnnnnnnnnnnnnnnnnnnnnnnnnnnnnnnnnnnnnnnnnnnnnnnnnnnnnnnnnnnnnnnnnnnnnnnnnnnnnnnnnnnnnnnnnnnnnnnnnnnnnnnnnnnnnnnnnnnnnnnnnnnnnnnnnnnnnnnnnnnnnnnnnnnnnnnnnnnnnnnnnnnnnnnnnnnnnnnnnnnnnnnnnnnnnnnnnnnnnnnnnagtttttctttaggctatttgctgactatgagaaggatccaccccaacttgactacacacagatgctgctttagtttgcttgccacccagacacc

SEQ ID NO: 42721 - DNA, 646 bp, Macaca Mulatta
cattcatgcggatcggagcagcggttggatcattttcattgctgtgatatacaccacaatgggtttatgcattcaaccgttgatggacatttgggttgtttcccgtttggcaagacgatgaagaaagctggtatgagcattctttcacacgtcttttcttgggcatatgtactcgctcctgttgagtgtaaacctaggaatgaatcgctcagtcatagggcaaatgtgtgttcctctttcccagacaccattcgagtttccaaagtgcttgcagaggtttacactgccatccaccagagatgaaagttccacttgggctgctgcctcctggccaagcctggctaggttgtagcttttgcgttttactccctctggtgggtgtgtaaattgctaatcactgtgattttaatttgcatttccctgatgatgaagctgagcactttttcgtatctttatgggccatttgattgtcctcttttgtgaaatgcctattcgggccattggtccatttttctatgaggttatctccgtttctctcattgatttgtaattaagagtcctgttgcaaatatctttccccaccgtgcggtttcttgccttttccttcgcttacaatgctccacgctgtcctggaccctagcatcac

SEQ ID NO: 42722 - DNA, 830 bp, Macaca Mulatta
tctccatggtctcttcggggaggaagacaggtcaggcccctggatgctcttacacagccgccaataagaacaaaggcaacacctgggggagaggatacactgatagagtatttggagaatcccaagaagtacatccctggaacaaaaatgatctgtgtcggcattaagaagaaggaagaaagggcagacttgatagcttatctcaaaaaaactactaatgactaatagttggccactgccttatttattacaaaacaaatgtctcatgacttttttatgtgtaccatactttaatagatctcatacaccagaattcagatcatgaatgatgacagaatattttgttgggcagtcctgatttaaaactaaaactggcttgtggttaaatgaatatgttcagtttttgaattttaatagtaattccaattcagtaaatgctatcactgtttaccccttctaaagatatgattagacttcattagtaatgttcaacttttcacaaagatggtgagtgccatcttaaaacttattggagattggttttatatttagatttatatagctggttatgtgaatatatttaaatactggggaaattccttcactgtctcagaaccaagaaagattcacctgtgttttgtgttcatttgcctcttaaaggcaagggttgaagataaataaatggtagcaatgtctagagttttggccttaacgatgccaatcttattataattccctgtatttaaaatggttccttttacttattgaaaggcattttagtattgtttatgtgtaatattaaagattattcaacacttctcacatcttat

SEQ ID NO: 42723 - DNA, 540 bp, Macaca Mulatta
gaggcgcgcgtgcttgccttcggtcacagtgcaggtgcgcgtgccggtgctgggcggtgaggccggggcgccctcgacgcgcatggcctcgcgccgccgctgcaggtgcgccaagagcgcggcagtggaggtcccgggagggctcgcagtgtccgcggcgtctgagtccaccacgagagcagcggcggcgctggcggcgcccagcgggttctcggcgcggacctcataagtgccgccgtcgcgcggccgcgccgcccgaatgcgcagcgcactcgcctcaccgagctcctccacgcgcacgcgggggccgtcgggctcacccaggcgccgcccgtccttggaccagctcactgccggcttcggggagccacccacgcggcagcggaaggtggcctctgagccctcgcgcacgtggatggacgtgggccgcagcaggaagtgcggcgcctgctcggcgcaggcggcctccgcgtccacctgcaggcccacagcggcgaaggcctcgcctataacagtgcgcgcgcggcacacgtattgccc

SEQ ID NO: 42724 - DNA, 407 bp, Macaca Mulatta
  misc_feature (1)...(407): n = A,T,C or G
cttcccagccactggctgccagaaactcattggagtggatgatgaatacaaacttcgtactttctgtgagaagcatatggccacagaagttgctgctgatgctctgggtgaagaatggaagggttatgtggtctgaatcagtggtgggaacaacaaatttccccatgaagcagggtgtcttaacccatggccgtgtctgcctgctactgagtaaggggcattcctgttacagaccaaggagagtgggacaaagaaagagaaaatcagtttgtggttgtattgtggatgccaatctgagcattctcaacttggttattgnnnnnnnnnnnnnnnnnnnnnnnnnnnnnnnnnnggactgactgatactatggtgcctcatcgcctggggcccaaaaaagctagcagaa

SEQ ID NO: 42725 - DNA, 828 bp, Macaca Mulatta
  misc_feature (1)...(828): n = A,T,C or G
ggggcggccgccatgttctctgtgtgtctttgtcttttgtgtgttctttcattctccaccacccccggcacggaccccaacaagtggcgcagcgagcagggtcagcatggagacctaaccttgatgggccccgtctgcaatgcacctcctgcaaagagacagagctgtttaagtgaactgacctatttggaggactaatagacggatttaaaaaggtgcccaggaagtcctggaactgagtcctggggcaaagttctggaaggcgggaaaagaaggtgatcagcgtgctcatggatggcttctgactctccaggtttccatgcaagggtactcaaacgtgtgtatgtgcagcaaaccattggaaagccagataatagatgactgcctgaagagcataacaaaagaaaggcgtattatgtgaagtattcaaatctctctcacaacatcagacttacatatcctaatgttatcgccttcggtatagggatctagatgtcaggaagatggttgagtttcccccggatgacattttcagttcttaacaacatgggtaacattgtcctttgtaactattttttcttccctttcattcattcttgactcnacaactaagcttctaataacctttttggttaactgaaataaaataaaatagctgccnnnnnnnnnnnnnnnnnnnnnnnnnnnnnnnnnnnnnnnanaaaatnaaantaaaaaataataaaaattaaatnnnnnnnnnnnnnnnnnnnnnnnncgcctctggccccctnnnnnnnnnnnnnnnnnnnnnacnnnnnnnnnnnnncgccgcgcgcccccaataag

SEQ ID NO: 42726 - DNA, 646 bp, Macaca Mulatta
  misc_feature (1)...(646): n = A,T,C or G
ttggtttttggctgcatagaggggctgaatannnnnnnnnnnnnnnnnnnnnnnnnnnnnnnnncttgttcttacagaagatgtaattcagaagatagtttagctccctagcgctaagttgtagaatagaaaatagaacattatttaagttaattgaagggtgagattttcatacccccactaatgctgtgcatctgtctttcgtttgttaacattatttgcttaatttctttcaactgacactgtgaataatactatcaaaaactaaggctagacattccccgtgtatctttaagcatgcttctcctgaaatttaactacattagtagttgacatttgtatacatatatcctaatacaagagtaggataaggtggaaatgtactggcctgagggatggtgaagcattcctttagtattttttatcctgttgggctcctagattgtactggggttgcccataaatcaaaccccatactctcagaattcattatattgtggtaatatccgaacctagtgaatggtacgattgggtgttttccattgagagtggatggacctctttataaagttggttgctgcaaaatccatttcttccaaaagccactttatttagggtttattcacaaatcttaaccattttgata

SEQ ID NO: 42727 - DNA, 105 bp, Macaca Mulatta
agctgtgtaacatgccctccatgcgaggcagcctggccaccctgacccttcttggcaagttggtggatgccattcctgctctggcagatgagcttgtaatggagc

SEQ ID NO: 42728 - DNA, 143 bp, Macaca Mulatta
catagcattcaacaacaaattttggaacataaaaataagatacttaaaaatcatcttcgaaatgacaatcaaggtaagacttctgatagtaaatttctcatttctcttggtggtcttactgattttaaaaagcaaaattacag

SEQ ID NO: 42729 - DNA, 791 bp, Macaca Mulatta
gggggaaccctttcccttctttgtgagagagaaccgcccccgcacggcgagcgcgcgcgcgctcacgcaccactctcacactccggcgcgccccgggctttccgcccggcgtctcgcgcatgcgcgaggaggaaagcggtagcgaagtcggaggctttttgccgagtttctgtgagaagtttctggaaagacagagccaaagggacgctggggtgtggggagcgcaaggaagcaagcgtttgaaaaaaagcgaaaaaccccaagcacaccgccacacctccaaccttcgagccacggcccaaacagagcccaagtccactgagaccctcatgcctgggaaaaagcatagggaccgtggcagccgctcctccctctgccactgcttagtccccgagattcctcagcatggggagagggcagggggtagccatgagaagcgtagagcgcccactggacgtttgcgaggtggaaagaaagccgaaacccaccctttggagccgcctccgcgcacgggccccctcgagtgggctcagtacgttaggactcagcgtggcagccgaagcattgggttgggggcgtctttcactaattttttctaggttttccctcctctcgggctctgtggtctcttccccgcccttcttcactttggtgacctgacgctaacgctgcgagtgtggggaaaccgtagtaaccccgagtctgaggggcgccctgggcggcggtatccgtcgcttccagccgtttcccctttaaggaaagcccccgagaagggcccgtgtggccgagta

SEQ ID NO: 42730 - DNA, 829 bp, Macaca Mulatta
  misc_feature (1)...(829): n = A,T,C or G
gggggccttctcaggtctgccttgggagggcatataactataggcgtgagcaaaaccttttaggttcccaggaatatattaaagctttttgaagcctcctgtaaccatcttattccccagtttttcattttaagttttctggttagctcttcttagccccagctagtatacatcgttaaacagttgcttctgactaattatgacaaatgtcctgtgggtaagaggctataacgcagagtgagcactcgctgccggacagtcaaatggtgacagtttggtggtggggcttttggggaactccagacccatactcctaatggctgctgggttttgtagctactactgaagagagagagtgtttgcactgatttcagaaattgagggacaagtcatttacaggtctgttttagagctggagaaagggggagtggaagtaggacaaggagaaaatgccttgaggttttctgtnnnnnnnnnnnnnnnnnnnnnnnnnnnnnnnnnnnnnnnnnnnnnnnnnnnnnnnnnnnnnnnnnnnnnnnnnnnnnnnnnnnnnnnnnnnnnnnnnnnnnnnnnnnnnnnnnnnnnnnnnnnnnnnnnnnnnnnnnnnnnnnnnnnnnnnnnnnnnnnnnnnnnnnnnnnnnnnnnnnnnnnnnnnnnnnnnnnnnnnnnnnnnnnnnnnnnnnnnnnnnnnnnnnnnnnnnnnnnnnnnnnnnnnnnnnnnnnnnnnnnnnnnnnnnnnnnnnnnnnnnnnnnnnnnnnnnnnnnnnnnnnnnnnnnnnnnnnnnnnnnnnnnnnnnnnnnnnnnnnnnnnnnnnnnnnnnnnnnnnnn

SEQ ID NO: 42731 - DNA, 640 bp, Macaca Mulatta
tggggcagaactctgccaggatgaagaatatttcagaacagaatttcagttagatattatttctatccatatattgaaaagaatgccattgtcaatcttatcttttaaaaagtactcagtgtagaaattgctagcccttaattctttttcagcttttcatgttaatttatgcagagtctcaccaagctcaaagacactggttgggggtggggggtgccacagggaaagctgtagaaggcgagaagactccagaatcctccagttatttttcttcttaaagaccatcaaggtgcttaactgagctttggagactgtgaggcatttgggaaaaaaatagcccactcacatcattccttataagtcttaagttcattttcattttatatggagtaaaaaatttaaaaagctattagtatttattaatgaattttattgagacatttcttagaaatatgcaattctatacaagcaagctctgtctctaaactgcaagttgaccttttgcttgccacatttctgcattaaacttctatattagtttcaaaggcttttaaactcaatgcgaacattctatgggattgttcttgatgcctttaaaaagggggcagatttaatttcatttgagccctcaatttccaac

SEQ ID NO: 42732 - DNA, 766 bp, Macaca Mulatta
  misc_feature (1)...(766): n = A,T,C or G
gggaaacaatagctaaaattttttgaatttgatgaaattataaacccacagatcacaaagcttagcaaaccctaagcacaggaaaactacacgaaggcttatcacaatcaaattgcttgaaaaacagtgataaattcaaaagtctaaaggcagccagtaaaaagctagtaaggcgcaaaggtgagaatgacagcaggtttcttcttgcagatttcctacagatggaaaaggcagacagtggaacagcatctttaaagcagagaaagggaaaaaaccgtcaacctagaattctatacccactgaaaatatatttgcaaatggaggcaaaataaagacttttgaagacacacaaaagatgaaaactcatccccggcagacccacactacaagaaacgtgaagtcctttaggcttgaggagaattactcttcagagggaaacacggttctacacaaaggaattaaaagcaccagaaatgagtactatgtggataaatatgggatttctttctttttatttaaatcgtctttgaaagataattttttaagcaaaataataagtgtactatgaattttttttcaataagccttttgcactcttaattttttttccttaagagacaaagtangccggggtgcagtggctcatgcctgtaaatccagcacttttgggaggctgaaggcggggcggaattcacgaggtcagggagatggaagaccacgggtgaaaacccccgttctcctactaaaaaatacggaaaaaaaaatc

SEQ ID NO: 42733 - DNA, 452 bp, Macaca Mulatta
aatggggtggggtgcagccagagaacaagccgtgcgcctgaggtgcatgcttgccccaatagccacaaagctgctgccgcttgctccaagggggtgggcgtgagagtcccaggccagggtgcagggcctcctaggagggaggatgtgcagtgcccggacgcctgctccccatgcccgtgggaaccccaggcccacgaccctgacacccactccctgtgcccgctggaaccccaggcccacgtccctgacacctgctcgccatgcctgctggaaccccagggccacgctcccctctctagtggatcccccagctctcactgcagcacctgaggcctcctgagtgcttggcgctgttgtgtaaccagagaaggctgtgggccatggggtcccagggaaagcagcacctggctctctggatcttcaggcattatcagctgaacgttcctgcaacc

SEQ ID NO: 42734 - DNA, 2469 bp, Macaca Mulatta
  misc_feature (1)...(2469): n = A,T,C or G
gtatggtgtggtggactttctttgagtactgggatgcaggttccaagtgctgtgagaacccttcagaaaagtgaaaatggaatgactggttcggctagtagcctgaacaatattgttactcaatagtgtctactcagaatacgtttaccctccctcttgattgggtggccttttctgtgcagttattaatcacaggaatttgtgagtagtgaaaatcaggtttgctgtgttctgctttgaggcctggaatctgttatcattaaacacctagttcgaagcatttgcaggaacctactgtacagtatcatagaagcaagcagataccaagcaaaaaactgatgattgaagagtaaatgggggaaaaggcagtgtttaattaacataaaaactcatttttgtatttcttggattactttgactcttttaatgtttaactacatatagtaaccctaaggcctggggagaaaagcttttaaatcttgccttctttcttctgtattttgtctttttaaaatctcattactatctattatttagttctaacacagaagctttaaaaatacatagtcatctaaggttttctaaaaattgaaatcatatgttgggaatgataaaaaggttttcaaatggtttatttttcctcttttataaataagttttacaaaattatcctcttttgtttattgactaggttgtctataattttcttttttccaaaatactgtgataagaaatttcttgacacaacagcttaaaatcacccaaatttcagttttttacctagtgcacataacaatggcaaggggggtattctttatatgttgccttgtaaagtacagttcttttcattnnnnnnnnnnnnnnnnnnnnnnnnnnnnnnnnnnnnnnnnnnnnnnnnnnnnnnnnnnnnnnnnnnnnnnnnnnnnnnnnnnnnnnnnnnnnnnnnnnnnnnnnnnnnnnnnnnnnnnnnnnnnnnnnnnnnnnnnnnnnnnnnnnnnnnnnnnnnnnnnnnnnnnnnnnnnnnnnnnnnnnnnnnnnnnnnnnnnnnnnnnnnnnnnnnnnnnnnnnnnnnnnnnnnnnnnnnnnnnnnnnnnnnnnnnnnnnnnnnnnnnnnnnnnnnnnnnnnnnnnnnnnnnnnnnnnnnnnnnnnnnnnnnnnnnnnnnnnnnnnnnnnnnnnnnnnnnnnnnnnnnnnnnnnnnnnnnnnnnnnnnnnnnnnnnnnnnnnnnnnnnnnnnnnnnnnnnnnnnnnnnnnnnnnnnnnnnnnnnnnnnnnnnnnnnnnnnnnnnnnnnnnnnnnnnnnnnnnnnnnnnnnnnnnnnnnnnnnnnnnnnnnnnnnnnnnnnnnnnnnnnnnnnnnnnnnnnnnnnnnnnnnnnnnnnnnnnnnnnnnnnnnnnnnnnnnnnnnnnnnnnnnnnnnnnnnnnnnnnnnnnnnnnnnnnnnnnnnnnnnnnnnnnnnnnnnnnnnnnnnnnnnnnnnnnnnnnnnnnnnnnnnnnnnnnnnnnnnnnnnnnnnnnnnnnnnnnnnnnnnnnnnnnnnnnnnnnnnnnnnnnnnnnnnnnnnnnnnnnnnnnnnnnnnnnnnnnnnnnnnnnnnnnnnnnnnnnnnnnnnnnnnnnnnnnnnnnnnnnnnnnnnnnnnnnnnnnnnnnnnnnnnnnnnnnnnnnnnnnnnnnnnnnnnnnnnnnnnnnnnnnnnnnnnnnnnnnnnnnnnnnnnnnnnnnnnnnnnnnnnnnnnnnnnnnnnnnnnnnnnnnnnnnnnnnnnnnnnnnnnnnnnnnnnnnnnnnnnnnnnnnnnnnnnnnnnnnnnnnnnnnnnnnnnnnnnnnnnnnnnnnnnnnnnnnnnnnnnnnnnnnnnnnnnnnnnnnnnnnnnnnnnnngaaagaaattttcagatgttctgttcactacagagggcctattccaggatctaaataaatgggaatttataattcccttcatagactcaaacctgaaagcagaaatttttagtagttgagttgctttaagtgaattttagcaaatatgacacagaaaaggtcagatgctgttgtataaaattttttattactgtgtcttatataattctttcttcttattaattcagtgcctttttcctctaagcatactcttggtccatgctccatgcagtgtcaactgatgtttaagctacagagcattgctacagtggtgagggccctctgttgcaggggcatggggaaaagcatatatgaatcaggggctggaggagtgtacatgattctcgtgttcatgtcgtcatttgaaactcttcacataaaattttctaatattcatttggaaaacctctccgctggagaggtttcatctctgagaggttttgtagtaatagtgtaagttcagtaaatccagagtacaaattctcatcacatgtattacttgatattaaattttgcaattattacttcaaaataagaatctgaggatttcttct

SEQ ID NO: 42735 - DNA, 567 bp, Macaca Mulatta
cctctttgggcacgatcacggccatattcaccacctcctgggacccctccatccgctgcagcaggatcggcttgcgggtcagaggcttgggctggatctccgccgccatcggaggagggggcgcgtcttgggcgccgccgccaatcgcgccgcggggccgggctgaggagactgctggggcacggacacaggttgagacagagactctggctggccggagcggaacgccggaaaccggcgagcatagcctggcctcctctctcgggaacgactccgcgctccctgcttcaggcaccaaaaccgccacaaccgggatgcaagccggcgccactaccagaggagggggcggagagccggaggggcggagccttgtgggcggggcctgccgcaggggggtggccgctggtgggcgcgagggcgggtccacttccgggagggtggtgaaggaggaggggaaacctggagcaggaggcggggatctggtgtcccagtgcgcgtgcgtcagtccccctcgcccattttccccccctcccctccgcggctccccgggcgctgcagcaccactag

SEQ ID NO: 42736 - DNA, 416 bp, Macaca Mulatta
  misc_feature (1)...(416): n = A,T,C or G
atgaagcccaccctcatctcagtgcttgtgataatatttatactcagaggaacaagagcccagagtgtgactcagcccgagaagctcctctctgtctttaaaggggccccagtggaactgaagtgctactattcatattctgggagtcctaatctcttctggtatgtccagtaccccaaacaacgcctccagttactcttgagacacatctctagagagagcatcaaaggcttcactgctgaccttaacaaaagcgatacatctttccatctgaagaaactattcgctcaagaggaagactcagccacgtattactgtgctctaagtatcaatgacatacgctttggagcagggaccagactgacagtaaaaccannnnnnnnnnnnnnnnnnnnnnnnnnnnnccnnnnnnnnnn

SEQ ID NO: 42737 - DNA, 649 bp, Macaca Mulatta
  misc_feature (1)...(649): n = A,T,C or G
gggggactatgtgaagacacagcgaggggatacaatctatgatccagagagagggccttcaccacatactcgacctaccgatgccttgatcttggacttctcagcttccagaactactcaactgaattctcaaagatagctgaacaatttactgcttccatatagtttcatattctgctgcagacataatgcagtaattatcctgattgctgttgtgcttggagtgtacttgtaatgtagttttttgcttttatttggtagaatgcataacagcaccacaaaattattacttcttcaaaactttttccagtgttcaatacctgtgattcatccccaaaattgagatatcctgtttctctacactccatctgcacttggatagaggggcgtgtattcatttgcacctcatcagtcttactgaaattgccgtctctcagacatccttgaacttctgagtttatgancaaggagcccattgtgttgtaatggaggggaaaaaaatctgtgacttgaagtgataaatgcagtacatatgcaggctcagcaccaagaaagataaacatctctggtgagcagactaagtggtcagatctgtgatatgaacgaggaacatgactcatcgagaaagaagcacctcggtatgctcact

SEQ ID NO: 42738 - DNA, 893 bp, Macaca Mulatta
  misc_feature (1)...(893): n = A,T,C or G
gagatcggacgaggcttaccatttangttcaaccaaactggaacaaacccctttcagcttattatcttcatagccccatacagacaagtattttgttgtgatctggccacaaacccctcccccatccaaggatgtacaagcctgagatcacatgtagtttcattccctgctcggtctccagtccttagaacaatgcttggcacctggtgggtacttagtaagtatttgagtaaatgaatgagcaagtgaataattgagtgatctgttctacatgtcattttttcacatgtagatatctgaataatctctctttaagctatccccgtttagttcatttctttcataactcgtcgtaattactgtatctgtatttatacccttcttcgttgcctatctccttcactagactcttagctttgtgaacgtctatttcatttctcactctgggtgcctaatgcctggcctgcacataatatgtatttaacagatatttgttgggtagataggaggaagaaggcaactgaagaacaagcaatttgaaatccaaggcagctctaggttcttctccatgttctggagtccaaattctggaaggaggcaggagttactctgcacaaactctctcttgactgatgacagctacatacgaatgaagagctcctccatgcctcctgcacgcatgtgaggactccccacccagtgcaatgtgacctgggaacgcgtgaaataacgacgacgagagcgtcctgatcgaacaagtagcaaaacagaagcacacaaagcagcgcaatggcaacaaataaatccagaagccgacatacgacaaaggccaacgtcgcgacaacgtcaacaatagcaacacatatagacgataacacagcgctaaccgcaaa

SEQ ID NO: 42739 - DNA, 541 bp, Macaca Mulatta
gagggaagcacatcttcttagttgctatcagtggctgatggggaagattgttggtataaggaagtcagaatatagatacagacggataagtttgctaagaacagagatcagcaaacaacttttctgagagaaagaaacatctgccaatgacatgctgtttctgcagtttctgttgctagctgtctcagtggtggtgacaacgcagacgcccaggaacacgtctcattctatactatccagatcttatcatttgccaaccaatcctgggcacaaagtcagggttcaggatggctggatgagttgcagactcagggctgggagagtgaatcaggcagaataatttgcctgcacacctggtccaagagcaacttcagcaacgaagagttgtcagacctagagttgttatttcgtgtctacttctttggattcactcgggagattcaagaccatgccagtcaagattactcaaaatatccctttgaagtacaggtgaaagcaggctgtgaactgcattctggaaagaagccagaaggcttctttc

SEQ ID NO: 42740 - DNA, 815 bp, Macaca Mulatta
ggggcggccgccatgttctctgtgtgtctttgtcttttgtgtgttctttcattctccaccacccccggcacggaccccaacaagtggcgcagcgagcagggtcagcacggatgatggatgcagccacaacaagtgacactttgcacaggacaaccgtgggccccagcagaggaccagcagccccgatgcatggtgagcaatccccgtgcctcgctcaggtaggaatttgtgagtagctccgcgtggcccttgtggcttggggatctcccatgaggttgccgacagaggtcagccaggactaccgccatcggaagccttggctggggctggaggatccatgtgaacagtctagagagcactcacaacacagctgctggtgcgaggctacaattcctctccataccatcatcatctcctcagagctctttgagtgtacttatagcatggccgctgacttcctccagagcaggtgatccaagccgtcagtgtggaatttacaagacctttcacaatctagtttcataaatcacacaccacctcttccaccatattctgttggatgcatgtgcagaccagctctgatttcatgttaggaagagactgcaaaagggcatgaatggcagagggcaaggacacctgcgggcaggtggcatcttggaagctaccgagactaccacaaccagctcataatttatctattggtttttctaaagtctgtccctttttcccccatcaactcctgttggcacttccattttctgccgtttgggtagcctttggtcccattaactcttacggctccttttacttcctga

SEQ ID NO: 42741 - DNA, 626 bp, Macaca Mulatta
gggctatggcagactctggagctggccaggaaccttgctatgatccaagagataatgcagatccaacaaccttcacaaaaccttgagtatccactgaatccacagctgtatctgggcttagagacaatgccaggtgggaacaatgccctgggtcagaactgtgctgacattaatgatcaaatgctgaacagtatgcaagatccttttggaggaaaccctttcacagctctcctggcaggaaaagtgctggaacaagtcccctcttcacctccaccttcaccaccatcccaggaacgacaagaccagctccacagcatcctgcaacccgagtcatctataatagctctggtggtttatcttcaaacacctcagccagtgacacccctaacaaggtcaaccacacttccaaggccaacactgctatgatctccaccaagggccagagccatgtctgtgccactcggccagccagctgggataccagccttacctagcatagagcttacccagcagcttcaagaagaatacaaggatgccactgtttctctaagtagctccagacagatattagagggtgatctccagctgtcagatgaacagaccagctcccagatcccaggaggcag

SEQ ID NO: 42742 - DNA, 894 bp, Macaca Mulatta
  misc_feature (1)...(894): n = A,T,C or G
ggatcctactacctactacctagaataaaacactatttatattttggtctatttcctgccaaggtgttttctgtgtatacgtggatattttgtttgtttttaaacaaaacgatgggatcattctgaacatactgttttatagtatggtcagctaataatatatcagaccttttttcatattatcaaatattctgcaactttttttaaatgtctattaatattccatcatatagatgtgatataatttgcttgatggttgtctcttaaaaagatagcaaacacttgtttttaaatcacaaaagtgatggatgttcattgtagaaaatataataaacactgttaagacttaaaagccatgtaattccaccaaccaaaattaatccctgttgtcatatttgtagtcatttttatagccttttttttctatgtatttataataactatcatttgagttttttttccttttgcttttttactttaaaaatacatgttctagggtcaggggaaatgtaatctggaattaaatattagccttaaaattcacaattttgattttcctggattttcaggaattgactaactaaaagagtcttgaaagtatttgctgtatttaatcaacaaacagagtgnnnnnnnnnnnnnnnnnnnctaagaaagctcattgtagtagaaagggtgggaatgtgggaatgtatagaaaatttattagaaacaggggaactatttaagtctagccttatttcctttcagtctttttttcaatattttaaaaaacattgagtacttattgaatttagttcctgggctcttcctttattaaaaattggtttcaaaaatacctttgaaaggtttccaacaattccaaaataaataaatttttcaagtggggtttct

SEQ ID NO: 42743 - DNA, 805 bp, Macaca Mulatta
taattattactaaaggcacatcaccctgctacagagacagctccttggtctcacggaatccctgcaatagttgctgcatttctgcgtctttccgagagtaagggttgaaaagagataaggtcaattcatctgacaacaatccaataggaaacctactgtctccgtagaagttcttttcatggaaaggaaatgggctacaattttgatctgctgcaggaactaggtctattcctcagcctcacagtttgcaaaacgctacagacttccgtgggcataaattctccagctttagggactgctggtgtagttgactcttgaagctgctcttggatttccaagggtagcaccatttttacctgagaaaaaaaggaaaaagatattcaagaaggagcacttttcaacagaagttactccatttgctgtttttgtggttttgtgcttgtttgggtttgcaagtgtgttttctgcccaaattgttcttgcatattctaacagtgtttgctttacgtgttttgataccacgctgttttgaaggtacaaatgtttttcatggcatgtcttgtgttaagtgtacaaactgagaggtgaatgtcagtgactgaatagagtacagtattcctcaaagtttttaaccaaataaacgctaagaggaaagtgaagcgagatttctggaggtctggaagtggccagctgacaatatggcatctctatatctcctatttttatctttacgctaaatgcaaattttactttctgtgctaaaataatgtttccttagtttcaaggtaaaaatgtgtaaatagac

SEQ ID NO: 42744 - DNA, 112 bp, Macaca Mulatta
ctgggctccacctcaaggtgatgctcttgccggtcagggtcttcacgaagatctgcattttgacctgttagcggttacgaagatgctgcgaataacaatcagcggtcagccg

SEQ ID NO: 42745 - DNA, 1041 bp, Macaca Mulatta
  misc_feature (1)...(1041): n = A,T,C or G
tcccacacaagccaaacaagtttgcagacccagtgaccgcaggtcagcccggcccaagcctgccagggtccctcctgagctgctgggaggctctcctccatggaagactcttgatcacaggctgggccactgctctttgtctgagtcaggttgggtctctggttcatcctcctgtggtgggcctgggaaccaaagaaaaagtattcatgttgactcacttgaaccccagagggatcttggcagggaggcctgggatatagaaagcacaccaataatgatgaagaaaaagaagaagaaaccaaannnnnnnnnnnnnnnnnnnnnnnnnnnnnnnnnnnnnnnnnnnnnnnnnnnnnnnnnnnnnnnnnnnnnnnnnnnnnnnnnnnnnnnnnnnnnnnnnnnnnnnnnnnnnnnnnnnnnnnnnnnnnnnnnnnnnnnnnnnnnnnnnnnnnnnnnnnnnnnnnnnnnnnnnnnnnnnnnnnnnnnnnnnnnnnnnnnnnnnnnnnnnnnnnnnnnnnnnnnnnnnnnnnnnnnnnnnnnnnnnnnnnntatccttcagaagaaacccccaaaaccgctgtaagttatcagtctaagctgagagtagaggaagagacctttggtaacaagtcagtaccacaaggccaagacaagaaattgctgaagcaacatgaacacagaccacagcctgcaccccacctgaagactcctatagataaaagccagtcagtaggccctctcaatctgaaaggacccctagcagacgtttctgcatacaatgtagaaactcctttggatatcagactcaaagagggttgctctcctatcttggaccaagaggttatgggtgtagtttcaaaacccacagcagcaaaagaaataccaaatttgatacccactttgatagcaagtattccattagaatgtaatctaaaagaagggaataatgaaagtaaaatgactaaactgcagaatgtcaaactgaaggagtttcctgaaggagctgaagaggataaagaactaataaaggaagcttttccc

SEQ ID NO: 42746 - DNA, 642 bp, Macaca Mulatta
ggttttttccatcttcccaaagcagaaatgaattgtacagtcatatagagatttgaagtgttgcctttttcctccctatgctttcttctttttccttcttcctcctgaattcctcctccttcccagaagcagacactcgcctctcccagtagctagttctcagcacctcctttcttgcctcctccttcccctaaatggtagcagttggcctctccctctcctggtacctgaagtgggagtgacgagatggatcagaaaaaggtttaccccattcaccatcagtgggagtaggtttctacagcacataagtttctggaggtctctttaggaataagagagaaaggaggggggatggaagggtgataggaagaaaggagggaaggagggaaggggcaggaaaggagaaaaggagggaaggaaggagcaaaggaaaacaaaatcacttgtaaatctctgtaaaaccacttcctttctctgcatgctttctcacactgtatccctcttgccttctgctgctctgcggttctttgtttcttttagctctttcctccccccagtttatcttctcaacaatatagtacaaaagccaaaatacttaaaagttaatctcaaagtaatgctttttagaaatcatattttaat

SEQ ID NO: 42747 - DNA, 317 bp, Macaca Mulatta
ctccgcatgatcggggcctgccacgccagccgcttcctccacatgaaagtcgagtgccccaccgaactctttcccccactcttcctcgaggtctttgaggatcaggaagtctaaagcctcaggcggccagagggtgtgcggagctggtggggaggagcctggagagaaggggcagagctgggggctgagggagacccccccacaccccttctctccttcctctcgtccttggatagattcagctcccacacacacacccgcactgccctggtccctcctcagacctccagccctggacagggcaaacaaatgaactt

SEQ ID NO: 42748 - DNA, 954 bp, Macaca Mulatta
ggggagcagcggcggggaggggctcttcacccagtccggcagttgaagctcggcgttcgggttacccctgcagcgacgccccctggtcccacagataccactgctgctcccgccctttcgctcctcggccgcgcaatgggcacccgcgacgacgagtacgactacctctttaaagttgtccttattggagattctggcgttggaaagagtaatctcctgtctcgatttactcgaaatgagtttaatctggaaagcaagagcaccattggagtagagtttgcaaccagaagcatccaggttgatggaaaaacaataaaggcacagatatgggacacagcagggcaagagcgataccgagctataacatcagcatattatcgtggagctgtaggtgccttattggtttatgacattgctaaacatctcacatatgaaaatgtagagcgatggctgaaagaactgagagatcatgctgatagtaacattgttatcatgctcgtgggcaataagagtgatctgcgtcatctcagggcagttcctacagatgaagcaagagcttttgcagaaaagaatggtttgtcgttcattgagacttctgctctagactccacaaatgtagaagctgcttttcagaccattttaacagagatttaccgcattgtttctcagaagcaaatgtcagacagacgcgaaaatgacatgtctccaagcaacaatgttggttccctattcatgttcccaccaaccactggaaacaaagccaaaggttgcagtggctgtcagaaacatctaaagggcatttctctttttcccctagaaagggctgggtatagtcccatttttccccagggtctgatttcttgtatctgtgtcctttggaaaattccctgggggccccactttttgggggttttaattaaccttcccaaacccttattgaaaatttttttcccc

SEQ ID NO: 42749 - DNA, 779 bp, Macaca Mulatta
  misc_feature (1)...(779): n = A,T,C or G
tatagtggtcgttcaggtcctgccctgacctgatgaccattcatcatcaagtactcctctatggatctggaagttgggacagggtgtgcacgcatcctgtgttgcttcagtgcctgtggctgccgtattgagaatccttgtctgctgtactgggaaagtggacttgcatattcttatttttcattgtggtttccctaggttgaagacagacagttgtactgtgtgaatgtggatgagtatgctttttccttctctgtccagatttatttattacaagaaaaacacatctgcataaaaaagccttagangcaggaagaatgtccactttgttttctttctgtagcaccaagacatgtggggtttcagcttcctctaagaagtttttgaagactggctttcatctcaaacaagactttttcccattggaaaaacggtccttttttggtttaaaaatgtatttatataatgtataaataaataagaaagttgagagagaatttcctttcaaaattgatgaaaaaatgttgctttctgaacatcattaattgggagtcagttgttgcctcttcccaggccattgccactctgcattctgttttctttattctggtttacaattttccaatattccctttctctgcttcctcctttcttttcctctctcctcccttcttgagcagctctcctcctctctctgcaaccagctccaagcttcttccttgtgaggtatccgcattggcatgtaccacttcccagccccgttctccttccttctcaaa

SEQ ID NO: 42750 - DNA, 658 bp, Macaca Mulatta
  misc_feature (1)...(658): n = A,T,C or G
gcatatttcttgcacacatagcatgtactgatcccttttaagggtggtctagaattagtacaacactttcattacattttctatacaattaactaataactgttttctgctacagacgtggtgtgtgactaaacacagtgattatctgtacttaggatttgaatatagtgtcacagtttttactcacaattgcattgtatttaagttatatgttaagctcataagagagtacagaaaaggagttcatatcaaagttgcataattctaaatgtaataagctcactttcagtttgaattcatacagaaattcatgcttttgttagctgatggtcatcaaaacttacaacattttataaaactaatcactctccccctacaaaagttcatatttggaaagcaagaagtatggttaaattaaagcattctaacactagagtcagtatgcacttatttaggctttgagaaatagtttatacctggaagtggataagaaaaaatcaactgtattgcacaaattttctttacatgccaaatccatctatgatgtcaaagtttgttaaatgtattctctaatgcctcanaacaggtgtttcagagtacctgaatttaatatcttccatgtaacaggtcactttattttaaaggataacagttgtag

SEQ ID NO: 42751 - DNA, 755 bp, Macaca Mulatta
  misc_feature (1)...(755): n = A,T,C or G
gggagtccaccggaaccgagttgcgagacggcaggttcccgcccggaagaagcgaccaaagcgcctgaggaccggcaacatggtgcggtcggggaataaggcagctgttgtgctgtgcatggacgtgggctttaccatgagtaactccattcctggtgtagaatccccatttgagcaagcaaagaaggtgataaccatgtttgtccagcgacaggtgtttgctgagaacaaggatgagattgctttagtcctgtttggtacggatggcactgacaatcccctttctggtggggatcagtatcagaacatcacagtgcacagacatctgatgctaccagattttgatttactggaggacattgaaagcaaaatccaaccaggttctcaacaggctgacttcctggatgcactaatcgtgagcatggatgtgattcaacatgaaacaataggaaagaagtttgagaagaggcatattgaaatattcactgacctcagcagccgattcagcaaaagtcagctggatattataattcctagcttgaagaaaatgggacatctcccctgcaaattcttccttgccttttctcgctttgggcatgggaagaatggaagttgggggacagaaggaaaatggcccccctttccccctgggggggaccccatnnnnnnnnnnnnnnnnnnctcacttaaaaaaggaaaattaactgggaacactgccaaaaaaaggaggaggggtccttggagaaaaataaata

SEQ ID NO: 42752 - DNA, 268 bp, Macaca Mulatta
  misc_feature (1)...(268): n = A,T,C or G
acattgaacaggaggacccccgcgggcggaccccgctggagctggccgtgtctctgggaaacctggagtctgtgagagtgctccttcgacacaatgccaacgtgggcaaagagaaccgccagggctgggcagngcagtcctgcaggaggcagtcagcactggagaccctgagatggtgcagctggtactccagtatcgggactaccagagggctacacagaggctggcgggcattccggaactgctcaacaaacttcgccaggnccca

SEQ ID NO: 42753 - DNA, 745 bp, Macaca Mulatta
cgcctctcgagcccctgcctccttcacctgccacgaacaccacgaagaccgcgccgctccttttggccgtcgcgatggcggccggaatggcgccctggaaccacagcatcgctcccttcgggcccaggcgctcgctcggtgtgtagtctccgcagtcccggaaccggctccgccctccgtcttcgtcctgctctgcggcccccgcaacctcggctgctgcggcccccacctccggctcagcacaagcgcgcaggcccgtcagcggcacccggagacgcgcgctggcgctcgcgagaacaccccacgtcacatgacgcaacccgtcgctgttcgtgccccagggccttctctcgttggcgagtcggtggtgcgtgcgcgcgcccgctaggcctccggccgcgcagtccaggaagtggaggaaggcagtgggaaggatgagtaaccgctacgacccgtcggcggcgcctgcagtgaggcatgatgggaattgtagtccacttaggcttattctcctccatattgtggagcatgtaactgtgggttctgaggcacggctaaagggggcagtagtgagggccactacacagtctataaaggggagagggagaaagagaagtgtcactccgactggcatatgctattctcggcctcgttgagactcccactgtggaggaaatcgtcctcgcatggaactaaatgggctttaagggattaactccgaggctttgattttttctgaacgtag

SEQ ID NO: 42754 - DNA, 1101 bp, Macaca Mulatta
ggggtttcagtcaaagtgaaacaaaataggaataactacttgggcaaaacactactttatcactgctaagatattactagaactgagcagagaaagagtcatagagagccatgacatagtactaattaataatgaggtactattgagcgactggaatattctcagatgatgcctgtttaattacccataggtgctaagtgaatgttaaaaattatggtgctggttgaataggcagaatagaacttgtgttagggcacatcccatggagatattttttactacttaattttttagagttacctcagtaacttaacaggcaggaatatagttttaatggaaacgaaaccacttgcctttaacagcgttagtcccgctaagaggaagtttttgtttgtctagtttattacaggtctttgactttgtcagcatatggcaaatttcatataaaagatggttaattatctaggctgatgaaatataggcagctgaaaagaaaattcttagcattcataccttagaaggaaccctgaaggacaggaagccatagatatcctgtttttttaaaaaagtaatttcaagtaaatttgcaaatgcaatgctagtaaaaagtgtatagaggtatgtctttcaaactatcttgttactattagaatttttgtagccatgtgcagaggagagaaaaggtgttggattttctgtggttctgattcagttgtaagaatttggtgtgaaaagaatgtttgcaaaggagcgggcataaaggggagaacaggaatatgaaacacaacatctgtaaattactaaattcagagggaatttagtgggggcatatctcttaaatggttttgaatagtttggtgttttaaccaatgacttaatttaacttagtgggtatactgtttccagtcccattactgatttttatccctctgtgataacatacacccaaataaagactgctatgtatttgatttaaaactattagatgtaaaaggtcactaagcaaaccctagaaatacctcacttttgctagtttgataccttgctaaatattagtaaatgtcttcctccagaatactaaattaaatgaacttgatgaac

SEQ ID NO: 42755 - DNA, 341 bp, Macaca Mulatta
ctgagcattagctaaaacagggtccatgcagatgccagtttccacaggacacacccacctgtgccaagtcagttcaccgtggctctggcaacggccgagaagttaccgcccctttccatggcaacgacccgacaacccagaagttaccaccctcgccctggaaatgtctgcattaactgccccttaatttgcatataattaaaagtgggtacaaacaggactgcagaactgcctctgagctgctactctgggcacacagcctatggcgcagccctgctctgcaaggagcagcacctctgttgctgctgtgcgccactggccacttcaataaaagttgctaa

SEQ ID NO: 42756 - DNA, 866 bp, Macaca Mulatta
  misc_feature (1)...(866): n = A,T,C or G
ggggctcgtgcatttgtatcaaaatttgcctacctctttgtgagggaggcctgcttttcacacctcagtttatttaattcgaggcaagttgaaagacaacactcactctaggtgattctgtggtgccatgaaatttaagataatttgggaaaaaggattagtcagtgttaagcaagagtcacatcttctgagctttcgattatcagtgtagtacctgactaaaaatgaagtaatacccttaaccatttataatttctagtatttctctgaaagatcgttttggggacaaaagtgacttgatatgtccaatttcatttcagaataaaaagctagcatctttaaaaatctcagattgcttgcttacagatataagtgagaattatggagaagcgattccttttagaggattacttttttcaattttggttttagtaatctagggtttgcctgtaaagaatacaacgatggattttaaatactgtttgtggaatgtgttaaaggttgattcagaaccttgaataaatcatctctcgtctagcgtcaactagctctattatcgagatacaagatnnnnnnnnnnnnnnnnnnnnnnnnnnnnnnnnnnnnnnnnnnnnnnnnnnnnnnnnnnnnnnnnnnnnnnnnnnnnnnnnnnnnnnnnnnnnnnnnnnnnnnnnnnnnnnnnnnnnnnnnnnnnnnnnnnnnnnnnnnnnnnnnnnnnnnnnnnnnnnnnnnnnnnnnnnnnnnnnnnnnnnnnnnnnnnnnnnnnnnnnnnnnnnnnnnnnnnnnnnnnnnnnnnnnnnnnnnnnnnnnnnnnnnnnnnnnnnnnnnnnnnnnnnnnnnnnnnnnnnnnnnnnnnnnnnnnnnnn

SEQ ID NO: 42757 - DNA, 1157 bp, Macaca Mulatta
  misc_feature (1)...(1157): n = A,T,C or G
gggttctctgtatacatggaatagattattatttatgatgtttgtgaagagcagctgtgatttcccctcaggtgaggagcattaaagggtagtgtatgtttcacagcagtgcagcttaggtcttacatatctgctaaagaatatgtcttggaacaatcagatgttctgagaactatagtgtttactgnnnnnnnnnnnnnnnnnnnnnnnnnngaatcttagtagtaacagtgacnnnnnnnnnnnnnnnnnnnngacagaaagagtcttactctcnnnnnnnnnnnnnnnnnnnnnnnnnnnnnnnnnnnnnnnnnnnnnnnnnntcttcnnnnnnnnnnnnnnnnnnnnaatgtgaaccattatgtccatccaaaaaaggtgactttcctagggtgaaaaactggctagtcaaataattataacgacttgagtagaatgaacctgaaataatacccattggccaggaagggtaatatttagcttcccctaaggagaggacaaaatttcgcttggccaatatacaaggcgcagtgagtccccctttttttaaagattttgccatagagttaaaaatgcaccaaaaactggcgcctatggaatttttgatataagtaaaaaccatgatggtggagtataaacgcaaaaccgcaataacccaaattttttccggctccgtggagaccactaaaccaacgctaaattcccaacttggtgatgttcgcctcttgcactccgaatggagtaacaaaactgggcgtaaaataccccacacctgtcggcaagagaaatatacttatttaatccgaaaacgttttttcattaaacccttttaagctaaagctcactttgagtaacacttataaagtcttacaccaacacggggtggatgctcgcgaccacaaagactcttagagagcacgccgatgtgaaaaaaacatagtgtaataaagatggttggatgattggaaaagcacagtctcaatgccctgaaaaagactcttnctacgcatgagtatgngtgatcggaaaaaagcgatgacaaataattcgcgcacatatataacctcctgacacaccagaaaggagttaagtataatatctttcgtgcaagcgcggagcaaaggtgtttgatatctggacagtataaccgtatn

SEQ ID NO: 42758 - DNA, 1223 bp, Macaca Mulatta
  misc_feature (1)...(1223): n = A,T,C or G
ggaactacaaaaaaggcttttagaaaatggttgtaaatctgacttctttgcaagtaactgtatattgtaaataggtataaaaggccttttttctaaataaggacttaactgcctgtaacatgaaacttcaaactaaaccactaactcaatgaactacttatggtttgtctgacatccctcacttaccaattaattataaatatgtttttttaaatccccaaagacattatctgtggtctttttttcctttcaagctcagcctgtgtgcctgatgtcatttctttcaagttgcccacagtatctccatttaaactaggctagtaaccaaaataatgtggaccttctttaggaaacagcgtgggagaataggagtccagccgtaagataaactggaaatatttgggtgtcttgtacctggctatgcaccacctcagtgttgttcctacataaacaaggccccttttagacttgtatgtggactgctgtttggtcaaagaataccttgttagcattgcagaaaggtggtcagatgaccaatgcagtgcaggaaacagccctgtctcaactaatggaaatatatttgcatgtaaccccaaaattagcttatcttgcatagaacataataagtatgtgtctttcgtgacacggatgttctactatagccttattttcaaaaaaaggggtcnnnnnnnnnnnnnnnnnnnnnggtacaggaattaacatattaaactttgttgtgaaactgaatcatgtcagaactgcttaaaattaacccttaccatttaatgtcatctacctgaaaacagtgagatttatactgtatcaatgtctatttttttgtttttgctatgaatataattacagtattttaatatttagttatttaatttgttctactagttggatacagaacacacaaatccagggggattaaagctggaaggggctaagagattagtttacagagaaaaggcttggtggtgggatttttttaaatgtgtgttatgtacatatatatataaatattaaaaaatgaaagttaatctagattttaacattttcagaaacttagtgataatattatgaacaattctaaaagccctgtgatttgaaaaatgtagaatcattaatggcccaagataggccttcacaccctcacaggtgcgaaaggaaaggccttcacatcctcacagaggtgtcatgcaaaggacagcggctttggc

SEQ ID NO: 42759 - DNA, 776 bp, Macaca Mulatta
  misc_feature (1)...(776): n = A,T,C or G
ggggtggtctggatgataataagaatggagaacaaaaatctcaaaacaatttattgccagaagagaagcaattaaagaatgaagagttagatattttctattcccatgaaaacagttgtgaaatacaggaatttcatgttgatgataaagattcgatcccctttacagaaatggccaatactttagagaagaaatcatcttcctttaaagatcttatgactgtacctgaatcaagagatgaggcgatgagtaatagtaccaatgtgatttattctaacttgacaagagaacagacccctggcatcagtcctaaatctgacaccttaacggattctcagatagacagagaccttcacaaattatctttactagctcaagccagtgttatcacgtttccatctgattcccctcagaactcatcccagctacaaaggaaaggaaaagaagataaaagatgtttcacagctaaccaaaataatgttggcgatgcctcccgtggacaggtgattattatttcagattcnnnnnnnnnnnnnnnnnnnnnnagaatcctgattcttgagaaactcactaaacaggacaaaagatgccttgagaaagaacgtccagagcagcacatttccacagtcaaggaggaaaaagaatccgttaaaggaagaaaaagacgaaatctcttttttccgtttgaaggaatctgaattctccagtgtttttgagttttgaaagtgccatctgaaggtgttttccggttttggcaagatcctcctaaaaccata

SEQ ID NO: 42760 - DNA, 112 bp, Macaca Mulatta
gctgcctctaagaatcagacttcactcttgggagaaccaccaaaagaaattcggctcagtaaaaatccatacttgaatttggcaagtgtgttacccagtgtgtgcttatcat

SEQ ID NO: 42761 - DNA, 775 bp, Macaca Mulatta
  misc_feature (1)...(775): n = A,T,C or G
ggattgaaagggaaaaatgcctgcaaaagcaagcacagtgtagcttatcaattaaaaaatagtagctaaagcaaaaagaagaaatatcagttgaagcagctactttattagtaatgcatgatagtgctatacgcagacaagtagcaatagtcttctatttacatctattcttaattaatcttgaatccctaacaggcttttcactgaaaattccattttgctcatttagatatcagaccctgtttgtaagatgctatttagttttctcctagctacggcctaaccttttctctcaagacttttaaaaatgaatatttcatagcataatttgccttcctttgtaactagagtgttttgaaaggctacgaataagaaaacaagttgcaaagccaggcagaatccctcctcttacttctattgtatcaatcagaatgttgtttttttctagaaggatcaatgccatttatctgttggagcacattaaacccctgcctaaaggattcacgctactgttttctcttccagaaaggaattaccacaaccatacaagtcagcgtagtaagaagctaagaacattttatcannnnnnnnnnnnnnnnnnnnnnnnnnnnnnnnnnnnnnnnnctcattctgcatttcctgcaactttctatcctgggtaggagatagataagttaataagcagtgacgatgcccagcttttctaatagaagatgatgcaaggaggcgccttactgcccatcagggcaaggcttctcatattccatttcccttt

SEQ ID NO: 42762 - DNA, 12223 bp, Macaca Mulatta
  misc_feature (1)...(12223): n = A,T,C or G
tcaggaagcacaggagtttctgcaggctccatcactgccagccctgaagcctcagtcacaacctctgaaagcagcaaatcaggtnnnnnnnnnnnnnnnnnnnnnnnnnnnnnnnnnnnnnnnnnnnnnnnnnnnnnnnnnnnnnnnnnnnnnnnnnnnnnnnnnnnnnnnnnnnnnnnnnnnnnnnnnnnnnnnnnnnnnnnnnnnnnnnnnnnnnnnnnnnnnnnnnnnnnnnnnnnnnnnnnnnnnnnnnnnnnnnnnnnnnnnnnnnnnnnnnnnnnnnnnnnnnnnnnnnnnnnnnnnnnnnnnnnnnnnnnnnnnnnnnnnnnnnnnnnnnnnnnnnnnnnnnnnnnnnnnnnnnnnnnnnnnnnnnnnnnnnnnnnnnnnnnnnnnnnnnnnnnnnnnnnnnnnnnnnnnnnnnnnnnnnnnnnnnnnnnnnnnnnnnnnnnnnnnnnnnnnnnnnnnnnnnnnnnnnnnnnnnnnnnnnnnnnnnnnnnnnnnnnnnnnnnnnnnnnnnnnnnnnnnnnnnnnnnnnnnnnnnnnnnnnnnnnnnnnnnnnnnnnnnnnnnnnnnnnnnnnnnnnnnnnnnnnnnnnnnnnnnnnnnnnnnnnnnnnnnnnnnnnnnnnnnnnnnnnnnnnnnnnnnnnnnnnnnnnnnnnnnnnnnnnnnnnnnnnnnnnnnnnnnnnnnnnnnnnnnnnnnnnnnnnnnnnnnnnnnnnnnnnnnnnnnnnnnnnnnnnnnnnnnnnnnnnnnnnnnnnnnnnnnnnnnnnnnnnnnnnnnnnnnnnnnnnnnnnnnnnnnnnnnnnnnnnnnnnnnnnnnnnnnnnnnnnnnnnnnnnnnnnnnnnnnnnnnnnnnnnnnnnnnnnnnnnnnnnnnnnnnnnnnnnnnnnnnnnnnnnnnnnnnnnnnnnnnnnnnnnnnnnnnnnnnnnnnnnnnnnnnnnnnnnnnnnnnnnnnnnnnnnnnnnnnnnnnnnnnnnnnnnnnnnnnnnnnnnnnnnnnnnnnnnnnnnnnnnnnnnnnnnnnnnnnnnnnnnnnnnnnnnnnnnnnnnnnnnnnnnnnnnnnnnnnnnnnnnnnnnnnnnnnnnnnnnnnnnnnnnnnnnnnnnnnnnnnnnnnnnnnnnnnnnnnnnnnnnnnnnnnnnnnnnnnnnnnnnnnnnnnnnnnnnnnnnnnnnnnnnnnnnnnnnnnnnnnnnnnnnnnnnnnnnnnnnnnnnnnnnnnnnnnnnnnnnnnnnnnnnnnnnnnnnnnnnnnnnnnnnnnnnnnnnnnnnnnnnnnnnnnnnnnnnnnnnnnnnnnnnnnnnnnnnnnnnnnnnnnnnnnnnnnnnnnnnnnnnnnnnnnnnnnnnnnnnnnnnnnnnnnnnnnnnnnnnnnnnnnnnnnnnnnnnnnnnnnnnnnnnnnnnnnnnnnnnnnnnnnnnnnnnnnnnnnnnnnnnnnnnnnnnnnnnnnnnnnnnnnnnnnnnnnnnnnnnnnnnnnnnnnnnnnnnnnnnnnnnnnnnnnnnnnnnnnnnnnnnnnnnnnnnnnnnnnnnnnnnnnnnnnnnnnnnnnnnnnnnnnnnnnnnnnnnnnnnnnnnnnnnnnnnnnnnnnnnnnnnnnnnnnnnnnnnnnnnnnnnnnnnnnnnnnnnnnnnnnnnnnnnnnnnnnnnnnnnnnnnnnnnnnnnnnnnnnnnnnnnnnnnnnnnnnnnnnnnnnnnnnnnnnnnnnnnnnnnnnnnnnnnnnnnnnnnnnnnnnnnnnnnnnnnnnnnnnnnnnnnnnnnnnnnnnnnnnnnnnnnnnnnnnnnnnnnnnnnnnnnnnnnnnnnnnnnnnnnnnnnnnnnnnnnnnnnnnnnnnnnnnnnnnnnnnnnnnnnnnnnnnnnnnnnnnnnnnnnnnnnnnnnnnnnnnnnnnnnnnnnnnnnnnnnnnnnnnnnnnnnnnnnnnnnnnnnnnnnnnnnnnnnnnnnnnnnnnnnnnnnnnnnnnnnnnnnnnnnnnnnnnnnnnnnnnnnnnnnnnnnnnnnnnnnnnnnnnnnnnnnnnnnnnnnnnnnnnnnnnnnnnnnnnnnnnnnnnnnnnnnnnnnnnnnnnnnnnnnnnnnnnnnnnnnnnnnnnnnnnnnnnnnnnnnnnnnnnnnnnnnnnnnnnnnnnnnnnnnnnnnnnnnnnnnnnnnnnnnnnnnnnnnnnnnnnnnnnnnnnnnnnnnnnnnnnnnnnnnnnnnnnnnnnnnnnnnnnnnnnnnnnggagttacagaaacaacgagatcatctgttgtcaaatcagggacanctggnccatctgttacaggaacaaggacaactgtaacttcatctggagaatcaggtacaacaagatcatcaggtggagaaacagagacaactggccaatcagctgtaaaatcagggacagcagaatcatttactgggttgacaagaacatataggcaatcagctggaatgactgggacatctgcacaatcagctgaagtggcactaacaggtcattttgttgaaggattagtgacaactggttcatctactgtaggattagagacaactagaccttcagctgtaggatcaggaacaactggacctcctgttgtaaaagcacagacaattggaccatcagctcgagnnnnnnnnnnnnnnnnnnnnnnnnnnnnnnnnnnnnnnnnnnnnnnnnnnnnnnnnnnnnnnnnnnnnnnnnnnnnnnnnnnnnnnnnnnnnnnnnnnnnnnnnnnnnnnnnnnnnnnnnnnnnnnnnnnnnnnnnnnnnnnnnnnnnnnnnnnnnnnnnnnnnnnnnnnnnnnnnnnnnnnnnnnnnnnnnnnnnnnnnnnnnnnnnnnnnnnnnnnnnnnnnnnnnnnnnnnnnnnnnnnnnnnnnnnnnnnnnnnnnnnnnnnnnnnnnnnnnnnnnnnnnnnnnnnnnnnnnnnnnnnnnnnnnnnnnnnnnnnnnnnnnnnnnnnnnnnnnnnnnnnnnnnnnnnnnnnnnnnnnnnnnnnnnnnnnnnnnnnnnnnnnnnnnnnnnnnnnnnnnnnnnnnnnnnnnnnnnnnnnnnnnnnnnnnnnnnnnnnnnnnnnnnnnnnnnnnnnnnnnnnnnnnnnnnnnnnnnnnnnnnnnnnnnnnnnnnnnnnnnnnnnnnnnnnnnnnnnnnnnnnnnnnnnnnnnnnnnnnnnnnnnnnnnnnnnnnnnnnnnnnnnnnnnnnnnnnnnnnnnnnnnnnnnnnnnnnnnnnnnnnnnnnnnnnnnnnnnnnnnnnnnnnnnnnnnnnnnnnnnnnnnnnnnnnnnnnnnnnnnnnnnnnnnnnnnnnnnnnnnnnnnnnnnnnnnnnnnnnnnnnnnnnnnnnnnnnnnnnnnnnnnnnnnnnnnnnnnnnnnnnnnnnnnnnnnnnnnnnnnnnnnnnnnnnnnnnnnnnnnnnnnnnnnnnnnnnnnnnnnnnnnnnnnnnnnnnnnnnnnnnnnnnnnnnnnnnnnnnnnnnnnnnnnnnnnnnnnnnnnnnnnnnnnnnnnnnnnnnnnnnnnnnnnnnnnnnnnnnnnnnnnnnnnnnnnnnnnnnnnnnnnnnnnnnnnnnnnnnnnnnnnnnnnnnnnnnnnnnnnnnnnnnnnnnnnnnnnnnnnnnnnnnnnnnnnnnnnnnnnnnnnnnnnnnnnnnnnnnnnnnnngggacaactggactatcagctggggtgacagggactaccagatcattagctggggtgacagggacaactggatcatctgcaaaatctgggacaagtataccatcagctggaaaaacaggaacaaccaggacatcagttgaagaatcaaggacaactagaccatcagctggaataacaggtacaaatggactatcagctgaagtgacagggtcaactggaccatcagctggagtgacggggacaactggaccatcagctggagtgacggtgacaactggactatcagctggagtgacagggaccactggaccatcagctggagtgacggggacaactggactatcagctggggtgacagggactaccagatcattagctggggtgacagggacaactggnnnnnnnnnnnnnnnnnnnnnnnnnnnnnnnnnnnnnnnnnnnnnnnnnnnnnnnnnnnnnnnnnnnnnnnnnnnnnnnnnnnnnnnnnnnnnnnnnnnnnnnnnnnnnnnnnnnnnnnnnnnnnnnnnnnnnnnnnnnnnnnnnnnnnnnnnnnnnnnnnnnnnnnnnnnnnnnnnnnnnnnnnnnnnnnnnnnnnnnnnnnnnnnnnnnnnnnnnnnnnnnnnnnnnnnnnnnnnnnnnnnnnnnnnnnnnnnnnnnnnnnnnnnnnnnnnnnnnnnnnnnnnnnnnnnnnnnnnnnnnnnnnnnnnnnnnnnnnnnnnnnnnnnnnnnnnnnnnnnnnnnnnnnnnnnnnnnnnnnnnnnnnnnnnnnnnnnnnnnnnnnnnnnnnnnnnnnnnnnnnnnnnnnnnnnnnnnnnnnnnnnnnnnnnnnnnnnnnnnnnnnnnnnnnnnnnnnnnnnnnnnnnnnnnnnnnnnnnnnnnnnnnnnnnnnnnnnnnnnnnnnnnnnnnnnnnnnnnnnnnnnnnnnnnnnnnnnnnnnnnnnnnnnnnnnnnnnnnnnnnnnnnnnnnnnnnnnnnnnnnnnnnnnnnnnnnnnnnnnnnnnnnnnnnnnnnnnnnnnnnnnnnnnnnnnnnnnnnnnnnnnnnnnnnnnnnnnnnnnnnnnnnnnnnnnnnnnnnnnnnnnnnnnnnnnnnnnnnnnnnnnnnnnnnnnnnnnnnnnnnnnnnnnnnnnnnnnnnnnnnnnnnnnnnnnnnagctggagtgacagggacaattggatcaccacttggagtgacagggacaactcggctatcagctgtggtgacagggataactggactatcagctgaggtaacagagataactggatcatcaactggggtgacagggataactggaccatcagctggagtgacagggacaactacagtatcagccggagtaacagggacaactggactatctgctggggtgagagagacaattggtctatcaactggggtgacagggacaattggatcatcaactggagtggcagggacaacaagactatcagctggagggacagggacaactggactgtcagctgaagtgacagggacaactggccaatctgttgaagtgacagggacagctagatcatcagctggagtgacagggataactggattatcagctggactgacagggacaagtggactatcagctgtggtgacagggataactggactatcggctggggtgacagggataactggaccatcagctggagtgacaggggcaactacagtatcagctggagtaacagggacaactggactatcagatgaagtgacagggataactggactatcagctggaatgacagggacaactggactatctgccggggtgacagagacaattggactatcatctggggtgacaaggacaattggatcatcagctgtagtggcagggacaacaagactatcagctggagtgacagggacaactggaccatcagctggtgtaacggggtcagctggactatcagctggggtgacannnnnnnnnnnnnnnnnnnnnnnnnnnnnnnnnnnnnnnnnnnnnnnnnnnnnnnnnnnnnnnnnnnnnnnnnnnnnnnnnnnnnnnnnnnnnnnnnnnnnnnnnnnnnnnnnnnnnnnnnnnnnnnnnnnnnnnnnnnnnnnnnnnnnnnnnnnnnnnnnnnnnnnnnnnnnnnnnnnnnnnnnnnnnnnnnnnnnnnnnnnnnnnnnnnnnnnnnnnnnnnnnnnnnnnnnnnnnnnnnnnnnnnnnnnnnnnnnnnnnnnnnnnnnnnnnnnnnnnnnnnnnnnnnnnnnnnnnnnnnnnnnnnnnnnnnnnnnnnnnnnnnnnnnnnnnnnnnnnnnnnnnnnnnnnnnnnnnnnnnnnnnnnnnnnnnnnnnnnnnnnnnnnnnnnnnnnnnnnnnnnnnnnnnnnnnnnnnnnnnnnnnnnnnnnnnnnnnnnnnnnnnnnnnnnnnnnnnnnnnnnnnnnnnnnnnnnnnnnnnnnnnnnnnnnnnnnnnnnnnnnnnnnnnnnnnnnnnnnnnnnnnnnnnnnnnnnnnnnnnnnnnnnnnnnnnnnnnnnnnnnnnnnnnnnnnnnnnnnnnnnnnnnnnnnnnnnnnnnnnnnnnnnnnnnnnnnnnnnnnnnnnnnnnnnnnnnnnnnnnnnnnnnnnnnnnnnnnnnnnnnnnnnnnnnnnnnnnnnnnnnnnnnnnnnnnnnnnnnnnnnnnnnnnnnnnnnnnnnnnnnnnnnnnnnnnnnnnnnnnnnnnnnnnnnnnnnnnnnnnnnnnnnnnnnnnnnnnnnnnnnnnnnnnnnnnnnnnnnnnnnnnnnnnnnnnnnnnnnnnnnnnnnnnnnnnnnnnnnnnnnnnnnnnnnnnnnnnnnnnnnnnnnnnnnnnnnnnnnnnnnnnnnnnnnnnnnnnnnnnnnnnnnnnnnnnnnnnnnnnnnnnnnnnnnnnnnnnnnnnnnnnnnnnnnnnnnnnnnnnnnnnnnnnnnnnnnnnnnnnnnnnnnnnnnnnnnnnnnnnnnnnnnnnnnnnnnnnnnnnnnnnnnnnnnnnnnnnnnnnnnnnnnnnnnnnnnnnnnnnnnnnnnnnnnnnnnnnnnnnnnnnnnnnnnnnnnnnnnnnnnnnnnnnnnnnnnnnnnnnnnnnnnnnnnnnnnnnnnnnnnnnnnnnnnnnnnnnnnnnnnnnnnnnnnnnnnnnnnnnnnnnnnnnnnnnnnnnnnnnnnnnnnnnnnnnnnnnnnnnnnnnnnnnnnnnnnnnnnnnnnnnnnnnnnnnnnnnnnnnnnnnnnnnnnnnnnnnnnnnnnnnnnnnnnnnnnnnnnnnnnnnnnnnnnnnnnnnnnnnnnnnnnnnnnnnnnnnnnnnnnnnnnnnnnnnnnnnnnnnnnnnnnnnnnnnnnnnnnnnnnnnnnnnnnnnnnnnnnnnnnnnnnnnnnnnnnnnnnnnnnnnnnnnnnnnnnnnnnnnnnnnnnnnnnnnnnnnnnnnnnnnnnnnnnnnnnnnnnnnnnnnnnnnnnnnnnnnnnnnnnnnnnnnnnnnnnnnnnnnnnnnnnnnnnnnnnnnnnnnnnnnnnnnnnnnnnnnnnnnnnnnnnnnnnnnnnnnnnnnnnnnnnnnnnnnnnnnnnnnnnnnnnnnnnnnnnnnnnnnnnnnnnnnnnnnnnnnnnnnnnnnnnnnnnnnnnnnnnnnnnnnnnnnnnnnnnnnnnnnnnnnnnnnnnnnnnnnnnnnnnnnnnnnnnnnnnnnnnnnnnnnnnnnnnnnnnnnnnnnnnnnnnnnnnnnnnnnnnnnnnnnnnnnnnnnnnnnnnnnnnnnnnnnnnnnnnnnnnnnnnnnnnnnnnnnnnnnnnnnnnnnnnnnnnnnnnnnnnnnnnnnnnnnnnnnnnnnnnnnnnnnnnnnnnnnnnnnnnnnnnnnnnnnnnnnnnnnnnnnnnnnnnnnnnnnnnnnnnnnnnnnnnnnnnnnnnnnnnnnnnnnnnnnnnnnnnnnnnnnnnnnnnnnnnnnnnnnnnnnnnnnnnnnnnnnnnnnnnnnnnnnnnnnnnnnnnnnnnnnnnnnnnnnnnnnnnnnnnnnnnnnnnnnnnnnnnnnnnnnnnnnnnnnnnnnnnnnnnnnnnnnnnnnnnnnnnnnnnnnnnnnnnnnnnnnnnnnnnnnnnnnnnnnnnnnnnnnnnnnnnnnnnnnnnnnnnnnnnnnnnnnnnnnnnnnnnnnnnnnnnnnnnnnnnnnnnnnnnnnnnnnnnnnnnnnnnnnnnnnnnnnnnnnnnnnnnnnnnnnnnnnnnnnnnnnnnnnnnnnnnnnnnnnnnnnnnnnnnnnnnnnnnnnnnnnnnnnnnnnnnnnnnnnnnnnnnnnnnnnnnnnnnnnnnnnnnnnnnnnnnnnnnnnnnnnnnnnnnnnnnnnnnnnnnnnnnnnnnnnnnnnnnnnnnnnnnnnnnnnnnnnnnnnnnnnnnnnnnnnnnnnnnnnnnnnnnnnnnnnnnnnnnnnnnnnnnnnnnnnnnnnnnnnnnnnnnnnnnnnnnnnnnnnnnnnnnnnnnnnnnnnnnnnnnnnnnnnnnnnnnnnnnnnnnnnnnnnnnnnnnnnnnnnnnnnnnnnnnnnnnnnnnnnnnnnnnnnnnnnnnnnnnnnnnnnnnnnnnnnnnnnnnnnnnnnnnnnnnnnnnnnnnnnnnnnnnnnnnnnnnnnnnnnnnnnnnnnnnnnnnnnnnnnnnnnnnnnnnnnnnnnnnnnnnnnnnnnnnnnnnnnnnnnnnnnnnnnnnnnnnnnnnnnnnnnnnnnnnnnnnnnnnnnnnnnnnnnnnnnnnnnnnnnnnnnnnnnnnnnnnnnnnnnnnnnnnnnnnnnnnnnnnnnnnnnnnnnnnnnnnnnnnnnnnnnnnnnnnnnnnnnnnnnnnnnnnnnnnnnnnnnnnnnnnnnnnnnnnnnnnnnnnnnnnnnnnnnnnnnnnnnnnnnnnnnnnnnnnnnnnnnnnnnnnnnnnnnnnnnnnnnnnnnnnnnnnnnnnnnnnnnnnnnnnnnnnnnnnnnnnnnnnnnnnnnnnnnnnnnnnnnnnnnnnnnnnnnnnnnnnnnnnnnnnnnnnnnnnnnnnnnnnnnnnnnnnnnnnnnnnnnnnnnnnnnnnnnnnnnnnnnnnnnnnnnnnnnnnnnnnnnnnnnnnnnnnnnnnnnnnnnnnnnnnnnnnnnnnnnnnnnnnnnnnnnnnnnnnnnnnnnnnnnnnnnnnnnnnnnnnnnnnnnnnnnnnnnnnnnnnnnnnnnnnnnnnnnnnnnnnnnnnnnnnnnnnnnnnnnnnnnnnnnnnnnnnnnnnnnnnnnnnnnnnnnnnnnnnnnnnnnnnnnnnnnnnnnnnnnnnnnnnnnnnnnnnnnnnnnnnnnnnnnnnnnnnnnnnnnnnnnnnnnnnnnnnnnnnnnnnnnnnnnnnnnnnnnnnnnnnnnnnnnnnnnnnnnnnnnnnnnnnnnnnnnnnnnnnnnnnnnnnnnnnnnnnnnnnnnnnnnnnnnnnnnnnnnnnnnnnnnnnnnnnnnnnnnnnnnnnnnnnnnnnnnnnnnnnnnnnnnnnnnnnnnnnnnnnnnnnnnnnnnnnnnnnnnnnnnnnnnnnnnnnnnnnnnnnnnnnnnnnnnnnnnnnnnnnnnnnnnnnnnnnnnnnnnnnnnnnnnnnnnnnnnnnnnnnnnnnnnnnnnnnnnnnnnnnnnnnnnnnnnnnnnnnnnnnnnnnnnnnnnnnnnnnnnnnnnnnnnnnnnnnnnnnnnnnnnnnnnnnnnnnnnnnnnnnnnnnnnnnnnnnnnnnnnnnnnnnnnnnnnnnnnnnnnnnnnnnnnnnnnnnnnnnnnnnnnnnnnnnnnnnnnnnnnnnnnnnnnnnnnnnnnnnnnnnnnnnnnnnnnnnnnnnnnnnnnnnnnnnnnnnnnnnnnnnnnnnnnnnnnnnnnnnnnnnnnnnnnnnnnnnnnnnnnnnnnnnnnnnnnnnnnnnnnnnnnnnnnnnnnnnnnnnnnnnnnnnnnnnnnnnnnnnnnnnnnnnnnnnnnnnnnnnnnnnnnnnnnnnnnnnnnnnnnnnnnnnnnnnnnnnnnnnnnnnnnnnnnnnnnnnnnnnnnnnnnnnnnnnnnnnnnnnnnnnnnnnnnnnnnnnnnnnnnnnnnnnnnnnnnnnnnnnnnnnnnnnnnnnnnnnnnnnnnnnnnnnnnnnnnnnnnnnnnnnnnnnnnnnnnnnnnnnnnnnnnnnnnnnnnnnnnnnnnnnnnnnnnnnnnnnnnnnnnnnnnnnnnnnnnnnnnnnnnnnnnnnnnnnnnnnnnnnnnnnnnnnnnnnnnnnnnnnnnnnnnnnnnnnnnnnnnnnnnnnnnnnnnnnnnnnnnnnnnnnnnnnnnnnnnnnnnnnnnnnnnnnnnnnnnnnnnnnnnnnnnnnnnnnnnnnnnnnnnnnnnnnnnnnnnnnnnnnnnnnnnnnnnnnnnnnnnnnnnnnnnnnnnnnnnnnnnnnnnnnnnnnnnnnnnnnnnnnnnnnnnnnnnnnnnnnnnnnnnnnnnnnnnnnnnnnnnnnnnnnnnnnnnnnnnnnnnnnnnnnnnnnnnnnnnnnnnnnnnnnnnnnnnnnnnnnnnnnnnnnnnnnnnnnnnnnnnnnnnnnnnnnnnnnnnnnnnnnnnnnnnnnnnnnnnnnnnnnnnnnnnnnnnnnnnnnnnnnnnnnnnnnnnnnnnnnnnnnnnnnnnnnnnnnnnnnnnnnnnnnnnnnnnnnnnnnnnnnnnnnnnnnnnnnnnnnnnnnnnnnnnnnnnnnnnnnnnnnnnnnnnnnnnnnnnnnnnnnnnnnnnnnnnnnnnnnnnnnnnnnnnnnnnnnnnnnnnnnnnnnnnnnnnnnnnnnnnnnnnnnnnnnnnnnnnnnnnnnnnnnnnnnnnnnnnnnnnnnnnnnnnnnnnnnnnnnnnnnnnnnnnnnnnnnnnnnnnnnnnnnnnnnnnnnnnnnnnnnnnnnnnnnnnnnnnnnnnnnnnnnnnnnnnnnnnnnnnnnnnnnnnnnnnnnnnnnnnnnnnnnnnnnnnnnnnnnnnnnnnnnnnnnnnnnnnnnnnnnnnnnnnnnnnnnnnnnnnnnnnnnnnnnnnnnnnnnnnnnnnnnnnnnnnnnnnnnnnnnnnnnnnnnnnnnnnnnnnnnnnnnnnnnnnnnnnnnnnnnnnnnnnnnnnnnnnnnnnnnnnnnnnnnnnnnnnnnnnnnnnnnnnnnnnnnnnnnnnnnnnnnnnnnnnnnnnnnnnnnnnnnnnnnnnnnnnnnnnnnnnnnnnnnnnnnnnnnnnnnnnnnnnnnnnnnnnnnnnnnnnnnnnnnnnnnnnnnnnnnnnnnnnnnnnnnnnnnnnnnnnnnnnnnnnnnnnnnnnnnnnnnnnnnnnnnnnnnnnnnnnnnnnnnnnnnnnnnnnnnnnnnnnnnnnnnnnnnnnnnnnnnnnnnnnnnnnnnnnnnnnnnnnnnnnnnnnnnnnnnnnnnnnnnnnnnnnnnnnnnnnnnnnnnnnnnnnnnnnnnnnnnnnnnnnnnnnnnnnnnnnnnnnnnnnnnnnnnnnnnnnnnnnnnnnnnnnnnnnnnnnnnnnnnnnnnnnnnnnnnnnnnnnnnnnnnnnnnnnnnnnnnnnnnnnnnnnnnnnnnnnnnnnnnnnnnnnnnnnnnnnnnnnnnnnnnnnnnnnnnnnnnnnnnnnnnnnnnnnnnnnnnnnnnnnnnnnnnnnnnnnnnnnnnnnnnnnnnnnnnnnnnnnnnnnnnnnnnnnnnnnnnnnnnnnnnnnnnnnnnnnnnnnnnnnnnnnnnnnnnnnnnnnnnnnnnnnnnnnnnnnnnnnnnnnnnnnnnnnnnnnnnnnnnnnnnnnnnnnnnnnnnnnnnnnnnnnnnnnnnnnnnnnnnnnnnnnnnnnnnnnnnnnnnnnnnnnnnnnnnnnnnnnnnnnnnnnnnnnnnnnnnnnnnnnnnnnnnnnnnnnnnnnnnnnnnnnnnnnnnnnnnnnnnnnnnnnnnnnnnnnnnnnnnnnnnnnnnnnnnnnnnnnnnnnnnnnnnnnnnnnnnnnnnnnnnnnnnnnnnnnnnnnnnnnnnnnnnnnnnnnnnnnnnnnnctggaataacaggtacaaatggactatcagctggagtgacagggtcaactggaccatcagctggagtgacagggacaactggactatcagctggagtgacagggacaactggactatcagctggagtgacggggacaactggactatcagctggagtgatggggaccactggactatcagttggagtgacagggaaaactggactatcagctggagtgacagggacaactggaccatcagttggagtgacaggaataactgcactatcagctggagtgacagggacaagtggactatcagctggagtgacagggaaaacagggctatcagctggagtaacagggagaactgggccttcagctgaagcaacagggaaaactggactatcggctggagtgacagggatcactggaccatttgctgaagtgacagggacaactggactatcaggtggggtgacagggacaactggttcatcagccagggtgacagggacaactggattatctgcaaaatctgggacaagtataccatcagctggaaaaacaggaacaaccagaacatcagttgaagaatcaaggacaactagaccatcagctggaataacaggtacaaatggactatcagctgaagtgacaggg

SEQ ID NO: 42763 - DNA, 992 bp, Macaca Mulatta
  misc_feature (1)...(992): n = A,T,C or G
gggttgaaggatatatacaaatttgtatatagtgagtgtcctctacagtggcattagagcaacttgtactaatatgttttgtttcgttnnnnnnnnnnnnnnnnnnnaagtataatttttttatcagaaaaacaagatttttaaaaaaccattatatgagttatcctagttggcaaaaatgtatgtttttcctcacttaagtgaggaaaagagatgcaaaatcaaccttggctgtataaggggtgcaggaatatgaacttgtctgggtgtgagagtatcatgtcctgtgcatttttttatttcctaaacaggttaaattataaatcattaatgaaaattattaaaagactttgttttccctacagttagaaaaaacatgattaaaagaccctccaatcccattggtataaactccataaacctattacaaaaaatacttggtggggccgggcctggggccctttggggaaaagctttttcttattaaccctttcgaaatttgggaacacgcgggggacccaacagtgaagggttagaggtggatatataatgggcagaggaatacgggcgttggtttttctcccactgaggtgggagcaattaccctctgggggggataaatagatacgagtaagagagcagtcgctgagaatattttcgttatccgcgtcgggaggtggaaaaagaaactgtagctctctcgaggagaagttatgccacccaaaagcggattggcaactataaaataacatctatatccccctgataaggggacaatgcattctttagaatgggtagactatactaactcggtacactagcttaagactatgcaaagagcaaggtttttactaagcctccaaagcgtctctccctgtttctatctattttataacctccatccctaacaacccatacataccaacaccaatacataaccttattgcctggaaatgatgaaaaattttgggactaaagaggatcttgctggc

SEQ ID NO: 42764 - DNA, 754 bp, Macaca Mulatta
aactattataactgtagaccaagatttaggggaattggaactaaacgatgaatcaagtgattcagatgaggaaatgactgcagtggcctaattttcttcacttgaattgaaaataaataatttgagagcttcaaattatattcattgattatggtacctaattgtcaagatacaagattttgatactgacattctcttatataatgagagtttcatttgcagtttcaaaaatggtgttacgatatttattttaaaatgaagactgcttttcatttacattaagttgttaaaatagatagatgtgatctgcagaagttgtttaatctttttcatctgaatttcgggccgggagggagcaatataactaaggacaaaaaatgttttgtttttcttgtgtatttatgaccacctacttttatgttttgtgaaatggacagtagcctgtttcctaaaagattcctgtgggtactttttgagttgtgataatagcaaaattgcctttcagtaataatatcacactaatgcttcttttaaacattaaacctattttccttttttacaaaataagggaaaatgtggtaagaagtttgtatacactgccggattatagattattatttatcttttgaaccagagttaaatggtaaaagaaaaaaaaaatcagtaatgattgctgtgttgatctcccacaattaatttatcttttgacaaaggggataaagagtttcagtttacctccttttaattgtatatt

SEQ ID NO: 42765 - DNA, 652 bp, Macaca Mulatta
  misc_feature (1)...(652): n = A,T,C or G
gggtatagcaatggttatgtcatccacattccgaaaccaagagccccatcatacagtcccatcaatgttgcataaaagacctagattttctgtataaagctattgcttagacatccttcagtaaacgcccccagaatgtgtcaacaacctaggacaaagccgtagagagatgacaaaaatcaggttcctgctgtgcccaagttcccaccgtagtgaggcagatttatacttgggtgactctaattcagttacacagacagtaacaaagcatttagaaaatatacaggaggacatcatcaacacatttgaccaatgtttcttgagtacatcctgtgggcaggcactgaggctaatcactggctaatcacagcattaagtaaatggggaaaacatggcccatatccctcatgaaagctttatgggccgaaatttctggaccccaaaaggaaaggggtaaatgggggnnnnnnnnnnnnnnnnnnnnnnntttaagccttggggaaaacccttaaaaaagttcccttttgaaaaaaatccacccaaacccaatgggggaaagtacccccccggcnnnnnnnnnnnnnnnnnnnnnnnnnnnnnnnnnnnnnnnnnnnnnnnnnnnnnnnnnnnnnnnnnnnnnnnnnnnnnnnnn

SEQ ID NO: 42766 - DNA, 208 bp, Macaca Mulatta
  misc_feature (1)...(208): n = A,T,C or G
caggaccagcccgtcagcagacatgcagncagtcagggttgctgagcacaactttccttataagaagcctccggtggccactcggagacagaggaaggccaaggnaggcactcaagcgcagtttcaagtctcaggccgtgggtgactctgtgcccctcatctggtcgcagctggagcatgctgacgtcgggaagaaacctgcagaaaa

SEQ ID NO: 42767 - DNA, 573 bp, Macaca Mulatta
  misc_feature (1)...(573): n = A,T,C or G
cggcatcaagaagaaggagcactcgaggccgaggcgcaggccgccatggaggccaactcccatgggagcctgacgcggcccaagaaggccatcccgccgggttgtggggacgaggtcgaggaggaggacgagagcatcctggacaccgtcatcaagtacctgcccgggccgctgcaggacatgctcaagaagnnnnnnnnnnnnnnnnnnnnnnnnnnnnnnnnnnnnnnnnnnnnnnnnnagaccctccgcggaggcccccaagggacgagcagagtgcagcccctacgccgatataagccatagccccaggcccgccctgcctgcgcccgccgcctctctcacccgaggggcgtgcgcccccaggaccccccagtccgcccggtgctcctctgcccgcgggtggctggagccccatcgcctgggacgccccttcctcttgccgtttaccgcccacccagcagcgcccgaggccagggccgccggaagggcagccccgcgaccacccctgtgcactcattagcggcggtgggcgcctgtcgggcccgcactcaggagcacagccatagcaga

SEQ ID NO: 42768 - DNA, 773 bp, Macaca Mulatta
  misc_feature (1)...(773): n = A,T,C or G
ggcgcgtnnnnnnnnnnnnnnnnnnnnnnnnnnnnnnnnnnctgaaatgggcggatcacgaggtcaggagatggagaccatcctggctaacacgnnnnnnnnnnnnnngtnnnnnnnnnnnnnnnnnnnnnnnnnaactagccgggcgaggtggcgggcannnnnnnnnnnnnnnnnnggggaggctgaagcaggagaatggcataaacccgggatgcagaannnnnnnnnnnnnnnnnnncgnnnnnnnnnnnnnnnnnnnnnnnnnnnnnnnnnnnnnnnnnnnnnnnnnnnnnnnnnnnnnnnnnnnnnnnnnnnngagtcaattctctatagaactcactaaaaagaaatgtgatgaaattctcatcagtaacaacttctgtatagcacttcacagcttaagaactatatccacattactttgctatgattatgttttatagagaattaaactatcacacaaaggactattttccaggttttattagtgtatgtgaaaactgtttcatgaaaattaattgaaaatttcaaaagagttaatagaatttgcaaaattagatcttggtattacaacggttttgactttgagaatgacggaaataaatataaaagccttgacacacaaactcttaaagcataaaaatacggatagactacttacagcccattgtttggccttgtcaactttaaccaatactgtaacctaaaggatcctactgtgaatgttggttggctaatccttcatccatcctaacaactgttttaaaaac

SEQ ID NO: 42769 - DNA, 1106 bp, Macaca Mulatta
  misc_feature (1)...(1106): n = A,T,C or G
tcccccaggctttgccccttgaccgccacctggcactggctgcctaccagatccattncancntgngacccagctttgctggcccagcagtgctggattgnnnnnnctggtgtccactctgggctgggaactggggccgccgccgggcctatcaggcagcctcttgggcttgggcacagcaggtattacaagacctggaccctcaggagcnnnnnnnnnnnnnnnnnnnnnnnnnnnnnnnnnnnnnnnnncactgatggaggatacgctgcggatgggccaggcactgcggccccatggactctggggcttctatcgctacccagcctgcggcaatggctggcatagtatgnnnnnnnnnnnnnnnnnnnnnnnnnnnnnnnnnnnnnnnnnnnnnnnnnnnnnnnnnnnnnnnnnnnnnnnnnnnnnnnnnnnnnnnnnnnnnnnnnnnnnnncccacccaggctgccgcctgcccaccaccaggcctttgtccgacatcgcctggaggaggccttccgtgtggcccttgttgggcaccgacatcccctgcctgtcctggcctatgtccgcctcacacaccggagatctgggaggttcctgtcccagnnnnnnnnnnnnnnnnnnnnnnnnnnnnnnnnnnnnnnnnnnnnnnnnnnnnnnnnnnnnnnnnnnnnnnnnnnnnnnnnnnnnnnnnnnnnnnnnnnnnnnnnnnnnnnnnnnnnnnnnnnnnnnnnnnnnnnnnnnnnnnnnnnnnnnnnnnnnnnnnnnnnnnnnnnnnnnnnnnnnnnnnnnnnnnnnnnnnnnnnnnnnnncccggcgagatccagaacagatggaagcctttctacacctgtggccagacggcagccttggagattggaagtccttcagctgccactgttactgtggctgggctggccccacctgccaggagcccaggcttgggcctaaagaagcaatataaagccagggcccctgccactgcctcttcttttccctgctgccacttttccagttctgtagctactctgtcccactcttgctctattcaggttacagtcaaccctcccaagcacacaccccgcttcccttggaatccctga

SEQ ID NO: 42770 - DNA, 776 bp, Macaca Mulatta
  misc_feature (1)...(776): n = A,T,C or G
gggtaacttcatgctattaagggttctgtagtatatagcaatcatttatggaaagttttcttaagtaaattgttaataaaaataattatattatcaaaatttgaaaatgagttacctttttgataaatctgagctaatttaagattatcttttaaaaatgtcactcatgatcagttgcattctattaaactttcagggatgggacagaaaggtatgcagcaagacatgccaaaatcaaaccttatgctcttggagattattctgatattagcttgtaagatggcatcaagaggagaaaccaaaggtgtagaggcaggcttagtagttattgtaatgtctgtggtaagcaatgaggagagcctaaattgagtaatgactagtcatgaaaaggtgaagatgacgatganaatacaggaaatggaaatgaattttaaaccaatagaaatttcttactttttggntangcttnaaaaacaactaggccangcacggtggcttgtgcctgtgatcctagcactttgggaggccacgggcgggtggattcactgaagtcaagaattccagaccagcctgggccaacgtggtggaaaccctggtctctcctaaaaaacgatgnnnnnnnnnnnnnnnnnnnnnnnnnnnnnnnnnnnnnnnnnnnnnnnnnnnnnnnnnnnnnnnnnnnnnnnnnnnnnnnnnnnnnnnnnnnnnnnnnnnnnnnnnnnnnnnnnnnnnnnnnnnnnnnnnnnnnnnnnnnnnnnnnnnnnnnnnnnnnnnnn

SEQ ID NO: 42771 - DNA, 195 bp, Macaca Mulatta
gcttcatggcctaaatatcaactacaactgtgagatttgtggaaactacagcgaccgagggcccaaagccttccagcgacactttgctaaatggcgtcatgctcatggtatgaggtgtttgggcaacccaaacactgctcactttgctaatgtgacacagattgaagatgctgtctccttgtgggccaaactgaa

SEQ ID NO: 42772 - DNA, 174 bp, Macaca Mulatta
tgttacttttattataagaaaacaataatctttaaaaaaatcattactcgtatatcataccaaatacatgctatccagttaaacttccctttttcctgctgttatcttgtttcgccgaagaaaatccaaatagcactttataaatcacagtgctctcgtttaaggtcaagctgt

SEQ ID NO: 42773 - DNA, 930 bp, Macaca Mulatta
ggtgcttgaaatctttgtggtagtttccttagtttttgtaacctggggcaatatgttccagagaacagggatatttgtctggtccagtgaccttggtgatcatagtcataattgaaagatgcctaaggcatgcttaaatcagcatcgtcaactgatttgttgttgttgtgttattttcacttcttggatctatgtagtagttgtaataacaaatatttaaattagctatttttttgatgccattaaaaaaaatcatactctggcctttttttccccttaccattgtttcccagatcttttaaaaattcatcccatatccagaaagtactaattataaagattgctgaccaagcaaagttttgcatcaaaatgtcacctcattgctctgaccaaagactgactgttgtggttttaactcctctctgtgaagcattttgcattttccccaagctcctttctgaaagaagacccagtgcagagcggcctttactttctgttgcctactgttgaatagactacttagagaaaatgggagttacagtgtgaacagaatggattaggatgacgagtttgatgggcatttccagtactgtatctaagaaaaaaaaatagcacagctaggagcctttgacattgtctggtgttttacatggtctgttcatcaaagttccccttttcagtttgtaagaatgttcatctaacagaagaaaatgctgtaaatatttgtaacacattttttttaacaaggcccaaaacgaaaacaaagttttgggaacagtgaacttcacagtggttttattttaacatcaatggctggatatttgggaacaccagtccaccttattgtacacacatgtgcgtgcaacaagacctggatgtagggacatgtcaaggcgcgaaaaaattacaccttctcacaaaacaaccggg

SEQ ID NO: 42774 - DNA, 960 bp, Macaca Mulatta
ggcagcttcgtttggagaagggagaattcttgaagttctgaaagggaaaccaccccgagtccctgctccctcattcattaattccgtcactcagtgggtgttctgacgtcgtaggggtgagtgggtgcgcggagataccatgaggaagcgccaagtttctctccgaggctttggagggtctgttgcaaagatgagatcctcaagaacaaaggtaagtctgaggagggggaagttgggttcagaacatacatcgaaaccttagagatggtcctgttacaggaaaggggtccccatctaaaccccaagagagggttcttgaatcttacacaaaaaataattcagggtgagtctgcagtgcaaagcgacagccagcttatttagacagtaaaagccactccctatagtgggacctccctgaaccctaaaggtgggaaagccccccccccctagggtacaatggcctgctgtagcgtggcgttacacgtcgcccccttccccctagaagccttgtcgattaatgcggaccgaccccctttctttcagctcgccgagagctggtcggggccgcgagccgcagtgagtgaggcgcggtcggcgggggcgggagttcgtgggggcgctgggcgcctgccgcggggctgtcccgggaagcgatgccggcccgttacctcccgggtccgatccttcacttaccgaccctgggacgtcttcgctccttaccgcaaatacccccccgcgctttaatctgtgtgtctctccgcgtctggggccggtggcacacgacctcccagatgtgtcttgtcgggccatcggcggctctggcttctgccctgcccgcgaagttatcgcgcctaggtcacgcaccgagcgcggcatagctggcatcgtgtctcgccctgatgccgcctctacacccccgtgtcttatatagtagggaaccgctcccgctgctctgttgtg

SEQ ID NO: 42775 - DNA, 179 bp, Macaca Mulatta
atggcttccccgtctagacagcccccgccaggggggtcaggactgcttcacgggagccgggctcgttcatatggaagcctggtgcaatcggcctgctccccagtgagggaaagacgcctggagcatcatttggagcccggagacaccctggctggactagcactcaaatatggggtgac

SEQ ID NO: 42776 - DNA, 682 bp, Macaca Mulatta
caggatccagtggagatattgtcatgatccagactccactatccctgcccgtcacccctggagagccggcctccatctcctgcaggtctaatcagaacctcctgcatagtgatggaaacacttatttgcattggtacctgcagaagccaggccagtctccacagctcctgatttatgggggttccaaccgttttgctggagtcccagataggttcagtggcagtgggtcaggcactgatttcacactgaaaatcagccaggtggaggctgaggatgttggggtttattaatgcacgcaaggtatacagtttcctcccacagtggtacaaccctgaacagaaacctcccttcttgctgtggttcagctgcccaaatgtgttgtttatctggaaagcagacaccgtagattatcttgggagagtaaagaggaagattatggagaactcagggtaatacattacagctgagggctcttgaccatcaatatctcggttacatctcaggtatcacaattttagtccccatcagttgcaagagtcttggcctggcagaatttgcaggagaatggaggaaggtcaagtgccctctgaacaaccagtcatgttgcaagggaaagctgaatcaaagctcatcgtaatcctctctgccttgcctacgttcaattcatcaacaaaattcattc

SEQ ID NO: 42777 - DNA, 375 bp, Macaca Mulatta
  misc_feature (1)...(375): n = A,T,C or G
gtgttgttgttgcggagtgcaagtgtgtgtgtcaatgaaatcaggctcttacgtagatgtttgcnnnnnnnnnnnnnnnnnngatttagcacatgactttggaaagtggacgtggatttataggagggatgaagcagtgaattgttcatctcagtttgaaagctcatttttaggagtgtctgtgtagccaaagtataattattaagaaatacacttttttcctcttcaggcttgtatcagttcgttaggaaggttgaatactttaattaggattaaggagcagtgatttactattaacaatttaataaatatgtttaaaactttgtcccaaagagcttccnnnnnnnnnnnnnnnnnnnnnnnnnnnnnnnngtc

SEQ ID NO: 42778 - DNA, 1527 bp, Macaca Mulatta
  misc_feature (1)...(1527): n = A,T,C or G
caggctggctgctggctctacaaggttctgtgctggcatcctgagcactgccaggcacttgaccattgagcagaagatggcagactactcaaacaaactctaccatcagttagagcaagaaacagggatccaaacaggtnacaggttacacaaggacaggctcaatctttctggcccaaactcaggaccgactgatctccctgaagcgcatcaactcaaggctgaannnntaggtatcccttctgagatcatctcccccaagaaagtggccgaacttcaccatctcctcaacgtgcacgacctggtgggggccatgcatgttcccgaggatgcagtggtgtcctctgctgacgtggctcttgccctggcaagtgcagcctcccaaaatggtgnnnnnnnnnnnnnnnnnnnnnnnnnnnnnnnnnnnnnnnnnnnnnnnnnnnnnnnnnnnnnnnnnnnnnnnnnnnnnnnnnnnnnnnnnnnnnnnnnnnnnnnnnnnnnnnnnnnnnnnnnnnnnnnnnnnnnnnnnnnnnnnnnnnnnnnnnnnnnnnnnnnnnnnnnnnnnnnnnnnnnnnnnnnnnnnnnnnnnnnnnnnnnnnnnnnnnnnnnnnnnnnnnnnnnnnnnnnnnnnnnnnnnnnnnnnnnnnnnnnnnnnnnnnnnnnnnnnnnnnnnnnnnnnnnnnnnnnnnnnnnnnnnnnnnnnnnnnnnnnnnnnnnnnnnnnnnnnnnnnnnnnnnnnnnnnnnnnnnnnnnnnnnnnnnnnnnnnnnnnnnnnnnnnnnnnnnnnnnnnnnnnnnnnnnnnnnnnnnnnnnnnnnnnnnnnnnnnnnnnnnnnnnnnnnnnnnnnnnnnnnnnnnnnnnnnnnnnnnnnnnnnnnnnnnnnnnnnnnnnnnnnnnnnnnnnnnnnnnnnnnnnnnnnnnnnnnnnnnnnnnnnnnnnnnnnnnnnnnnnnnnnnnnnnnnnnnnnnnnnnnnnnnnnnnnnnnnnnnnnnnnnnnnnnnnnnnnnnnnnnnnnnnnnnnnnnnnnnnnnnnnnnnnnnnnnnnnnnnnnnnnnnnnnnnnnnnnnnnnnnnnnnnnnnnnnnnnnnntttgatgtatgatctgaaggttccccgctgggacttccagaccggtaggcagttacgcacctctcctctctatgaccggctggatgcacagggagccaggtggatggagaaacacggatttgagaggccaaagtactttgttccccctgacaaggnnnnnnnnnnnnnnnnnnnnnnnnnnnnnnnnnnnnnnnnnnnnnnnnnnnnnnnnnnnnnnnnnnnnnnnnnnnnnnnnnnnnnnnnnnnnnnnnnnnnnnnnnnnnnnnnnnnnnnnnnnnnnnnnnnnnnnnnccactggggatcaggcattagaagttctacagtacctcttttccaatgacctggatgtgcctgtgggccacattgtgcataccggcatgctcaacgagggtggagggtatgaaaatgactgcagcatagcacgactgaacaagcgca

SEQ ID NO: 42779 - DNA, 1511 bp, Macaca Mulatta
  misc_feature (1)...(1511): n = A,T,C or G
gttatgtgttctcatattgctgaagacctttggccagagcgagacattaaagattttttccaaaaagtcatactgaggagatatgataaatgtggacgtgataatttacaattaannnnnnnnnnnnnnnnnnnnnnnnnnnnnnnnnnnnnnnnnnnnnnnnnnnnnnnnnnnnnnnnnnnnnnnnnnnnnnnnnnnnnnnnnnnnnnnnnnnnnnnnnnnnnnnnnnnnnnnnnnnnnnnnnnnnnnnnnnnnnnnnnnnnnnnnnnnnnnnnnnnnnnnnnnnnnnnnnnnnnnnnnnnnnnnnnnnnnnnnnnnnnnnnnnnnnnnnnnnnnnnnnnnnnnnnnnnnnnnnnnnnnnnnnnnnnnnnnnnnnnnnnnnnnnnnnnnnnnnnnnnnnnnnnnnnnnnnnnnnnnnnnnnnnnnnnnnnnnnnnnnnnnnnnnnnnnnnnnnnnnnnnnnnnnnnnnnnnnnnnnnnnnnnnnnnnnnnnnnnnngagagaaaccctacacatgtgaacagtgtggcaaaacttttaaccagtcttcataccttattccacataagataattcatattagagagaaaccctacaagtgtgatgagtgtggcaaaacctttaaccggtcttcacaccttactcaacataagataattcatactggagagaaaccctacaaatgtgaagaatgtggtaaaccttttaatcgtttatcaaaccttactgtacataagagaattcatgctcaagaaccccaacgaagtgaagaatgtggcaaagcttgtaaccattcctcgatccttattaaacataagggaattcatagtagagaaaccatacaaatgtgaagaatgtnnnnnnnnnnnnnnnnnnnnnnnnnnnnnnnnnnnnnnnnnnnnnnnnnnnnnnnnnnnnnnnnnnnnnnnnnnnnnnnnnnnnnnnnnnnnnnnnnnnnnnnnnnnnnnnnnnnnnnnnnnnnnnnnnnnnnnnnnnnnnnnnnnnnnnnnnnnnnnnnnnnnnnnnnnnnnnnnnnnnnnnnnnnnnnnnnnnnnnnnncatgagaactcatatggaagataaagcctagaaataagaagaatgtgacaaagcctttacaagttctcaacacataatttatactagaaagaaatcctaaagtgtgaagaatgtcacaaagcccttaacaagtcctcaattattaacagatataagatatttcatactggagcaaaactctacaatcctgaatgtcacagtgcttttaataacacctcaaacttttctaaacannnnnnnnattatactcttgcaaaactctagaaatacaaagaatgtgaaaaagcttttaaatggttttcacacttgattgcaggtaaaataatttatactggagaaaactccaagtatgaagaatataacttttaaccagtgttcacaacttattgcacaggaaagcatttatagttgagaaatggtgtacaaatataaagaatgtgggaaagtcattaa

SEQ ID NO: 42780 - DNA, 1082 bp, Macaca Mulatta
  misc_feature (1)...(1082): n = A,T,C or G
gggccaccctggacacctcttttcaaataaatgtgagtttgcccatgttccttttaggagtggtgtcggaaatgaagtctactttgaatgtggtctggtcaacactttagtacagctgtcatctccattaaataggatactctacaaatggtgtctctattaaaaacagattagcatttttgtgcagctggttcatattcttggtccaaaactatgacctctaggtcatttaaatagaagctgttttaaaggcagtgcaccctcctaattttgcacttggagaattgacatttctaatctaaatatacagagacttatatggcttgttcagtttccttttgttaattttagcccaatattgaagcgcaatatttcttccacctggggggatggcctcagagggaatgtgagaacttatcaaaaaaacaaacatctcctaaagaatataaatacactccatacgttataccaacccaagtcgaaaaaagaaggcgaagattcaattcccacacaaaggggtggaccgaaatggattggggtcattatacaacgacagggctctacagacctctttgggatactatcatatattggagaagaaaagagggggatttggggcaaagcaatataataaaaatagggccatcagagagaaagggtattcgataaaagataatgacaaaataaaagtctcaacacaattcgggccccttgtaggaggaaaaattagtccctcacacaaaaaaaaaacacgtgggatgaattactctatttnnnnnnnnnnnnnnnnnnnnnnnnnnnnnaatcagcactcgagaggaaaaaagcaaagaagacgtttcctgctatctattacctgaggccagggatagctgcataggatcgaatgcnaagcaggcaccaccaactgagtccaaatatgaaaatctaaataaataaacccacccctacacgaagcgcaaacatcaacaacgacacttgtcagatggtagcgaaacccaccgccgataggccctggggggcatgaaacacacnctgcatatncccttgctttgaggtggcttgggatagagcagtacggg

SEQ ID NO: 42781 - DNA, 801 bp, Macaca Mulatta
  misc_feature (1)...(801): n = A,T,C or G
gggcattttataattttcaaatttagtcggcccacggnngtttntatatttctagtaatatttttaatgtttgcagtgtctattttgatattcttctctctgatcttggtagtatccaaatgaaaagtggaatgaggtattggggagacctttcctaacaggttttgaactcagtctatacacgagcttttcctcattgaaattcaaatccatttcgatcaaatttctttttataagaaaacatttattttatagaagttatttctttataatggattatgcctcatcttatttgtcactgttgcctagaagtaatcttatagtactattgggatctttgtttttttatgcctgtatttgtttgctatttctttgcactttctttttatttccagctttctgagtctttatttttacatctgtctcttgcataaaacatatagttgagttttttaatttgtttaaaaatatgatctgaaggtctttttcttaattggtaagtttaccattacatttattgctattacagatatgtttggtcttaattctgtcactgtgtttatataatgtttttaatattttggtcattaatttttgggtatttcaatttttgttcctgtagtctgggttttttcatttaaatatatacttctggtaaatttttaaggatttataacctggattttaattcctagtgggtggaactantggtcaaattctaaattaggggcatatggtggccttccaattttctcccattgtttttgggtatttaaaaagggaaaaaacgactgggccctt

SEQ ID NO: 42782 - DNA, 763 bp, Macaca Mulatta
  misc_feature (1)...(763): n = A,T,C or G
gatggtcgtgtgcagcagaagcaaaagtgcaatagaaatctcacattcctctagaaaagagagagcaaactttatagaaaactacctttaggttatctaccaccttgcatagagcaaattctaaaaagacgtagtgctcattgatgcagcaagtggtttttgagtaccagggtttgggattacagtggggagcaaaggaggcagatgtcccctgcccaggcagcttcatgtcagagagtaagagactctacagcctgcacgcaagagaattgagctttcaggccctttcacaatttcccctggccttgggtgcttaaaacctagctgtaaaatagtcaattgttacagatacgggagtactggaaaataggatcatgttctctgagctggaaggtttgctggagcagggataatcccgtaaggcaatgtctattctgttccccaggtcaggcgtaattgaaacactcctgtgttacattctcgatgccaatgttaggccagggcatggttctgcttcatgagaaagaaattgaccaaaatggagcctgtttcaaaatcaattatagatattttatataatgaagagcanagtactttaaccagaattttattggtccttttggggtgatcagttatgaaagaagggaaagcttttgggcagattctttggaaatggcagctttttttgggaaatcttctggctaaagaaaaaattcagggtaacaagaatttcttataaacccctccggttttggccatttgt

SEQ ID NO: 42783 - DNA, 185 bp, Macaca Mulatta
aggggcaataaccatggctttgctagaaaacttggtagcaggaaatgtgtacattgtcaagatatctgcatccaatgaggtgggagaaggacccttttcaaattctgtggagctggcagtacttccaaaggaaacctctgaatcaaatcagaggcccaagcgtttagattctgctgatgccaaag

SEQ ID NO: 42784 - DNA, 1434 bp, Macaca Mulatta
ctctctcctcttgcctacgatgactctcctcgtaggcctcttggatctaatatcgtggggtgaggggagcaggcccggggagggtggttaccgctgaggagctgcagtcgctgtcaagatgatagaggtactgacaacaactgactctcagaaactgctacaccagctgaatgccctgttggaacaggagtctagatgtcagccaaaggtctgtggcttgagactaattgagtctgcacatgataatggcctcagaatgactgcaagactaagggactttgaagtaaaagatcttcttagtctaactcagttctttggcttcgacacagagacattttctctagctgtgaatttactggacagattcctgtctaaaatgaaggtacagcccaagcaccttgggtgtgttggactgagctgcttctatctggctgtaaaatcaatagcagaggcaaggaatgtcccatttggcaactgacttgatccgaactaagtcaatataggtttacggtttcagacttgatgagaatggaaaagattgtattggagaaggtgtgttggaaagtcaaagctactactgcttttcaatttctgcaactgtattattcactccttcaagagaacttgccacttgaaaggggaaatagcattaattttgaaagactagaagctcaacttaaggcatgtcattgcaggatcatattttctaaagcaaagccttctgtgttagcattgtctatcattgcattagagatccaagcacagaagtgtatagagttaacagaaggagtagaatgtcttcagaaacattccaagataaatggcagagatttgaccttctggcaagagcttgtatccaagtgtttaactgaatattcatcaaacaagtgttccaaaccaaatgttcagaagttgaaatggattgtttctgggcgtactgcacggcaactgaagcatagttactacagaataactcaccttccaacaattcctgaaatggtcccttaactggattattacagcaccaaaaaacttcgctgaagcctttctccacaaccttgttctatggattccataatgttacaatggatttaagctatgaagcctcaaaacatcacaagataagcatgatggtctcagacttgggaaaactgcctaatattacgctgtagtagaattatgtttagctttgaattcatctgtgaagcattcaaatcaaagctaaaaacctaaatgtgaaatgctaatgacaagcctgagaaggtaaactgtgaatcttcatttctatcattgatctaactttagatattggatcaatatatttaggtagtattgaaaatggtattggaggagtcacactaatactatcaactgtcagtcttcccacagcttcaatcactctcattattctaatccttctcctacttaatttac

SEQ ID NO: 42785 - DNA, 709 bp, Macaca Mulatta
  misc_feature (1)...(709): n = A,T,C or G
ggatagccatctttccacctcggattttatctactcgaccaggacagaaaagtccaattattatacatgatgacaattcctctgataaagatagagaagatagcatcacttacactactgtggactggagagattttatgtgcaatacatggcatctagaacctactcttanggtaaatttctggactggaagaaagattgatccagtaggtgttgattatattcttcaaaaattgggctttcatcatgctaggactactattcctaaatggcttcaaggagagtcatggatccactgaacaagttctggtcattcttatcaaaaaactcggttaccgcctnccggattgaaagggaaagaaaagggcaagaccaagaaaaacccttaaaagtatttttatctttgaaccaaaggattggggcccgttaaagtttttttaccccgggaagggttttttttnnnnnnnnnnnnnnnnnnnnnnnnnnnnnnnnnnnnnnnnnnnnaaattttggggggcnnnnnnnnnnnnnnnnnnnnnngaaagtttaacaccgtttttttttaaaggccccccacaattttggggggnnnnnnnnnnnnnnnnnnnccccggnnnnnnnnnnnnnnannnnnnnnnnnnnnncacccnnnnnnnnnnnnnnnnnnnnnnnctccnnnnnnnnnnnnnnnnnnnnnnnnnnnnnnnnn

SEQ ID NO: 42786 - DNA, 789 bp, Macaca Mulatta
gggacaacactaacagatcccatactccaacatcatcaggaagaatcaaatatcattggatcatccttgggcagtcctgtttcagaagattcaaaggatgtcgaagatttggtaaactgtcattaggataattcttagaaataggcagttcaagcaaagaagccacactgttaattacaacatcttcaaagaaataggagcaacccccaagaggcttaatttaccaatttaaatagccacagtgcttaagccacacattgttgctgctatgacttcttacctcctttaaatacatcatctgaagttgagttttatgacagtgtgtagttgagtggaggctgggagttttaagcataaatccctatgtttaatgttacatggcaataaggaatttcattcacttcagccacgaagaaaagtttagaatcacgaaagcttaactgctgtggtttaaaatacagtttctctaaagatcagacatggcactgtctcctttcaagtaagcctggttgtagttcagataagtcatttcaacatgagagcttaccagtgatcttctgatcttcaagaagactaagtttgagacttgaccagcatacaagtacagagacctaggaggtggtcttgtggtggttacgtttgattaacccattgctggcagtggggagctgatttaggcagggtaaacaggaaagcattaaaagagttaaaattcactacagggttttttgttacttttaaagggaatatggataagcatagtaacaaaaccccccaaaatctaagccg

SEQ ID NO: 42787 - DNA, 306 bp, Macaca Mulatta
ccactgtctgcgcttcagtttgcagaccagatggcggctctgtgttcctgagatgactcccttggcagcttctgtcgctaccgcctcacagagcccacgctggccagcggccccaggctcagcctgtgctttctgggcagctacctgacactgccctggctgctgctggctgtcttcgtggcttctctgttctgcgtcgggcccctcacctgtgcactgctgtttactctgggctatgtcctctaatcctcagccaggacgctgctgaccaagctggggaagctgaacgagccctgatggcattgg

SEQ ID NO: 42788 - DNA, 317 bp, Macaca Mulatta
gcacctcacacccagagacacactcacacctggaacccaatcacacaggtgaaacacacctcacacccagccgacactaaaaccagacccggggcgccagagctgaccacaggggcaggcagggctctcgtgagagcaaagttctcacctgggacaggcacagctcacacttgagacacagctcacacctgggatacagctcacacctggaacaggcacagctcacacccaggacacacagctcacacccaggtcacagctcatacccgggacaggcacagctcacacccgggacacatagctcacacctggaacac

SEQ ID NO: 42789 - DNA, 747 bp, Macaca Mulatta
  misc_feature (1)...(747): n = A,T,C or G
ggggactgctacgaggaaaaagcagatgtgagaactcaagattcagggctgctcttctaggaaacaagtctgccataatctccagctgtgttggaatctgttaactaatgaattggtctctgtgcaaatcctgagtgctaaagtttccaacaagactgatgctagcttgtgtcaccatgaagatgctacatcatgccaagtgttgccagcgcctaacaatttttggttctgtgagggcattgcataaagataatagaagagcaacccctcagaatttttccaactatgaatccatgaaacaggacttcaaactggagattccagagtatttcaactttgctaaagatgtcctggaccaatggactaatatggaaaaggctggaaagaaaccttcaaatccagccttctggtggatcaatggaaaaggagaagaggtgcgatggagttttgaggaactgggatctctgtccagaanatttgccaatatactttcagaagcctgttccctacaaagaggagatcgggtaattctgattctacccagggtcccagagtggtggcttgcnaatgtggcctgtctgcgaacagggacagttttaattccaggaaacactcagctgacccagaaagacattctctacagactacagtcttcaaaagcaaactgcatcatcacccaatgatgttttagcccccagcagttaaatgctatttgcaccaaaatggtgaaaatcttgcactccaaac

SEQ ID NO: 42790 - DNA, 170 bp, Macaca Mulatta
tgatctttatgagtacaagtatcgtactgatgtagatttcatatttcaagaaacttgttattctgttcattgtgccattttggcagcaagatgtccattttttaaaacgctgctttcttcctcacctgagtatggggcagagataataatggacatcaatacagctggta

SEQ ID NO: 42791 - DNA, 807 bp, Macaca Mulatta
gggggaattgactaatgcatggccagcttggtaggcgttttacagctcccactcagcaagccttggcaagttcttggaagaagaagggaaaatgaggaggaggggatgtcctgttggtttctgaggtactgggtttcttgctgtgtgaactttcgatacacacatcggaaaacctgaagagtctctgtgcttttcctggaattatataaccaactacagtttcagaatacatcaaagcaaggtcttatcaaataccttatctccgggtttgtcttccacataaaatatgagtcacaatcaggatcaaacgattgaagtaaactttgtccacactgcagtttgctcctgcaggactgtgcttcatatctcctctaagtccaaatccaactaggtctcttgggttaggccatggacagtcctcgagtttactttggaggtcaccccacagcacctgtgtacctccagaaagaccgtggaaaaagagaatcacgagtggaaactgggatcatcgtcatccccttggaggaaaccatgggcccagataaaatttcagcatctggtgctttaaaggactggtaccaggaaaacgactagcatcctctactacaatgaaaaaatactgcccccgggaggaatggattctaacctcttcattttcttgagaaaaagatgtgaaactggggaacaaaaaaataactgaatttcccccaaggggggcaaattgaaaagcacccagccctccttttgggagaaaaatattccaaaaaagaaaaggggacatgaatccaagtcaacacgaactttccc

SEQ ID NO: 42792 - DNA, 789 bp, Macaca Mulatta
gcaggaaagaggggctttttccaatatatcgcaaaaaggggtatgaaatatgttcagggaaacaagctctcactaattccgtgtaattagaagaggccatttgtaaatgttagaactgtgaaacttgtcttcctattccacaccaaattctgaaaggggaattcttcttttccggcttgccctgccagtccaggtggggggccttcaggggtgggggcctatgaagccgtggttaatatttcaccaaggttactaggattgaaaattacagtgaaactaaatgactcaccgataggaaaaaacattgcatttgtttatcggcagtgacagcatttgaatttaaagagaagctggtttaagaagctgcccattatgattctcctttaggaatctgaatattttaaaaatttaatatttaagtattgccgatgaagtgttcaaaaccaatttaagttggtgaaaatgtgttctcaactgaattcagaagcactaccagcttgccatcttacactggtttgacttccatccacttttagagagctcgaaaaattatcctattaacttaaatcgaacacactctaatcttccagcagcctggattgttttaacctgccattaacatctctcaaatgctagcaaatctttggactccaacactttctaaatactcaaaggaaccaagagctggggcaagcaagttcctctcgaaacagtcacttttctcccttctgctgctgtcatggtgctatgaagtatgctccaatggacgttttcttgtaactatcagcc

SEQ ID NO: 42793 - DNA, 343 bp, Macaca Mulatta
ccagcacaatcctagcaaacagagtaaatgctttggcaagcatgcctaagttctatgtacaggtccttcatcttatgaataaaatgaatttgcccacaccttttagaccaattactgtgcgacctcccatgtatgaagaccatatgccattgcatgcacctcttccacccacatctcctcagccacctgaggaacctccttggccagacgatgatgaggaattatctagtgaagaattagaatatgaaagcagtgatgatgaggactgacagagaatgaacaaaccaatggaactagcaaatcttcagctcaaaagacccaaaacaataaagcagcaccatgt

SEQ ID NO: 42794 - DNA, 648 bp, Macaca Mulatta
  misc_feature (1)...(648): n = A,T,C or G
gtatagtagtgtagtggccatcactttagatatggaagagtagtttagtctagcgaagagagagggaaaagtaagtttcccaggataatnnnnnnnnnnnnnnnnnnncaaagccttgtcaatgaggaatggggaaggaggttttgctgccaggttttactaagtacatttcaataaaccctgctgttgtagtcctcttttattaatgctttcctgacatttaccctgttagttgaggctcttcattgttcctgcactgagctgtagaattctcttttgttatagatttgcaaacaagactttcccagcagactgaaggtgagttgaagtgtttctattttttatttttgtctttgaaatagaattaaatgtagtaagacagttttctgtatttattgtcatatgtttataccagtaatttggactgaattttgacacaatggcacatagtggtatattcatagtaatctgtctatatttcagaagacctaacccaaattaatggnnnnnnnnnnnnnnnnnnataacattttttttcaatttgctttagtttgcttaaaattttcagctttgtacaggttttatgcctgtgttctgagtgttgataagttgcatatagaagtcaggaaataaagtatttcttgttac

SEQ ID NO: 42795 - DNA, 563 bp, Macaca Mulatta
  misc_feature (1)...(563): n = A,T,C or G
tggtagcagaagggtcttacaacagcgaaaagggctacagttcttagcacggagagagagcgaggagttgtcaggaaagctgcaggttactttgagacagtcgtcccaaatgcattagaggaactgtaaaaatctgccacagaaggaacgatgatccatagtcagaaaagttactgcagcttaaacaggaaacccttcttgttcaggactgtcatagccacagtttgcaaaaagtgcagctattgattaatgcaatgtagtgtccattagatgtacattcctgaggtcttttatctgttgtagctttgnnnnnnnnnnnnnnnnnncattacatcaggtatattgccctgtcaattgtggtagtggtaccaggaataacacctttcggaatttttaacttttcaatatttgtgtagttcagtttttctacattttagtacagaaactttaacaaaatgcacgttttgaaggtgtttccttgtgagttaaccagtacagaagatcattgttacttacctatttagtatgcacatttgctaaagttaactgttaagaaacacctg

SEQ ID NO: 42796 - DNA, 647 bp, Macaca Mulatta
gtagaattaataaccctccttgggatgagtgttactgttctcacgtggcttcagatgctatcagcctcaaagaaatgatctcaacagagaagctcattctctcccaacttctgtggtaaaatccaggagtattttctctggggatctgcccacagggcaaagtccataaaggcaagtcctgtctggaccttgtggttatctgaagcattagccatcaccagcacaacaaaggggacagggctttccaaggtggggctggtcagaaggtaatctttgctaagatgcccacaggcagggaaagcgaaatagcgttgatgagaccaggggagatctaaaaaaaaggcaggtttgtgtcttctagctccaaatatacctgccttttagctcacacactgtcctggagttctcagacctttaagggccctaacacagtgcagtttatacaggggttcaaaagggacagtggcccatttggaagacctttaggatcaatgggaatacattccattgttttgcctcagagtaaagtttctggctcgggggtaattataagttgcaaaaaggatagaggcatatcctaagtcttcctttattccacaaataattacaaccaacctactgtgtgccaggcactattcttggcactg

SEQ ID NO: 42797 - DNA, 789 bp, Macaca Mulatta
gggttgactgagctgttaattagagaaggaaattctatctactcacccgcaaagggcgagtgaacaggaccactagcacagcttctgtggccgggcctcgccttcagggacagtcagagggcacagtctgttctctttgcctcctctccaccatccctagcaaaagcggccccaccccactgctcccttccacatccctcttactccaacactgagtccactgacatgcctcaagcgagggggcccgcctgggttgctctcagaggcctccttctcccacgcctatccagttagatggagctcctgaatggattaccacacttttaaccgcctctaggctcgacataaaaaatttcaaagtaaaaaattcccgtcaaaaatcaagtgggggaaaaaatgagcagtttgagaagaatctattaagtccaagtttggaatgaagatcaaaaaattgtgtccgtgaatactatattgggaaccatgaggtaaatgcccctacaaacgagtttcctttaagtcccaacaagaaaatgtatgcaattctattatttcgaaataaaacctattcagggaaaataaaaacatttgtaaagaaacctccccaacccttttaagccctatgcaaaaaataatgaaagggtttttccggaacatttttccgtaaaaataaatttacgaaaattttgccatagaaaattagttaggggactttttaaaagccttcccccttttgaatttaaaaattttttacaagaggaaaaagttttttagccccaaatctcagttcat

SEQ ID NO: 42798 - DNA, 780 bp, Macaca Mulatta
  misc_feature (1)...(780): n = A,T,C or G
ggggcaaatgttgtgggagggaagttggagagcatatttgaggtagggaaacatgcctactaatttatgctttaaagttaaaattaacatttatgtgtttatgtataaagattttttcaaaattgcatgtgatgacattaattagtatagctcctgtggaaagtgatgcagtaaaccatgtcaagcagtgttcatactctttgagctaatcattctgtatctgagagttcatattaaggtattaaatttaaagaagaaaaatgttaatgtgtgaagacatcattgtggcattaactatgtaatatggaatattacatgctaggaaagataataaagtttatccaacataaacttatgctgaaacttcctctttttggactttaaatctagaaaaatggttgtcacatcgatgagatgttacacacatgtaaataatacaattatgaagactacaattataaaggctgttacttagaactgtagattatataatgaaaaagaacttataattgcatgtacaattaaaatatatatgtatgtatttgagtactagaaggagataagataaaatgaaaacaatgtgaggggattacagtaaattgtttttatcttgttttgacagtaaaatctgngaaacagtgttgctcaaatattagcaaaatttagaagaaacactaaaatttaatatctagctcttgtaactgtggaatataattttctttataataaaacaattttgtaattttgccggtaggcatttggcagaatgttttaaatttc

SEQ ID NO: 42799 - DNA, 401 bp, Macaca Mulatta
gctggtgttgattttcctccctgcagagccaatggtgcacattggtttaagcccagagatcctgcttgagccctggactcatcttgggaagggccatgggaggtcctggctagagttctgcccaaccttgaccaaccccagcaatttttccaaaaaccagtcaagggcattacatttgctcctgggactggcagctgggcctcctgggtgccagtgcatctcaagtgccatattctgtgatcacggatgctggctccccctcaccctatgcaagcaaacacgttctcacctcctctcccgcccctggagctctgagcacaccccaagcacggtgcagggagggactggacagatctgaggaaggccgtaaagtggggagaagaggattcagctcaggggta

SEQ ID NO: 42800 - DNA, 433 bp, Macaca Mulatta
  misc_feature (1)...(433): n = A,T,C or G
ggaaaggagagaccttctggattgatccatgggttatcagggaaagttcgtcaccatcacaatcattattacagctcccgtggattaaacacttctctgcacaaggctcagtggtgcacactttgcatgatgatttctgggttcttattgtgggatgttccccctttgcaggtgtagaatctcaggctcagagagactgaggccacacaggtcatcagtggtccagctgagattaagcaaagggtctggccgggcacggtggctcacgcctataatctcagtnnnnnnnnnnnnnnnnnngggtannnnnnnnnnnnnnnnnnnnnnnnnnnnnnnnnnaccaacatggagaaactctgtctctnccnnnnnnnnnnnnnnnnnnnnnnnnnnnnnnnnnnnnnnnnnnnnnnnnnnnnnnnnnnnnnnnnnc

SEQ ID NO: 42801 - DNA, 1554 bp, Macaca Mulatta
  misc_feature (1)...(1554): n = A,T,C or G
gattttgccaatttccacaagaaattgtccttcaaatggtggagagatgtcgaataaggaaactacagttacttgctcaccagtatatgatttcaagtaaaattgagttctacattagtgaaagcttacctgaatattttgcaccctatcaagcagagcgatttcgaagacttggnnnnnnnnnnnnnnnnnnnnnnnnnnnnnnnnnnnnnnnnnnnnnnnnnnnnnnnnnnnnnnnnnnnnnnnnnnnnnnnnnnnnnnnnnnnnnnnnnnnnnnnnnnnnnnnnnnnnnnnnnnnnnnnnnnnnnnnnnnnnnnnnnnnnnnnnnnnnnnnnnnnnnnnnnnnnnnnnnnnnnnnnnnnnnnnnnnnnnnnnnnnnnnnnnnnnnnnnnnnnnnnnnnnnnnnnnnnnnnnnnnnnnnnnnnnnnnnnnnnnnnnnnnnnnnnnnnnnnnnnnnnnnnnnnnnnnnnnnnnnnnnnnnnnnnnnnnnnnnntgatatgtaccaagatccagaagttgcacagattatacgaaaattagatgaaagaaaacgggaagccgtccaaaaggaatgctatgattatgccaagaaactaaaacaagctattgctgatttgcaaaaggnnnggttggtgagcgccttgggaggtatgaggtggagaaacgctgtgccgtggagaaggaagactatgatctcgccaaggagaagaagcagcagatggagcagtatcgcgctgaggtgtacgagcagctggagctgcacagcctcctggatgccgagctgnnnnnnnnnnnnnnnnnnnnnnnnnnnnnnnnnnnnnnnnnnnnnnnnnnnnnnnnnnnnnnnnnnnnnnnnnnnnnnnnnnnnnnnnnnnnnnnnnnnnnnnnnnnnnnnnnnnnnnnnnnnnnnnnnnnnnnnnnnnnnnnnnnnnnnnnnnnnnnnnnnnnnnnnnnnnnnnnnnnnnnnnnnnnnnnnnnnnnnnnnnnnnnnnnnnnnnnnnnnnnnnnnnnnnnnnnnnnnnnnnnnnnnnnnnnnnnnnnnnnnnnnnnnnnnnnnnnnnnnnnnnnnnnnnnnnnnnnnnnnnnnnnnnnnnnnnnnnnnnnnnnnnnnnnnnnnnnnnnnnnnnnnnnnnnnnnnnnnnnnnnnnnnnnnnnnnnnnnnnnnnnnnnnnnnnnnnnnnnnnnnnnnnnnnnnnnnnnnnnnnnnnnnnnnnnnnnnnnnnnnnnnnnnnnnnnnnnnnnnnnnnnnnnnnnnnnnnnnnnnnnnnnnnnnnnnnnnnnnnnnnnnnnnnnnnnnnnnnnnnnnnnnnnnnnnnnnnnnnnnnnnnnnnnnnnnnnnnnnnnnnnnnnnnnnnnnnnnnnnnnnnnnnnnnnnnnnnnnntttcaggcttctttgaaattgttgaaaatgatcattacacaatatattcctaaacataaactgagtaaacttgaaacagctcactgtgtggagaggaccattcccgttttgctcaccagaactggagattcttctgcccgcctccgtgtgacagctgcaaattttattcag

SEQ ID NO: 42802 - DNA, 712 bp, Macaca Mulatta
ggggaatgatatcagtggagatcaccgggagtcagaaccctctttccagcagtaacagatggtggattagcggctttcagcatgcctcggacccttggaaatggcaagatagtacataaagatcaactctgtgagttttaattcaaggaggaaaatggaaatctactggaatcataaaggacaacccagaacccagggaggagaatgccagaaaacagcccccatgatagcatccagctgacaaagatcacagggaaatacatcttcacagcagataggagcaaaatacgacttgaatagttctattctcatcaagactatttgtaagaaataggcaccggagatcgagctgaagaaaaaagatttacttgaaactccaggatagcgacaatactgatggcaccttatggggtttggtttggaattggaggttgctatggagagctcagcagctgtctagggagtgctctactgctctttcccttaaagtgattcaattactttctatatttccttggttcctgtttcactagtcaaaagaacttccctctgttgcaatttaatctaattcattaaaaagggctaataccggccctatttgtatgtcttcaccaccattcccagtctcctattatcttgtgtgtcaaccactccactcatctctactccatgattccttatctacaaccttgtctcctcctcctcctactcc

SEQ ID NO: 42803 - DNA, 715 bp, Macaca Mulatta
  misc_feature (1)...(715): n = A,T,C or G
gggaaaaagaaaactggcgttagaggatatagaaaaatataagtacaattgttacaaataacgcagatttcaaaaacaaaaaaagtcacaacccaaacaaaccaaaatttaaatgatcagaattggcagcacaaagaaaacgccctctcctgacttgtattgtggcagtctgaacgcccccagaaaattgtgccaaagagtttagaaaaataaatatacaataaaagtaaacacacacatacacacagaacagcaaacttcaggtaactattttggattgcaaacaggataaattaaatgttcaaacaatctgataaaataaccatttggaaactgcttggccttctgttcttttatttgattgactacaatgcggtattggtctcttgctgcacttcaaaaccnnnnnnnnnnnnnnnnnnnnnnnnnnnnnatacacaaacacactaactagaactcttgtgatgaaaatggcacttgaaaaaggttatatttttccactgaagttgaaggttaataaaatggtgtcaaacgtcccctggtcacacactttaatatttttttagaagtgtgatgtatgattaccataaatcagacttaattattttcccttttacaggggaacagggcatcctgaattttagagtctttcagcaataagaaaggatgttnggtgaaagctttgatccctcttttggtttttgcagtttgttat

SEQ ID NO: 42804 - DNA, 869 bp, Macaca Mulatta
  misc_feature (1)...(869): n = A,T,C or G
gggggggaggacataggagggcaattaatacactaggctctcctcaagtaggagagataggatagggtaaccatacatgcaattgcccagggcagtgccagttcacaccagtttaattacagtgtaatatctggatacaggatacaggataaaagtggataataatgcccacttttaatcttaatagagagcctatttttgaataattgaattgattaccctaatcatgatgcacataaagaagttgcttgtgggaaaatatggcaaaaaataaagaaataaacgataggctgattggaaagggagaaatagacctttgtttgaagatgacatgattgtttatgtagaaaactgaaagactnnnnnnnnnnnnnnnnnnnctcctggaactaataagcaattacagcagtgttgtaagagacaaggctaatatatgaaagttcatcacttttctatataccaggaattaacaagtggaatttaaaattaaaaacatccctttactacactcaacaatgatactaattctctaatttgtaactgtagacttatgtagaatgatgatatcgtctgtaataannnnnnnnnnnnnnnnnnnnnnnnnnnnnnnnnnnnnnnnnnnnnnnnnnnnnnnnnnnnnnnnnnnnnnnnnnnnnnnnnnnnnnnnnnnnnnnnnnnnnnnnnnnnnnnnnnnnnnnnnnnnnnnnnnnnnnnnnnnnnnnnnnnnnnnnnnnnnnnnnnnnnnnnnnnnnnnnnnnnnnnnnnnnnnnnnnnnnnnnnnnnnnnnnnnnnnnnnnnnnnnnnnnnnnnnnnnnnnnnnnnnnnnnnnnnnnnnnnnnnnnnnnnnnnnnnnnnnnnnnnnnnnnnnn

SEQ ID NO: 42805 - DNA, 802 bp, Macaca Mulatta
  misc_feature (1)...(802): n = A,T,C or G
ggaacattctccagaaccccaacttcccttcgttattccatcaaatacttactgaacacctactccgtgccaggaattattctatacactgtgtgaacaaaacataaaaatccctgtactcacagatcttataatctggtgaaggagagaccaaacaggtgacagatacataagaaacatatttgaccaggatctaaaagaattagaggtcagggagtgatcctggcccaggaagactgtgtgagcagaggaagtagcaaaggagtatccttgaagctatactttgtctcttgtgtttgaggaatccaaggagaacagtgtgactagagtggaggagagaagtaactgagatcagagaggtagtttggagccagacatgaagaccttgtaggccattataaagacatgaatttctgtgactgagatgagaaaccactggagagttttgagctcaggatcagtcaaatctgacttttatgtttaacaggatcactcttgctgctatagataagtaaattaaagtggggggcaaggactaaattgnggagatcaatcaaatggctattggagtaaatttcagaatatgaagcttgtggatggaacatgtttgcaagggagcatcaagannnnnnnnnnnnnnnnnnnnnacactggagctcaagatgccccattgataccctaacagacatgtccaggaatcagttggggtatacagtttaagaaaacaggggctagtgggagatataaaattaccggaatctttccttggtattaaatcctccgganagttgaattaagaaaa

SEQ ID NO: 42806 - DNA, 682 bp, Macaca Mulatta
  misc_feature (1)...(682): n = A,T,C or G
tttccatcaaacttattatttcagagtaaccatcccaattaacccattcattaatagtcagatatgtaattatttaatatattatggaggtttttaatgctttaaatcataaatgttggtaattgttaatgtattatgtgctaaaaataacaatggtaccacagacgataacattgtgtattctgctttgaaattttcagactacttttacatctgttaactcatcgtatcaatcaataaattaccttatctgaaatggaaattatttgttcaagctgagtacactgatcccctgaatatttccccaaatgccatctactttcaccaaccagaatgtgtattatgttttatttggtttcatgaagaaataagtactttttctttccctctttctcgttggcgtatctttgaattatctatgtaatgttcaatactctgtgcagactgttgatgattaggacctgttcgtttgaaaccaacaaaccaaccaaccaacaaacaaactctgtcctaagaaggctacacaaatttaaaggatgcaccagtttttctcactagtgttagcataggacttttacagacatccaaatttttcatgtaggtgagtcaaagagattgactggagtgactttgttaatgtaaaaaggaccttaaataannnnnnnnnnnnnnnnnnnnnnnn

SEQ ID NO: 42807 - DNA, 2394 bp, Macaca Mulatta
  misc_feature (1)...(2394): n = A,T,C or G
attcctattagcctgtcaaatgtaggctttgtacctctttacggtggagatcagacccagaaaattcttgctctctttgcacctgaagattcactgacagnnnnnnnnnnnnnnnnnnnnnnnnnnnnnnnnnnnnnnnnnnnnnnnnnnnnnnnnnnnnnnnnnnnnnnnnnnnnnnnnnnnnnnnnnnnnnnnnnnnnnnnnnnnnnnnnnnnnnnnnnnnnnnnnnnnnnnnnnnnnnnnnnnnnnnnnnnnnnnnnnnnnnnnnnnnnnnnnnnnnnnnnnnnnnnnnnnnnnnnnnnnnnnnnnnnnnnnnnnnnnnnnnnnnnnnnnnnnnnnnnnnnnnnnnnnnnnnnnnnnnnnnnnnnnnnnnnnnnnnnnnnnnnnnnnnnnnnnnnnnnnnnnnnnnnnnnnnnnnnnnnnnnnnnnnnnnnnnnnnnnnnnnnnnnnnnnnnnnnnnnnnnnnnnnnnnnnnnnnnnnnnnnnnnnnnnnnnnnnnnnnnnnnnnnnnnnnnnnnnnnnnnnnnnnnnnnnnnnnnnnnnnnnnnnnnnnnnnnnnnnnnnnnnnnnnnnnnnnnnnnnnnnnnnnnnnnnnnnnnnnnnnnnnnnnnnnnnnnnnnnnnnnnnnnnnnnnnnnnnnnnnnnnnnnnnnnnnnnnnnnnnnnnnnnnnnnnnnnnnnnnnnnnnnnnnnnnnnnnnnnnnnnnnnnnnnnnnnnnnnnnnnnnnnnnnnnnnnnnnnnnnnnnnnnnnnnnnnnnnnnnnnnnnnnnnnnnnnnnnnnnnnnnnnnnnnnnnnnnnnnnnnnnnnnnnnnnnnnnnnnnnnnnnnnnnnnnnnnnnnnnnnnnnnnnnnnnnnnnnnnnnnnnnnnnnnnnnnnnnnnnnnnnnnnnnnnnnnnnnnnnnnnnnnnnnnnnnnnnnnnnnnnnnnnnnnnnnnnnnnnnnnnnnnnnnnnnnnnnnnnnnnnnnnnnnnnnnnnnnnnnnnnnnnnnnnnnnnnnnnnnnnnnnnnnnnnnnnnnnnnnnnnnnnnnnnnnnnnnnnnnnnnnnnnnnnnnnnnnnnnnnnnnnnnnnnnnnnnnnnnnnnnnnnnnnnnnnnnnnnnnnnnnnnnnnnnnnnnnnnnnnnnnggaatctgaattagagcctatgaatggtgagataatggatgattctcttaagacctcacttataacagaagaggaagactccactagtgaaattttagatgaagaattaaaattgcagccttttaattccagtgaagattctacaaatcttgttccactggtggtagaatcttcaaaactctctgaggcagatgcaccagataagnnnnnnnnnnnnnnnnnnnnnnnnnnnnnnnnnnnnnnnnnnnnnnnnnnnnnnnnnnnnnnnnnnnnnnnnnnnnnnnnnnnnnnnnnnnnnnnnnnnnnnnnnnnnnnnnnnnnnnnnnnnnnnnnnnnnnnnnnnnnnnnnnnnnnnnnnnnnnnnnnnnnnnnnnnnnnnnnnnnnnnnnnnnnnnnnnnnnnnnnnnnnnnnnnnnnnnnnnnnnnnnnnnnnnnnnnnnnnnnnnnnnnnnnnnnnnnnnnnnnnnnnnnnnnnnnnnnnnnnnnnnnnnnnnnnnnnnnnnnnnnnnnnnnnnnnnnnnnnnnnnnnnnnnnnnnnnnnnnnnnnnnnnnnnnnnnnnnnnnnnnnnnnnnnnnnnnnnnnnnnnnnnnatcttctgagcaactggatcagtttacacaatcggcagaaaaagctgttgatagcagctcagaggaaatagaagtggaagtgcctgtggtagacaggcggaatttaagaagaaaggccaaagggcataaaggacctgctaagaagaaagctaagctgacctgaaggaagaagaaaagtggatgataaaccctcttctttgtaacataattgtttttaaaatatggtaattaataaacagcatggggcacaggacaaaaatttccaaaatttcaatttgaacttatttactatgcagtttttcgcttccctttagaacgtagaattcaccatnnnnnnnnnnnnnnnnnnnnnnnnnnnnnnnnnnnnnnnnnnnnnnnnnnnnnncatgtttcaattttggaaaccagatcatattatattttctttatcaggtggtacatctgaccattatttcaaaaatataattaaaaaactgaaagtagcaggatttccattacttacaaggatcacagaaatcttttatactaagggttttaatagtaaaacttggtgagggttctagaagttttaaatttcaaaaccaatcaccaattttttaaaatgtaggcatgcctaaacaaaagtgtcaataaattagaataaatataacttcaagtgaaagagagcacaaaaacag

SEQ ID NO: 42808 - DNA, 679 bp, Macaca Mulatta
  misc_feature (1)...(679): n = A,T,C or G
taagggtgagaataaagtattccaaaagaattaatttttatcnnnnnnnnnnnnnnnnntnnnnnnnnnnnnnnncacaaattggtatccatgtataattcatttccattcattttcttgtgtaaagaaagctcagtaaaagtatttcttaggtttctgtaattctagttctctactcaattttcctctgcaattttctgagccagaacccttcttagaaggcatattagagactttaaaagttaaataataaaataaatctcnnnnnnnnnnnnnnnnnnnnnnnnnnnnnnnnnnnnnnnnnnnnnnnnnnnnnnnnnnnnnnnnnnnnnnnnnnnnnnnnnnnnnnnnnnnnnnnnnnnnnnnnnnnnnnnnnnnnnnnnnnnnnnnnnnnnnnnnnnnnnnnnnnnnnnnnnnnnnnnnnnnnnnnnnnnnnnnnnnnnnnnnnnnnnnnnnnnnnnnnnnnnnnnnnnnnnnnnnnnnnnnnnnnnnnnnnnnnnnnnnnnnnnnnnnnnnnnnnnnnnnnnnnnnnnnnnnnnnnnnnnnnnnnnnnnnnnnnnnnnnnnnnnnnnnnnnnnnnnnnnnnnnnnnnnnnnnnnnnnnnnnnnnnnnnnnnnnnnnnnnnnnnnnnnnnnnnnnnnnnnnnnnnnnnnnnnnnnnnnnnnnnnnnnnnnnnnnn

SEQ ID NO: 42809 - DNA, 346 bp, Macaca Mulatta
  misc_feature (1)...(346): n = A,T,C or G
acttgataaaatgtttattttcatactggtcaagtacatttacttctattcatttcacagtgagtacccagtaacaacaaaagcacttaaaattgggggggggggcatgattttagtacctttatttgaagtgtaatcattttaaattattattattttaactggggcagtgatcagtggtttaaacaggaactttagtggtttcaattcttttaagaaacattaattttgagggaaaaacttcccacaaaatattgggaacgtaagagtagtattgattagaaaaaaattaaataagaaacatagtgtggtagccnnnnnnnnnnnnnnnnnnnnntttttctgt

SEQ ID NO: 42810 - DNA, 828 bp, Macaca Mulatta
  misc_feature (1)...(828): n = A,T,C or G
gggaggtggaggctgtggtgagccaagatcacgccactgcattccagcctgggcaacagtgcgagatnnnnnnnnnnnnnnnnnnnnnnnnnnnnnnnnnnntctccagtaagttacatcttatagactcatcccaacctgtgtccctgcctcccctgcagatttaaccactatgctgaatttcatgctcttgcattttatatttgtgtatgtatttttagtttgtcttcttaggaacttgttagacaagggtgtcacactatcataagatatatagtcttctagtacttgttctttttattcagtatccgaaactaagattcatccacctttattggctggtaccctgtaagtcccattcctttgccaattggttggtatcaaaaaggggccacttggtatggaaaattccccccccccgagttttgccccaacctttccccaattggtgggtaacacaaaactggtggtgttttattgtnnnnnnnnnnnnnnnnnnnnnnnnnnnnnccttcaccccccacccacaaaagaacaaacataaatatgatattttagctcgtgtgccttggttaaccacgctacaagcacccagatccgccngtcggcccctgtggttcccgacgcaccccctccaattttatatacctataacaccaccctgtctctcatgccaccttcattagtattccgcgccccatgagctntttttattgtactccgccttagtcgatttacgacatgcacattcccttactcacaactacacagtatcccctttcaccacctcncacctgcctggtatcacaccctcctatcctccccaac

SEQ ID NO: 42811 - DNA, 123 bp, Macaca Mulatta
ttgcttgttgaatacttgctatgtgggaggcactgagttgtccactgatgtgaacgctaagaggaatgttagcctgatcccggatatctattaattcttcagggaattagacaaatacacaag

SEQ ID NO: 42812 - DNA, 277 bp, Macaca Mulatta
atcatcgaagcctcccgtcattgaggggttagcccactgtttacagcaatccagagggtttcaaggaaaggttccttcgcaaggcgtgcgagaacgcggtggtacccataggttgcctgggcacggcggccgccctcaccaaaggcctctactgcttccaccagggcaacagccagtgcttacagctcaagatgcatgcctggatcaccgcccagggcttcaccatcgcagccatcttgctgggtctagctgccccactatgaagtctcgaccctga

SEQ ID NO: 42813 - DNA, 494 bp, Macaca Mulatta
  misc_feature (1)...(494): n = A,T,C or G
aggtccttgtggttgacctcgtcaacagccggttcctcagacannnnnnnnnnnnnnnnnnnnnnnnnnnnnnnnnnnnnnnnnnnnnnnnnnnnnnnnnnnnnnnnnnnnnnnnnnnnnnnnnnnnnnnnnnnnnnnnnnnnnnnnnnnnnnnnnnnnnnnnnnnnnnnnnnnnnnnnnnnnnnnnnnnnnnnnnnnnnnnnnnnnnnnnnnnnnnnnnnnnnnnnnnnnnnnnnnnnnnnnnnnnnnnnnnnnnnnnnnnnnnnnnnnnnnnnnnnnnnnnnnnnnnnnnnnnnnnnnnnnnnnnnnnnnnnnnnnnnnnnnnnnnnnnnnnnnnnnnnnnnnnnnnnnnnnnnnnnnnnnnnnnnnnnnnnnnnnnnnnnnnnnnnnnnnnnnnnnnnnnnnnnnnctgtttgaggtccgagcccaagagtatctggaaacactccccagtggagagcacagcggtgtcaataagttcctgaagggactag

SEQ ID NO: 42814 - DNA, 535 bp, Macaca Mulatta
  misc_feature (1)...(535): n = A,T,C or G
actggcagcacacggggacacagcagctggactgggagcagcagggtttgcagcagctggactggcagcagaatgacccacagcctgaggagcagcagggcttgcagcagctggactgggagcaggatgacccacaacctggggagcagcaacagggcttccagcaactgcactgggagcagccacaggaacacagccccccttagagacactacaggagtcacagtcccccccttggagccaccacaggagccacagcccctcttggaacccccacnnnnnnnnnnnnnnnnnnnnnnnnnnnnnnnnnnnnnnnnnnnnnnnnnnnnnnnnnnnnnnnnnnnnnnnnnnnnnnnnnnnnnnnnnnnnnnnnnnnnnnnnnnnnnnnnnnnnnnnnnnnnnnnnnnnnnnnnnnnnnnnnngccacagcagcccatggttctggtggattgagggtggagcaggcagaggagcaggtgagagggaggtgcaggtgtggagctccctgagcctgggctctttagatccctgccca

SEQ ID NO: 42815 - DNA, 724 bp, Macaca Mulatta
  misc_feature (1)...(724): n = A,T,C or G
cacttgcagaagacctcactcgattgaggagcacaggtttgttccntgagtgtgtggcagtggataattagtgagaggaggtttacgttcatcttgtcatctcccacagtgcaccctccatggggttggcacccacatgcaagcagatggacttgctcagctggaggatgacaaacattttcataatctgtgacctcagaggtgctctttccctgcaagaccagttgtgatcatgcctctggctaatgtgcactcatcaagggcgagcagtgcccacctctgtgagggctcccttcaggtgcccgcccactttgtaaatggaagcttttgttccagccttgtcccatgcatgtgtttgcattcgctgcacagatcgtcttattcagacccaccacccaggagcttacagtgtacctaatccaactctatgcccttatacatggagtctctcattgccagggtttctcatgaaaggatgttcattatgtgatacaccagaacttgctggacttttacagacatgaacctgcctctaaaagcttaaaaatcttactctcttggaaggaactctgtaaactggaaataagataagtgctaaattaatacatgttttgtggttttttgaagaaagggttcaaatagtaagagcttcacccactttccctctgactagtatcatctcttaaaaagccactgaaaatacctgtggtgctctgagataatt

SEQ ID NO: 42816 - DNA, 2020 bp, Macaca Mulatta
  misc_feature (1)...(2020): n = A,T,C or G
ggagagggaccaggcaggcgccggagnnnnnnnnnnnnnnnnnnnnnnnnnnnnnnnnnnnnnnnnnnnnnnnnnnnnnnnnnnnnnnnnnnnnnnnnnnnnnnnnnnnnnnnnnnnnnnnnnnnnnnnnnnnnnnnnnnnnnnnnnnnnnnnnnnnnnnnnnnnnntatcaagaatcggcccgacaaactctcgctgtcagcgcagcaggctcccgcccaagcccagacctccgacccggttccgagcctgttcccgccggatcgctgggcgcccagggtcggcacctggggctcgcccgatgaggnnnnnnnnnnnnnnnnnnnnnnnnnnnnnnnnnnnnnnnnnnnnnnnnnnnnnnnnnnnnnnnnnnnnnnnnnnnnnnnnnnnnnnnnnnnnnnnnnnnnnnnnnnnnnnnnnnnnnnnnnnnnnnnnnnnnnnnnnnnnnnnnnnnnnnnnnnnnnnnnnnnnnnnnnnnnnnnnnnnnnnnnnnnnnnnnnnnnnnnnnnnnnnnnnnnnnnnnnnnnnnnnnnnnnnnnnnnnnnnnnnnnnnnnnnnnnnnnnnnnnnnnnnnnnnnnnnnnnnnnnnnnnnnnnnnnnnnnnnnnnnnnnnnnnnnnnnnnnnnnnnnnnnnnnnnnnnnnnnnnnnnnnnnnnnnnnnnnnnnnnnnnnnnnnnnnnnnnnnnnnnnnnnnnnnnnnnnnnnnnnnnnnnnnnnnnnnnnnnnnnnnnnnnnnnnnnnnnnnnnnnnnnnnnnnnnnnnnnnnnnnnnnnnnnnnnnnnnnnnnnnnnnnnnnnnnnnnnnnnnnnnnnnnnnnnnnnnnnnnnnnnnnnnnnnnnnnnnnnnnnnnnnnnnnnnnnnnnnnnnnnnnnnnnnnnnnnnnnnnnnnnnnnnnnnnnnnnnnnnnnnnnnnnnnnnnnnnnnnnnnnnnnnnnnnnnnnnnnnnnnnnnnnnnnnnnnnnnnnnnnnnnnnnnnnnnnnnnnnnnnnnnnnnnnnnnnnnnnnnnnnnnnnnnnnnnnnnnnnnnnnnnnnnnnnnnnnnnnnnnnnnnnnnnnnnnnnnnnnnnnnnnnnnnnnnnnnnnnnnnnnnnnnnnnnnnnnnnnnnnnnnnnnnnnnnnnnnnnnnnnnnnnnnnnnnnnnnnnnnnnnnnnnnnnnnnnnnnnnnnnnnnnnnnnnnnnnnnnnnnnnnnnnnnnnnnnnnnnnnnnnnnnnnnnnnnnnnnnnnnnnnnnnnnnnnnnnnnnnnnnnnnnnnnnnnnnnnnnnnnnnnnnnnnnnnnnnnnnnnnnnnnnnnnnnnnnnnnnnnnnnnnnnnnnnnnnnnnnnnnnnnnnnnnnnnnnnnnnnnnnnnnnnnnnnnnnnnnnnnnnnnnnnnnnnnnnnnnnnnnnnnnnnnnnnnnnnnnnnnnnnnnnnnnnnnnnnnnnnnnnnnnnnnnnnnnnnnnnnnnnnnnnnnnnnnnnnnnnnnnnnnnnnnnnnnnnnnnnnnnnnnnnnnnnnnnnnnnnnnnnnnnnnnnnnnnnnnnnnnnnnnnnnnnnnnnnnnnnnnnnnnnnnnaggttgaataactttgttgccatagaagaagaaccacacatcaggcttttttcattagcaaaccagtaaatactcactttgggcctctgaagtcacacccatctcgtgatacctgagatacaaactgaagctagctcttaagagcctccctctaagatttagagagaatgatttctcaaccagttttcatctttgaaaatcccgttttcctctttatcattgtgatttttattcaaatgcatgagtctctgattttctaccctatgcaaagggtagagactccagggtcctgtagaagaaactttacatagtggcctaaggatcttatttctcagaattcagggattggttttcctctttctggaaataatgacactaacttgatttcatgctatctctttcatcttcctcaatacttgtactgtctgtatatttttattatatactgtggatatatttttattac

SEQ ID NO: 42817 - DNA, 818 bp, Macaca Mulatta
ggggggccttctcgcctaacgccgccaacatggtgttcaggcgcttcgtggaggttggccgggtggcctacgtctcctttggacctcatgccggaaaattggtcgcgattgtagatgttattgatcagaacagggctttggtcgatggaccttgcactcaagtgaggagacaggccatgcctttcaagtgcatgcagctcactgatttcatcctcaagtttccacacagtgcccgccagaagtatgtccgacaagcgtggcagaaggcagacatcaatacaaaatgggcagccacacgatgggccaagaagattgaagccagagaaaggaaagccaagatgacagattttgatcgttttaaagttatgaaggcaaagaaaatgaggaacagaataatcaagaatgaagttaagaagcttcaaaaggcagctctcctgaaagcttctcccaaaaaagcacctggtactaagggtactgctgctgctgctaaagttccagcaaaaaagatgaccaccgcgagtaaaaaggctccagcccagaaggttcctgcccagaaagccacaggccagaaggctgcgcctgctccaaaagctcagaagggtcaaaaagctccagcccagaaagcacctgctccaaaggcatctggcaagaaaagcataagtgggcaatcaaaaaaagttaataaaaggtttccttttttgacattgggtcgggccaatgggcgcctgagagaatagcgggatacgacgcatattctttcaactctttgtgctccgcgcgtcttctttgcgcgtttcctttaaaagagaagtttttct

SEQ ID NO: 42818 - DNA, 670 bp, Macaca Mulatta
  misc_feature (1)...(670): n = A,T,C or G
ggtatttcattaacaataactgaagccccccttgatgaaattctacaattcccacaaagacaagttcttccagtaaatactgttaaagactaaatgcagacatcagaattcaggataaaattttgtttgtcttataagtcctttaagtcaggatagaggcaaatgatgtcactggctctttctttatatgaaaggtgaggagctgcatgtacagtcatgtgctgcaaaatgatgtttcagttaatgaaagactgcatatacagcgatactcccataattttacaaaagaactgaaaaattccatcacatagtgatatcgtagccattgtaatattgtagtgcaatatattaatcacttgagttgatgctnngtgtaaacaaactaatgccctgccagctgtataaaaatatagcccattacactatgggaaagtacagaataacttgaataatgggtataaaatgaccgggaaacccggattttaggtaatttaaaaaatttccggggaccaaaaccccttttcattgggtaatttttaaaaaggggggcctaatttccaaccnnnnnnnnnnnnnnnnnnnnnnnnnnccgnnnnnnnnnnnnnnnnnnnctcggggaggggtgcccttttttgaaaaggggttttnnnnnnnnnnnnnnnnnnnnccc

SEQ ID NO: 42819 - DNA, 808 bp, Macaca Mulatta
  misc_feature (1)...(808): n = A,T,C or G
ggggagcaagaagcggttgcaaacacttgtagcccggngtgntggaaaaggcaaagaagaaaaacaagtgccagcttttaggaagacgggattaatgaaaaccacaagaattttaaaggctaaaagagataccgattctctctttcccaaagagccagagtcagttcttttcttcttggtccctgtgatcccgccatagcttgtatcaaataaatggtgccaaaagtgggtcaaagagtgttagagctggaaaggaacccagcgatgatgccacattcttgtattgtacaaatgaggaaactgaggcccagataggtggagtaagtgacctgttcgggtgacatggctgtttgttgagtatccaggaaacttcaaggactgagattcgtgctcttcccaaagcaccatgcagtatatagatctttgcctagatacaattccatacattttctctgcagtgtcctcaggggaatgccctttgaaagggccagcgtgacaccgaatatcatgcttgggcttatgtcatttttttcagtcttcaagtggtgtttatgatctgcttggaatcttaggttttccaaagctgttggaatagctgcctggggcataattaagctttccgcctgttggggtctacatttattttcagaaaaatttttgttatccgttcaatttaagggaaatagaaactggtgccttttctcccccaaaatttccgtttatttggcccattttgccttatggtaaaattggccgttaatgtttcaattggccggtccaatttccctcatttgaaggatatgaattt

SEQ ID NO: 42820 - DNA, 763 bp, Macaca Mulatta
ggcagcacctgttgtttactgatttttttaatgattgccattctaactggtgtgagatggtatctcattgtggctttgatttgcatttctctgatggcgagtgatgatgagcattttttcatgtgtctgttggccatatgaatgtcttcttttgagaagtgtctgtttatatcctttgcccactttttgatggggttgtttttttcttataaatttgattgagttctttataggttctggatattagccctttgtcagatgagtagattgcaaaaattttctcccattctgtaggttgcctgttcactctgatggtagtttctttcgctgtgcagaagctctttagtttaattagatcctatttgccaattttgccttttgttgccgttgcttttggtgttttaaacatgaagtccttgcccatgcctatgtcctgaatggtattgccctagtcttcttctagggtttttatgcttttaggtctaacatttttagtctctcatccatcttgaatttgcaaacatttattgaatattcgtcatgtgcctgacatagagattaaacttaatgaatcctaagggacacttaacctttccatcttcaaagcatttaacccccatttcggaaaaattaataaatgaattaaagggcgccaatcaattgcctgaactttaggttttagggacaggattcaaagtggaaaaataaacctggggggtggttttccttgaagggaaatatgccttaacccctttaaagtgac

SEQ ID NO: 42821 - DNA, 1365 bp, Macaca Mulatta
  misc_feature (1)...(1365): n = A,T,C or G
ggtgctccggtatttgtcctttattgaacatcctcccaaagctggggctcgggttcaccccccactgtgcccctcgagaagcggccttcagaagcatcttctctgcaccacggagctcccaaactccttgaagtctgcggcggtgacccacatctgcttgaagctactcagagaggtgacgatggaggctccaatccagntccagctccttgagaagccggtcatccagcccgtggaacagggtagtgccccccgacagcacgatctccccaaagaggatcttctggatgtcggcatcacacttggtgatgctgctggagaccatatgcgaaagcccggggctctggcagcccagctgctggggcgcgaacagggcctcgggcgcctggtacagcgggtccccgaggctgatgatgttcccgtcgggcagcttgtactccctcaggacctcctccggcctccgggaaagctccttctcgggctccaaggccacgtagcacagcttttttttgatgtcatccaccaggcccttgtccagctcgcaggagaaggtgtggccgctggccaggagcagctgcgtgaggagctccgtgatgtccctgcccgccacgtggagcttggtgactgcgtggggcagggagtaaccctcgaagatggggacagtgcaggtgaccccatccccgctgtccaccaccaggcccgtgacgcaggccgaggcgtagagagccagcaccgcctggtccgacaggtagaaagcgggcacgccaaagttctcaaacatgacttccgctatcttctctcggttctccctggggttcagggagggttccgtcccgagcagaggctggtcgctgggtttcacacccagctcccactcaaagagatgcttccagagtctcttccatgtcatccccccctgtgatcaagccacgctcgatgggggagtgcagctgccgggcctccagctttgtacagggccccctcccccccaaagtatttcttctggttggcccccgctgaaggggcctggaattttaggtgccccccgatggagctgacgatatgccgggggccaacttccccgaaaaggcccgctttgcagagccccgagccattgtcgaaaatcacagcgggggagtctaacgcgtgcggattaaacatgcccgcagccttcccttctcagcctcatcaaaataaagcccagccctccagggccactttgtgatgcaataggggatcccacggctctntcccacggctctcggggtgtctcaaggcagggctagcaccgcaccagggagccctccatcctcaggctcaggtctgctctcccttcagggggcccccgcctgctgaggcctcttc

SEQ ID NO: 42822 - DNA, 4299 bp, Macaca Mulatta
  misc_feature (1)...(4299): n = A,T,C or G
catggcggaggagcggcccccccggctggtggattacttcgtggtagctgggcttgcagggaacggagcacccatccctgaggaaacttgggttcctgaacccagtgggcccctgcgccctccccggccagctgagcccatcacagatgtggcagtcatcgctagggcactgggcgaggaagtgccccagggctacacatgcatccaggcttccgctggcggccaccccttggaactcagtgctgggcttctgggtggaactcaacccgtcatctgctaccgcaggggccgtgacaagnnnnnnnnnnnnnnnnnnngggtgttgtatgaggggaaggaacgtcccaagcccggcttccaagtgcttgacacgacaccctacagccactcagcaaacctggcccctccaggccctgggcacccccgcacctacctcacttaccggcgggcagcagagggggcagggctgcatgccctgggcatnnnnnnnnnnnnnnnnnnnnnnnnnnnnnnnnnnnnnnnnnnnnnnnnnnnnnnnnnnnnnnnnnnnnnnnnnnnnnnnnnnnnnnnnnnnnnnnnnnnnnnnnnnnnnnnnnnnnnnnnnnnnnnnnnnnnnnnnnnnnnnnnnnnnnnnnnnnnnnnnnnnnnnnnnnnnnnnnnnnnnnnnnnnnnnnnnnnnnnnnnnnnnnnnnnnnnnnnnnnnnnnnnnnnnnnnnnnnnnnnnnnnnnnnnnnnnnnnnnnnnnnnnnnnnnnnnnnnnnnnnnnnnnnnnnnnnnnnnnnnnnnnnnnnnnnnnnnnnnnnnnnnnnnnnnnnnnnnnnnnnnnnnnnnnnnnnnnnnnnnnnnnnnnnnnnnnnnnnnnnnnnnnnnnnnnnnnnnnnnnnnnnnnnnnnnnnnnnnnnnnnnnnnnnnnnnnnnnnnnnnnnnnnnnnnnnnnnnnnnnnnnnnnnnnnnnnnnnnnnnnnnnnnnnnnnnnnnnnnnnnnnnnnnnnnnnnnnnnnnnnnnnnnnnnnnnnnnnnnnnnnnnnnnnnnnnnnnnnnnnnnnnnnnnnnnnnnnnnnnnnnnnnnnnnnnnnnnnnnnnnnnnnnnnnnnnnnnnnnnnnnnnnnnnnnnnnnnnnnnnnnnnnnnnnnngatgatcttcccactgcactggcagtgcccctacattcctctgtgcccgctggtgctggcagatgtgctgagtgccccagtgcccttcattgtgggtatccactccagctactttgatctgcatgacccgcctgctgatgtcatctgtgtcgaccttgataccaacacactcttccannnnnnnnnnnnnnnnnnnnnnnnnnnnnnnnnnnnnnnnnnnnnnnnnnnnnnnnnnnnnnnnnnnnnnnnnnnnnnnnnnnnnnnnnnnnnnnnnnnnnnnnnnnnnnnnnnnnnnnnnnnnnnnnnnnnnnnnnnnnnnnnnnnnnnnnnnnnnnnnnnnnnnnnnnnnnnnnnnnnnnnnnnnnnnnnnnnnnnnnnnnnnnnnnnnnnnnnnnnnnnnnnnnnnnnnnnnnnnnnnnnnnnnnnnnnnnnnnnnnnnnnnnnnnnnnnnnnnnnnnnnnnnnnnnnnnnnnnnnnnnnnnnnnnnnnnnnnnnnnnnnnnnnnnnnnnnnnnnnnnnnnnnnnnnnnnnnnnnnnnnnnnnnnnnnnnnnnnnnnnnnnnnnnnnnnnnnnnnnnnnnnnnnnnnnnnnnnnnnnnnnnnnnnnnnnnnnnnnnnnnnnnnnnnnnnnnnnnnnnnnnnnnnnnnnnnnnnnnnnnnnnnnnnnnnnnnnnnnnnnnnnnnnnnnnnnnnnnnnnnnnnnnnnnnnnnnnnnnnnnnnnnnnnnnnnnnnnnnnnnnnnnnnnnnnnnnnnnnnnnnnnnnnnnnnnnnnnnnnnnnnnnnnnnnnnnnnnnnnnnnnnnnnnnnnnnnnnnnnnnnnnnnnnnnnnnnnnnnnnnnnnnnnnnnnnnnnnnnnnnnnnnnnnnnnnnnnnnnnnnnnnnnnnnnnnnnnnnnnnnnnnnnnnnnnnnnnnnnnnnnnnnnnnnnnnnnnnnnnnnnnnnnnnnnnnnnnnnnnnnnnnnnnnnnnnnnnnnnnnnnnnnnnnnnnnnnnnnnnnnnnnnnnnnnnnnnnnnnnnnnnnnnnnnnnnnnnnnnnnnnnnnnnnnnnnnnnnnnnnnnnnnnnnnnnnnnnnnnnnnnnnnnnnnnnnnnnnnnnnnnnnnnnnnnnnnnnnnnnnnnnnnnnnnnnnnnnnnnnnnnnnnnnnnnnnnnnnnnnnnnnnnnnnnnnnnnnnnnnnnnnnnnnnnnnnnnnnnnnnnnnnnnnnnnnnnnnnnnnnnnnnnnnnnnnnnnnnnnnnnnnggctgtgctggaaagcaagtggccgtctggcacaccaggcgggcgtctgcgctgggccaagctccggaatgtcgtcttgggggctgctcagttctttttgcccttgagagaacggcnnnnnnnnnnnnnnnnnnnnnnnnnnnnnnnnnnnnnnnnnnnnnnnnnnnnnnnnnnnnnnnnnnnnnnnnnnnnnnnnnnnnnnnngagccctatttggagcacccttcccctactcgcccccttcagcgccagactacttgggctgggcgaagtctgagagacccggcctcaccccctggacgcctggtgaagagtggtagcctgggcagtgcccgaggggcacagcccactgtggaggctggtgtggcccacannnnnnnnnnnnnnnnnnnnnnnnnnnnnnnnnnnnnnnnnnnnnnnnnnnnnnnnnnnnnnnnnnnnnnnnnnnnnnnnnnnnnnnnnnnnnnnnnnnnnnnnnnnnnnnnnnnnnnnnnnnnnnnnnnnnnnnnnnnnnnnnnnnnnnnnnnnnnnnnnnnnnnnnnnnnnnnnnnnnnnnnnnnnnnnnnnnnnnnnnnnnnnnnnnnnnnnnnnnnnnnnnnnnnnnnnnnnnnnnnnnnnnnnnnnnnnnnnnnnnnnnnnnnnnnnnnnnnnnnnnnnnnnnnnnnnnnnnnnnnnnnnnnnnnnnnnnnnnnnnnnnnnnnnnnnnnnnnnnnnnnnnnnnnnnnnnnnnnnnnnnnnnnnnnnnnnnnnnnnnnnnnnnnnnnnnnnnnnnnnnnnnnnnnnnnnnnnnnnnnnnnnnnnnnnnnnnnnnnnnnnnnnnnnnnnnnnnnnnnnnnnnnnnnnnnnnnnnnnnnnnnnnnnnnnnnnnnnnnnnnnnnnnnnnnnattctgctgtccagctgctccctgtgccgtgcctgtgattcgctggtgtacgatgaggaaatcatggctggctgggcacctgatgactctaacctcaatacaacctgccccttctgcgcctgcccctttgtgcccctgctcagtgtccagacccttgattcccggcccagncagtgtccccagccccaagtctgctgatgccagtggcagcaaagatgcgcctgtccctgggggtcctggccctgtgctcagtgaccgcaggctctgccttgctctggatgagccccagctctgcaacgggcacatgggggnnnnnnnnnnnnnnnnnnnnnnnnnnnnnnnnnnnnnnnnnnnnnnnnnnnnnnnnnnnnnnnnnnnnnnnnnnnnnnnnnnnnnnnnnnnnnnnnnnnnnnnnnnnnnnnnnnnnnnnnnnnnnnnnnnnnnnnnnnnnnnnnnnnnnnnnnnnnnnnnnnnnnnnnnnnnnnnnnnnnnnnnnnnnnnnnnnnnnnnnnnnnnnnnnnnnnnnnnnnnnnnnnnnnnnnnnnnnnnnnnnnnnnnnnnnnnnnnnnnnnnnnnnnnnnnnnnnnnnnnnnnnnnnnnnnnnnnnnnnnnnnnnnnnnnnnnnnnnnnnnnnnnnnnnnnnnnnnnnnnnnnnnnnnnnnnnngccagatcccccagcgggtggtatggccaggcccagtacctgcatcccttagtttggcactgttggagtcggtgctgcgccatgttggactcaatgaagtgcacaaggctgtggggctcctgctggaaactctagggcccccacccactggcctgcacctgcagagnnnnnnnnnnnnnnnnnnnnnnnnnnnnnnnnnnnnnnnnnnnnnnnnnnnnnnnnnnnnnnnnnnnnnnnnnnnnnnnnnnnnnnnnnnnnnnnnnnnnnnnnnnnnnnnnnnnnnncaaggaggagctgaggcagcggcgggcacagatgcccactcccaaagccattgactgccgaaaatgttttggagcacctccagaatgctag

SEQ ID NO: 42823 - DNA, 770 bp, Macaca Mulatta
  misc_feature (1)...(770): n = A,T,C or G
ggtgaagcaattaacttcatttccagcagagaaatgctcagccatttgtatctttattccagcaaagcaactgagcaaaatgaaaacagtgaccatggctggttgcttctcaatcaatttcacaatcacaccccaaagagtgctggtgggacttgatgtcacctttgtaagagggctgtttcaggggccaggtcaaatggctctggtcctgatcctgggctaaataatatttgcataagtgtcccaatagattggaggcatgccaatcaaattttaggatgacataaagctggaggatatagcagataagatgaatgatagacttaaaatggcatttgcattgtattttaaggtttatctggactttacctataaccctcagaaagctaggtatgtctgttatctctacttcctagctaaatacactgagattcagagaggtaaattgcagaatcatggtgatcttgacaggctagaagtatgtcccaaaataagaagaaatcaaggttaagtgtaaaggattacgtctggattttaaaaaccaatttcaagctgggtatgnnnnnnnnnnnnnnnnnnnnnnnnngtttggaaggcagtggtgggaggatcgcttgagcccaggaatttaagccccagccgggcaacacagcgagatttcgtctctctactttatatnnnnnnnnnnnnnnnnnnnnnnnnaattttccgaaaataagattggagttttgtattagttgcccaggggctactgttaacaaagtaccaat

SEQ ID NO: 42824 - DNA, 639 bp, Macaca Mulatta
  misc_feature (1)...(639): n = A,T,C or G
aaatgtgaaagcatatttagattttatataccatctgaaatgtgatttgttaagattcttggaggtgggcctcttagaataattttgaatgagatctaccgactcacttgtgagaatatttttcgcagatatctttgggccttttcattagaaagctgtttgtccccctgttggtacatttggttacctcattttgccgtttgtttccgattgtgaaagctcacaggggtgtttttcggaatcatttgctgagtcattttctcaaatcatattccattgtatcagttaacatatagttttaaatgtatgtattataaatatctgtaaccaaatcatttgaaggcttgataaatttttaacaaagtttgtacattttttatgaaagttactagtaatgctttactaagtagtgcaatgaatttttatttttaatccctgtgcccaattttggagttgagagggttgttggtaataaatgtatgatgtacacnnnnnnnnnnnnnnnnnnnnnnnnnnnnnnnnnnnnnnnnnnnnnnnnnnnnnnnnnnnnnnnnnnnnnnnnnnnnnnnnnnnnnnnnnnnnnnnnnnnnnnnnnnnnnnnnnnnnnnnnnnnnnnnnnnnnnnngtgtttaccaagtt

SEQ ID NO: 42825 - DNA, 791 bp, Macaca Mulatta
gggcttgccttggtgtggactgaaggccaccaggtgttctcatatctataagaatctgagacagaaacacaaacttagggaaggagtgtactgaatggagctgcctaaaatgacagaagtagggctagagaaaaattgtcttatttataggaataaattggcatggccattcctaatagcaggtaatttggggagtaatacacttaccagttataacagaatacagtagggggagcaggccagagttaaccgcttgttatataaatagaataaatttgtttctagtgaacatcattctgtaaacttatatacatcttagtaaaagtcatatcataaatttcgagggcattgctttcaaatctcattggatgaaattatctctaataaagctgcaaagcaggatttcaaatgttttataactccccttgttggcagcttagatttttctttgtataaatgtggagattctgtgatttatttaatgtttgaattgaatagtttcatatgtactccattgtgtatgcttatttattatgatttatgtttacatttattttattcaccaagaggagaaagtaccaaataaatgactggctatataaaacatagccttcacttaaaacataggttatcttttccacataaggcttgtaattttctgaatttttcttacactatagtacaaaccttacagactaggtaatgataatatatggcaaaggaaaaaagggttatttttagatcctactgtaaggggtatgaaccttttctaaaataaaaaccctcccctt

SEQ ID NO: 42826 - DNA, 823 bp, Macaca Mulatta
  misc_feature (1)...(823): n = A,T,C or G
ggcagtatagagagcctcttgccatcatagagtttgttttaattttggggtcatcaaattacctttttctacagactccacccccgccccaaaaattgatctgcttttttccttaccacttattccactcactgttcctgatcaagcctttttttcttgattcacagcatgtgtgtacagaagattgtctaatggcttcttctctgttctgccttaaatccctttcgttattctttcccttcagttctaaatgcaacttgaagcccagttccattcctgtgattccttctcagaagatagtcaatatccctgaaagtttggtggtttaatcattccttttgccttttcaaaaattgcttttttaattgggcaaaatggtaattccgacccccctggaaaccaaataatttggaaaatgggcctgtgtttttttaaaaatttcccacttaaaaaccctttttttcgcctgggggggccgggcggaccatgtcaagacaagatcgtgggattttcacgagcaatgaaaccggtacactaaggtcaagtgaaaaaaacacgtgtgtgtttctgccaggaagatccaggcaccccttttggggggtgcccaccatcttctacgaaaaaagaaaaaaaccattcttttctactcacaaaagagaacaacacagtttttctgcgcgtttgtaatatgaaaggaagataaagcagtcggagaaaggcccccccccataataaatatgatgtaaatatggtgaaaaatcctgaggggggcaaacagaaaagaacctgtgttttctcacnnnnnnnnnnnnnnnnnnnnnnn

SEQ ID NO: 42827 - DNA, 804 bp, Macaca Mulatta
gaccgcctgtgcctgggcgaccgccatggccacaaggactggatcttcgccgttgcctggctgagtgacaccgtagccgtgagcggctcccgcgacggcactgtggcgctgtggcggatggacccggacatgttcaatggcagcattgcctggcacagcgaggtgggtctccccgtatatgcccacatccgtccgaaggatgtggaggccatacccagggccagcaccaaccccagtaaccgcaaggtgcgggccctggccttcagcggcaagaaccaggagctgggagcggtgtccttagacggctacttccacctgtggaaagccaggagcacactatccaggctcctgtccatcaggctgccctactgccgagagaatgtgtgcctgacctactgcgatgagttgtccctctacgctgtgggctcccagtcccacgtctccttcctggatccgcgccagcgccagcagaacatccggcccctgtgctctcgagaaggtggcacaggcgtgcggtctctgagcttctaccagcacatcatcactgtgggcaccggccatggctccctgctcttctatgacatccgggcccagaagttcctggaggagagagcctctgccagtctggactctacgccggggcccgcagggaggaagctcaagcttgcctgtggcagaggctggctcaaccaagatgacgtctgggtgaactactttggtggcatggaagagttccccaatgcgctctacacccactgctccaaaaggcccgagatgaagctctttgtggctggggggcctctc

SEQ ID NO: 42828 - DNA, 441 bp, Macaca Mulatta
atggtgatgggcctgggccttttcttgttggtcttcatgctgggtctgggtctgaccccacccaccctggctcaggataaccccaggtacagagacttcctggccaagcactatgatgccacaccacagggccggaatgacagatactgtgaaagcacaatgaggagacggcatctgacctcaccctgcaaagacatcaacacctttgttcatggcaacaggcaccacatcacggccatctgtggagatgagaatggaagcccttatggaggaaacctaagaataagcacgtctcctttccaggtcaccacttgcaaactacgtggaggatccccccggcctccatgccagtaccgagccacacgggggtccagaaacattgttgttggttgtgaaaatggcctacctgtccacttggatgagtccattttccgtccgtaa

SEQ ID NO: 42829 - DNA, 5210 bp, Macaca Mulatta
  misc_feature (1)...(5210): n = A,T,C or G
gggaccaccctgcgcccactgtcaatggcacccggcctgcccnnnnnnnnnnnnnnnnnnnnnnnnnnnnnnnnnnnnnnnnnnnnnnnnnnnnnnnnnnnnnnnnnnnnnnnnnnnnnnnnnnnnnnnnnnnnnnnnnnnnnnnnnnnnnnnnnnnnnnnnnnnnnnnnnnnnnnnnnnnnnnnnnnnnnnnnnnnnnnnnnnnnnnnnnnnnnnnnnnnnnnnnnnnnnnnnnnnnnnnnnnnnnnnnnnnnnnnnnnnnnnnnnnnnnnnnnnnnnnnnnnnnnnnnnnnnnnnnnnnnnnnnnnnnnnnnnnnnnnnnnnnnnnnnnnnnnnnnnnnnnnnnnnnnnnnnnnnnnnnnnnnnnnnnnnnnnnnnnnnnnnnnnnnnnnnnnnnnnnnnnnnnnnnnnnnnnnnnnnnnnnnnnnnnnnnnnnnnnnnnnnnnnnnnnnnnnnnnnnnnnnnnnnnnnnnnnnnnnnnnnnnnnnnnnnnnnnnnnnnnnnnnnnnnnnnnnnnnnnnnnnnnnnnnnnnnnnnnnnnnnnnnnnnnnnnnnnnnnnnnnnnnnnnnnnnnnnnnnnnnnnnnnnnnnnnnnnnnnnnnnnnnnnnnnnnnnnnnnnnnnnnnnnnnnnnnnnnnnnnnnnnnnnnnnnnnnnnnnnnnnnnnnnnnnnnnnnnnnnnnnnnnnnnnnnnnnnnnnnnnnnnnnnnnnnnnnnnnnnnnnnnnnnnnnnnnnnnnnnnnnnnnnnnnnnnnnnnnnnnnnnnnnnnnnnnnnnnnnnnnnnnnnnnnnnnnnnnnnnnnnnnnnnnnnnnnnnnnnnnnnnnnnnnnnnnnnnnnnnnnnnnnnnnnnnnnnnnnnnnnnnnnnnnnnnnnnnnnnnnnnnnnnnnnnnnnnnnnnnnnnnnnnnnnnnnnnnnnnnnnnnnnnnnnnnnnnnnnnnnnnnnnnnnnnnnnnnnnnnnnnnnnnnnnnnnnnnnnnnnnnnnnnnnnnnnnnnnnnnnnnnnnnnnnnnnnnnnnnnnnnnnnnnnnnnnnnnnnnnnnaggtccacagatgtgggattcacacccccatcatcccctcccactcggccccgcaatgaccgaaatgtcttctctcgtctcaccagtaatcagagccaggggtcagcgctggacaagnnnnnnnnnnnnnnnnnnnnnnnnnnnnnnnnnnnnnnnnnnnnnnnnnnnnnnnnnnnnnnnnnnnnnnnnnnnnnnnnnnnnnnnnnnnnnnnnnnnnnnnnnnnnnnnnnnnnnnnnnnnnnnnnnnnnnnnnnnnnnnnnnnnnnnnnnnnnnnnnnnnnnnnnnnnnnnnnnnnnnnnnnnnnnnnnnnnnnnnnnnnnnnnnnnnnnnnnnnnnnnnnnnnnnnnnnnnnnnnnnnnnnnnnnnnnnnnnnnnnnnnnnnnnnnnnnnnnnnnnnnnnnnnnnnnnnnnnnnnnnnnnnnnnnnnnnnnnnnnnnnnnnnnnnnnnnnnnnnnnnnnnnnnnnnnnnnnncctcaggccaggtgatctcaggggatgcctgtgccgccacgtccacccgtgccatcaccagtgctcagggtgagcatcagatcaaccagatcgccctcagcccttcgggcaccatgctgtacgccgcctcgggcaacgccgtccgcatctgggagcttagcaggtngcaggttccagcctgttggcaagctgactggccacatcggtcctgtgatgtgcctgacggtcacccagacagccagccagcacgaccttgtggtgactggctccaaggaccactacgttaagnnnnnnnnnnnnnnnnnnnnnnnnnnnnnnnnnnnnnnnnnnnnnnnnnnnnnnnnnnnnnnnnnnnnnnnnnnnnnnnnnnnnnnnnnnnnnnnnnnnnnnnnnnnnnnnnnnnnnnnnnnnnnnnnnnnnnnnnnnnnnnnnnnnnnnnnnnnnnnnnnnnnnnnnnnnnnnnnnnnnnnnnnnnnnnnnnnnnnnnnnnnnnnnnnnnnnnnnnnnnnnnnnnnnnnnnnnnnnnnnnnnnnnnnnnnnnnnnnnnnnnnnnnnnnnnnnnnnnnnnnnnnnnnnnnnnnnnnnnnnnnnnnnnnnnnnnnnnnnnnnnnnnnnnnnnnnnnnnnnnnnnnnnnnnnnnnnnnnnnnnnnnnnnnnnnnnnnnnnnnnnnnnnnnnnnnnnnnnnnnnnnnnnnnnnnnnnnnnnnnnnnnnnnnnnnnnnnnnnnnnnnnnnnnnnnnnnnnnnnnnnnnnnnnnnnnnnnnnnnnnnnnnnnnnnnnnnnnnnnnnnnnnnnnnnnnnnnnnnnnnnnnnnnnnnnnnnnnnnnnnnnnnnnnnnnnnnnnnnnnnnnnnnnnnnnnnnnnnnnnnnnnnnnnnnnnnnnnnnnnnnnnnnnnnnnnnnnnnnnnnnnnnnnnnnnnnnnnnnnnnnnnnnnnnnnnnnnnnnnnnnnnnnnnnnnnnnnnnnnnnnnnnnnnnnnnnnnnnnnnnnnnnnnnnnnnnnnnnnnnnnnnnnnnnnnnnnnnnnnnnnnnnnnnnnnnnnnnnnnnnnnnnnnnnnnnnnnnnnnnnnnnnnnnnnnnnnnnnnnnnnnnnnnnnnnnnnnnnnnnnnnnnnnnnnnnnnnnnnnnnnnnnnnnnnnnnnnnnnnnnnnnnnnnnnnnnnnnnnnnnnnnnnnnnnnnnnnnnnnnnnnnnnnnnnnnnnnnnnnnnnnnnnnnnnnnnnnnnnnnnnnnnnnnnnnnnnnnnnnnnnnnnnnnnnnnnnnnnnnnnnnnnnnnnnnnnnnnnnnnnnnnnnnnnnnnnnnnnnnnnnnnnnnnnnnnnnnnnnnnnnnnnnnnnnnnnnnnnnnnnnnnnnnnnnnnnnnnnnnnnnnnnnnnnnnnnnnnnnnnnnnnnnnnnnnnnnnnnnnnnnnnnnnnnnnnnnnnnnnnnnnnnnnnnnnnnnnnnnnnnnnnnnnnnnnnnnnnnnnnnnnnnnnnnnnnnnnnnnnnnnnnnnnnnnnnnnnnnnnnnnnnnnnnnnnnnnnnnnnnnnnnnnnnnnnnnnnnnnnnnnnnnnnnnnnnnnnnnnnnnnnnnnnnnnnnnnnnnnnnnnnnnnnnnnnnnnnnnnnnnnnnnnnnnnnnnnnnnnnnnnnnnnnnnnnnnnnnnnnnnnnnnnnnnnnnnnnnnnnnnnnnnnnnnnnnnnnnnnnnnnnnnnnnnnnnnnnnnnnnnnnnnnnnnnnnnnnnnnnnnnnnnnnnnnnnnnnnnnnnnnnnnnnnnnnnnnnnnnnnnnnnnnnnnnnnnnnnnnnnnnnnnnnnnnnnnnnnnnnnnnnnnnnnnnnnnnnnnnnnnnnnnnnnnnnnnnnnnnnnnnnnnnnnnnnnnnnnnnnnnnnnnnnnnnnnnnnnnnnnnnnnnnnnnnnnnnnnnnnnnnnnnnnnnnnnnnnnnnnnnnnnnnnnnnnnnnnnnnnnnnnnnnnnnnnnnnnnnnnnnnnnnnnnnnnnnnnnnnnnnnnnnnnnnnnnnnnnnnnnnnnnnnnnnnnnnnnnnnnnnnnnnnnnnnnnnnnnnnnnnnnnnnnnnnnnnnnnnnnnnnnnnnnnnnnnnnnnnnnnnnnnnnnnnnnnnnnnnnnnnnnnnnnnnnnnnnnnnnnnnnnnnnnnnnnnnnnnnnnnnnnnnnnnnnnnnnnnnnnnnnnnnnnnnnnnnnnnnnnnnnnnnnnnnnnnnnnnnnnnnnnnnnnnnnnnnnnnnnnnnnnnnnnnnnnnnnnnnnnnnnnnnnnnnnnnnnnnnnnnnnnnnnnnnnnnnnnnnnnnnnnnnnnnnnnnnnnnnnnnnnnnnnnnnnnnnnnnnnnnnnnnnnnnnnnnnnnnnnnnnnnnnnnnnnnnnnnnnnnnnnnnnnnnnnnnnnnnnnnnnnnnnnnnnnnnnnnnnnnnnnnnnnnnnnnnnnnnnnnnnnnnnnnnnnnnnnnnnnnnnnnnnnnnnnnnnnnnnnnnnnnnnnnnnnnnnnnnnnnnnnnnnnnnnnnnnnnnnnnnnnnnnnnnnnnnnnnnnnnnnnnnnnnnnnnnnnnnnnnnnnnnnnnnnnnnnnnnnnnnnnnnnnnnnnnnnnnnnnnnnnnnnnnnnnnnnnnnnnnnnnnnnnnnnnnnnnnnnnnnnnnnnnnnnnnnnnnnnnnnnnnnnnnnnnnnnnnnnnnnnnnnnnnnnnnnnnnnnnnnnnnnnnnnnnnnnnnnnnnnnnnnnnnnnnnnnnnnnnnnnnnnnnnnnnnnnnnnnnnnnnnnnnnnnnnnnnnnnnnnnnnnnnnnnnnnnnnnnnnnnnnnnnnnnntctggccccctgggggtgctgggtaaccccttagctctgagatgtggccacaaatctcttcccactcctctccatccctccccacctgaacagaaggttttgaccttgcaacctgtaagaaagaatccgtccgcatgactgtttacaagcgatagaaacacataagactctgtcccctgagctcccacagctgggcgggggatgccccacctggggtgactgcactgtagctgcaaggcgtgttctcacacgaagtgtgatcttacggccccgcgagaggtgctcatcatcattgcccattttccgctgtttccgatgggtcagctacctcacggcggggccagctctgctgtcctggcaagtgtcattgactctctaaacttgaagtccttcgggagccctgagcccagcatccctgagacaccccaagttgtgctccatgagagttggagtctctgcccactctttcagggatgtccagggtccatcgttagggggcaggcccccagctccaatcactgcacaagcaccctaagtgttggaagcacaaaatggttgtgatttgagcacaatggcagggtctcgcaggcagactggatagacccgggcccgggaagttcctcccaggttgcctctgtccaaagtgagattggggatgcctgtgtctgggacagggggctgcccttgctcagaccaggccttggcccatggctcgtgctaattctgggactcgccagctaacttctcacccttctgtgcccatcttaagatctgagccttgtcaggcccagccacatctgtataccatgggaccaggagtaaagcgctctctaaaccccgcaccccaaatctctaaacgcctgagttcaggctgagtcctagccctagtgagcctga

SEQ ID NO: 42830 - DNA, 1654 bp, Macaca Mulatta
  misc_feature (1)...(1654): n = A,T,C or G
gggaagatggccatgtacaggtggaggcagagattagagaggggctgtcccaacccaagggacacagaggatgccagcgaccatgggacactgggaagggcaaggaagggtcctcccctagggccttcagagggaacacggtcctgacacctggatttctggcttccagaactgggaggcagtaaatccctgttgtatccagctgttccctttgtggtcacttttcacggaagtcctggggacgaatgcaggctccagtccagcttgggggccatgtggggtagcggcggatcgggacgtccttctaagagaagcgatcttgagccatgtcaccggtgaggagttaggagttagcccagtgggggaaaaggggaaggcagcactcannnnnnnnnnnnnnnnnnnnnnnnnnnnnnnnnnnnnnnnnnnnnnnnnnnnnnnnnnnnnnnnnnnnnnnnnnnnnnnnnnnnnnnnnnnnnnnnnnnnnnnnnnnnnnnnnnnnnnnnnnnnnnnnnnnnnnnnnnnnnnnnnnnnnnnnnnnnnnnnnnnnnnnnnnnnnnnnnnnnnnnnnnnnnnnnnnnnnnnnnnnnnnnnnnnnnnnnnnnnnnnnnnnnnnnnnnnnnnnnnnnnnnnnnnnnnnnnnnnnnnnnnnnnnnnnnnnnnnnnnnnnnnnnnnnnnnnnnnnnnnnnnnnnnnnnnnnnnnnnnnnnnnnnnnnnnnnnnnnnnnnnnnnnnnnnnnnnnnnnnnnnnnnnnnnnnnnnnnnnnnnnnnnnnnnnnnnnnnnnnnnnnnnnnnnnnnnnnnnnnnnnnnnnnnnnnnnnnnnnnnnnnnnnnnnnnnnnnnnnnnnnnnnnnnnnnnnnnnnnnnnnnnnnnnnnnnnnnnnnnnnnnnnnnnnnnnnnnnnnnnnnnnnnnnnnnnnnnnnnnnnnnnnnnnnnnnnnnnnnnnnnnnnnnnnnnnnnnnnnnnnnnnnnnnnnnnnnnnnnnnnnnnnnnnnnnnnnnnnnnnnngcgttacttccgggcagattaggaatccccgctccgtcgatgagcgaggacctgagacagagctgccacccatagagagccactgtgggggtccccgcagagggtttgcatctatcaccatcacggccagacgcgtgggccccccagccagcgccctgctgtgggggactgttggggactctctgtgccccaagtgcagggctgaggacacactgttccaggcgcccccagctctggccaatggcgcccatccaggtcggcatcagagatcttttgcctgcacagagttctccggaaacagctccgtggtgcggctgaaggttcccgaggcccacacagggttgtgtgagagacgcaagtactgggtcacccatgtggatgacaaagggaccagtttttctccagacaccccactgtcaggaaagagcccgctggtgttcagttcctgtgtccacctcagggtgtctcagcagtgtccaaattcaatctattatgtagacaagtctctctccgtccccattgagccacctcaaattgccggccccaaaatgcacagatccgtcctgtcgctcaacctcagttgtagttcccacagattgacagcagatggagtagatggcctagtgaacagggagccaataagc

SEQ ID NO: 42831 - DNA, 684 bp, Macaca Mulatta
ggggtggccttgagaagctgagcggagaccagctggactttaatcagagaaaccaagagactgttaccatggcggggaagcccaagcttcactacttcaatggacggggcagaatggagcccatccggtggctcttggctgcagctggagtggagtttgaagagaaatttatagaatctgcagaagatttggaaaagttaagaaatgatgggagtttgatgttccagcaagtaccaatggttgagattgatgggatgaagctggtgcagaccagagccattctcaactacattgccagcaaatacaacctctacgggaaagacataaaggagagagccctaattgatatgtatacggaaggtatggcagatttgaatgagatgatccttcttctgcccttatgtcgacctgaggaaaaagatgccaagattgccttgatcaaagagaaaacaaaaaatcgctacttccctggccttcgaaaaagtgttacagaggccatgggacaaggatttacctttgtttgggcaaccaagcctggaacccgggggcctgaacattttagcccgtgggggggggaaaccttcccccctgacctaaggggggggggaaaagaaagactttggaacacccccgcggcccctttgatttctgccccgagggtcgttttgccccccccgtgtggtg

SEQ ID NO: 42832 - DNA, 757 bp, Macaca Mulatta
  misc_feature (1)...(757): n = A,T,C or G
ggggtactacaacagttagatgttgtgagggacaaaatgggctgtgcaaaagacaggataaataaaagcttattacatgtttaactataattagttttatacacatattaagtattcagccctataggttttctggtattagtcctttatagaacgaaaaattgaggtaacttgaaaacataattaccagttatgttgaggattatcatcgtttatttttcaccctgaaacaagaaagtggtgttcttaaaaatgtttgttttctataaaatatttttcctgttccaaatgttctttttacgttgatttttgggcaggtatgtactggcagtaaattgaaaatgttagataaccaaattcttcatttctggattcttcattcttcatttctggactttacagctatgaaagaacaacacaaaggaattcagagcttcaagaaccaagtatatcaggagagttgtagaaaacagatctttttctaattttctttgagatgaagataggcaacagttgctgccccttaaataccttaaaagtaggcaggtgtatctgcaggattctgtttgctgcttttaaatagtacattgttttaaaaggtctgtttgtagcttgcctttacaattatatagactattgactagctcattatatagggccttagtataaagtagactaccatattcgccagcatttaagaaataatcccccttccccccccaccgaagggtatttantcgggggtactcccataatt

SEQ ID NO: 42833 - DNA, 172 bp, Macaca Mulatta
gcagccgggccccatcaccgagatggacggggcggtggccacagacttcttcacggtgctctccaccggccaccgcttcacggaggaccagtggctgaacgtgcaggccttctccatgctgcgggcatggctgtagcacagtggccccgagggcctgggcaccctggacaca

SEQ ID NO: 42834 - DNA, 2439 bp, Macaca Mulatta
  misc_feature (1)...(2439): n = A,T,C or G
gtgtactccttggatgggattctggtgtttggtttgctctttgtttgcacctgtgcctacttcaagaaagtacctcgtctcaaaacctggctgctatcagagaagaagggtgtttggggtgtgttttacaaagnnnnnnnnnnnnnnnnnnnnnnnnnnnnnnnnnnnnnnnnnnnnnnnnnnnnnnnnnnnnnnnnnnnnnnnnnnnnnnnnnnnnnnnnnnnnnnnnnnnnnnnnnnnnnnnnnnnnnnnnnnnnnnnnnnnnnnnnnnnnnnnnnnnnnnnnnnnnnnnnnnnnnnnnnnnnnnnnnnnnnnnnnnnnnnnnnnnnnnnnnnnnnnnnnnnnnnnnnnnnnnnnnnnnnnnnnnnnnnnnnnnnnnnnnnnnnnnnnnnnnnnnnnnnnnnnnnnnnnnnnnnnnnnnnnnnnnnnnnnnnnnnnnnnnnnnnnnnnnnnnnnnnnnnnnnnnnnnnnnnnnnnnnnnnnnnnnnnnnnnnnnnnnnnnnnnnnnnnnnnnnnnnnnnnnnnnnnnnnnnnnnnnnnnnnnnnnnnnnnnnnnnnnnnnnnnnnnnnnnnnnnnnnnnnnnnnnnnnnnnnnnnnnnnnnnnnnnnnnnnnnnnnnnnnnnnnnnnnnnnnnnnnnnnnnnnnnnnnnnnnnnnnnnnnnnnnnnnnnnnnnnnnnnnnnnnnnnnnnnnnnnnnnnnnnnnnnnnnnnnnnnnnnnnnnnnnnnnnnnnnnnnnnnnnnnnnnnnnnnnnnnnnnnnnnnnnnnnnnnnnnnnnnnnnnnnnnnnnnnnnnnnnnnnnnnnnnnnnnnnnnnnnnnnnnnnnnnnnnnnnnnnnnnnnnnnnnnnnnnnnnnnnnnnnnnnnnnnnnnnnnnnnnnnnnnnnnnnnnnnnnnnnnnnnnnnnnnnnnnnnnnnnnnnnnnnnnnnnnnnnnnnnnnnnnnnnnnnnnnnnnnnnnnnnnnnnnnnnnnnnnnnnnnnnnnnnnnnnnnnnnnnnnnnnnnnnnnnnnnnnnnnnnnnnnnnnnnnnnnnnnnnnnnnnnnnnnnnnnnnnnnnnnnnnnnnnnnnnnnnnnnnnnnnnnnnnnnnnnnnnnnnnnnnnnnnnnnnnnnnnnnnnnnnnnnnnnnnnnnnnnnnnnnnnnnnnnnnnnnnnnnnnnnnnnnnnnnnnnnnnnnnnnnnnnnnnnnnnnnnnnnnnnnnnnnnnnnnnnnnnnnnnnnnnnnnnnnnnnnnnnnnnnnnnnnnnnnnnnnnnnnnnnnnnnnnnnnnnnnnnnnnnnnnnnnnnnnnnnnnnnnnnnnnnnnnnnnnnnnnnnnnnnnnnnnnnnnnnnnnnnnnnnnnnnnnnnnnnnnnnnnnnnnnnnnnnnnnnnnnnnnnnnnnnnnnnnnnnnnnnnnnnnnnnnnnnnnnnnnnnnnnnnnnnnnnnnnnnnnnnnnnnnnnnnnnnnnnnnnnnnnnnnnnnnnnnnnnnnnnnnnnnnnnnnnnnnnnnnnnnnnnnnnnnnnnnnnnnnnnnnnnnnnnnnnnnnnnnnnnnnnnnnnnnnnnnnnnnnnnnnnnnnnnnnnnnnnnnnnnnnnnnnnnnnnnnnnnnnnnnnnnnnnnnnnnnnnnnnnnnnnnnnnnnnnnnnnnnnnnnnnnnnnnnnnnnnnnnnnnnnnnnnnnnnnnnnnnnnnnnnnnnnnnnnnnnnnnnnnnnnnnnnnnnnnnnnnnnnnnnnnnnnnnnnnnnnnnnnnnnnnnnnnnnnnnnnnnnnnnnnnnnnnnnnnnnnnnnnnnnnnnnnnnnnnnnnnnnnnnnnnnnnnnnnnnnnnnnnnnnnnnnnnnnnnnnnnnnnnnnnnnnnnnnnnnnnnnnnnnnnnnnnnnnnnnnnnnnnnnnnnnnnnnnnnnnnnnnnnnnnnnnnnnnnnnnnnnnnnnnnnnnnnnnnnnnnnnnnnnnnnnnnnnnnnnnnnnnnnnnnnnnnnnnnnnnnnnnnnnnnnnnnnnnnnnnnnnnnnnnnnnnnnnnnnnnnnnnnnnnnnnnnnnnnnnnnnnnnnnnnnnnnnnnnnnnnnnnnnnnnnnnnnnnnnnnnnnnnnnnnnnnnnnnnnnnnnnnnnnnnnnnnnnnnnnnnnnnnnnnnnnnnnnnnnnnnnnnnnnnnnnnnnnnnnnnnnnnnnnnnnnnnnnnnnnnnnnnnnnnnnnnnnnnnnnnnnnnnnnnnnnnnnnnnnnnnnnnnnnnnnnnnnnnnnnnnnnnnnnnnnnnnnnnnnnnnnnnnnnnnnnnnnnnnnnnnnnnnnnnnnnnnnnnnnnnnnnnnnnnnnnnnnnnnnnnnnnnnngcacaaggtaaaggtaatttacagcatgccacaaaacaatttgttttatttcttgactttccctaagcagataagcagtttcttctttaactcattactttgtttgatgtgtcttgcatatttttga

SEQ ID NO: 42835 - DNA, 248 bp, Macaca Mulatta
ctcaaccagggcaccaggacaaagtggctgtcgcctggacgggagcagatggaaggggtggggatgacctctaggcaggggatgcccgcctggcacgggagccccagggatggcggtcggatttcaggtcccggccaagcctgagagactctggctgcagcggatcggggagccaggtggactagagcttggcctgcgtgtgcctcccgcagactccgcggtgatggtcttcctcatcctggccaggt

SEQ ID NO: 42836 - DNA, 627 bp, Macaca Mulatta
cactaaaacgctgttagtgtgctcaactacagaaatagccgctgctaagtgatgtagattttctacttgaatatttttatgttgtaggaacctcaggaggtcagtgtttactgttttatatatgccttctttttcctgtttgagcttctctctttgaaggattctaacagaacaaagctgctgatcaacctaagttggaaacagaaagtgtaattaatataacttaaatgcatgtttggcagttccatgttacagtccattagtgagtgaacttagtgacacaggtattcatttattcaggaaagaattttgctttttgtattgtctgatctcttcaatgacttcatactgtgttagaaaaaaaaatcacttttttatattttttggttggttatttcccaaataatcaacatgtaaataatcttttaagagccagttctgatgctttacattattgctacttgattttgttacgcaagttagatttcagaagaatagattttaaaacacttaaccaagccattacatcttaaaaacaaaacaagtagcatacattttgtaattaacatattgataaacactgtgattcttttggttaagactttttcatctgaattgcttaaattg

SEQ ID NO: 42837 - DNA, 778 bp, Macaca Mulatta
  misc_feature (1)...(778): n = A,T,C or G
ggattccagtggcctgtaattacttaaatatttctctttaccactcctgaagcattctttggtattctttgctagttctttgccgtgtggtcctggtgccaaagaaagaagggatttagagtctcttagcttttaattatttgtttccaagagattttaaattagaatcattcattcagtttttttgagacggagtctcannnnnnnnnnnnnnnnnnnnnnnnnnnnncgnnnnnnnnnnnnnnnnnagctccgcctcccgggttcacgccattctccgnnnnnnnnnnnnnnnnnnnnnnnnnnnnnnnnnacccgccacctcgcccggctagttttttgtatttcnnnnnnnnnnnnnnnnnnnnnnnnnnnagcgaggatggnnnnnnnnnnnnnnnnnnnnnnnnnnnnnatnnnnnnnnnnnnnnnnnnnnnnnnnnnnnnnnnnnnnnnnnnnnnnnggcctcattcagtcttgagatgaaaaagctgtttttaggctgggactcagagggtattcccctcggtggtcctcagtcagccttaagcattgtaggtgtacaaatttaatattaatctgttcacttgagtgaccaaactctggtgaagtgattcacagtcacacaactcacnaggaagttaattggggaaaatgcaattctaatgcattaatttacagtggaagcagatcatcctgaaagcttgaactgnatgttgtctttggttgaagataaacccacttgaggcgagagaattaaatttaggacattgctaa

SEQ ID NO: 42838 - DNA, 501 bp, Macaca Mulatta
  misc_feature (1)...(501): n = A,T,C or G
catggctggggccatcgcttcccgcatgagcttcagctctcttaagaggaagcaacccaagacgttcaccgtgcggatcgtcaccatggacgccgagatggagttcaattgcgannnnnnnnnnnnnnnnnnnnnnnnnnnnnnnnnnnnnnnnnnnnnnnnnnnnnnnnnnnnnnnnnnnnnnnnnnnnnnnnnnnnnnnnnnnnnnnnnnnnnnnnnnnnnnnnnnnnnnnnnnnnnnnnnnnnnnnnnnnnnnnnnnnnnnnnnnnnnnnnnnnnnnnnnnnnnnnnnnnnnnnnnnnnnnnnnnnnnnnnnnnnnnnnnnnnnnnnnnnnnnnnnnnnnnnnnnnnnnnnnnnnnnnnnnnnnnnnnnnnnnnnnnnnnnnnnnnnnnnnnnnnnnnnnnnnnnnnnnnnnnnnnnnnnnnnnnnnnnnnnnnnnnnnnnnagtatggcgactatgaccccagtgttcacaagcggggatttttggcccaagaggaa

SEQ ID NO: 42839 - DNA, 1123 bp, Macaca Mulatta
gggcttttctttaattcttgtctgttcgaggctcactccttagctctactgactcccaacagagcacccaagaggaaaatggccataagtggagtccccgtgctaggatttttcatcatagctgtgctgatgagcgctcaggaatcatgggctatcaaagaagaacacgtgatcatccaggctgagttctatctgaaccctgaccaatcaggagagtttatgtttgactttgatggtgatgagattttccacgtggatatggcaaagaaggagacggtctggcggcttgaagaatttggacgatttgccagctttgaggctcaaggtgcattggccaacatagctgtggacaaagccaacctggaaatcatgacaaagcgctccaacaatactccaatcaccaatgtacctccagaggtaactgtgctcacaaacagccctgtggaactgggagagcccaacgtcctcatctgtttcatcgacaagttctctccaccagtggtcaaagttacatggcttaaaaatggaaaacctgtcaccacaggagtgtcagagacagtcttcctgcccagggaagaccaccttttccgcaagttccactatctccccttcctgccctcaactgaggacatttatgactgcaaggtggagcactggggcttggatgcacctcttctcaagcactgggagtttgatgcaccaagccctctcccagagactacagagaacgtggtgtgtgccctgggcctgattgtgggtctggtgggcatcatcgttgggactgtcttcatcatcagggttggcacaacaagctgaacccggtgcccggaaacattccgggaggttcccaaaaaactcaaactcgctatagccagaggagtaacccataccaagggactacacacccaacaaggtgctacactataacgtgctttttgccgttttcttttcgccttgttacactgtttcttttgtttggtgatacaagcagaaaaacatgacactggaatgagagagcataatacgtagcaggtataactagtcaatcacaacgttcgaagtaataacacagtaaaacaacgaaggaacaggcaatgatagtagacgtacacaaataaagaag

SEQ ID NO: 42840 - DNA, 785 bp, Macaca Mulatta
ggggtggggagaagttcaagtatgccagagcttacagaagattaactattttatgagaacttctggcactctcagacagtaaaagccactgtggactggagctaaaataaatctttccaacctaaacactgcacaacaacttttctaaatagaggtgaaaaattcagatctggaccactagtcttaagaacagaaacaaggctggatgaattgaagatcctatcctggagcagcaaagcataatgctttagagatatgttctggagccagagtgacaaggttaaaatttccagctctaccatatgagagctgtgtgaccttaagcaagtcattaatctctttgtgtctctatttacacctctgaaaatgggcataagatcagtacggagcttatcaaaggctgttgcaaaattaaatgaatgaatatttaaggcacacagaacagtgcttagcttaggacatgataaattttattttaattagccatacttctcctccttttccaaagaatccacttcaaactgacacaccaataggggctatccatccgggagaaactaaaaccatttgtttgttggggtaagtgccaataaatgacaaccatagaacaaaactttagaaatttctgatactcaattttgataattcattcatttagccactaactttcttcaaacttgtaaagtgtacaaaggaaggtttgctgacatgggggaaaactgccgaaataatgaaacccatcccctttaaataattttttcttggcatctccaggtttaaggtcc

SEQ ID NO: 42841 - DNA, 208 bp, Macaca Mulatta
  misc_feature (1)...(208): n = A,T,C or G
tcagggaggttaccaaggaaatggcaaacaaggtttcatgtgcaaggacagatgagatttgttgactgtctgttttggttgatgaattttgttcagagtttcatcctactctaagtggattgaaagtatataaannnnnnnnnnnnnctctttagcctgtactcccactgcttctatcaacccagcaacaccagataatgcatcacac

SEQ ID NO: 42842 - DNA, 105 bp, Macaca Mulatta
acttatgaagtgataacccatccccttcagggctgactcttgcttgtcctctaggagaataaaccatgggggtgcctgagggatgcaaagaatcacacccaaatc

SEQ ID NO: 42843 - DNA, 721 bp, Macaca Mulatta
ggatcttttgtagaaatgtggaaactgaagataaaaaaattaggtttcagaagaaaactctagtacacctgttattagattctagccctaaacattgtttttgaggtttttattatttacctgcaatttggactaaattctgaattatttcctgactacaagtatccaaagaataaatgggttttcattttctttatgatagttttagttggcttctaatgcaacaacaatttttattgtatcctgtgtgcattctattcctactattcaaattattaatgttatagatctttcattgtagtacttctgaattaaccaaaatcacagtattctgaagatgattctacaaagcctgctgatgatttctacaaagcctgctgtattgttgctgtagaaaacacattgatgcaacatgttcaccccaacctcctccctaaaggctcagggcccatcgcggaagaggaaggcgcgtgagattgtaagagccaaattagggggatggagtgtggaggataaggacacttcatcttggttacttacctgccaaattgacttctgatgaaagccaactccagaaatgtgcctacagtttctcctttcacctaaacgctgcccttggtcaaatccttctcttcttctaagcaatcaactttcaattcccttgtataacccaccagtattaaaaaggctttttatacccattccaattcctcattgcatt

SEQ ID NO: 42844 - DNA, 396 bp, Macaca Mulatta
  misc_feature (1)...(396): n = A,T,C or G
gccattataatataagcttcccaaaatgtaactaattgttcacatcccctgctgatcggcagcactccccaatgcctaccaaattaaggaatgctcgcccagtgtcaactgagacattgctgnnnnnnnnnnnnnnnnnnnnnnnnnnnnnaacacgattttctaaatagctaatatttgatgtcatttatttatcaaatgttatttgggggcatttcatgtgccaggcatatgtaacacttaaaagaatcttgtgtaagttacggtagtattattatccttatcttaaatatgagggaactgaggcttacagaagttaggtaacttatgaaagttcccctttatggtggagctagatttccaggctgtgtctgaatattttctgagacatgctaa

SEQ ID NO: 42845 - DNA, 1510 bp, Macaca Mulatta
  misc_feature (1)...(1510): n = A,T,C or G
cagcaaaaatataccaacattgttaaagaaatcaaagcaaaggatcttgaaatcaggatacacaagaagaaaaaatgtgaaatttatcggagnnnnnngagtttgctaaactgtatgacaccattcgaaatgaaagaaacaaatttgttaacttactccacaaagctcatcagaaagtaaatgaaataaaagaaaggcatannnnnnnnnnnnnnnnnnnnnnnnnnnnnnnnnnnnnnnnnnnnnnnnnnnaaagaaagctacaaaattccatgctgaaacacgccaacaatgttaccatcagagagagcatgcaaaacgatgtgcgcaaaattgcatcaaaacttcaggaaatgaaagaaaagaaggaagcccagttaaataacattgacagacttgccaatatgatcacaatgatcgaagaggagatggtgcagcttcgcaaaagatatgaaaaagctgttcagcatcgaaatgaaannnnnnnnnnnnnnnnnnnnnnnnnnnnnnnnnnnnnnnnnnnnnnnnnnnnnnnnnnnnnnnnnnnnnnnnnnnnnnnnnnnnnnnnnnnnnnnnnnnnnnnnnnnnnnnnnnnnnnnnnnnnnnnnnnnnnnnnnnnnnnnnnnnnnnnnnnnnnnnnnnnnnnnnnnnnnnnnnnnnnnnnnnnnnnnnnnnnnnnnnnnnnnnnnnnnnnnnnnnnnnnnnnnnnnnnnnnnnnnnnnnnnnnnnnnnnnnnnnnnnnnnnnnnnnnnnnnnnnnnnnnnnnnnnnnnnnnnnnnnnnnnnnnnnnnnnnnnnnnnnnnnnnnnnnnnnnnnnnnnnnnnnnnnnnnnnnnnnnnnnnnnnnnnnnnnnnnnnnnnnnnnnnnnnnnnnnnnnnnnnnnnnnnnnnnnnnnnnnnnnnnnnnnnnnnnnnnnnnnnnnnnnnnnnnnnnnnnnnnnnnnnnnnnnnnnnnnnnnnnnnnnnnnnnnnnnnnnnnnnnnnnnnnnnnnnnnnnnnnnnnnnnnnnnnnnnnnnnnnnnnnnnnnnnnnnnnnnnnnnnnnnnnnnnnnnnnnnnnnnnnnnnnnnnnnnnnnnnnnnnnnnnnnnnnnnnnnnnnnnnnnnnnnnnnnnnnnnnnnnnnnnnnnnnnnnnnnnnnnnnnnnnnnnnnnnnnnnnnnnnnnnnnnnnnnnnnnnnnnnnnnnnnnnnnnnnnnnnnnnnnnnnnnnnnnnnnnnnnnnnncaggagttcttggaagcagataatcgccagatgcccaatggtgtttacacgactgcagagcagcgtccaaatgcctacatcccagaagcagaggccactcttcctttgccaaaaccttatggtgctttggctccttttaaacccagtgaacctggagccaatatgaggcacataaggaaacctattataaagccaattgaaatctgagtaggtgaacaaatccaggcctatgaaggagaggacttcaaccaggcttccttgtacccacaggtgaaaaatgtgagcata

SEQ ID NO: 42846 - DNA, 634 bp, Macaca Mulatta
ggggaccaatgagatggctgagtcttgagaagggaggagaatttcctaagatctctgcccagagattgccatgaatgaggaggcccagccagatgacctggactccagcctgcactcaaagatcactagtgtggctcgggcacatgcatcagtcaagttctgtcatcctgactgatgccttctctctcatgtcccagcagagggatgcttggagtcacggtgccagctggaagccccagaatgtgaaatataaaaagtcaaataactgttttaatggtccccaaacacttttgcaacttgagtcactgtaccggaattggatttcagttgggtaaatcttttgtaaggtgcatgaaaggaagtcctggtaggaaatttgagaaagcattaatgtggcagatgagctcccatgtggttccaagtgagaaaagagtacttatgaaccttgacggcccgaaaactgattgccctaggaagacttcctccaagccccgggaagtgaacttcaatgtacatctgcttaaggaaaacagtctctaggacagttaaagaaaccctctctcagggacgtagattggacacccccgttggggggtcattcatctttcatctcgcttcccaacttaaacaaccc

SEQ ID NO: 42847 - DNA, 116 bp, Macaca Mulatta
atccccttaatcgtcgaagaaaagcagatacctgccgctaccacatttgttcaaaagccattcttaaaattactagtggaagaagacagaacctctgacatattcaagaaatttag

SEQ ID NO: 42848 - DNA, 183 bp, Macaca Mulatta
aggactgggtcatctcataagagctaagcatgacagatatcaacagggcgggcttcctaggatgatttctgagccaacagtccaagaccttttgttgatttcagccccacttagccaagacctcaagtataaataattctgataattatggagaaatcaactgctattttatactgattctgt

SEQ ID NO: 42849 - DNA, 675 bp, Macaca Mulatta
  misc_feature (1)...(675): n = A,T,C or G
ggtgctgctacagaccttttccttttgtccttccctctgttgctatggacttgatcacctcacataggacccaaactgtcaccctgtgctcaaagacttaaggcttcctttctctcattgctagcccctagggagtagagtttctcggtctccttgctaaaaaccagttcctttaggaaacaaatcaaaacaaaaccagcttataaaaaggaaaaatagtttctccttttaagcatgggtacctaaaatttattttaaatttaatatgaatttccgggggaactttccctggnnnnnnnnnnnnnnnnnnnnnnnnnnnnnggccccccaggggagaaacccctttttttcccaaaannnnnnnnnnnnnnnnnnnnnnnnnnnnnnnnnnnccaaggggggggnnnnnnnnnnnnnnnnnnnnnnnnnnnntattgtggggggccccaaaaaatccgggggggggttannnnnnnnnnnnnnnnnnnnnnnnnnnnnnnnnnnnnnnnnnnnnnnnnnnnnnnnnnnnnnnntannnnnnnnnnnnnnnnnnnnnnnnnnnnnnnnnnnnnnnnaaggggggtttcgtgcgnnnnnnnnnnnnnnnnnnnnnnnnnnnnnnnnnnnnnnnnnnnnnnnnnnnnnnnnnnnnngtttagaaaaaagagaggggga

SEQ ID NO: 42850 - DNA, 2234 bp, Macaca Mulatta
  misc_feature (1)...(2234): n = A,T,C or G
agactccgcacagctcagacccccgcagtcagccttgtccacctttctgtccccaggcccagtggtgtctccctgctatgagaacatcctggacctttctaggagcacctttagggggccttccccagagccacctccatccccactgcaggtgcccacctacccacagctaactctggaggtaccacaggcccctgaggtcctcagaagccctggagtcccccccagcccttgcctcccagaatcttacccctatgggagcccccaggagaagagtttggacaaggcaggctcggagtctccccatcctggccgcaggaccccaggcaactcatccaagaagcccagccaggggtcagggcggcgacctggggatcctggcagcacacctctgcgggacagactggcggccctggggaagctgaagacaggccctgagggggccctgggcccagagaagaatggggtgccagccaggcctggcaccgaaaagacccggggaccagggaagtcaggggagagtgctggagacatggtgccccccatccacaggccaccagagcagctagaagctaagggagggatacggggggcagtggccttgggcacgaacagcctgaagcagcaggaacccggactcatgggggatcccggggcccgagtctactcctctcactccatgggggccagggtggacctggagcctgtctcaccaaggagctgcctcaccaaagtggagctggccaagaaccggctggcaggggccctgtgcccccaggtaccccggtacccctgccaaagtgccaacctcagcccccagccctgggcatccccaatataagcccttccagcagccccaccaagctccctttccaaggcacccaacaagagtggtggcctcaacctggggctcccccattcaccaagnnnnnnnnnnnnnnnnnnnnnnnnnnnnnnnnnnnnnnnnnnnnnnnnnnnnnnnnnnnnnnnnnnnnnnnnnnnnnnnnnnnnnnnnnnnnnnnnnnnnnnnnnnnnnnnnnnnnnnnnnnnnnnnnnnnnnnnnnnnnnnnnnnnnnnnnnnnnnnnnnnnnnnnnnnnnnnnnnnnnnnnnnnnnnnnnnnnnnnnnnnnnnnnnnnnnnnnnnnnnnnnnnnnnnnnnnnnnnnnnnnnnnnnnnnnnnnnnnnnnnnnnnnnnnnnnnnnnnnnnnnnnnnnnnnnnnnnnnnnnnnnnnnnnnnnnnnnnnnnnnnnnnnnnnnnnnnnnnnnnnnnnnnnnnnnnnnnnnnnnnnnnnnnnnnnnnnnnnnnnnnnnnnnnnnnnnnnnnnnnnnnnnnnnnnnnnnnnnnnnnnnnnnnnnnnnnnnnnnnnnnnnnnnnnnnnnnnnnnnnnnnnnnnnnnnnnnnnnnnnnnnnnnnnnnnnnnnnnnnnnnnnnnnnnnnnnnnnnnnnnnnnnnnnnnnnnnnnnnnnnnnnnnnnnnnnnnnnnnnnnnnnnnnnnnnnnnnnnnnnnnnnnnnnnnnnnnnnnnnnnnnnnnnnnngagctggcgggagcccaagcctgagtacggggatttccagccagtgtcttctgaccccaagagcccttggccagcctgtggaccccggaatggcctggtgggccctcttcagggctgcggaaaacctcctggaaagnnnnnnnnnnnnnnnnnnnnnnnnnnnnnnnnnnnnnnnnnnnnnnnnnnnnnnnnnnnnnnnnnnnnnnnnnnnnnnnnnnnnnnnnnnnnnnnnnnnnnnnnnnnnnnnnnnnnnnnnnnnnnnnnnnnnnnnnnnnnnnnnnnnnnnnnnnnnnnnnnnnnnnnnnnnnnnnnnnnnnnnnnnnnnnnnnnnnnnnnnnnnnnnnnnnnnnnnncccagctcggcccccaccccttaccaaagtcccccgccgtgcccacacactggagcgggacgtgccaggcatagaggagctgctggtgagcgggcggcaccccagcatgccagccttccctgcactgctacctgctgctccgggccaccggggccatgagacctgtcctgatgngatccctgtgaagacccaggccccacccctcctgtccagctggccaagaactggaccttccccaatactagggcagctggcagctcctcggatcctttcatgtgcccaccccgacaattggaggggctgcccaggacccccatggnggccctgcccgtggaccggaagcg

SEQ ID NO: 42851 - DNA, 826 bp, Macaca Mulatta
  misc_feature (1)...(826): n = A,T,C or G
gggttagtttcgtttctctcttaggagtcaacagccagttcagaagtttttgaggatggacttggagttctagtagctaggctaattctggaagtgaaatgatggtaaacagcacatgtaggagcttttacttacagttgtgtatataaagtggctcagaaaaatgctatatagcaaatatacagctacatatttgattttacagctattgttacctagaatgaggtgaaaggacatgtttaggattttttaaagtgtgaggtaagttacaatagtaagaagcgatagtagcgtgatgcctgaccatggctggaaggtgggtgctgatgatggacattggaaccagacctggatgcgtctttgtcatcaggatcaggaggcaaagagcctgtcttttcctagttctgctgnnnnnnnnnnnnnnnnnnnnnnnnnntcttaataaccaaaaacaaaagccctcttaggcatttagaataagcatttggggccaaaggggacagaaagagaagcctgaaatttactttttctcctccataaaattaacattgctgtccgtttttttccatgggaattggtcaaaaaaaattctttacccttttcatggtaannnnnnnnnnnnnnnnnnncctattcctcccaaatgggaaatttttggataaatttttgtaagttttatatttaaaccttnnnnnnnnnnnnnnnnnnnnnnnnnnnnnnnnnnnnnnccgaacaaaaaatcttggcttttgctcccccaggcttgggaaaaacaacggggccccgaatataagggcttcattgtaaaacccctgtgcccctatag

SEQ ID NO: 42852 - DNA, 974 bp, Macaca Mulatta
  misc_feature (1)...(974): n = A,T,C or G
ggcaacttggggcttgaatgggtgctgggctgtaggtactactgggtcactgttgctataaatggtcactggaacagattaataaatcaaggtttattaatcagtttcacccatagttagaggactacttgactcatttctgtctctagtaaatggactttggtagtagcaacaccataccgtgatgatatcatttgtgtcgggaatcaaactgggcgacgcaaggatggtttcggtttttgaagcctaaatctatggaagacttaccagtttgggagaggataataataaaagtaacaatcaatgcttccaaactccaattgagtctcttttttagcttttatatttacttagttgttatgctaaccaattcagctttttactgttgctgttgttaagaaataaaatttctgattgctgttttcataaagttccagtttggtgatttcttataaatataatcctcatatgatttattcattcagaacaatttattgatctatctaatctgacgtactgggcgatacacctattggtgttattnnnnnnnnnnnnnnnnnnnnnnnnnnnnnnnnnnnnnnnnnnnnnnnnnnnnnnnnnnnnnnnnnnnnnnnnnnnnnnnnnnnnnnnnnnnnnnnnnnnnnnnnnnnnnnnnnnnnnnnnnnnnnnnnnnnnnnnnnnnnnnnnnnnnnnnnnnnnnnnnnnnnnnnnnnnnnnnnnnnnnnnnnnnnnnnnnnnnnnnnnnnnnnnnnnnnnnnnnnnnnnnnnnnnnnnnnnnnnnnnnnnnnnnnnnnnnnnnnnnnnnnnnnnnnnnnnnnnnnnnnnnnnnnnnnnnnnnnnnnnnnnnnnnnnnnnnnnnnnnnnnnnnnnnnnnnnnnnnnnnnnnnnnnnnnnnnnnnnnnnnnnnnnnnnnnnnnnnnnnnnnnnnnnnnnnnnnnnnnnnnnnnnnnnnnnnnnnnnnnnnnnnnnnnnnn

SEQ ID NO: 42853 - DNA, 799 bp, Macaca Mulatta
  misc_feature (1)...(799): n = A,T,C or G
ggcgcannnnnnnnnnnnnnnnnnnacaacactttgggaggctgagatggcaaatcacnnnnnnnnnnnnnnnnnntcagtnnnnnnnnnnnnnnnnnnnnnnnnnnnnnnaaaaacnnnnnnnnnnnnnnnnnnnnnnnnnnacacacctgtaatgccagctatttgggaggctgacacaggagaaacgcttgaacccggannnnnnnnnnnnnnnnnnnnnnnnnnnctnnnnnnnnnnnnnnnnnnnnnnnnnngggcannnnnnnnnnnnnnnnnnnnnnnnnnnnnnnnnnnnnngccaacgttcttcaagtgcagaggcaacacagggaggaagcaagagggaaatgcccagctatctaccaactgctccagccatcccagctaaggcactagatttatgagttaagaagccaccgtggacattatagccaacagatcacatgtggagaagtctccataaagccatacacaaattttagaatcaagagcagatacacaattgttttagccactatgttttggagtgcttaattatgcagccacagattacccaaaccatacaaataaaccaatttaaaactgttcctgtttggtagtaacccatgacaacaaaaaatgtcagttggtaaccatttgcttacagttaataatccctataaaaaaatccttcccacaaaaggtacctttttttgagaattttaagtggttcttaaaggtactctgttttattttcaccattgggccacgtatagaacgaagaaattaaatttaacccaaaaaggcttaactctta

SEQ ID NO: 42854 - DNA, 771 bp, Macaca Mulatta
  misc_feature (1)...(771): n = A,T,C or G
gggtttgtttgtttgttttccatttaaagagatagggtttgctgtgttgcccaggctggccttgaactcttgggttcaccagggcttctagttttgctttgatatagattgttagtcacatataaaatgttatgctattactggggcaaaaaaagagggatactacataatggttaagtgattcaaaatacttaaagcaaaaactgatggaactgaaggagaaatagacaaatccttaagtaatgtaatcagccttctctctgtaacnnnnnnnnnnnnnnnnnnnngtagatagaaaatctactggaaggaggtagaagaagtgaacaacactgtcacccagcttgatttaattgacacttaaaagaacactgtgcagcagcttcaaaatatacattctttttatatgcacatggtgtattcaccaagatgaaccatattttgggccataaaaactcagcaaatttctactaaaaagtagaaattctgtgaccacaacagaataaaagaagaaagcagtaacagaaagatatctagataatccccatatattggaaattaaatgcacttttaaatagcccgtagtcaaaaagtcataagggaaattagaaaacatcttgaatagaatggaaacaaacagacaacatgtcaaaaacatatgatcccagccaaagcactactgaaggaaattaaaagcagttagtgaatttaaaaatcttaaatnctcccatataaactttccacatttagaaaacggaaaaaagaagagcc

SEQ ID NO: 42855 - DNA, 854 bp, Macaca Mulatta
  misc_feature (1)...(854): n = A,T,C or G
ggggcagggttgactgcaaaggacagcaggaagaattcttggagcgatggaactgttttctgtcataactgtggtggcaggcacacatcggtatgcatttgtcaagattttaagaaggatacaccacaaagagtccattttactgtatatnnnnnnnnnnnnnnnnnnnnnnncaaaaatgacctgtaccctacgattataaattggtaaaatatacataagataactggtaacaatggatgtattaggataaatggttttcatttccttttctctattttccaaattttgttgtatggtcagattgcacttacatttaaaaacaaggaaggcatatcatttatattactttcctgatctagtactactactgaaatttcaaattaaatcaataatgccaaaataacaactttggcaaaagaatgtaagtgtaacaagataacccaaggccacgagaacatttctgcggaggtgtgtgctccctgcttccgtgttctgtcctctactctgcacttggccctgagcatcaaaactccagtccaggctctccattaatcacaacattcagaagtgtcactagaaacacagatcttcattccaggggtactcatctccctcagggaaaacgttaacaacagagtatttggccttaggcaagcaagatttctttcctttttggcaatttccaatacattaaaacgcctccatgggaagaaaattccctaaccttagtttaaccaagctccaacgaagggaaacacccactttaaaaattttcggaaacctattccgccctctggagagaccagcacccgaaatcccgtttccgggttcctctttcccctccccgttta

SEQ ID NO: 42856 - DNA, 221 bp, Macaca Mulatta
atggcacacaacacaatccctcggccagttaaagctcttccatcctctggctccaatttacctctgtatcataattgggttagtttgcccatatggaacctgctccaggcatataggtattccccaaatattcaagcacatcagaagtttctccccaactcaattatgtttgttctagacccgctagcccagtggctcccaaatataactggagcaggata

SEQ ID NO: 42857 - DNA, 782 bp, Macaca Mulatta
  misc_feature (1)...(782): n = A,T,C or G
ctttatcgaggtttaacacatatttttattaagctgctggggaattcctgggccttttcgggatattaaggatccataaattaaaaaatatccacatccgaatgatttttcacctccttttcaggtgggtttttttaaaccggtcttattgaggtatgcttaacataccataaaatatcccccgtttaaacggtgcatttcaatgatttttgggcgtatttacggaatggctcagccatcaccacaatgcagttttgaaacatttccatcactccaaagagatccccatgtacattttgtagtcatttccattctcacctccagccccaggcacccactaatctactttcggcctctatactattgcctttactggacaattcatataaacagactaatatattatgtggtcttttgtgtctggcttcttttatgtaacataaagctttgaaagtttatccatgttgtagtgtgtgtcagtactttatattgctaaatgctattcggttgtgtgtatttaccacattttgcttatgcatttactggacaatttggattgtttcccttttctgactcttaggaatgatgatgctataaacactaacatacaaatctttgcgtatctgtatgttttgttttgagaaggagtcttgctttgccaccctagcctggagtgcagtggtgtgatctctgttcactgtaacctccacctcccaggtacaagcnnnnnnnnnnnnnnnnnnnnnnngnnnnnnnnnnnnnaaagtgcccaccaccacgcc

SEQ ID NO: 42858 - DNA, 670 bp, Macaca Mulatta
  misc_feature (1)...(670): n = A,T,C or G
agctaagctgatttaccagactggcaaaggatcagaattttcttcctatcccccataatcctttaagcttgggatgtcatgcgctttctcagtattcggatttttttaaggtaaatatgtaattatttttcgttgtttgttcagtcaaacttgtatttgagtgctggccctgtcccctgttaggtttgtagccttagggttattttaacttactgtgtgccatggtttctttttaagaagattattttcactaccagttttgtaaagttggtgtgaaaattaaatgatttaaagcacattgtctggtacatgctaagcacagaatacacataacccataatcgttctttctttactattcaacttaaatcttgtattttttccattaaatattgttttctagtgttatgaaaatactagtttggccgggcacannnnnnnnnnnnnnnnnnnnnnnnnnnnntgagaggccaagaagggtgggtcacttgagggtcgnnnnnnnnnnnnnnnnnnnnnnnntnnnnnnnnnnnnnnnnnnnnnnnnnnnnnnnnnnnnngaccgggcatagcggtgcacgactgtggtcccagctacccgggaggctgaggtgaggcaggagactcgcttgaccctgggatgcggaagttgccgtgtgccgaggtcgcac

SEQ ID NO: 42859 - DNA, 342 bp, Macaca Mulatta
ggcctctcccaggcgggcccctgtccacctcgtgaggcccagcccccaccccctgcctctccagccagctcccctggcccaggacatctcacgcttccctgagggtaccccctgccatggcacgtgcctatcaccctgcctggaaggccggcgtccactgtgtctcctgctgtgctgggcccgctcagatcctttcctcagctgttctgccttggggccggggcagggacccctcatgggtactcccacaggccgacctgtccaggcctgcacggtgtcccgtgaggtccgggagctccccacgattagggcctgctctgtgtcccctgtcatgtccccagc

SEQ ID NO: 42860 - DNA, 437 bp, Macaca Mulatta
tgaacaatgccctttcactgtatataaggattttcggctgatatatcggcagtgtgcacttctcttcattgtggttggagttgatgacactgagacagagatggctatttatgaattcattcataattttgtggaagttttagatgagtatttcagccgagtgagtgaattagataaaatgtttaatttggataaagtacacatcattttggatgagacggtgttaaacggctgcgttgtggaaactaacagggaaagaattcttgcccctctactaattctttatgtcagaaagctgaaaggaagtatcttccagacaacatggatttatcggaaatgctagtaccgtggaatacatcccatcatctgtaacccggaagaatctggaagaccgcaattacaaaatggggtatccttccaaagacattataaatagg

SEQ ID NO: 42861 - DNA, 200 bp, Macaca Mulatta
aggtgctgttcgtggtggtggacgtggcggctgacaatgagcacgtgctgcagtactttggcctcaaggctgaggcagcccccaccctgcgcttcatcaacgttgagaccactaaaaagtacgcgcctgtggatgggggccctgtcaccgcagcttccgtcactgctttctgcgacgcagtcctcaacggccaagtcaag

SEQ ID NO: 42862 - DNA, 602 bp, Macaca Mulatta
cgcttttgttaggactagaaactatactggatgagtatgtatactgcatgtttacacatgctgtgtttatatgtgaggcttcactgaccaccgtgcattttgaaattgtattacattttgtgtgtgtgtggtgataggtttgttcttcttgcttaaggagctctgttctgtgtaggcagtacagtgttaaggaggttgctgaattagttatctaaaaatgtatccgtgaatttggggtaaataatgcttaatatctgaagtattttcagtaaacgtggagatatatcagataatacttttaaattagtggaaacactcgcatttctgagtgagctatgaactataatcatctcttcccctgagtttagagaagttgttttcacattctttacatttatggcacatatattgaacttacataataactcttccctgattttgagaacaaatttagcagtttcctaaaaatcttcctcctctttccatacagatgtcatatgttatagtttaaacatatgtacagttttctgatagaatccaaggagctgatttaggaaagaatattaacacctacggttgtgcagctctaatcttactgaaaa

SEQ ID NO: 42863 - DNA, 353 bp, Macaca Mulatta
  misc_feature (1)...(353): n = A,T,C or G
ggattatttataagagaaaaacactgaaaacaacccacaagtttatcattagggacatggctaattaaatcaatatataccattagtttccaaacatctttgatcttatactcctaattgtaagtaatttttgagcatgcaattcattattagatataattgtatcaggttaaatagatgcacttctatgccgacattgtacactatacaacatatacataaataagagttttttgaaagcgtaaaagcatgcaatgcactgggggaaattatttcagtgacgagattctaagtctcccttatgcagaatattnnnnnnnnnnnnnnnnnnnnnnnnnnnnnnnnnnnnnnnn

SEQ ID NO: 42864 - DNA, 1083 bp, Macaca Mulatta
  misc_feature (1)...(1083): n = A,T,C or G
ggnnnnnnnnnnnnnnnnnnnnnnnnnnnnnnnnnnnnnnnnnnnnnnnnnnnnnnnnnnnnnnnnnnnnnnnnnnnnnnnnnnnnnnnnnnnnnnnnnnnnnnnnnnnnnnnnnnnnnnnnnnnnnnnnnnnnnnnnnnnnnnnnnnnnnnnnnnnnnnnnnnnnnnnnnnnnnnnnnnnnnnnnnnnnnnnnnnnnnnnnnnnnnnnnnnnnnnnnnnnnnnnnnnnnnnnnnnnnnnnnnnnnnnnnnnnnnnnnnnnnnnnnnnnnnnnnnnnnnnnnnnnnnnnnnnnnnnnnnnnnnnnnnnnnnnnnnnnnnctaaactccatcttaactcgtgaaactctagctgatgtaaaataaacaaccagagtggcctttcaaagcttacagaacatcacaatatcccaggacccccaaaactggggcattaggacaccctcttactatggccattggacttccttaaaaacgttcaggtaggttttagactaaacacaaaaactctaacgacccgtgccagggggacttgccgtatgcaaaaacaccactacgattctctttttagcgtgccacttgcacattcctcctgggttcttttctgaaaaacaggtgggtggggctggtattttattaacgcgcaaagaccccagcatgaaattaaagctcgaaaggccctccggagttttaccaccccgtgtgaagtagccacagaaaaagaagagaggantccgcaagataaaatanatgaagagagcacacagaacgcgcctggacaacgtatttataagcgccgtccccggtgtcgaaaaaaacatcttcatccgcagaaacgncctataatctctccctagaaaataaaaacaactccctgttacacaacaaaaagnggggatctaaatagtatataaaatcgtgnactgcacaacaaaataaatatcgtgctcgtatagtaacagccgagagaatcagcgtcagtagtcgtgggggtctaaaaaaagatgtcagagctcctccctattttatatatgcgcggagtaatatatacacacgtgtcgcgcgctatagacatgtagctcaaa

SEQ ID NO: 42865 - DNA, 732 bp, Macaca Mulatta
  misc_feature (1)...(732): n = A,T,C or G
agcagctaggaaatgaagtgggttggtatgttgtagttggatgtgcatgtgagagtaacaatgtcagatattaaggttcatgggtnttagaaatgtgtataatcaagtcctcatagccaaaagttttagtgtaaactatcagttcccagagaaaaaggagaaatgtaactaagaatgaagagaagaaagtgtccagaaattcagtgtgactatcagaaaccactaaaaatgaatgtagtgctggggagaactgcagactggcagagcgaggccagatggcctgtcacaccacaccgtagtgaacactaggagccaacaaactgcccagagccaaggccttggcaccacacccacaccacaggctcacacaggtaggaggcaggcaggttcaatcttgctgccatgcactaataaccacaggtggcttgaggtctttgaggttgtttcttctaacattctgcaggagggagttcatttttcaatagtgaacgggctgctgtaaacaggttacctcctgggaccactacagtttaaggacaaagtgtggggatagcacaagtgaagggagggtgtctctcctgcctcctcacctaagatgaaacctccatcagctcacccacacttgtttttctcttctccatgaacttgcaggggcatgtaccattagtaaggaaaataaaaccttttaaatatgtctactgaaagcatctttcttgcacaaggcttaaagta

SEQ ID NO: 42866 - DNA, 273 bp, Macaca Mulatta
tgaaccgcatcctgccccaccccaaggtaagaaggcagtctccaggcccccaaggctgggaaccgcacccccactcgcgcctccttgaccctgcgccgcctccccctcctcagtttgacccgcagaccttccacaacgacctggccctggtgcagctgtggacgccggtgagcccgggggggccggcgcgccccgtgtgcctgccccaggagccccaggagccccctgccggcaccgcctgcgccatcgcgggctggggggccctcttcgaag

SEQ ID NO: 42867 - DNA, 836 bp, Macaca Mulatta
  misc_feature (1)...(836): n = A,T,C or G
ttgttgcgggtcatatccgagagagggggacgtttccccccccgcatgggccccggggagtttttgtaaagcatcccttaacagtcaagggggttcccaccacgacggggggccttccaaaagtgctgtgggttttagggagggttggcacccccgcgttagggcgtctttgcgagccatgtcgtccagcgtgctcctcccctttnngagaaaggggtgtctagttcccgtcgccccagggtggagtggcagtggcacaatttttggctcacggccaggttccgcctttttgggtttcacgccattttgccttcagcccccttgagtaggggggacgacagtggccccccactatgcgcagggtaattgnnnnnnnnnnnnnnnnnnnnnnnnnnnnnnnggtgttagccaggatggtcacaatctcttgacttcgtgatccacccgtctcggcctcccgaagtgctggcnnnnnnnnnnnnnnnnnnnacacccagcctcccttgcctattcttaattgtctttttgttgagttgtacgaattattgtgatttttttttaagacagagtccgctnnnnnnnnnnnnnnnnnnnnnnnnnnnnnggnnnnnnnnnnnnnnnnnnnnnnnnnnnnnnnnnnnnncnnnnnnnnnnnnnnnnnnnnnnnnnnnnnnnnnnnnnnnnnnnnncgccgccgtgcccggctggtttttgtattttcagtagagacgannnnnnnnnnnnnnnnnnnnnnnnatctcgaagnnnnnnnnnnnnnnnnnnnnnntgccttggcctcctagnnnnnnnnnnnnnnnnnnnnnnnnnnnctcgcc

SEQ ID NO: 42868 - DNA, 773 bp, Macaca Mulatta
  misc_feature (1)...(773): n = A,T,C or G
gggggttggtgctcaagtgataccattaagtcccttaagatgcagaatttccttcccttccttttccttttccttttctttcttatctaatctatctnnnnnnnnnnnnnnnnnnngtctgtatctatatctatatctatatctatatctatatgtatttttgagacggggtctcactgtgatgcccaggctggggtgaagtgatgcannnnnnnnnnnnnnnnannnnnnnnnnnnngctcgggcgatcctcannnnnnnnnnnnnnnnnnnactgggacctccatgcccagctgnnnnnnnnnnnnnnnnnnnnnnnnnnnnntgccatgttatactggctggtctggaactcctgggctcaggagatctgcctgcctcggtctcccagagtgctgggattccaggcatcagtcaccatgccaggcccctggttctatttaaatgctcaaacttggtgtggaactgcacagactatacggctgctctccactcaagattacaaattgaacattgactttcctcattttttatccaattttgctttccagagacccagatatgacttcattttttaaatgaaattttgcaggtcattagctcataatgattaaatgattctggttattagcataaaacacagctgtagtacataaaaggtaaccctttattgtttaaatattattcagtgtgccccacatagcacacannnnnnnnnnnnnnnnnnnnnnnnnngaactccttcanggcaattacgggaaaataaactttac

SEQ ID NO: 42869 - DNA, 2025 bp, Macaca Mulatta
  misc_feature (1)...(2025): n = A,T,C or G
gagcaaaaaaggagcagatcagcagcannnnnnnnnnnnnnnnnnnnnnnnnnnnnnnnnnnnnnnnnnnnnnnnnnnnnnnnnnnnnnnnnnnnnnnnnnnnnnnnnnnnnnnnnnnnnnnnnnnnnnnnnnnnnnnnnnnnnnnnnnnnnnnnnnnnnnnnnnnnnnnnnnnnnnnnnnnnnnnnnnnnnnnnnnnnnnnnnnnnnnnnnnnnnnnnnnnnnnnnnnnnnnnnnnnnnnnnnnnnnnnnnnnnnnnnnnnnnnnnnnnnnnnnnnnnnnnnnnnnnnnnnnnnnnnnnnnnnnnnnnnnnnnnnnnnnnnnnnnnnnnnnnnnnnnnnnnnnnnnnnnnnnnnnnnnnnnnnnnnnnnnnnnnnnnnnnnnnnnnnnnnnnnnnnnnnnnnnnnnnnnnnnnnnnnnnnnnnnnnnnnnnnnnnnnnnnnnnnnnnnnnnnnnnnnnnnnnnnnnnnnnnnnnnnnnnnnnnnnnnnnnnnnnnnnnnnnnnnnnnnnnnnnnnnnnnnnnnnnnnnnnnnnnnnnnnnnnnnnnnnnnnnnnnnnnnnnnnnnnnnnnnnnnnnnnnnnnnnnnnnnnnnnnnnnnnnnnnnnnnnnnnnnnnnnnnnnnnnnnnnnnnnnnnnnnnnnnnnnnnnnnnnnnnnnnnnnnnnnnnnnnnnnnnnnnnnnnnnnnnnnnnnnnnnnnnnnnnnnnnnnnnnnnnnnnnnnnnnnnnnnnnnnnnnnnnnnnnnnnnnnnnnnnnnnnnnnnnnnnnnnnnnnnnnnnnnnnnnnnnnnnnnnnnnnnnnnnnnnnnnnnnnnnnnnnnnnnnnnnnnnnnnnnnnnnnnnnnnnnnnnnnnnnnnnnnnnnnnnnnnnnnnnnnnnnnnnnnnnnnnnnnnnnnnnnnnnnnnnnnnnnnnnnnnnnnnnnnnnnnnnnnnnnnnnnnnnnnnnnnnnnnnnnnnnnnnnnnnnnnnnnnnnnnnnnnnnnnnnnnnnnnnnnnnnnnnnnnnnnnnnnnnnnnnnnnnnnnnnnnnnnnnnnnnnnnnnnnnnnnnnnnnnnnnnnnnnnnnnnnnnnnnnnnnnnnnnnnnnnnnnnnnnnnnnnnnnnnnnnnnnnnnnnnnnnnnnnnnnnnnnnnnnnnnnnnnnnnnnnnnnnnnnnnnnnnnnnnnnnnnnnnnnnnnnnnnnnnnnnnnnnnnnnnnnnnnnnnnnnnnnnnnnnnnnnnnnnnnnnnnnnnnnnnnnnnnnnnnnnnnnnnnnnnnnnnnnnnnnnnnnnnnnnnnnnnnnnnnnnnnnnnnnnnnnnnnnnnnnnnnnnnnnnnnnnnnnnnnnnnnnnnnnnnnnnnnnnnnnnnnnnnnnnnnnnnnnnnnnnnnnnnnnnnnnnnnnnnnnnnnnnnnnnnnnnnnnnnnnnnnnnnnnnnnnnnnnnnnnnnnnnnnnnnnnnnnnnnnnnnnnnnnnnnnnnnnnnnnnnnnnnnnnnnnnnnnnnnnnnnnnnnnnnnnnnnnnnnnnnnnnnnnnnnnnnnnnnnnnnnnnnnnnnnnnnnnnnnnnnnnnnnnnnnnnnnnnnnnnnnnnnnnnnnnnnnnnnnnnnnnnnnnnnnnnnnnnnnnnnnnnnnnnnnnnnnnnnnnnnnnnnnnnnnnnnnnnnnnnnnnnnnnnnnnnnnnnnnnnnnnnnnnnnnnnnnnnnnnnnnnnnnnnnnnnnnnnnnnnnnnnnnnnnnnnnnnnnnnnnnnnnnnnnnnnnnnnnnnnnnnnnnnnnnnnnnnnnnnggctgttagtaacagactggtgttgcagagggaggcaaacaccctggcaggccagtcacagcccccaccaccgccacctccaaaatggcctggaatgatctcaagtgagcagttgagcttggaactgcaccaggtggaaagggaaattgggaagagaacacgggaactnnnnnngaaaaccagtgttctctggacatgaaaagcaaactgaatacaagtaaacaagccgaaaatggacaaccagaaccacaaaacgaggt

SEQ ID NO: 42870 - DNA, 818 bp, Macaca Mulatta
ttagccctttgtcagatgagtagattgcaaaaattttctcccattctgtaggttgcctgttcacgctgatggtagtttcttttgctgtgcagaagctctttagtttaattagatcccattggtcaattttggattttgttgctgttgcttttagtgaagtccttgcccatgccgatgtcctgaatggtattacctaggttttctttctaggttttttatggtattaggtctaacatttaagtctctaatccatcttgaattaattttcgtataaggagtaaggaaaggatccagtttcagctttctacttatggctagccaattttcccagcaccatttattaaatagggaatcctttccccatttcttgtttttgtcaggtttgtcaaaatcagatggcagagacttttatcatcttggatgtggaacgttcgctgccagtgactgagttacgagcagagcaaccatagatcccactatgctctgtagtaatattgcggatatagagctcttgtcctgattgcagaaacttcccattaatcatccaagaatactctgccggtgggttagagtccgcgaagcagtacaagtggatgttttctcctgtatagtagtaatacttgactggagacaaaacgctgggtttgtctggaccatagacaggattcagggtgactgggtcctgttgttttcggacagctgcaacctgggactgatagggaggctctgaccatttatccaccacaggtatcttgcgttcggagtgtcaggataacaggataaggtcacagtctccgtgccctgcctgggtttaagtg

SEQ ID NO: 42871 - DNA, 707 bp, Macaca Mulatta
ggggtggagctgccagagtaaagcaaagagcaaggaagcaggctcgttggaaggggttgtgacagccccagcaatgtggagaagtctgggcttgccctggctctctgtctccttccatcgggaggaacagagagccaggaccaaagctccttctgtaagcaacccccagcctggagcataagagatcaagatccaatgctagactccaatggttcagtgactgtggtcgctcttcttcaagccagctgatacctgtgcatactgcaggcatctaaattggaagaactgcgagtgttctatttgctttaatgagaatagaaacgtaaactatgacctaggggtttctgttggatagttagcaatttagaatggaggaagaacaacaaagacatgctttccatttttttctttacttatctctcaaaacaatattatccttgtcttttcaatcttacacttttaactaataagtggattttgtattttaagatccagaaatacttagcacatgaatattttgctataaaagcatatataactatgttttaaatatccatttatcctccgtatatctaaagacttaaatcccttatttttacctatccacccatggaattaaaagccctttggtccccctttccttttcccccaaaagggtggggaaatccacaaacttctcattcttaaaaaacactttggagggtggc

SEQ ID NO: 42872 - DNA, 7439 bp, Macaca Mulatta
  misc_feature (1)...(7439): n = A,T,C or G
tttgtccagagacaagaaagtcccagagataactctgaaagaaatttgagcctgatttattttgtgggagatgaatccccttccccagaaaggctaaaaaatattggaaagaggatcccaccaacacccatgaatagtttagtagaaagctcgccatccacggaagaaccagcctcactttatacagaagatatgacccaaaaagccactgacacaggtcacatggggccacctcagacccatgcacggtgcagcagctggtggggtggtttggaaattgactccaaaaatattgcagatgcgtggagttctagtgaacgggaatctgttttccagagccctgaatcgtggaaagagcataagccaagctccattgataggagagcctcagattctgtatttcagccaaagagtctcgaattcacaaagtcaggtccctgggagtctgaatttggtcagcctgaactgggtagtaatgatattcaagaccaaaatgaagaaagnnnnnnnnnnnnnnnnnnnnnnnnnnnnnnnnnnnnnnnnnnnnnnnnnnnnnnnnnnnnnnnnnnnnnnnnnnnnnnnnnnnnnnnnnnnnnnnnnnnnnnnnnnnnnnnnnnnnnnnnnnnnnnnnnnnnnnnnnnnnnnnnnnnnnnnnnnnnnnnnnnnnnnnnnnnnnnnnnnnnnnnnnnnnnnnnnnnnnnnnnnnnnnnnnnnnnnnnnnnnnnnnnnnnnnnnnnnnnnnnnnnnnnnnnnnnnnnnnnnnnnnnnnnnnnnnnnnnnnnnnnnnnnnnnnnnnnnnnnnnnnnnnnnnnnnnnnnnnnnnnnnnnnnnnnnnnnnnnnnnnnnnnnnnnnnnnnnnnnnnnnnnnnnnnnnnnnnnnnnnnnnnnnnnnnnnnnnnnnnnnnnnnnnnnnnnnnnnnnnnnnnnnnnnnnnnnnnnnnnnnnnnnnnnnnnnnnnnnnnnnnnnnnnnnnnnnnnnnnnnnnnnnnnnnnnnnnnnnnnnnnnnnnnnnnnnnnnnnnnnnnnnnnnnnnnnnnnnnnnnnnnnnnnnnnnnnnnnnnnnnnnnnnnnnnnnnnnnnnnnnnnnnnnnnnnnnnnnnnnnnnnnnnnnnnnnnnnnnnnnnnnnnnnnnnnnnnnnnnnnnnnnnnnnnnnnnnnnnnnnnnnnnnnnnnnnnnnnnnnnnnnnnnnnnnnnnnnnnncagactcttacacatcaccaacatgtgctggagacgaaaaggaaactgaacacaagccatttgctaaagaggaaggttttgagtcaaaagatggtaactccacggcagaggagactgacattccacctcagtcactgcaacagccatctcgaaatcgaatcagttcaggtcctgggaacctagacatgtgggcttcacctcatacagataacagttctgaaataaatgccactcacgacccggatgaaaatgaactcaagacagagcacacagatggtaagaatgtctccatggaggaggacgtgggggaaagcagccagtccagttacgatgaccccagcatgatgcaactgtacaatgaaacaaaccgacaactcacacttttgcacagcagcaccaactcccggcagacagcgcctaacagtctcgacttgtggaacagagtgattttggaggatacgcagtccacagcaacgatctcagatatggacaatgatttggactgggatgactgcagcgggggtgtggcactccccagtgacggtcaaacagaaggatacatggctgaaagtaccgagccagaaacccgatttacagtgagacagctggaaccctggggcttggagtatcaggaggcaaatcaggtagattgggagctccctgcctctgatgagcataccaaggacagtgctcccagtggacatcacacnnnnnnnnnnnnnnnnnnnnnnnnnnnnnnnnnnnnnnnnnnnnnnnnnnnnnnnnnnnnnnnnnnnnnnnnnnnnnnnnnnnnnnnnnnnnnnnnnnnnnnnnnnnnnnnnnnnnnnnnnnnnnnnnnnnnnnnnnnnnnnnnnnnnnnnnnnnnnnnnnnnnnnnnnnnnnnnnnnnnnnnnnnnnnnnnnnnnnnnnnnnnnnnnnnnnnnnnnnnnnnnnnnnnnnnnnnnnnnnnnnnnnnnnnnnnnnnnnnnnnnnnnnnnnnnnnnnnnnnnnnnnnnnnnnnnnnnnnnnnnnnnnnnnnnnnnnnnnnnnnnnnnnnnnnnnnnnnnnnnnnnnnnnnnnnnnnnnnnnnnnnnnnnnnnnnnnnnnnnnnnnnnnnnnnnnnnnnnnnnnnnnnnnnnnnnnnnnnnnnnnnnnnnnnnnnnnnnnnnnnnnnnnnnnnnnnnnnnnnnnnnnnnnnnnnnnnnnnnnnnnnnnnnnnnnnnnnnnnnnnnnnnnnnnnnnnnnnnnnnnnnnnnnnnnnnnnnnnnnnnnnnnnnnnnnnntcctcaaaccgaggaaccagaggaagtttccgagtgtgagaaggggtctcacaatctagactcccgtgatgtgcaaacagggatgtctgcagataacctgcggccaaaagacacctatgaacagcacctcatgagtcagagaaattcaggtgaaactactgagacttcagatgggatgaatttcccaaaatatgtatctgtaccagaaaagaatcttgagaaaactgaagaatgtaacattctagagccagagaatgtgggtggaaggggacctcacaaagttccccgaagccttgactttggggatgctcctgtagacagtgtcgtgcatgtcagctgcacaagttccgagataaccaaaaatcttgacgttaaggggactgaaaatagccttccaggagccagttcatctggaaattttgacagagatactatttctagtgagtatactcattcaagtgcatcaagtcctgagttaaatgattcttcagttgcgctgtcttcctggggccagcaacccagttctgggtatcaggaagagaaccgaggtaattggagtgaacagaatcaccaagaatctgaactaattaccactgatggccaagtagaaatagttaccaaaatgaaggatttagagaaaaacannnnnnnnnnnnnnnnnnnnnnnnnnnnnnnnnnnnnnnnnnnnnnnnnnnnnnnnnnnnnnnnnnnnnnnnnnnnnnnnnnnnnnnnnnnnnnnnnnnnnnnnnnnnnnnnnnnnnnnnnnnnnnnnnnnnnnnnnnnnnnnnnnnnnnnnnnnnnnnnnnnnnnnnnnnnnnnnnnnnnnnnnnnnnnnnnnnnnnnnnnnnnnnnnnnnnnnnnnnnnnnnnnnnnnnnnnnnnnnnnnnnnnnnnnnnnnnnnnnnnnnnnnnnnnnnnnnnnnnnnnnnnnnnnnnnnnnnnnnnnnnnnnnnnnnnnnnnnnnnnnnnnnnnnnnnnnnnnnnnnnnnnnnnnnnnnnnnnnnnnnnnnnnnnnnnnnnnnnnnnnnnnnnnnnnnnnnnnnnnnnnnnnnnnnnnnnnnnnnnnnnnnnnnnnnnnnnnnnnnnnnnnnnnnnnnnnnnnnnnnnnnnnnnnnnnnnnnnnnnnnnnnnnnnnnnnnnnnnnnnnnnnnnnnnnnnnnnnnnnnnnnnnnnnnnnnnnnnnnnnnnnnnnnnnnnnnnnnnnnnnnnnnnnnnnnnnnnnnnnnnnnnnnnnnnnnnnnnnnnnnnnnnnnnnnnnnnnnnnnnnnnnnnnnnnnnnnnnnnnnnnnnnnnnnnnnnnnnnnnnnnnnnnnnnnnnnnnnnnnnnnnnnnnnnnnnnnnnnnnnnnnnnnnnnnnnnnnnnnnnnnnnnnnnnnnnnnnnnnnnnnnnnnnnnnnnnnnnnnnnnnnnnnnnnnnnnnnnnnnnnnnnnnnnnnnnnnnnnnnnnnnnnnnnnnnnnnnnnnnnnnnnnnnnnnnnnnnnnnnnnnnnnnnnnnnnnnnnnnnnnnnnnnnnnnnnnnnnnnnnnnnnnnnnnnnnnnnnnnnnnnnntggaccattcaaccaaggcagccagacccagatgctgacaaattcagccagcttgtaatattggaccaaatcaaagaaaaggactcaagagagcaaacctttgtgtctgctgctggcgatgagctgactcctgaaacaccgacccaggagcggcatcgggacgccatgctgtcagtctgcgatcagccagatgcaggctttactcatgcagaggaaaatggttgtgttacatctaatgtttcaacaaatgaaggtcaagaaacaaatcagtgggaacaagaaaaatcatacctgggtgagatgacacattcaagcattgccacagaaaattttcctgctgtcagttctcccacccaactgataatgaagccaggctctgaatgggatggctctgccccaaatgaggactcccaaggtacatttgtgccagatattttacatggcaactttcaagagggtgggcagctggcctctgccgcgcctgacttgtgggtggatgctaagaagcccatcagtttgaaagcggatggtgagaatcctgatatcctgacacattgcgaccacgacagcaattctcaggcttccaacagccctgatatatgtcacgattctgaagcgaagnnnnnnnnnnnnnnnnnnnnnnnnnnnnnnnnnnnnnnnnnnnnnnnnnnnnnnnnnnnnnnnnnnnnnnnnnnnnnnnnnnnnnnnnnnnnnnnnnnnnnnnnnnnnnnnnnnnnnnnnnnnnnnnnnnnnnnnnnnnnnnnnnnnnnnnnnnnnnnnnnnnnnnnnnnnnnnnnnnnnnnnnnnnnnnnnnnnnnnnnnnnnnnnnnnnnnnnnnnnnnnnnnnnnnnnnnnnnnnnnnnnnnnnnnnnnnnnnnnnnnnnnnnnnnnnnnnnnnnnnnnnnnnnnnnnnnnnnnnnnnnnnnnnnnnnnnnnnnnnnnnnnnnnnnnnnnnnnnnnnnnnnnnnnnnnnnnnnnnnnnnnnnnnnnnnnnnnnnnnnnnnnnnnnnnnnnnnnnnnnnnnnnnnnnnnnnnnnnnnnnnnnnnnnnnnnnnnnnnnnnnnnnnnnnnnnnnnnnnnnnnnnnnnnnnnnnnnnnnnnnnnnnnnnnnnnnnnnnnnnnnnnnnnnnnnnnnnnnnnnnnnnnnnnnnnnnnnnnnnnnnnnnnnnnnnnnnnnnnnnnnnnnnnnnnnnnnnnnnnnnnnnnnnnnnnnnnnnnnnnnnnnnnnnnnnnnnnnnnnnnnnnnnnnnnnnnnnnnnnnnnnnnnnnnnnnnnnnnnnnnnnnnnnnnnnnnnnnnnnnnnnnnnnnnnnnnnnnnnnnnnnnnnnnnnnnnnnnnnnnnnnnnnnnnnnnnnnnnnnnnnnnnnnnnnnnnnnnnnnnnnnnnnnnnnnnnnnnnnnnnnnnnnnnnnnnnnnnnnnnnnnnnnnnnnnnnnnnnnnnnnnnnnnnnnnnnnnnnnnnnnnnnnnnnnnnnnnnnnnnnnnnnnnnnnnnnnnnnnnnnnnnnnnnnnnnnnnnnnnnnnnnnnnnnnnnnnnnnnnnnnnnnnnnnnnnnnnnnnnnnnnnnnnnnnnnnnnnnnnnnnnnnnnnnnnnnnnnnnnnnnnnnnnnnnnnnnnnnnnnnnnnnnnnnnnnnnnnnnnnnnnnnnnnnnnnnnnnnnnnnnnnnnnnnnnnnnnnnnnnnnnnnnnnnnnnnnnnnnnnnnnnnnnnnnnnnnnnnnnnnnnnnnnnnnnnnnnnnnnnnnnnnnnnnnnnnnnnnnnnnnnnnnnnnnnnnnnnnnnnnnnnnnnnnnnnnnnnnnnnnnnnnnnnnnnnnnnnnnnnnnnnnnnnnnnnnnnnnnnnnnnnnnnnnnnnnnnnnnnnnnnnnnnnnnnnnnnnnnnnnnnnnnnnnnnnnnnnnnnnnnnnnnnnnnnnnnnnnnnnnnnnnnnnnnnnnnnnnnnnnnnnnnnnnnnnnnnnnnnnnnnnnnnnnnnnnnnnnnnnnnnnnnnnnnnnnnnnnnnnnnnnnnnnnnnnnnnnnnnnnnnnnnnnnnnnnnnnnnnnnnnnnnnnnnnnnnnnnnnnnnnnnnnnnnnnnnnnnnnnnnnnnnnnnnnnnnnnnnnnnnnnnnnnnnnnnnnnnnnnnnnnnnnnnnnnnnnnnnnnnnnnnnnnnnnnnnnnnnnnnnnnnnnnnnnnnnnnnnnnnnnnnnnnnnnnnnnnnnnnnnnnnnnnnnnnnnnnnnnnnnnnnnnnnnnnnnnnnnnnnnnnnnnnnnnnnnnnnnnnnnnnnnnnnnnnnnnnnnnnnnnnnnnnnnnnnnnnnnnnnnnnnnnnnnnnnnnnnnnnnnnnnnnnnnnnnnnnnnnnnnnnnnnnnnnnnnnnnnnnnnnnnnnnnnnnnnnnnnnnnnnnnnnnnnnnnnnnnnnnnnnnnnnnnnnnnnnttgcaggctgtcacccatcactgtgaatgggaaatgctttcaccacagcctgctcagaacatcttgatccgtgacacggaaatggaggaggagacagagttccttgagctcggaaccaggaaaccaagaccacatggnnnnnnnnnnnnnnnnnnnnnnnnnnnnnnnnnnnnnnnnnnnnnnnnnnnnnnnnnnnnnnnnnnnnnnnnnnnnnnnnnnnnnnnnnnnnnnnnnnnnnnnnnnnnnnnnnnnnnnnnnnnnnnnnnnnnnnnnnnnnnnnnnnnnnnnnnnnnnnnnnnnnnnnnnnnnnnnnnnnnnnnnnnnnnnnnnnnnnnnnnnnnnnnnnnnnnnnnnnnnnnnnnnnnnnnnnnnnnnnnnnnnnnnnnnnnnnnnnnnnnnnnnnnnnnnnnnnnnnnnnnnnnnnnnnnnnnnnnnnnnnnnnnnnnnnnnnnnnnnnnnnnnnnnnnnnnnnnnnnnnnnnnnnnnnnnnnnnnnnnnnnnnnnnnnnnnnnnnnnnnnnnnnnnnnnnnnnnnnnnnnnnnnnnnnnnnnnnnnnnnnnnnnnnnnnnnnnnnnnnnnnnnnnnnnnnnggatactatggggacggtctaaatgccatcattgtgtttgccgcctgttttctgccagacagcggtcgggcggattaccactatgtcatggaaaatcttttcctnnnnnnnnnnnnnnnnnnnnnnnnnnnnnnnnnnnnnnnnnnnnnnnnnnnnnnnnnnnnnnnnnnnnnnnnnnnnnnnnnnnnnnnnnnnnnnnnnnnnnnnnnnnnnnnnnnnnnnnnnnnnnnnnnnnnnnnnnnnnnnnnnnnnnnnnnnnnnnnnnnnnnnnnnnnnnnnnnnnnnnnnnnnnnnnnnnnnnnnnnnnnnnnnnnnnnnnnnagttcaaaattcagcagtaaaattaaatatgtcaatagcttatcagaactcagtgggctgatcccaatggattgcatccacattccagagagcatcatca

SEQ ID NO: 42873 - DNA, 434 bp, Macaca Mulatta
ataagcctttctggggatgtgagacgtgtgatattcggagacgaccatggcagcgcacccatggatccccagggagtggagagctttgctgtgtggggagcacaagtgttcacttctggcaggcattactgggaagtggatgtgacccactcctccacctggattctgggagtctgtcgagattcctggacagcagataccaatatcgttcttgattctgatgaaatatttttgttaatttcctcaaagaggagcaatcactatagtctctccaccaactctccacctttaattcagcatgttgcaaggcctctgggtcgggttggggtgtttctggattatgataatggatctgtgagtttttttgatgtttccaaaggttctcttatctatggttttcctccttcctccttctcttcccctctgaggccttt

SEQ ID NO: 42874 - DNA, 827 bp, Macaca Mulatta
  misc_feature (1)...(827): n = A,T,C or G
gggtgtgttgggaaataagaaacaactcggttttgacaaatggctttgtaagcttttgtgatgtttctttagcaatttattagaaagatggtgtgagatgacgtgctgcttcattgaattgctctttcccccatctttgccaaatctcaatgtatcattncttannaccctacctcctgtaagcnggcttttgctanntgcttcagctcnngtagtctcaggcagcctgaaagtggctgccctaacnccccttgttgtgagtttgggttccaaaaaaacaacaatttttnnnnnnnnnnnnnnnnnnnnnnnnnnnnnnnnnnnnnnnnnnttggggttccccagtacgggcaggggcgcgatacgcccccagcccgccccgcccggcaagactgccgatcgtccaggcgcctctggcgccctcggggggcgtcgattccctaggagtccagtggaagagtggggggggaggtgggcctgaaggaacaaaagagtgagtgcgtgcagtccggagggggaaagaggggtaggggccgttccgtgtggccgcggtgctccgcatacgcgtcactcgccgctctctcgaccgcgatcaggcgacgatcggtacgaggtgccaaaaaaggggtgatcggggggcatacgggcgcggccntcagggagctaggcgtgaggcagttgagtgccgtcgagaaagatgcggncnnccctccctcgcgccnnnnagagagcccggggccgaaacaaaaaacctaaccatcccctccccnnncgaggtgggaaagagcggcgtggtggcaacctgagtccgactgaggcgaggagct

SEQ ID NO: 42875 - DNA, 492 bp, Macaca Mulatta
actgacatgtctccccagctcccgtacagaaaacatctaaaataaacacacatggatggaaagcgttgagcatctgtttcgaatgtggttatgggagctgaccctggtccaagatctggctcaggctggggtcataagccataggccccgacatggccccaggtaaagagccggtttggcagcagggttaaaggtcaggcaggctccaggcacaggctacgaccaggtcaggttgggttaaccgtgagacagagaatctgcactctggtctaacaggcacggaatggatggggttagagctgtcagcactggggtgagggtctctttgcaggtcatatgcaggaagctgagcatcaggtcaagggcatgggtctctgtggagcagggggcaaggtttggtggattagtttggatcctccacagcagataccaaaacgggattcaacatacaagaaacagaccaatagaaggtcagagaggccagaggccacc

SEQ ID NO: 42876 - DNA, 795 bp, Macaca Mulatta
ggaatgagagtaatattcaggatgaggatgaacagctcttctaatcaggctgtcataaaaataaggaagcttatttcgtagaagcctttaccaaacctccttcttcaactcgttgttccagattggattaagcagctcattcctgtggccaaggaagtgtgcactggttaacccagtctttactaacccatacgtttagcaaagagattggattatccaacaacttgattgctctggagactactttgagttgaggtatgagatagtagataggagaatgatctgtaagtagatattggatagacgagtaagagatgcaaactacactgaggtcttgcactggtctaggtattgggactcagatgtaatagacgtagttcttttcttgagacaagttcatagtgaggagaaccagtacagcagggaatatgataccctggaattggcacactgagtgaagctttgactgcattgtaatgttttgtggttttaacctgtctttccttttgcccttgctgttttaactacggtgattgagttgcccccttttcccaccatgtttggaattttttgtttgaaatctctattttacccacctgggactatgaatctttgaagggcagaaaacataatctggtcaaccatattcttattggatcaattccatcacggtggccggttttgtaataggcacctttatgttcgttttttaaaggggaacaaaattttggatggaatttgtttgaaaatccaaagtccctccatacaagggactcccccttggagtacattcca

SEQ ID NO: 42877 - DNA, 766 bp, Macaca Mulatta
gggaggggaactggaaggatgaggtcgcagtctcacctgcccgtttgtgctgcttgaattttttcagcgtgactcgttgcctcaaaacatgcagattgacgtggtgcttattttgagactaaactagtatcctgaattaattccttacaattctgtattttaataatacatgcttttataattttgaggtgtttcatctgctcagtgtattttgtttaggcggaagcggtccctgtaacatccttttccccgtgaagactggcatgcccagtactgctgtgtctcgcgggggctgttgggtcactaagcttttctggctttcatgtggcctggtatttaataattaccttaggatgcactcagtcattctttcttacttacttcctaccgatagagattttcctacattttgggagcctggaaagaaaagcatcttttttttttccttaagtccagccgaatttttactttatatatggatataaaaaggatttttccacaagcctccttaaaaatgggaggggggaaacctaccaaaattattccctgggggtaaataaccccggacaaggaaaccactttttccaggcccctctattattccctaaaccaaaaagggcggcccggccgatgtttcccataaaaaccgcctctggagggagaggtgtattactgaaaaattgtttttttggcgcggggggcgggctaaaaaaatggggaaaaaaccgtccgccccgcggtggggaagagcccctgtgggtgttct

SEQ ID NO: 42878 - DNA, 435 bp, Macaca Mulatta
gggtgggaacacttttttcaggtcctcgagcactgtcagccgggtgcctgggccaaaatactgcggactcctaggtgcctgttcagctttgttggcacagagataaagtgcggtgtctcctggttccgaggacgggatctccaggctgcaaggtaggttcttggggcattgagatgagaaccgcttcttgtgcagctccgtttcttgaagaacttgttcattctgaaaggaaatcaaaaatgtaaactctttattctgattctgttgataccaataaacataagtatgtcctttttcgggggtacaatccatctttgttttctgtccttttcctttgaccaaatatcctggagtctgtgtgacttcggcatgaaaagagcctgctgccaggagacacagggctgcacagccgaggagcctggtgcccatggcagg

SEQ ID NO: 42879 - DNA, 301 bp, Macaca Mulatta
tgctgcaggctccgagctggcctttgtgcaggagccgggggacacagtggctgtgtgggagcacccactggtgctgccctgccaagtggagggtgagccgcctgtgtccatttcttggcagcgggatgggctggccttagccaatgacagcggtgccaccctgatgccagatggctccctgcacctggctgccctgccttcccgctggagcctcctttccagtgcccacgagtaccactgcgtgacccagaaccgctacgggcggctggtgagccgacgggcccgggtacagctggcaagt

SEQ ID NO: 42880 - DNA, 426 bp, Macaca Mulatta
acctgcccattctctgacgccacccacccagtgtacattcggcctcaccagagtgggtgtccccggggcacctgccgacggaccccttgcgcccccaggtttgcagctctcccctgggccactaaccatcctggcccggctgcctgcctgacctccgtgcctggtcgtggctctccatcttatctcctccccgtgtccccaatgtcttcagcgggggccccctcttgggtcccctcctctgccatcaactgaagacccccacgccaaacactgaatgtcacctgtacctgccgcctcagtccaccttgcggcccgtgtttgactcaactcagctcttttaacgctaatatttctggcaaaatcccatgcttgggtttttgtcactaacctgttaacgcttgcaatcccaataaagcattgaaagcc

SEQ ID NO: 42881 - DNA, 500 bp, Macaca Mulatta
tgtctcattttatttttgagtagtgagtttccaaacaaccagatacctagcagctccttttccttcctcctccaggcttccactatcacctttcccttagcttccatctttccctgtgacatgaggaattgctgaggatttaactcactacaaacccagcacttcaactttccttggtggacaatttggcagattgatccctttttgactcatttttagccactgatttctgatgcatcctttcttcttgtcataaccggggaaatgtcaggacctttgttttgaaagactaaatggcactatttttcaaggttgttaataccttcgaggtggaattgggaacactgagtgcttgccttaattgtacccacacccccaagttggcatataacctggaggctctttcttgcaaagaatactttttgtggaaatgatgccaaggaagaataaaagtagtttatcagagggaagtgttaatgctaatgaagaattagaatcac

SEQ ID NO: 42882 - DNA, 881 bp, Macaca Mulatta
tttggtcctattataagaagtatcattgggatatatgattagtcttaatagttaacaacggaggcgcccagagtagcgatcaagttttgtaaacaaactcatgattgtggtgagtacctggcgttctacactttatgtagaatagttttgaccaggaaattatcaggcaacgccatttgtggggtgtgttcttggggattggggtgggctcaatgttttttggataacccccttccccagtttgaatatgaaaaaggccccgggaaaaagttccttttcccattccccctgggttataaaccaaggaaaagggtttaacatgccaacatttctttaggtagggaaaccctttgaatctttaccatttaaaaaattctaatcggtgatcccagggggtggatacttgggtactcactgtacaaatccaaacattttttgtatattaaaaatttttttccatgtgggtcatggatgacaaaagaaatgcaaccctttggagttagcttttctgtatagcattttttagaatcaggaggcttgccagggttttgtttcatcagaaatcttaatctttctgctcaagagatggcattattaaactcttggttatgtggtttccgggaaagaaatattctaactgagttccaggaatcacctctgtggcgtttctacaggaaaagtgaccactcttgaagcttcactgtcactagcaagaatgattgtgatggtttctaagcggtctccggccaatctttagttcttttatgcagagtgcttttattctaagtgaagtgcccttcggtttaatggtgacctcctgttattacagggattgcagccgcatttgatggacgtgaacctgctcatcactggctcccccc

SEQ ID NO: 42883 - DNA, 341 bp, Macaca Mulatta
ggtggatgacttgggtggcttgaaggaggatcaaaaagtgttcccaacacacctttgagaccaaatcagcaatctgtgcttaatagttctttttcagaactttttcttaaatttccagaaacagaatctcattcatctgttccaccaccaaagctttctgttcatgatataaaacctctagattcaccaggaaggagaaaactagatacaaatgcaccagaaagttttaaagatacagcagaatccaggtcgggtaaaagacgagatgtaaatccgtttttggctcctcactcagcgggtgtacctcttactaacccagctggacttggacctggtgggcc

SEQ ID NO: 42884 - DNA, 765 bp, Macaca Mulatta
  misc_feature (1)...(765): n = A,T,C or G
ggcatgaccacgatannnnnnnnnnnnnnnnnnnnnnnnnnnnnnnnnnnnnnnnnnnnnnnnnnnnnnnnnnnnnnnnnnnnnnnnnnnnnnnnnnnnnnnnnnnnnnnnnnnnnnnnnnnnnnnnnnnnnnnnnnnnnnnnnnnnnnnnnnnnnnnnnnnnnnnnnnnnnnnnnnnnnnnnnnnnnnnnnnnnnnnnnnnnnnnnnnnnnnnnnnnnnnnnnnnnnnnnnnnnnnnnnnnnnnnnnnnnnnnnnnnnnnnnnnnnnnnnnnnnnnnnnnnnnnnnnnnnnnnnnnnnnnnnnnnnnnnnnnnnnnnnnnnnnnnnnnnnnnnnnnnnnnnnnnnnnnnnnnnnnnnnnnnnnnnnnnnnnnnnnnnnnnnnnnnnnnnnnnnnnnnnnnnnnnnnnnnnnnnnnnnnnnnnnnnnnnnnnnnnnnnnnnnnnnnnnnnnnnnnnnnnnnnnnnnnnnnnnnnnnnnnnnnnnnnnnnnnnnnnnnnnnnnnnnnnnnnnnnnnnnnnnnnnnnnnnnnnnnnnnnnnnnnnnnnnnnnnnnnnnnnnnnnnnnnnnnnnnnnnnnnnnnnnnnnnnnnnnnnnnnntgaatctctgaaaagggcgaatcaaaactaattatcaggctttttaaaaatgaaataaggccggcaaggttcaatttcgcccctaatttttttcttagccgcataaacagcaatacatcctccattaaataaaacctgcccctaaacaacttccaaaatcttttctt

SEQ ID NO: 42885 - DNA, 748 bp, Macaca Mulatta
  misc_feature (1)...(748): n = A,T,C or G
ctttattgcttattattgctgtgggtgatcaaatttgtatttgtattttttanaatattttttaattaccttgttttagaatttctgatataattttacatttcatcaatggctgacctttctttgctcacattatcaatcaaaaataacccaaacatgtccccctaaatttcagtttaccatttaatatgctcatttttccttatttttctgccatcccaatatcataacaatgttagaaaactttcaccatccttttcctataacttttcttcctacccctatgagaactttagaatgttttacttcatattctctttgtccactccaccctaacttcttgatataaattagggagttatgccttatttttatcctctgtaacagtttttcagacaggtattatatgttacctgaagattacatataatttgccaagaaaaacattgttgtgtggtgtgtttcaggactttttctttctcttttgttaatgataagtggatttaaaaatacaagtttagttttttaaagttaaattaatatttttccaagaaattgtttatctaagtgttatctaagtattaaaatttatcaaagnnnnnnnnnnnnnnnnnnnnnnnnnnnnnnnnnnnnnnnnnnnnnnnnnnnnnnnnnnnnnnnnnnnnnnnnnnnnnnnnnnnnnnnnnnnnnnnnnnnnnnnnnnnnnnccctggcgttaccaacttaatcgccttgaggaatccccctt

SEQ ID NO: 42886 - DNA, 696 bp, Macaca Mulatta
tgcttttgagattccatatgtaggtgcaataaaagagtttatggaatgattctgaaatcccagaaatgctatgatagacgagaatatcaatatctgactctaccaaatactatctcaacgacttggacgcgtagctgaccctgcctacctgcctacgcaagaagatgtgctagtagttcgagtccccaccgcagggatcatcgaataacccccttgatttacaaaagtgtcattttcagaatggtcgatgtaggggattcaaagtcagagagaagataatggatatactgctttgagaatgtcacctctatcatgtttctagtagcgcttagtgaatatgatcgagttctcgtggagtcagacaatgagaacagaatggaggaaaggaaggctctctttagaacaattatcacatatccctggttccagaactcctcggttattctgttcttaaacgtgaaagatcttctagaggaggaaatcatgtattcccatctagtcgactacttcccagaatatgatggaccccagagagatgcccaggcagccctggaattccttctgaagatgttcatggacctgaacccagacagtgacaaaattatctactcccacttcacatgcgccacagacaccgagaatatccgctttgtctttgctgccgtcaaggacaccatcctccagttgaacctgaag

SEQ ID NO: 42887 - DNA, 1936 bp, Macaca Mulatta
  misc_feature (1)...(1936): n = A,T,C or G
annnnnnnnnnnnnnnnnnnnnnnnnnnnnnnnnnnnnnnnnnnnnnnnnnnnnnnnnnnnnnnnnnnnnnnnnnnnnnnnnnnnnnnnnnnnnnnnnntcccagtcacgactttgtaaaacgacgtccaannnnnnnnnnnnnnnnnnnnnnnnnnnnnnnnnnnnnnnnnnnnnnnnnnnnnnnnnnnnnnnnnnnnnnnnnnnnnnncattccgtatgggtttattctgtgtatattctcaaatagaatatcccagtcaaagccttggttatataaccaatgttttcaaatgtgtcatgttataaagagagtagattctctactgaacttgtgcaaatatctttattaccctaagcaaatgaatactcatgctatgaatagtttcccaattctggggcactcagattgggagcaaaagcaaatgttttcatttttgtttacaaaagtataatttaccaaattgttgtaaagtataaagagcttaagagagaaagttcataaatctggagaataaaacattcaaagaatcagcacattttcaaataaaaaattatgaaaacattatctttttgattattaagcccaatataactgagtttttttcttctttgtcttgaatttcatgaaggtatcagcctgttcattaaaattttgaaagttctcagagagtccagtggtatgatcttgaagttatcagaaacttgtattcaagagtctttgtcagagtcttttccatatatctccttgaagaaaaagcaattttggactgtagctgactgtaaatacttcgaggaagaatcaaagcaactgtctgccagacttcctgaaatacagaaatgacatcacagttgctatatcagatcaattccaggatagatgtcctcttcctaaaggagcagagactttgatcgtcttgaatgtggaacgttcgctgccagtggctgagttacgagcagagcaaccatagagcccgctatgctttgtagtaattttggggatagagagctcttgtcctgattgcagaaacttcccattaatcgtccaagaatactctgccggtgggttagagtccgcgaagcagtacaagtagaggttttctcctgaacggtaataggtgaatgaagagaaaatcctggggacgtctggaccatagaggagattcagggtgactgggtcactgcggctggaactcactgggttcttcatttcacattcatagggtcctgcagtatcctttgtgacaccaaatagagtgagggtcctgttgtttttggacagctgcaacgttgtgactgatagggaggctctgaccatttatccaccacaggtagcttacatcctgagtgtcaggatcacaggataagatcacagtctccatgccctccctggggtttaagttgctgctggagatgtagggcttgggagtctccaggtataaggtgaaatgtccagttactcctttagtcctatcacctcgctttatgatttgtatggtgtaggatcctgtgtcattcttggtgacattctggatcagcagggatgcattggaatatactgtttctcgtccactgtatgcaggcccaaatataattgtttcagcgtctattacatatgatgtaatgtaatggtggaggtccgttttttgccctttgtaccagatgtagccaataagattctggggcaaattgtggacaagtagaagaacatccttcccctcagaaactttggttggctgagcttcaatcgtgacttgggcagtggtgggcgggttccagaagattaaaagtgatgctgtgagcaggagctccttccaggtgatgtgcagtgtgcagcgaggggctgagaggggccccatggcctgtgctgcctgtgtgttctcctgtgtggagatgagcctggatccgagaatcttttccgagcacagctgtcagct

SEQ ID NO: 42888 - DNA, 658 bp, Macaca Mulatta
gggcggggcgcatggggacttcggcgcgcgccggaagcacgtgcgcgggctgggtcccctggctgtgtgcgccgaggctgggcgagcggcgggtgggggcgttgcgggctgagtcccgatttccctcagggaaggccgggtagaggcaggcggtgggcaggtttgggggtgacagagggctggggacagtggggtccagttaccgaacagaggaggaaggtgcctgcactggggaggaaagcagtccatttgccacactggcccgtctcagttaaagacattgtcttcggtcatcatctgaggctgtcagccaggaagaaacttccctgacgcagttacgatcgaggccagaacttggttaatgtgtaacaagggggcagtaggctccaggtgtccagccagaggccgccctgtgaatgggaggcgggttcatttacccgttgggaagctaagctttcactccaaactgcccggccctcttgactggagctgagcaggtgtgggcagaatgacagaagctcaagatgcccagatgctgaagggtcatcgcaagactacagacagcagcctctccacatcccattttagagggttctggattacggctgagaactatctcctggcccccagctggggatgtgtttccaaatttaggagt

SEQ ID NO: 42889 - DNA, 796 bp, Macaca Mulatta
  misc_feature (1)...(796): n = A,T,C or G
caaaattggatttccataaacnnnnnnnnnnnnnnnnnnnnattttaagcctttcctaaaaattttttccaccaatttaaagttttgcccttgcaaaaggccatttgcacccctttttggtcagattttattccctaaggggttttatatattggaaggttattcatttgggcatttttattttcagttttccaattgttttgtggctagtttacagaaatgcaactaatttttggatattgttctgtaatcatccagtattactaaactcacttaatagtttttagtagcttttttgtagatttcatgctatattttatagatcatgttatccgtaaataaagacttgtcttgcatttttcctgtcgaatttggatgccttttttatactggcgagaaactctagcacaatgttgaatagaagtgtaaatgtggacatctttgccttgcccccaatcttagcagggaaagcattcagtgatatctgtagtattttccatagatgccttttagcaggttgaagaagttcccttctatctctagtttgctttgagtttttatcacagtagaggctggattttctcaaattcttttcctgcatctattgagataatcacagnnnnnnnnnnnnnnnnnnnnnnngtctgctaatatgatgagttacattgactaatttttagatgttaaaccgaactaccattcctggaataaactgcacttggtctcaatgtaccatcatttctatatatagttaggctcaattttgtgaattttagttaagaatttttatatctcc

SEQ ID NO: 42890 - DNA, 771 bp, Macaca Mulatta
  misc_feature (1)...(771): n = A,T,C or G
cacaacaagcacagaacacaagaagacaagcgcagaatnnnncaaggcttagagtcggacgaggctgctgcttcatcgactcactgcaacctccacttctggtatcaagcaattccgcctcagcccctcaggtagttgggattacaggcgcgcaccactatgcccagcgtgtttttgtagtttagtnnnnnnnnnnnnnnnnnnnnnnnntnnnnnnnnnnnnnntctcgtgacctcgtgatctgtccnnnnnnnnnnnnnnnnnnnnnnnnnnnnnnnnnnnnnnnnntggcacctggccaccttttcattttaaattgtttaaatttatgccctgttagacatcagaatctatgcttgaacaaaggaaatagtaaattagctatatgtctgctggtttcactcggatgtggatatggatatgtggataaagacagtgaatgaaattaaaaccttggtattttaaatatcattaccagatataattgatggaatgttgtatcaacaaacattgaaacttggctttatttgtaacgtaaactatatagaatccatacatagccaaattagatttaaaatatacagttaacgaatggtactcaaagtgtttttgttgcactgttactctgaatgtggactctctatatttggtatggcgtgactaggcataacttttgtaatgtatttcagttgtatgtttttccttttattgccagcttctgataatgaaattttccaaagggatgggatataagaatcatcttttataaa

SEQ ID NO: 42891 - DNA, 442 bp, Macaca Mulatta
ctggactctagacctccgccgcccaagcacgaaggcccagccctggcccggccgcggtctcagtccggagaccccggatcgcgcagaaacgcactgaacaggcccctaccatcgggctccagaaactacctgggctcggcctacctgttgcctcacattggccaaagagggggaaaccagaaggagggaattgctgcggcgacttgactttccaggccccgagcagaaaggtaggaggcgacaggttggaatgggggaggggcggtggctctgccctccagaggtcggggcgccttggcggtcggggggaaatatggaaggcaccggggcaaaccagcccaaagagctgtggagcccagctggggaaaggaaaggcagcctcaggttctcccctcctctccagtcatcattccaggatagggtgaggggcggccccctcccg

SEQ ID NO: 42892 - DNA, 519 bp, Macaca Mulatta
cagtctggccaacacgcatgccgacgaccgtgcggccatggccattgcggagatgctcaaagtcaatgagcacatcaccaatataaacgttgattccaacttcataacgggaaaggggatcctggccatcatgagagctctgcagcacaacacggtgctcacggagctgcgtttccacaaccagaggcacatcatgggcagccaggtggaaatggagattgtcaagctgctgaaggagaacacgacgctgctgaggctgggataccattttgagctcccaggaccaagaatgagcatgacgagcattttgacaagaaatatggataaacagaggcaaaaacgtttgcaggagcaaaaacagcaggagggatatgatggaggacccaatcttaggaccaaagtctggcaaagaggaacacctagctcttcaccttatgtgtctcccaggcactcaccctggtcatccccaaaactctccaaaaaagtccggactgtgaggagccgtcctctgtctcctgt

SEQ ID NO: 42893 - DNA, 777 bp, Macaca Mulatta
  misc_feature (1)...(777): n = A,T,C or G
gggtcagtggagtggcaagttggcttatactagtgtgttactcatgcatgtatacatgccaagatcatgtagctgactttacatatggagtaaacatatattttatgacattgctataatactttgcttatcaatgggtattttcaagagctgtgtaactaggcttatggaaatagacattctttttccagatgtagttatgcagataatgtaaagttctagaaatcttaagatactatccttggatagtggccacctaatcaaagagagtttttttaaaatgtatctaatgatgtgatttgggatagaatttagcattgtacatttggtattttgcacatttatatttttaaccttaataggcattgctaaactcagatatgctccaaagttgtcagttgtctctaaagttaaaatcatgcaattatgcttgcagtactacctacagaaaaagggagactttctgatgtaaagtatacactagatttctttcacataaatggaagaattttaaactttggttaaagggaaattgtacaagttaaaatattactctatagagatgctgtatatcgtgaagagttatgggaaatcaaggccacatttgccatgctgttatataaagcagatctgatgtaagtattcacacaagttgtttccctttcgtttgtnnnnnnnnnnnnnnnnnnnnnnnatgtatatangcaagtattttagctttttcataaaagtaataatgggaaaagtttttcaaaaacaataataggcgggcctctt

SEQ ID NO: 42894 - DNA, 733 bp, Macaca Mulatta
gggaagatttatttgcactgagtgtaaccctgcagaaatgagtcagagaattggtaaaagttgcaaatccaaacattcaacttcgagtgttcatgttttgtgcataatagatctttctaagtgcatatcaaagaagtgattttgccaaatttattactctttaatcatgttagattaaaattatctttagaatacaaatctttaaatgatggaatgcctatctagaaaatttaattttcaaacatttgttctttttgatgtgctttcagtggctttcttggccatatcaggtatatagttgtctttctgcaattctcattctactcttataccccagtgaatctatgtttggcttaaaataaattgagatggtcagatactgagtaagaaattaggaaatccgcatactgttaattcataaaaacaataatgttcattgaaataattaacttttctgcactttaacttcagtttctggtttgattttattgatttcttataatttgacctaaaatctctgtgtaataaaaaataaatcatcatgagttactggaaattctaaaattttaagactatttaaaagataaaattcaatttatgaaaatgcaatttactgaaaggtaatttctctgttctttttgtatagaatagaatctatttaggtttgttggtacacatgtaaattgttatttgaaatatgtgttgatatgctaaataggtgaatttaaaaaca

SEQ ID NO: 42895 - DNA, 407 bp, Macaca Mulatta
atgaagaagctactagcagtgattctgtggcttcaactagactggttaagtggagagctgaaagtgggacaaaaccctctgttcctgagcacgcaggagggaaaaaactataccatctactgcaattattcaaccgcttcagacagactgtattggtacaggcaggatcctgggaaaagtctggaatctctgtttgtgttgctgtcaaatggagcagtgaagcaggagggacgattaattgcctcacttgacaccaaagcccgtctcagcagcctgcatatcacagccgccctgcaagacctctctgccacctacttctgcgccgtggcttcgtattcaggaggaagcgctaacagactcacctttggcaaagggactcatctaatcgtccagccctatatccagaa

SEQ ID NO: 42896 - DNA, 916 bp, Macaca Mulatta
  misc_feature (1)...(916): n = A,T,C or G
gtagagggatggacgaggactgaagagagatcagtgaagggggtttattttaatgacacacaaggattattgtggaaatcaaagtgccggagccaaaaacagggctcaaccttcaagattagagttgtgttcaaggtgtncaagttgactctgggtcccacaaagcaacagcaatttcactaaggttacgcgtaaaaggtgaaacctggctggctgaaagctttcccaagccccttcaggctcccctgttttctcttatacacattccccaccagtaaacttcttgtacatttaatgccatctcagtgtctgctcccaagaggaccccaactgactcactggggcatttaacctccaattcctttcctcccttggctgagatctgttccaagaagtatctccaggacactccagcctgttgcacaggccaaagaaaagccctcaggcagaggagcaagtacttgcaagaggacaccagtggcaagaacagggacatggtgagacatcaacatcattggctacagtagtactagtcactcttgactatgttgtttcaatagttttccttctcaaaaacatttgtcacctattttggagttaattcagaggactgctccaaaagaaaaaaactaaaaagcaaaaccagctttattaaaatggttctggatttatcttttgagaattcctttcataagaaataatgtccttaagctatatcaggactacccatgttctgcttgagattgaaaaaccctgctttatgtacctactcaatcctgtgtgagtcaacccatctgaagcatancgatgaatcaggaaaaagccggtaacttctaaccggaaccccggtgggatttacaacgggngnctctttacaccacattatttcctcacgagggcgctcacaccgcgaccc

SEQ ID NO: 42897 - DNA, 850 bp, Macaca Mulatta
tatgtcatcttatttccctgagtttcaagtatagtgcagattctatataaaactactaaatgacactggaatatgttgaatagattgggggaaaaaactataaagttttacacaattgtttgtagttacctttagagatggacttacccctttggagaagagtgaaatttgttttttcgccatgtgatggaagaccattgtgattttttaaaaaagtatataatacttaaaatggcataataattctgcacttgaatttgtactgttaacagcacatttggaagaattttaaactttttattgtcttataactagcattcacttattattttggatatttaagggttccattaagttaacattgtatttggacgaagtgtaaccaaattagccagtctgttttcgtccatgtttaattagaagtgagaggtagaagtacttcaaattcaacaggccagcaagcaatcggcttaaaattcccttccttaaatgttgtgctcttatgctctcggctttttaatgactttatttttacagtacttgttcagtcacttgagatgaaatgcttggggtagcttttccatcctcaaacttaatgtttttactgtagttcatagtgtttggaacagtatgtgccaatcactgagactgcttcagagtttgcagttctgtaagtttcattgccaaagaaagcttagtggttgttgactgtagtataagtccacctttctgtgcataaaattgattttccatattaccccattgttattctcatgcactattgggttaacggactcttcaaccaatgcttgtgttccatcggataaaactaatcgtattgtgggcctaa

SEQ ID NO: 42898 - DNA, 1017 bp, Macaca Mulatta
  misc_feature (1)...(1017): n = A,T,C or G
ggcccgcttcccaggttcaaacgattctcctgcttgaacctcctgagtaagtgagattacaggcgccagcccccacannnnnnnnnnnnnnnnnnnnagnnnnnnnnnnnnncnnnnnnnnnnnnnnaagaatggtcttcaactacagaactctggtgatccaaaagatcacatcctccaaaagagatgtgattataaggatagatcctctaccctcggtaatcaaggatatcattacacagtataatgtgcaatggaaggatatataaatcagataaagtcctagaagtatgtttatgatgtgtcgattgtaaggtaggattgttgtataaatggtttccagagctggtaagaatataagagatcatacagataaaagattaatatgtataagtataaaatcgataaatagaaaatgttattaattaatatgaagtaaataaattagaaatggagaaaaaatgtaaataactttatggattgatagtttatacagatattattcacttatcaagatatcgcaataggaacacattttattggagtgcaatatataaacactgatgtagatgtaaaagatatcgtgaacgatccctaagtaaagagganctaacataacaatgatattaatcgtatgaagtcgataaatgagtcaaactagagaaagctaatcggaatgcaagtagatgcgatgtattgtttataaatactaggcagtatgatgaaagatgagaatacatcgagatgaatagtatttgtatacgaaattgatactctaggatgctactgtcgtagaagttgagaggaaactttgaagagctgctcgcctagtgctactgaacggctcacgtctagaatgcttagtaatacaagatatgaaataatgtctactatcgtacattctgctatacatctttgtaagtgatggcatatcatatatggcttctatcaatcgaaacgtactcttatacatgtttgttgtagataagagtagttacgtttaacataatcaaagtn

SEQ ID NO: 42899 - DNA, 748 bp, Macaca Mulatta
  misc_feature (1)...(748): n = A,T,C or G
gggaacgccgccaacatggtgttcaggcgcttcgtggaggttggccgggtggcctacgtctcctttggacctcatgccggaaaattggtcgcgattgtagatgttattgatcagaacagggctttggtcgatggaccttgcactcaagtgaggagacaggccatgcctttcaagtgcatgcagctcactgatttcatcctcaagtttccacacagtgcccgccagaagtatgtccgacaagcgtggcagaaggcagacatcaatacaaaatgggcagccacacgatgggccaagaagattgaagccagagaaaggaaagccaagatgacagattttgatcgttttaaagttatgaaggcaaagaaaatgaggaacagaataatcaagaatgaagttaagaagcttcaaaaggcagctctcctgaaagcttctcccaaaaagcacctggtactaagggtnnnnnnnnnnnnnnnnnnnnnnnnnaagttcccgccaaaagaatgaccccgtgagtaaaaaagctccagccccagaaagttcctggcccaaaaagcccaaggccaaaaaggcctgccgcccgcttccaaaaagcttcaaaaaggggtcaaaaaagcctccacccccaaaaaaacaaccctgcctccaaaagggctatctcgggcaaaaaaaagccttaaattgggccccacccacaatctcttaatttccacagtaatcatatcttttcgagggtccccgtggttccggt

SEQ ID NO: 42900 - DNA, 567 bp, Macaca Mulatta
atggcaagcataaagatacactttgagatagccacatagcctccgatcttaacctacacatgggtgggcccttggtagccctatttaagttatgttgtctgattgggttaagggcagacagacatatcacctgtgccagactgatcagatcctctgtcaggaatttagactcactgatgctagtctacctggtctgggaagttgaactaaggacatacaaacgtggatactgaggatgcaccatgtttggccatgtgctcaccaagcgaaagtggctagctgagaaagagaaaagaaagaaagcagatgtacagagagaagcagagatctgaatctacgagcccctgaagggaactaggcagacagagagctacacctgggcaatagggactagttgcctgggtccttgtaaatgctcctgttccatgctctggtctcttatgaagtccagctgtatttcatgctgtgggttctgtgaaagtctcctgattccttctggtaaattgttttgttgctgttaagatagtttgagtgggtttcagttatttacaaataaaagatttttgg

SEQ ID NO: 42901 - DNA, 638 bp, Macaca Mulatta
  misc_feature (1)...(638): n = A,T,C or G
tttttgagacaaagttgcactgtcgcctaagtggagtgcagtggtgtgatcctggctcactgtaatctcgtctccagggttcangagattcttatgccttagcctcccgaatagctggggattacaggtgcccactacgatnnnnnnnnnnnnnnnnnncnnnnnnnnnnnnnnnnncnnnnnnnnnnnnnnnnncnnnnnnnnnnnnntgtgatctcaggtgatccccctgcctcggcctcccaaaatgttaggattgnnnnnnnnnnnnnnnnnnnngagccagaatttaaatctctatgaaaattatttctgaacttacagtttgatagttgaaatatggactttgtataatacttgaatggtttttttaagggttaagtgttgctttgttaaagcatgtttaaattcatgcttaagagcgtgaatttaaaatatttaattacacataagttgtaaaattgtttttgcagtctatagtgtatgatagaaagcacagatttgggatttgtaagaactaggatttaggcgttgttctgccgctaattaactatgtagtgttggataggatacttaatttctttgcaataatatcaggttccttaaaggtccttagtctagtctcaaatctgtagctt

SEQ ID NO: 42902 - DNA, 814 bp, Macaca Mulatta
  misc_feature (1)...(814): n = A,T,C or G
ggtccaaaatactatcaaggaatcaatataaaaattgttaatatttttctcatactgttttcaaaatatattgtgaatattacatttacagcacatcttaattaggactagccgtatttcaagtgctcagctcacatattgcttgtagctaccatattggacagcacatgtccaaaaaaatacatgtaaagttaaagtttaaaagacacaggaactaaaccctcatcgtccttcccttgggaggtagtttagagagctatagatgctgtaacatttttgctattgtttattatacatgacattattcctaaaaaggcttttgagatcctaggttgtattcctcaggttttgttgccttcccatgaaggtgtgaaggcagggatgcctgttattcagtccaggatgcatgacgagagaccttgggaaagtttcatctagatttaaaagagaattcttgatgcttacgttccatactcaaaatgtaaatttgaatattaaaataaagatgatttttcttttggagctagtcttgctctgttgccccaggtggggatgcagtggcatgatcactgcaacctcgacctcacaagcnnnnnnnnnnnnnnnnnnnnnnnnnnnnaagcaactaggaaatacaggtggtgcaccaaccgggccctacttaattttttttttctggaaaaagacaggggtttttcccctaatggttgtcccagggctgggtcctcaaaaactccctggggccttcaaagacaaatcccttcttggccctttgggcctttcccaaaaagtgggtttgaagaaattaaacagc

SEQ ID NO: 42903 - DNA, 571 bp, Macaca Mulatta
tgtcaggaaactgctatatgtgctgctttttgtgtgacctccaaaacttgctggggttcatgcctgaggaactgtacaccattctgggcttccagcccaacacagagggctgaggtctctgggaccaccatgaatcaggccaaggcccgtcgactgagtggaagtccatcctaaccaactactccaaggacccaggaaagacacgaatgaatatgtccaggaacgtctccaagaagcagtggacttattgcatccaaaaccacacctcttgaccaggctttctctcttgtggcagagaaggcaaagctaatactactcacagtgcttttaaatgaaaatggtcaagaaacaggcactgggaagccatcctggctcctagcaggctatgggaagggatggtgctggctgtttgagagtctcaaaggagcaagcatatcataaatgcacacaaattatttttctattttcttttgtgttttgcaaccaggaacagaaaatgcaaaaactccctctttgtttgagatgggtaggaaggtgggaagtaaacagccatgccatttcagaggtcagt

SEQ ID NO: 42904 - DNA, 665 bp, Macaca Mulatta
atatatggtagaaaagataaaacagtgaatagacaaggaagtcaacctcaggttcagagctagagagacaacagagaagatgaagggagaaaattatcaaaacaaataataagggaaaaatttccaaatattaaagacccagttatttacatataaaggtatcgtcaggtatttatcaaaattaataaagattcatctcaaaataaatcattttcaaaatttcagaacctcaagggttaaagaaacatcataaaatattccagtgagggaaaccacaatgaaagtaactgacaacagacagaacatcagattcccagaagcttctattattaagataatgagaaaggccttgaagttctaacggaaaattatttttattgataaatgtagactttttcaaaatcacaatcaggcacatagaaagaataaaaatactgttgagtatgaaaggacataaattttatctgccacacacagttttattagaaattgactaaagatatcgcttagtaaagtgaaactgttaatcaggaaatgggaaggtaaggaaccaggaaactgaatttaatgcagggcctcactgaaaagggatcctactatagcagttccttggcaagcaaagaatgtctgatacgtgagtgatatttagaaaatgattaacaagt

SEQ ID NO: 42905 - DNA, 456 bp, Macaca Mulatta
tctactaacagtctgtttaaggcaatttagcttctttctggcatgctcctcagaattcttccagcctctacctactgcccaattccagagccacttttccatttttaggtatttgttatagcagcaccccaagtacctaaaaaagtcttttatgcctatttctctgccatatgacttgaatatgctactagatttggaattcatctttctccagggtcactacttattttaaagaggtgaatttacctgtgctagggttttgatactgggagtgctaccagaactaccacagaatgaaagtggtgagcccaccactgcagagaagttttctcagagccataattgagaggaattcttctcaaaataagctctactccttttcactcattgaaaacaacttgcataatgtaacagccagccccattttaaaaagattaccaggggtaaaacaacttt

SEQ ID NO: 42906 - DNA, 699 bp, Macaca Mulatta
cacagtcattcctccaaccctcagagcgcctgcgcctggccgatggcccccatgggtgcgctggccgcctggaggtctggcacggcgggcgctggggcaccgtgtgtgatgatggctgggacctgcgtgacgccgctgtggcctgccggcagctgggctgcggaggggcgctggccgcccccggaggcgccttcttcggggagggggcagggcccgtgtggctcagcgagctggcttgccggggcaacgaagggcagctgggcctctgccaccaccggggctggaaggcccacatctgctcccacgaggaggacgcgggcgtcgtctgtgcaggtgaggacaccctggctgctccttcacggggatttcctttggagatgtcccaggaatcccaagtccttagccccagaaagtctgagtgtgcagcagtccagagacactcatcctcccatcccctccaaagccaggagtctcacttcctcttccagggacccaagtgacctggattcccctactctcctcatagcttatgtccccgcctcccccgccgcaggtcagcgtgtggctaactctagggacgattcaacgtctcccctggatggggctccctggccagggctgtcggtggagctgagccccagcaaagaggagcccccggtgacacacggtgagcccaggggactaccgtgcccaccccca

SEQ ID NO: 42907 - DNA, 810 bp, Macaca Mulatta
gggtaggagataatgaggacctgaagtagggcaatgagcttaaaatgcagaagaggaaatagaagcaagaaatacttagggggtggatttgaaatgatggcaaatggaaaatttagctgtcagtatctcttaaatattatttctgtgtcaaaataagaatgacatattggctcattaattctgtgttccccataattttaaaggctggtcaaggatgactggttgccaaacaatataatctactctttgaaatttctcatggttctgctattattcttagctatgaggatgtgaaggggaaatgtattttaatctgccttcattgttcaaaataagaacttacttaagttagcctttatatgagtgatcgctttgaaggaagccatgtgctctgtaattcacaaagcatcgaaaatatttaaaaccaaacttccattattatttaggcaacaatattttacggaagaagtctgaatcattcaacctgaagaaacactgaggctgagttggtaatatacatcatttaaccatgcctttgatatgtggcattttctctaactaacaccattataagagggagacgagtgatcctttttagtgcctggccacagaaacacggaacccccacgggggaccggcctaaggcccttgtccccttcaaccccttttcgacccccccctattaagataccggcccggattctttccccctccattttcttgggagcccccagtccccttcacccagatttgcgcgcgacaaatatctgcccctccagtaaatcaccgcaccacattgagatgcaaggc

SEQ ID NO: 42908 - DNA, 191 bp, Macaca Mulatta
  misc_feature (1)...(191): n = A,T,C or G
ctgcctaagaagagaggagaactgtttttctaaggggaaccctccctcctcgaacattaactgggttgaccccgcccctctnnnnnnnnnncttcagtccaaatcaagatcggaaagcaggatcaagagaaagatgatcagaccggaacaggtaaacgttccatacagagatgcttcggaagtgcggagaa

SEQ ID NO: 42909 - DNA, 647 bp, Macaca Mulatta
  misc_feature (1)...(647): n = A,T,C or G
gggcataaaaggttaaactccttcagtatgttggagtggnnnnnnnnnnnnnnnnnnnnnnnnnnnnnnnnnnnnnnnggtttatatcttctctaatacctgcatgtggcatttaaaaatcaagaccacggtcaaacccctcttctaatcacgttaattgtttccattctttttaccctgagtgagcacttttcactttccagctaggtctgtttttcagcttgcagacgagattgagaaatccttgaaaatttggttttggttaaaatttttggtttatttatttgaaatccacactcccctggaaactcttaagtgcatttgtgcacttctgtttgtttgtctcanagaagggactgtaacaatctgagtaatttccatgtcctcttcctatcctctagtggttgagctgtgtagcatttaacctatatatattcacaaatatattcctataaacagtatacatttggatcattctttgttaaaaaaaagtttttcctgaaaatgaatttaataaaaaaggcaagatcttccccagggatgaaattttccatactgggctttcccgttggcaaagagacctttccccnnnnnnnnnnnnnnnnnnnnnnntggcctttctttttagaatgttccaaaaaaaattc

SEQ ID NO: 42910 - DNA, 795 bp, Macaca Mulatta
ggggccaaggaaacgggtctaacttctcttctccacgtggtagctgcacctttatttgaagatacgtcgtgttccctctgcattcactggcccgcctcaaccaggattatcgggatttcagctgccatcctctatagtgagtacaggatctatcctcactctgtggttcacaacagacttcgctgtgagtgcccaaggttttaaagcattatatgaagttttacctagccacacttgtggaaatcctggagaaatcctgaaaggtgttctccacggaacgagattcaacataggagacaaaatccgatacagctgcctctctggctacatcttggaaggccatgccatcctgacctgcattgttagcccaggaaatggtgcatcgtgggacttcccagctcccttttgcagagctgagggagcctgcggaggaaccttacgtgggaccagcagctccatctccagcccgcacttcccttcagagtacgagaacaatgcagactgcacctggaccatttctggctgaacccggggaaaccattgctctggtcttcatggactttcagctgggagaaagaaatgatttcttagaaatcagtggcaccggaagctccatccctatgggctaaatgggcatgaaactttccccttctcagtttatcagtaaccaagaattgggataagactcccttttcaccttctgaccaccaacccatcgaaggccaaagggattttaatggcttaagttttcaaaaggtcttatataactagcaacatatgaccatgaagggaaaa

SEQ ID NO: 42911 - DNA, 463 bp, Macaca Mulatta
cctcccatgaccagagaggcagatgaagatgccatccagtttgcatatagggtaaaatccgccattgccaggcagggagaacttgtggacctgctgtgggataggggcctgaagagggagaaggtgaaggacatgttcaaggaggagcagcagaagctatacagcaagaagattgtgaggaatcacaaggacaggagccacttatgagcttgcctcgagctggctggggccactgtgaggagtgaccacatgctaggagctggagttgctgccgctgcctccactgctgcatcctttccagactccagggctccctgggctgctctggatcccaggactctggatttcaccaagtgcagtgggatccctatgcacacggcgctacctacccttggcagtatgaacggatgctgctgggtgtcgcaacccaggataagatgtcttgtttcttttacaataagtc

SEQ ID NO: 42912 - DNA, 821 bp, Macaca Mulatta
ggatatttctcaggccactttacctctttgtactacttcttctcttcaaaaactcttttccttgttatcttctactttgagccaacgtcaaactcctttattcatcactcatcttcgttctcattctcaatttcctggaccattagttcatggtaatactcaaattaattcgcttttaatcggccacctacatactacaaaacaaaacaagctcgttctcttattcgtgcttgtctttcctgtgctcctttaagcattccatccttccatcctggggttaatccacaaggtgtcccttcttttggacgattaaagtatgttcatcataccattaataccttttctcattttcaatgggccactccgttgccatctaaaaaaactaattctgttattacacatctcttggtttgtttcgccatcatagacattcctcttatacttaaaactaataatgcccctatctatcgctctcataaattacaaggttttcttacaacaatacaatattcaacatatcaccgggtatcccggaaaacaactcaaggtcaagccatcattaaacccacaaattttaacttttaaaactcacctaccttaaaaccaacacacccaaaaaaaagccccccccaaaaaccaaattttttaaaggctcctttttctacccttaaactttttttcaaaccccattaaagaacccattgtgccaaaatttccccccttgcccgtgtaaaccccaatcctttttcccgtaaccctttccctgtaggggggatgatttctctcccccttataaaccactttttcaaagggtgtcttgg

SEQ ID NO: 42913 - DNA, 778 bp, Macaca Mulatta
  misc_feature (1)...(778): n = A,T,C or G
gggccaccatcttgaaggcaacctcattagggatcctgagcgacagccatccaggttgtgaaaatatggacatcaagcacatccgacttggaaaagcccagggtgaggagggaggaggcacacaacacagacctgagacaaaccgtggtcagaagttacctacaggaagctggacagagcttatgcaggaccgttgttgcccaagtgctggaataaaagccagatattatactgggcactgaggacacagagaagaataagagagctttaccctcaagaatcctacaagtctaccagccacaaactgcatcctgcccacatcaagccccttggtgtgtcctgacagattggacgggagcactcccagtctcgctgtgttgcctagcctggattgcagtggcgtnnnnnnnnnnnnnnnnnnnnnncacctcctgagttcaaatgattctcttgcctcagcctcctcagtagctggggaatacaggcatccaccaccacacccagcaaatgtttgtgnnnnnnnnnnnnnnnnnnnnntgccatgtcggccaggctgatctcaaaactcctgatctcaagtgatccannnnnnnnnnnnnnnnnnntnnnnnnnnnnnnnnnnnnnnaccggcgtgcgtgagctccctccctctgtcttctatgtgaggacacaataagaaagcagctatctatgaactangaaaggggttctcaccaggcactgaatcagtcagtaccttgaatctggactcccagtcttcagaatcatgagaaataa

SEQ ID NO: 42914 - DNA, 642 bp, Macaca Mulatta
tctttgatgacattgagttaccttttcctattgtgaacagtgctgctgtaacatgggtgtgccatcagaaggcctttaagcaggaaggtaacgtgcttacagctgcccttcaggacaacctctcttaaagctggctgaaggatgaatttaagaggggcaatgctagaggtggagaaagcaattaggacactgtgaagttaaggaaagatggagaatgactaactgcacctcagccttgcccgaccttttagggatccaaactcttgatcctaggagggtaggagaagaatcattgtttgggcacaactgatgctagatcagcattgtcaccgttgccaacagtaagctgtgtcacctgccacgcatctctctccatcagccacaggagcctttcatgttccttggagtgcatgctctgttctggcccatacaggcagtttcctttgcatggaacagttttccccatccccctctttgccttccctactttttctttagagaagccttcctgacttttcagcctagaactgagccctttttacatggcttgtgctgcctgtacatctcctatgcagcattcaccaggatttccaacagtaagtaattgctcttagtgccaaagctgctgcctcacaagactgc

SEQ ID NO: 42915 - DNA, 366 bp, Macaca Mulatta
ttagcttatcctcatcgctcacttaccacaagacaattcatactggagagaaaccctacacgtgtgaagaatgtggctaagcctttaactgcctctcaacccttaagaaacataagataattcataccggagagaaactctacaaatgtaaagaatgtgggaaagcctttgccttctcctcaactcttaatgctcataagaggattcatactggagagaaaccctacaaatgtgaagaatgtgacaaagcttttaagtggtcctcaagtcttgctaatcataagagtatgcatactggagagaaaccctacaaatgtgagtaacgtgataaagtccagccctcaggccttataatacataaaataa

SEQ ID NO: 42916 - DNA, 5291 bp, Macaca Mulatta
  misc_feature (1)...(5291): n = A,T,C or G
aaaattagttttcatgattctgaagtaagcggtataaaaacaattaggatgaattcacccatgcctgactgcacatcaaagtgtcgatccctgaagcatgctttggatgtcctttctgtggtaacaaaggggagcgaaaaccagattaaggcctttctctccagtcattgttacaatgctgcaactatcaaggatgtttttggccggaatgctctccaccttgtttcctcctgtggaaagaaaggagtgttagattggcttattcagaaaggagtggatctgttggtgaaagacaaagagtctggatggacagcattgcacagaagcattttttatggacatattgattgtgtttggtctctcttgaannnnnnnnnnnnnnnnnnnnnnnnnnnnnnnnnnnnnnnnnnnnnnnnnnnnnnnnnnnnnnnnnnnnnnnnnnnnnnnnnnnnnnnnnnnnnnnnnnnnnnnnnnnnnnnnnnnnnnnnnnnnnnnnnnnnnnnnnnnnnnnnnnnnnnnnnnnnnnnnnnnnnnnnnnnnnnnnnnnnnnnnnnnnnnnnnnnnnnnnnnnnnnnnnnnnnnnnnnnnnnnnnnnnnnnnnnnnnnnnnnnnnnnnnnnnnnnnnnnnnnnnnnnnnnnnnnnnnnnnnnnnnnnnnnnnnnnnnnnnnnnnnnnnnnnnnnnnnnnnnnnnnnnnnnnnnnnnnnnnnnnnnnnnnnnnnnnnnnnnnnnnnnnnnnnnnnnnnnnnnnnnnnnnnnnnnnnnnnnnnnnnnnnnnnnnnnnnnnnnnnnnnnnnnnnnnnnnnnnnnnnnnnnnnnnnnnnnnnnnnnnnnnnnnnnnnnnnnnnnnnnnnnnnnnnnnnnnnnnnnnnnnnnnnnnnnnnnnnnnnnnnnnnnnnnnnnnnnnnnnnnnnnnnnnnnnnnnnnnnnnnnnnnnnnnnnnnnnnnnnnnnnnnnnnnnnnnnnnnnnnnnnnnnnnnnnnnnnnnnnnnnnnnnnnnnnnnnnnnnnnnnnnnnnnnnnnnnnnnnnnnnnnnnnnnnnnnnnnnnnnnnnnnnnnnnnnnnnnnnnnnnnnnnnnnnnnnnnnnnnnnnnnnnnnnnnnnnnnnnnnnnnnnnnnnnnnnnnnnnnnnnnnnnnnnnnnnnnnnnnnnnnnnnnnnnnnnnnnnnnnnnnnnnnnnnnnnnnnnnnnnnnnnnnnnnnnnnnnnnnnnnnnnnnnnnnnnnnnnnnnnnnnnnnnnnnnnnnnnnnnnnnnnnnnnnnnnnnnnnnnnnnnnnnnnnnnnnnnnnnnnnnnnnnnnnnnnnnnnnnnnnnnnnnnnnnnnnnnnnnnnnnnnnnnnnnnnnnnnnnnnnnnnnnnnnnnnnnnnnnnnnnnnnnnnnnnnnnnnnnnnnnnnnnnnnnnnnnnnnnnnnnnnnnnnnnnnnnnnnnnnnnnnnnnnnnnnnnnnnnnnnnnnnnnnnnnnnnnnnnnnnnnnnnnnnnnnnnnnnnnnnnnnnnnnnnnnnnnnnnnnnnnnnnnnnnnnnnnnnnnnnnnnnnnnnnnnnnnnnnnnnnnnnnnnnnnnnnnnnnnnnnnnnnnnnnnnnnnnnnnnnnnnnnnnnnnnnnnnnnnnnnnnnnnnnnnnnnnnnnnnnnnnnnnnnnnnnnnnnnnnnnnnnnnnnnnnnnnnnnnnnnnnnnnnnnnnnnnnnnnnnnnnnnnnnnnnnnnnnnnnnnnnnnnnnnnnnnnnnnnnnnnnnnnnnnnnnnnnnnnnnnnnnnnnnnnnnnnnnnnnnnnnnnnnnnnnnnnnnnnnnnnnnnnnnnnnnnnnnnnnnnnnnnnnnnnnnnnnnntcagatggcagtacttcagaatttacagatatttaccggaaagatgaagattctgcagggtgccatctctttgtggtagagaaggttcatcctgacatgtttgaataccttttacaatttatatacacagatacttgtgactttttaactcatggcttcaaaccaagaatacacttaaacaaaaacccagaagaatatcagggaactctgaattctcatttgaatgaagtgaatttccatgaagatgataaccagaagtctgcatttgaagtttacaaaagtaatcaagctcaaacagttagtgaaaggcagaagagcaaacctaaatcttgnnnnnnnnnnnnnnnnnnnnnnnnnnnnnnnnnnnnnnnnnnnnnnnnnnnnnnnnnnnnnnnnnnnnnnnnnnnnnnnnnnnnnnnnnnnnnnnnnnnnnnnnnnnnnnnnnnnnnnnnnnnnnnnnnnnnnnnnnnnnnnnnnnnnnnnnnnnnnnnnnnnnnnnnnnnnnnnttcatttctgtgtgacgtgaccatgaaatcagtggatggaaaggaatttccttgtcataaatgtgttctttgtgctagacttgngaatattttcatagtatgctgagtagctcatggattgaggnnnnnnnnnnnnnnnnnnnnnnnnnnnnnnnnnnnnnnnnnnnnnnnnnnnnnnnnnnnnnnnnnnnnnnnnnnnnnnnnnnnnnnnnnnnnnnnnnnnnnnnnnnnnnnnnnnnnnnnnnnnnnnnnnnnnnnnnnnnnnnnnnnnnnnnnnnnnnnnnnnnnnnnnnnnnnnnnnnnnnnnnnnnnnnnnnnnnnnnnnnnnnnnnnnnnnnnnnnnnnnnnnnnnnnnnnnnnnnnnnnnnnnnnnnnnnnnnnnnnnnnnnnnnnnnnnnnnnnnnnnnnnnnnnnnnnnnnnnnnnnnnnnnnnnnnnnnnnnnnnnnnnnnnnnnnnnnnnnnnnnnnnnnnnnnnnnnnnnnnnnnnnnnnnnnnnnnnnnnnnnnnnnnnnnnnnnnnnnnnnnnnnnnnnnnnnnnnnnnnnnnnnnnnnnnnnnnnnnnnnnnnnnnnnnnnnnnnnnnnnnnnnnnnnnnnnnnnnnnnnnnnnnnnnnnnnnnnnnnnnnnnnnnnnnnnnnnnnnnnnnnnnnnnnnnnnnnnnnnnnnnnnnnnnnnnnnnnnnnnnnnnnnnnnnnnnnnnnnnnnnnnnnnnnnnnnnnnnnnnnnnnnnnnnnnnnnnnnnnnnnnnnnnnnnnnnnnnnnnnnnnnnnnnnnnnnnnnnnnnnnnnnnnnnnnnnnnnnnnnnnnnnnnnnnnnnnnnnnnnnnnnnnnnnnnnnnnnnnnnnnnnnnnnnnnnnnnnnnnnnnnnnnnnnnnnnnnnnnnnnnnnnnnnnnnnnnnnnnnnnnnnnnnnnnnnnnnnnnnnnnnnnnnnnnnnnnnnnnnnnnnnnnnnnnnnnnnnnnnnnnnnnnnnnnnnnnnnnnnnnnnnnnnnnnnnnnnnnnnnnnnnnnnnnnnnnnnnnnnnnnnnnnnnnnnnnnnnnnnnnnnnnnnnnnnnnnnnnnnnnnnnnnnnnnnnnnnnnnnnnnnnnnnnnnnnnnnnnnnnnnnnnnnnnnnnnnnnnnnnnnnnnnnnnnnnnnnnncaaaacagcttctcatggagttaaactttctcagaagcaacgaaaaatgattgcattgactaccaaggaaaacaatttaggaatgaatagcatggaaacagttttatctactccttcgaaagcccccaaaccagtgaatgcatggnnnnnnnnnnnnnnnnnnnnnnnnnnnnnnnnnnnnnnnnnnnnnnnnnnnnnnnnnnnnnnnnnnnnnnnnnnnnnnnnnnnnnnnnnnnnnnnnnnnnnnnnnnnnnnnnnnnnnnnnnnnnnnnnnnnnnnnnnnnnnnnnnnagatgctctacccatggtgccccaggaccagaaggcaaccatatttcagatttaccacttctagacagtcccaannnnnnnnnnnnnnnnnnnnnnnnnnnnnnnnnnnnnnnnnnnnnnnnnnnnnnnnnnnnnnnnnnnnnnnnnnnnnnnnnnnnnnnnnnnnnnnnnnnnnnnnnnnnnnnnnnnnnnnnnnnnnnnnnnnnnnnnnnnnnnnnnnnnnnnnnnnnnnnnnnnnnnnnnnnnnnnnnnnnnnnnnnnnnnnnnnnnnnnnnnnnnnnnnnnnnnnnnnnnnnnnnnnnnnnnnnnnnnnnnnnnnnnnnnnnnnnnnnnnnnnnnnnnnnnnnnnnnnnnnnnnnnnnnnnnnnnnnnnnnnnnnnnnnnnnnnnnnnnnnnnnnnnnnnnnnnnnnnnnnnnnnnnnnnnnnnnnnnnnnnnnnnnnnnnnnnnnnnnnnnnnnnnnnnnnnnnnnnnnnnnnnnnnnnnnnnnnnnnnnnnnnnnnnnnnnnnnnnnnnnnnnnnnnnnnnnnnnnnnnnnnnnnnnnnnnnnnnnnnnnnnnnnnnnnnnnnnnnnnnnnnnnnnnnnnnnnnnnnnnnnnnnnnnnnnnnnnnnnnnnnnnnnnnnnnnnnnnnnnnnnnnnnnnnnnnnnnnnnnnnnnnnnnnnnnnnnnnnnnnnnnnnnnnnnnnnnnnnnnnnnnnnnnnnnnnnnnnnnnnnnnnnnnnnnnnnnnnnnnnnnnnnnnnnnnnnnnnnnnnnnnnnnnnnnnnnnnnnnnnnnnnnnnnnnnnnnnnnnnnnnnnnnnnnnnnnnnnnnnnnnnnnnnnnnnnnnnnnnnnnnnnnnnnnnnnnnnnnnnnnnnnnnnnnnnnnnnnnnnnnnnnnnnnnnnnnnnnnnnnnnnnnnnnnnnnnnnnnnnnnnnnnnnnnnnnnnnnnnnnnnnnnnnnnnnnnnnnnnnnnnnnnnnnnnnnnnnnnnnnnnnnnnnnnnnnnnnnnnnnnnnnnnnnnnnnnnnnnnnnnnnnnnnnnnnnnnnnnnnnnnnnnnnnnnnnnnnnnnnnnnnnnnnnnnnnnnnnnnnnnnnnnnnnnnnnnnngagagactcaatttctgcacctgttaaaatttctgaaaataaatgcttaattacacatacagcatttaaacagtttggaagaggattggattattattacctttataatactgcataatcagaagttctctgaaccttggttgtacatctagacataaaaattgttttctttataggatgttgtttggtttgcttctgagtgtttaaacttttcaaaaacaatgttaaatttgtgctccagtacctagataaattggaaaggctaatgttctagtttctggaagataagcctgggagacacataaacaattcactgctataatttagttgatgtaaaatgatggaaactaactcaatatttcaggtttagctctacccaaaagcagcagacatataagcatatgtgcaataacaaatgatcttgatccatttc

SEQ ID NO: 42917 - DNA, 922 bp, Macaca Mulatta
gggacttcattttttaaggggtatgttgcttgggaaccatttcctgggttttgataacttatgtttggccaaattcacattcgacacagaggtcaacggaagaccacgagcaccatcaccttcgtccaggtaacaggaacgatttcttaaacacttcgaaagtgatactcgtggaactcagtaaaagtattcgtgttttctgtatcatctttggagaatccgaagataagagttactgggctgtactgaaagagacctggaccaaacactgtgacaaagcagagctctacaatactaaaaatgataatttgttcaatatagaaagcaatgacaggtgggtacagatgaggaccacttacaaatacgtctttgaaaagtatggtgacaactacaactggttctttcttgcacttcccactacgtttgccgtcattgaaaatttaaagtatcttttgtttacaagggatgcatcccaacccttctatctgggtcacactgttgtatctggagacctcgaatacgtgactgtggaaggagggattgtcttaagtacagagtcgatgaaaagacttaacagacttctcaataactctgagacctgtgcagatcaaagtgtgatttggaagttatctgaagataagcagctggcaatatgcctgaaatatgcaggagttcatgcagaaaatgcagaggattatgaaggaagagatgtatttaatacaaaaccaatcgcacagcttattgaagaggcattgtctaataaccctcagcaagtagtagaaggctgctgttcagatctggctgttactttcaatggactgaccccgcaaaagatggaagtaatgatgtatggcctgtaccggctcagggcatttggacactaaaagaatgacacactcgttttcttgcctccagttggttc

SEQ ID NO: 42918 - DNA, 108 bp, Macaca Mulatta
gatctgcttcctggtcatgtcctcatcctatctggcgttccgtatttctcggctagagcagcagttatgcaccttgagttggaacggcccagtccctgggcacaggtg

SEQ ID NO: 42919 - DNA, 751 bp, Macaca Mulatta
gggtggcagtcaccaatggctaaaccactgcaggattaacacagggctgggccattgcaatgtgtttattatacaatctgccttgaaccttttttcatcatgtcaaagagataagcatcagatgaagggaaataaatgtgagaccgacactttttataaaaatgcccctctgctctaagtcaccagttccccatggcttttgtatttgaaagtttcgtctgtgctgctgaactggactgtgtgttttcttcttgggtattaatatttaactatgtggaactgtagtttgtgttcctaattggatagtaaactatgtaagtgtggagaccgtgtctctttttacttttatctctcagagcacctagcatggggccttgcacataccagtaattataatgaaagtttacatttatttcatactttatatagtgctatgccttaactcatttaatctctgcagtcaccccatagggcaggtgcaattattgttctcgtcttggagaggaagttactgccacacaaaatggttcagtaacttgcccaaggtcacacagctaataaatgttttttgccaaagcgatctgacttcagcaccatgctcttaattaataatacatgacgtaaaaattatggcttaatagattaaaactctctctatagtggggtaaaaataccttttaatgttaaaaaatttatgtatattaaaatatatatacccccacctatgtagatatacatatacccctaatta

SEQ ID NO: 42920 - DNA, 1660 bp, Macaca Mulatta
  misc_feature (1)...(1660): n = A,T,C or G
gagggatctgcggtgtcccagtcagtgcagaggacttcaggacgtcggttcgacacctctgaaggaacagccagcatcatccctggaaacggagattgttggttggtagaggttattgctaaattcgaagagtgtgcatcagacagtaaagctggtcctttcatgaaccggggtttggaagctgcacgttgccagaaagaacctggcttgcatcccttcccctttccgttcactccctggcttttggagccttttcattaggtttgctcatgaagcgcatccctgccctcatgttctctctctggttcgcagtcctccttggattgtctggtccttactgtgagcttcacgcctgactccgttttctgagttccgctacctagttccagctccaagtctcaagttcccatgcaggccccaggcacatgttcactgttgggaagactctgccctgcttctgtggcagccgtgctgtgaggctgttaagaagccatgcactatgtcagtagcattctgttcccccagactctcagaccctgtgcgcccctctgcaccgtgaccctgtctgtgggaccccgcttccgctgttttgtgtcattgttctctgctcttcctcttgaacaatggactccgctgcatctggttttgactgtcgtatgatgtcttctgcgttccctttcgtgttttattcactaccttcagattcgtgatcatctgcctgcagaccgcacgtagagcttctcctannnnnnnnnnnnnnnnnnnnnnnnnnnnnnnnnnnnnnnnnnnnnnnnnnnnnnnnnnnnnnnnnnnnnnnnnnnnngtgagcttcacgcctgactccgttttctgagttccgctacctagttccagctccaagtctcaagttcccatgcaggccccaggcacaatgttcactgtgggaagactctgccttgcttctgtggcagccgtgctgtgaggctgttaagaagccatgcactatgtcagtagcattctgttcccccagactctcagaccctgtgcgcccctctgcaccgtgaccctgtctgtgggaccccgcttccgctgttttgtgtcattgttctctgctcttcctcttgaacaatggactccgctgcatctggttttgactgtcgtatgatgtcttctgcgttccctttcgtgttttattcactaccttcagattcgtgatcatctgcctgcagaccgcacgtagagcttctcctacctaggcagcctcagagccgctggtacccccaggcgctccatttgcccggcaaacctccacctccacctttttgtgatttccctgctcctgtgaacggtgtcaccagccatctagttagccgctgtcattgttagccgtccccttcctcccacccctgctggttctggcttcatgtacccttcccaccccgctttaataccccagagttctgcgctaatctggaccctcatgctgctggagggcacacatggctgtgatggttactcagcggcccagctatctccatagcatggcctaatgcccatgtctaaatcatgttactctcacgctcagccaacctctaccttcaaggggtgctcgcaggttacaaaaggaagcccaaacatatcaaagtattggctaggccccaattccccatcctaatctact

SEQ ID NO: 42921 - DNA, 815 bp, Macaca Mulatta
  misc_feature (1)...(815): n = A,T,C or G
ctggatttccagcaacagggagctgccaacaccgtgtactgtgctgctgccccaganctganggtctgggaggatgtatttcaacaactgctgncgctgcatgcctcgnccagaagcacagagcgaagagacggcccgggnccctgtgggcactcagtgagaggctcatccaagaacggcttggcagccagtccggctaagaggagctcggagtggatgggcgcagatacccgccgtgtgtgtctgtccgctcacgcaagtgccagagctgggcnccttccaaatgtccctccaacgcagatccgcaagagtgaaggaaataagagcagtcacaacagagtgaaaaatgttaagtaccaatgggaagcagggaattcctggggtaaagtatcacttttctggggctgggctaggcctaaggtctctttgctgtctgatggtggcctgtttgaaagtataaaacctggttggtgtgtaggttccatatctccctggagaagcaccagcaattgtttttcttttactgttgaatagcctgaggtcccctcgtcccatccagctatcaccacggccaccactgcagccaggggctggctttctcctacttagggaagaaaaagcaactgttcactgctccttgctgcattgatccaggagataattgttgcattcatcctgactgagcctgagccagtttagcaactgctggggagacaaatcccagaaccctgtcccagcgagccaggatggcggtgacacccagacagagtagaatacccagagcttgcagatggcaaagtacttgtcacagactc

SEQ ID NO: 42922 - DNA, 780 bp, Macaca Mulatta
ggctgaggagtagacttgctgcattattttgtttttatttagatgatattaaaactcagaagaattaattttgactttctgtatttaccgtttatcagttaattttctctgttcaagtatagtacagtagcacagagattaacatttaaatttttcacatatggtatatttcagaaatttgaagttaagcaaaaatcttaatgagtagagaaagtaagtaagtagccttcaggaaatcttaattagaggaccaggcccttttggaattgtgaataggtttatagccttacatcctggtacacatgtccaaggtgaggtcctgggtggtaaaggtaaatacatattggaagggcactgtgtgagccaaatgagtcggattaatcatgattatttccagtttgggttttgggtggtcttggagaatgttgtaaacactgcttcattgatatgttgattgagccagactttactcagcagctggaaaaggagagatgggagatgggctctgggttcttcctttgctcactggtaagtgctaagatctcagctttgtcctcaaaccctgaagtagtccttcattcacacagtgggaatccccttgaaaatgtcagaatggggaaagtccataagctggctgccttttaaggaaaatagaaaaaaattgcctggaaaaaagtttttctttgaaatttttaaccatccattgaaagggcccattgtttttagccttttccctcccgaatgggccaaagcccataacctccttaaccttgggggtcc

SEQ ID NO: 42923 - DNA, 419 bp, Macaca Mulatta
tagcctctggaagatttcatttcaaatgtgagctggcctaggatgttaaaatctgattctgtcctcagaaattacatgcaacttttcaaagggtaattttaaatgtcacacttttgcaagtaggtagggagtatacagaattttttgttgagatggccttggccaactgaccagggaaattcttgaagcattttgcagaaggtgcaggggaagtgtgttaggacccagagagcagcatgcatgatacctcttaagacagtggggtggaccttcagggacttggacttgaagggttttagtgatgctgggtggaagaacttatagaaaatatcaaggttatgaagaacagaatttgggaattatttcacatacaatcacatacaagcatttccctgttttcaaaagtcaaggtagggacc

SEQ ID NO: 42924 - DNA, 1485 bp, Macaca Mulatta
  misc_feature (1)...(1485): n = A,T,C or G
cagcttgttcatggcactgtgggccgtgctgctcctagagtactggaagcggaagagtgccacgctggcctaccgctgggactgctctgactacgaggacnnnaggagaggcctcggccccagtttgccgcctcagcccccacaacagccccgaaccccatcacgggggaggacgagccctacttccccgagaggagccgcgcgcgccgcatgctggctggctcggtggtgatcgtcgtgatggnnnnnnnnnnnnnnnnnnnnnnnnnnnnnnnnnnnnnnnnnnnnnnnnnnnnnnnnnnnnnnnnnnnnnnnnnnnnnnnnnnnnnnnnnnnnnnnnggcctctcgcatcgccagcctcacagggtctgtagtgaacctcatcttcatcctcatcctctccaagatctatgtgtccctggcccacgtcctgacacgatggnnnnnnnnnnnnnnnnnnnnnnnnnnnnnnnnnnnnnnnnnnnnnnnnnnnnnnnnnnnnnnnnnnnnnnnnnnnnnnnnnnnnnnnnnnnnnnnnnnnnnnnnnnnnnnnnnnnnnnnnnnnnnnnnnnnnnnnnnnnnnnnnnnnnnnnnnnnnnnnnnnnnnnnnnnnnnnnnnnnnnnnnnnnnnnnnnnnnnnnnnnnnnnnnnnnnnnnnnnnnnnnnnnnnnnnnnnnnnnnnnnnnnnnnnnnnnnnnnnnnnnnnnnnnnnnnnnnnnnnnnnnnnnnnnnnnnnnnnnnnnnnnnnnnnnnnnnnnnnnnnnnnnnnnnnnnnnnnnnnnnnnnnnnnnnnnnnnnnnnnnnnnnnnnnnnnnnnnnnnnnnnnnnnnnnnnnnnnnnnnnnnnnnnnnnnnnnnnnnnnnnnnnnnnnnnnnnnnnnnnnnnnnnnnnnnnnnnnnnnnnnnnnnnnnnnnnnnnnnnnnnnnnnnnnnnnnnnnnnnnnnnnnnnnnnnnnnnnnnnnnnnnnnnnnnnnnnnnnnnnnnnnnnnnnnnnnnnnnnnnnnnnnnnnnnnnnnnnnnnnnnnnnnnnnnnnnnnnnnnnnnnnnnnnnnnnnnnnnnnnnnnnnnnnnnnnnnnnnnnnnnnnnnnnnnnnnnnnnnnnnnnnnnnnnnnnnnnnnnnnnnnnnnnnnnnnnnnnnnnnnnnnnnnnnnnnnnnnnnnnnnnnnnnnnnnnnnnnnnnnnnnnnnnnnnnnnnnnnnnnnnnnnnnnnnnnnnnnnnnnnnnnnnnnnnnnnnnnnnnnnnnnnnnnnnnnnnnnnnnnnnnnnnnnnnnnnnnnnnnnnnnnnnnnnnnnnnnnnnnnnnnnnnnnnnnnnnnnnnnnnnnnnnnnnnnnnnnnnnnnnnnnnnnnnnnnnnnnnnagcatgtggttttctccatcggccggctcctggacctcctggtgcctgacatcccagagtctgtggggatcaaagtgaagcgggagtactacctggctaagcaggcggtggctgagaatgaggt

SEQ ID NO: 42925 - DNA, 937 bp, Macaca Mulatta
  misc_feature (1)...(937): n = A,T,C or G
aagacagctttgctggagggcctggaggtggaccagtacatgctgggcatcctgatttacattcagaanctctgactatgaggagatcaccatcgaccccacatgcagctggaagccagtgcccgtgaagcctgacatgcacatcaaggaggagccggacgggccggcactgaagcgctgccgcaccgtgagccccgcccacgtgctcatgcccagcgtgatggagatgatcgccgccctnnnnnnnnnnnnnnnnnnnnnnnnnnnnnnnnnnnnnnnnnnnnnnnnnnnnnnnnnnnnnnnnnnnnnnnnnnnnnnnnnnnnnnnnnnnnnnnnnnnnnnnnnnnnnnnnnnnnnnnnnnnnnnnnnnnnnnnnnnnnnnnnnnnnnnnnnnnnnnnnnnnnnnnnnnnnnnnnnnnnnnnnnnnnnnnnnnnnnnnnnnnnnnnnnnnnnnnnnnnnnnnnnnnnnnnnnnnnnnnnnnnnnnnnnnnnnnnnnnnnnnnnnnnnnnnnnnnnnnnnnnnnnnnnnnnnnnnnnnnnnnnnnnnnnnnnnnnnnnnnnnnnnnnnnnnnnnnnnnnnnnnnnnnnnnnnnnnnnnnnnnnnnnnnnnnnnnnnnnnnnnnnnnnnnnnnnnnnnnnnnnnnnnnnnnnnnnnnnnnnnnnnnnnnnnnnnnnnnnnnnnnnnnnnnnnnnnnnnnnnnnnnnnnnnnnnnnnnnnnnnnnnnnnctgctcccagaactgaccaaccctgatgagctactgtcctacttgggaccgcccgacctccccacaaacaacaatgacgacctgctctctctgtttgagaacaactgatcctgtgtttaccccaggcctggcggggacacgctcacagatgtcaccacagccctgcccttcatgcccagccccctgagacacccggtggtctctcccaaa

SEQ ID NO: 42926 - DNA, 683 bp, Macaca Mulatta
  misc_feature (1)...(683): n = A,T,C or G
ggtattgtggtctctaagccagacctcatcacctgtctggagcaaggagaaaaacctttgactatgaagaaacatgggatggtagccaacccctcannnnnnnnnnnnnnnnnnnnnnnnnnnnnnnnnnnnnnnnnnnnnnnnnnnnnnnnnnnnnnnnnnnnnnnnnnnnnnnnnnnnnnnnnnnnnnnnnnnnnnnnnnnnnnnnnnnnnnnnnnnnnnnnnnnnnnnnnnnnnnnnnnnnnnnnnnnnnnnnnnnnnnnnnnnnnnnnnnnnnnnnnnnnnnnnnnnnnnnnnnnnnnnnnnnnnnnnnnnnnnnnnnnnnnnnnnnnnnnnnnnnnnnnnnnnnnnnnnnnnnnnnnnnnnnnnnnnnnnnnnnnnnnnnnnnnnnnnnnnnnnnnnnnnnnnnnnnnnnnnnnnnnnnnnnnnnagagaaaccctacaagtgtgaagaatgtggcaaagcctttaagtacttctcattccttactacacataagataattcatactggagagaaaccctacaaatgtgaagaatgtggcaaagccttcaactggtcctcacaccttactacacataagagaattcatgctggagaaaaaccctacaaatgtgaagaatgctggcgaagcctttaagtactcctcttgccttactacacataagataattcatactgg

SEQ ID NO: 42927 - DNA, 2022 bp, Macaca Mulatta
  misc_feature (1)...(2022): n = A,T,C or G
agcgccccctgcagcgcgggaagccgccctacagctacatagcgctcatagccatggccatcgcgcacgcgcccgagcgccgcctcacgctgggcggcatctacaagttcatcaccgagcgcttccccttctaccgcgacaaccccaaaaagtggcagaacagcatccgccacaacctcacgctcaacgactgcttcctcaagatcccgcgcgaggccggtcgcccgggtaagggcaactactgggcgctcgatcccaacgcggaggagatgttcgagagcggcagcttcctgcgccgccgcaagcgcttcaagcgctcggacctctccacctatccggcctacatgcaagacgcggcnnnnnnnnnnnnnnnnnnnnnnnnnnnnnnnnnnnnnnnnnnnnnnnnnnnnnnnnnnnnnnnnnnnnnnnnnnnnnnnnnnnnnnnnctatgcaggctacgcgccgccgtcgctggccgcgccgcctccagtctactaccccgcggcgtcgcccggcccttgccgcgtcttcggcctggttcctgagcggccgctcagtccagagctggaaaccgcaccgtcggggtccggcggctcttgcgccttcgcctccgccggcgcccctgctaccgccacnnnnnnnnnnnnnnnnnnnnnnnnnnnnnnnnnnnnnnnnnnnnnnnnnnnnnnnnnnnnnnnnnnnnnnnnnnnnnnnnnnnnnnnnnnnnnnnnnnnnnnnnnnnnnnnnnnnnnnnnnnnnnnnnnnnnnnnnnnnnnnnnnnnnnnnnnnnnnnnnnnnnnnnnnnnnnnnnnnnnnnnnnnnnnnnnnnnnnnnnnnnnnnnnnnnnnnnnnnnnnnnnnnnnnnnnnnnnnnnnnnnnnnnnnnnnnnnnnnnnnnnnnnnnnnnnnnnnnnnnnnnnnnnnnnnnnnnnnnnnnnnnnnnnnnnnnnnnnnnnnnnnnnnnnnnnnnnnnnnnnnnnnnnnnnnnnnnnnnnnnnnnnnnnnnnnnnnnnnnnnnnnnnnnnnnnnnnnnnnnnnnnnnnnnnnnnnnnnnnnnnnnnnnnnnnnnnnnnnnnnnnnnnnnnnnnnnnnnnnnnnnnnnnnnnnnnnnnnnnnnnnnnnnnnnnnnnnnnnnnnggtgtactctgtaaatggaaggaggtggggcgaggcagccagagcccttggactggcacagggaccctcgatggagcgaagcccccaaaggggatgctttctggcattctatcggagagggtccttggcggtaaccagagggaagcgtagtgtcaacacctgagaccaggatccaaattgtgggaaatcagtttctgccttccatgtactgccggaaactcgggcatttttacgcggttcggcctctagtgcttttaactgctttactacaataaaaggctccggcagccagcgcctttcttcttaaagcgaggacaaatttgcaaaagaagtagccttttcttcttcttttttaaatgggagaaatctctgctctggttgacctgagctagttttccctgtctctgagaactggagacctagctccgagttgaactgtgtctcagcgctccagtcccatcacttgaaccttcagtctcccccatctgttacacgagagggctacggactctacccaccgctcccgggttgtcattcagggccccatcatcttggatgctgccctgtgtatttggcagcaatggtggaccacccagggcccctgagtagccacccaaagcttacccgctgttctagggaatagaaaagagctcatggccaagcatctaacctaaagtcccaggattggctccaggcagcaattatatcataacttattgaacttttgagcaggttgtgctggcaatttcatagctgttactgcccagtcataaatctggttttccattataaggcagctagaaatgcattcgttcatttgtccactgtttcttgtcatcacgcagccctggacccaatggggaactaaagtttaaggagatgagag

SEQ ID NO: 42928 - DNA, 801 bp, Macaca Mulatta
  misc_feature (1)...(801): n = A,T,C or G
gggattgggaggcagaggtaggtggtaaggtgtgaacgctggtttcccacccaaatcgtcctggccgaggccgtacttcatactcgaccgaagggctttagttttccgggtcatttcccttctccgcctggagcccacggccaatgcgtctttgtcttccctctaattcccgaacccgcgcttccggggacggggtcgtagccaggctcgagaagcttttggtggagtctacctctaaccaagctattcaggccaagaccttaaccgcacttaccctgaactgatcgaaagtgctaatgaggggaagaggtgttattctgcacaatggggaaggtattgtctgggtctgcgagccctcttcccctcccccatctctacaaaagaaaactggaatttgagctgctctagggagttcaggagctggnggtcgacccacggttgggttcattaggtgtataggggaacgctttccgttgcaaatcactggattctgcttgtgttccgcgcatagtttttgtcggtcttccctagcttcaaaagaacatagtactgatttgtgtactcattaactctaagtattctgtaagtattttgactaaattactaattcgtacnaaattcnatttgtggaatatttgaaacacccccgtatctgggatacagtctgctttaccaaactgtgcaatctgcctttacgaaattattactatgggattggtaaaataaccgcccgattggaaaggccaccccaacagttgttggggcttttgcaaaaaacagtccctttgggattttgctaac

SEQ ID NO: 42929 - DNA, 514 bp, Macaca Mulatta
ccgtctttttgcagtgccaggcagggtggccaaagaggactggactctggacctggagccccgcggtccagttcacattcacccaacaagagtttcgagaggcctcccatggtgcctgtgctgggtggcggtggtggtgccaagaggaatggaatgtcctgggctccttcaggagctctctgcccaggggcaaggagagcccagagagaagcaccctgatctcttgagcttcctgatctgctcctgtcccctgccctcctccactcccttgcctttccctaggttgtcccctccctgggcttttgtgtgttttgggagatgtcacctaaccaggacgtttaatattcaatcccatccccattcctcccaccctgccccgctttgatttaatcctttggctgtgggctgaggcctcccagggaagctgggtggggtgggtgctgagaccccctcagaccagtgcagaggcctgtccttgtgcagtctgcaccccgcactgtctcccttgcctgta

SEQ ID NO: 42930 - DNA, 903 bp, Macaca Mulatta
ccccggtgccgagggcaggagcctcggagacggcctagaagacatggaggacctggcccgcttgcggtgagcgggctcattgccaaagctgccatcctcggctcacagctcctcatacccaccctgccctcatctttatgaattgcgtgtagacccttattgaatccttagaaggatgagcttgaaccctcctggcaggaaggggcaggtgaggggcgacagatgttacctccccaggactgcctttctattagtacaaagcttccttctgggtcagcgccagccctacttgtagcctccccattacttgacagcccagccctcattttatggatcaggctctgggaggttgaatgacttgccggacgtgtccctgcagtgggtagcagaactaactcacaacctcctgcagccacaatttattgtccctccaccctgttgtccccacaggctgatgtgtgacagctctgtgctgctgtgcctcaagaagagatttcacctgggccgaatctatgtatggggagccacggggagggacagtgggctgggatcccctttcctctggggacagagggctccccagcacccctagaggttctctttcctcttcctctccgggctgggcgctgaaccgtctctggagccctgcagagtgggacttgggggctgagctctgtttacattccccctgctccctccacactctgatgacaccttgttttcctccccagacttttggggggcccctcttgcttgttttgaacccccaccggcccttgcctctcttctcacctgaggtccaggcaagctaccaccccaggaaggccctcagcaccaccccgtatgtgactgccccactgaccctctgctcacctcccagacagcccagtccctgcatgtccc

SEQ ID NO: 42931 - DNA, 1818 bp, Macaca Mulatta
  misc_feature (1)...(1818): n = A,T,C or G
aggagcaacaagggagccatgggcaactgcgtcaccaccatggtgcacaaccgctacaccccctcggagagggcacccccgctcaagagctccaaccagactgccccctccctcaannnnnnnnnnnnnnnnnnnnnnnnnnnnnnnnnnnnnnnnnnnnnnnnnnnnnnnnnnnnnnnnnnnnnnnnnnnnnnnnnnnnnnnnnnnnnnnnnnnnnnnnnnnnnnnnnnnnnnnnnnnnnnnnnnnnnnnnnnnnnnnnnnnnnnnnnnnnnnnnnnnnnnnnnnnnnnnnnnnnnnnnnnnnnnnnnnnnnnnnnnnnnnnnnnnnnnnnnnnnnnnnnnnnnnnnnnnnnnnnnnnnnnnnnnnnnnnnnnnnnnnnnnnnnnnnnnnnnnnnnnnnnnnnnnnnnnnnnnnnnnnnnnnnnnnnnnnnnnnnnnnnnnnnnnnnnnnnnnnnnnnnnnnnnnnnnnnnnnnnnnnnnnnnnnnnnnnnnnnnnnnnnnnnnnnnnnnnnnnnnnnnnnnnnnnnnnnnnnnnnnnnnnnnnnnnnnnnnnnnnnnnnnnnnnnnnnnnnnnnnnnnnnnnnnnnnnnnnnnnnnnnnnnnnnnnnnnnnnnnnnnnnnnnnnnnnnnnnnnnnnnnnnnnnnnnnnnnnnnnnnnnnnnnnnnnnnnnnnnnnnnnnnnnnnnnnnnnnnnnnnnnnnnnnnnnnnnnnnnnnnnnnnnnnnnnnnnnnnnnnnnnnnnnnnnnnnnnnnnnnnnnnnnnnnnnnnnnnnnnnnnnnnnnnnnnnnnnnnnnnnnnnnnnnnnnnnnnnnnnnnnnnnnnnnnnnnnnnnnnnnnnnnnnnnnnnnnnnnnnnnnnnnnnnnnnnnnnnnnnnnnnnnnnnnnnnnnnnnnnnnnnnnnnnnnnnnnnnnnnnnnnnnnnnnnnnnnnnnnnnnnnnnnnnnnnnnnnnnnnnnnnnnnnnnnnnnnnnnnnnnnnnnnnnnnnnnnnnnnnnnnnnnnnnnnnnnnnnnnnnnnnnnnnnnnnnnnnnnnnnnnnnnnnnnnnnnnnnnnnnnnnnnnnnnnnnnnnnnnnnnnnnnnnnnnnnnnnnnnnnnnnnnnnnnnnnnnnnnnnnnnnnnnnnnnnnnnnnnnnnnnnnnnnnnnnnnnnnnnnnnnnnnnnnnnnnnnnnnnnnnnnnnnnnnnnnnnnnnnnnnnnnnnnnnnnnnnnnnnnnnnnnnnnnnnnnnnnnnnnnnnnnnnnnnnnnnnnnnnnnnnnnnnnnnnnnnnnnnnnnnnnnnnnnnnnnnnnnnnnnnnnnnnnnnnnnnnnnnnnnnnnnnnnnnnnnnnnnnnnnnnnnnnnnnnnnnnnnnnnnnnnnnnnnnnnnnnnnnnnnnnnnnnnnnnnnnnnnnnnnnnnnnnnnnnnnnnnnnnnnnnnnnnnnnnnnnnnnnnnnnnnnnnnnnnnnnnnnnnnnnnnnnnnnnnnnnnnnnnnnnnnnnnnnnnnnnnnnnnnnnnnnnnnnnnnnnnnnnnnnnnnnnnnnnnnnnnnnnnnnnnnnnnnnnnnnnnnnnnnnnnnnnnnnnnnnnnnnnnnnnnnnnnnnnnnnnnnnnnnnnnnnnnnnnnnnnnnnnnnntggagcccgagatccagaagctgattgccaggcacaagcaggaggtgcggaggctcaagagccttcatgaggcggagctgctgcagtcagacgagcgggcctcgcagcgctgcctgcgccaggctgaggagctgcgggagcagctggagcgggagaaggaggcgctgggccagcaggagcgcgagcgtgctcggcagcggt

SEQ ID NO: 42932 - DNA, 483 bp, Macaca Mulatta
agcctcaaggcccatgcagttggtcagtggtggaatcaggtgtggggcatgcctggttctgccctggctcatcccctgccttcagaggacaacaacggcgcagcgcacatgggggcaggccctgaggtgtggctttctctgggctgggctggggcagttctgggggaggggtgtgttctgtcccttcctccaggagacacggtgcctgcgccatctggccacttgcatgagggaacgtctgtctgcaccccctgtgggctgctgtcctcatccctggctgctggatgcacctcggacgctggggctctggtctccgatccttcctggactttgtggggacagcgacggaggaggaggatgcccccgaggatgggccaggcacgaggcttgcagcagttcccaggttttgcagataaaagtacaggacacccctgcagcatttgggacgttgtcacaaggagacccggctcctggagtaggggt

SEQ ID NO: 42933 - DNA, 1958 bp, Macaca Mulatta
  misc_feature (1)...(1958): n = A,T,C or G
ttacctaacttacctgcaaatacttttatacaaatttgcacatgctactctagtcaaaaatatatgtacattacaggtatttcctgtgtgtaacttggttctagttgcttctttcagaaatatcctctatttttgatttacctgataaaatcactttcctgtccaaagtcttctaaatacttctagattaactactttttagtacatctaagaagacaagagttttgtctcttatccacctctgagtcaaaaactagcgtgtctgtcaattggtacatagttcctacagccccacttagctctggatcagagttctacttggcattgtttgcaactacatggacgtaaaatgcatgggttctcttgaaaaaaatgttgtttttgccatgatgctctctgaaagagactaaccttccctctttcttcgcagagaaagactcgtgtgtaatccttgacaatgtaatctcatttacttattcccatctctacccatatgtgaccttcatgtctttgctgtaagcccctacatcctcaatatgtacactagggatagcataaaangtagtaataatagtagtagtaataataacaataaaatggattatagcttatactatgcacaaggcactgttgatatattacttcatttagtattcacagtaactctgtgcctcaagtactattgtaatacctttaagaggaggaaactgaggcacagggccctaaattaatattccaagataaaacagctactaattgacagagggcataattcaactcatgatacttggctctagaatatatgctctgaaccattatacaataataattcatgaggaaacatttttaaagcctaagttatttgctctgaaataagatatagtttgggtgagaaagcttagataccgtgaaatattacagaatttggtagtcttttggcactccaggttttacttttactgcttaaacataataaaaatatgacttattatgcctttgattttacaataatattcctgttatttttggaagcatagggtgtgggataatgctaattactagtgactagtatggcagaaacaatatgagtaactaaaatcaatatacttctcaacaatttccaacagccttcgcaattaacttggccatgtgactgattgtgactaaaataatgtgaaatataatgcctcccagtttctccagtttcccattttcctagtatatctcctgataaaatgtctatactcacttccccattcctaataataaagcaaggctagttagtaagacatcaccttgcattttgaaaatcccatannnnnnnnnnnnnnnnnnnnnnnnnnnnnnnnnnnnnnnnnnnnnnnnnnnngcggagtctcgctccnnnnnnnnnnnnnnnnnnnnnnnnncgnnnnnnnnnnnnnnnnnagctccgcctcccgggttcgggccattctcctgtnnnnnnnnnnnnnnnnnnnnnnnnnnnnnnngcccgccacctcgcccggctnnnnnnnnnnnnnnnnnnnnnnnnnnnnnnnnnnnnnnnnnnnnnnnagnnnnnnnnnnnnnnnnnnnnnnntcnnnnnnnnnnnnngtnnnnnnnnnnnnnnnnnnnnnnnnnnnnnnnnnnnnnnnnnnnnnnnggcccccatagacttttgaaatgatttcatatattggtctttctttattccaagagtccagaaatggcaacatcacctttgattcaatgtaatggaaagagttcttttgagagacagagaaaagaataatttaatttctttccccacgcctccttctctgtctcttacactgtcttccttccttccaccctccccatttctctctctcatttctcagaaatatattttgaaaggattcacagcagacagctaaggcgtttttttctaagcagagaagtgatactgagaaggtagggttgcatgaaccct

SEQ ID NO: 42934 - DNA, 159 bp, Macaca Mulatta
aaaatatccaagcttcatattaaccctacctgtcaacgtaacgatttcatgaacattattatattgtcgaattcctactgacaacattataactgtatgggagcttaactttataaggaaatgtattttgacactggtatcttattaaagtattctgat

SEQ ID NO: 42935 - DNA, 467 bp, Macaca Mulatta
  misc_feature (1)...(467): n = A,T,C or G
aatcagggaagaacgtggctgtacctgtcgggggttcccctagaccagtggtgggctcctgggccttctctgctcttggaatggaggctgagggccacctgccctcctgcaggttttgggtacaagctgtgcgcctctgcagagcacctgtgtcctctcctgtcctgtgcagttaatcagggctccaggtggctttcaggagcaaggccctgctccctcgtgtggcaagcagggcctctcccaggcgggccngggcctctcccaggcgggcccctgtccacctcgtgaggcccagcccccaccccctgcctctccagccagctcccctggcccaggacatctcacgcttccctgagggtaccccctgccatggcacgtgcctatcaccctgcctggaaggccggcgtccactgtgtctcctgctgtgctgggcccgctcagatcctttcctcagctgttctgccttg

SEQ ID NO: 42936 - DNA, 640 bp, Macaca Mulatta
  misc_feature (1)...(640): n = A,T,C or G
gaggacgaagtgaactacactcagctcgtcgacctgcacgccgatacgctgagtgcggtttgcggatcctggccttcccatgtaaccagttcgggaagcaggagccagggagtaacgaagagatcaaagagttcgccgcaggctacaacgtcaaattcgatatgttcagcaagatatgcgtgaacggggacgatgcccacccgctgtggaagtggatgaagatccagcccaagggcaagggcatcctgggaaatgccatcaagtggaacttcaccaagttcctcattgacaagaacggctgcgtggtgaagcggtacggacccatggaggaacccctggtgatagagaaggacctgccccactatttctagctccacaagtgtgtggccccgcccgagccccctgcccacgccctcggagccttccaccggcacccatgacggcctgcttgcaaaccagctcctggtgaggcagacccgaaaatccagcgtgcaccccgctggaggaaggtcccgtggcccgctgggcttggctcggcgcccccaaccctggctgccttatgggaataaagagacaaattggtaacnnnnnnnnnnnnnnnnnnnnnnnaggccggtaccaatgcgcctatagtgagtcg

SEQ ID NO: 42937 - DNA, 160 bp, Macaca Mulatta
tacttgcaactgggctcagtggtctctactcttccctgcctacaaagctagaagagaaaggcgaggaatggcactgccttctgaaagatgactggcttctacttccttctcttgtccagttcatgaactccctggagttttgcaatgcagtcatacaggt

SEQ ID NO: 42938 - DNA, 292 bp, Macaca Mulatta
atccttctggacctggtggctgaagcccagtcccgccgcctagaggagcagagggccaccttcttcaccccacaaaaccccccaagccaagcccctgccccactccgtcctcttgaggacagagaacagctttacagcaccatcctcagtcaccaggtaagacatccccccaggaggcaaacccaggcctcctggtctcttggccctgttctcttttgggttaaactcctgcttctccctaggcaccccatcaccttcacaggtttcctatatgcctccccataccaaccct

SEQ ID NO: 42939 - DNA, 851 bp, Macaca Mulatta
atttccttgtcctgtgttcctctgtgctgtttttcatcgtggtcctgtcgccttgtctccccttgttcatctcttcgcgctctcttaccccggctccggttttccctttctttctttgttcctccctttcggtccgcgccccattatttctttcccccccgctgcttttgtcctctccttccttccgtctctccctctggccctctcctcgtttgggcgtggcatcggggttcttttcctccgttccccttcccttctcgcacgcttgtctctgtgctcccccttgcttttcttggggccgctccgtgtgcctctttcaatacgcccctttttcctgtccccggctctcctattttgctccccatccatcgcccccctcgttttccccctcggggccccgttgtcttcccctccaccaactaatatgtccagccaacttccttgtcggacccacttagctcgttgacacgcgctcacaacctgactcaaggtaaactcccaagcgacgcttgcacaggatcctgtcactcttccgtagcaccgagaaggcaactgcaggacatcaacagtaatgacacgaagccagacacgtgtatgttttacccgaacttccaagcacctggtaaacatgccctccactgcgtgatgagattaaggtgatggactgtcgatcaactaggtccaaggcctgcgtggctgatgagccaaagagaaacttcagcgataacagatattcatcaggaattcgcgcgctctcttgcaccgccgcggccatctcgctcaggagctcctccacgactcccggcaacactacggccatcgtaccgcaggacacgccctccacgactccc

SEQ ID NO: 42940 - DNA, 620 bp, Macaca Mulatta
  misc_feature (1)...(620): n = A,T,C or G
gnnnnnnnnnnnnnnnnnnnnnnnnnnnnnnnnnnnnnnnnnnnnnnnnnnnnnnnnnnnnnnnnnnnnnnnnnnnnnnnnnnnnnnnnnnnnnnnnnnnnnnnnnnnnnnnnnnnnnnnnnnnnnnnnnnnnnnnnnnnnnnnnnnnnnnnnnnnnnnnnnnnnnnnnnnnnnnnnnnnnnnnnnnnnnnnnnnnnnnnnnnnnnnnnnnnnnnnnnnnnnnnnnnnnnnnnnnnnnnnnnnnnnnnnnnnnnnnnnnnnnnnnnnnnnnnnnnnnnnnnnnnnnnnnnnnnnnnnnnnnnnnnnnnnnnnnnnnnnnnnnnnnnnnnnnnnnnnnnnnnnnnnnnnnnnnnnnnnnnnnnnnnnnnnnnnnnnnnnnnnnnnnnnnnnnnnnnnnnnnnnnnnnnnnnnnnnnnnnnnnnnnnnnnnnnnnnnnnnnnnnnnnnnnnnnnnnnnnnnnnnnnnnnnnnnnnnnnnnnnnntgctaccactgaacccacactgtgtcatagcctacttctttttctattcaggggcgataacttatacttcctttcaacaacactttccattccacgctccgcatcccccatacctacactaatatcctctatgccccc

SEQ ID NO: 42941 - DNA, 1089 bp, Macaca Mulatta
  misc_feature (1)...(1089): n = A,T,C or G
ggggcagttcggcggtcccgcgggtctgtctcttgcttcaacagtgtttggacggaacagatccggggactctttcttccagcctccgagcgccctccgatttcctctccacttgcaacctccgggaccatcttctcgggcatctcctgcttctggggaccctgcccaacccccccttttttcgggtgtcgcctccctcctttggctaccatacccctggaggcccccccatccttcccaattttttccccccgacccgggaggccgccgttcaacaccccgggcgtaccatttctcccttgcgggccttccccaagcccgaccgctcccttgtgggggttctccttttttaacagccgaagactcgccgtccctcttggatgtgcgcgccggggggcgctcacctctttcctcccgtacccctccgtccgccggtatcagcagtntggcccggcggggggtggggggtggcgccctctctcctgttgtggcccggggggcctgagcgtgtgtgcgccgatccgccgcactccgtcgtctgtggtcacagggggtggggacacggcggggggagctcccgtcgttgtacccagttatgttgacctttttcctctcnnttnnnnnnnnaagggcaagcccaggtccnnnnnnnnnnnnnnnnnncnccnnnnncgtgtcgccgcctttctgcgccccttcccgccgttttcccccttgtacggctccccccttccccgtttcccctatnctgccttgcgcggtgcgcccctcttgttttgcccctggtacttgttcgcgtctccctttcgccnncccccttattcttttctccccccccgcgccgccgtggcgcgcctatgccgcctttccgtcccccgctgtgggcttgtccccagtgcgcgcgagcggccttttttttgttattgcccccgcctgggcgttcgtagcccgtgaccgttgtctggctggactgcgtgtntcgtgcggacgctcatcgggtggggtcgtgtgcccggtggagggcggatgtgttggcccgtgccccactcttttaatcccgcgtattgctcgcgccgcgagccgtcccgc

SEQ ID NO: 42942 - DNA, 751 bp, Macaca Mulatta
ggaaacttgagagagaagtctacaaagagccagttcacccagctgcagcagaacctattccaagtcaccagcactcccagacccaggattccctccaagttctaagaaatgtgctgtgattaatcacctcactgacacaaaaaaccaaagatctttctaatttccccattcacattccagcaagtttaataggaaagtttagaaaactcatctgaagaaagaatactcatcaaatgggagagagcaggaacattttgttctaagactggattgagacctaatgatgctagaccacgttttaaatatcagaacacagcattcataagaaaatagaatctgcttcaagcataaaccataagaggggaaaactacctttacaatgtattttcttcatatcaaattcatgtcataagaatatctaaatgacttctggccaagtcacttaaatgttgtggtcttcggtctttttggtctttccaaatgtaaaatttgccacagactggttattttttagaaccctttcttcccttctgttctcctactttatttaggtagctccacacacacattttgaaaattggataaacaacctccttctcactggtccatgcaagaccatattagtgtatttctaatataatacacaaccatgaaataattatacaacacaaaaactacaatactggctttctctcccctctgggtaccctggggcctttcatttctctacccctctaacccctttaagaaa

SEQ ID NO: 42943 - DNA, 621 bp, Macaca Mulatta
atgtatatacctagccacccttatggtatgtctcagaacgtttatattaaagtaatgcttgtcttgcagcaggtgatcccataaaacaataactccctgttcttaaaaacttactctctttttcactaacaacataggaattgtttctgtgttgagattattctgtgttgcatccattctctgtgtagtggtcaccttctgtctgtcatggtgggtttaatgtgaagtaaaaccattggttctctgccacttttgaagaaagggcagttcatctgatccttcttcagaatggtacctactgatatcatcgaggaaaatgttacaaatcagacctagaatatgactttttacaattgaggcatttcctgtcatttggccgccttaccaacaagatgtgatgtacaaatttggaatcaaaggatacaaagcaacaagagaggaaatgtgtaatgggggtaacaaaactgcctatgttacctattgtctagtcagaaaaaaaaagtctgaggtctggaatgcaagaaagttgtggttattttctttcatttttagtttcagtatgttaatttctaagttccattctgaaagtccatgtgccccattcagttactgtggttgtag

SEQ ID NO: 42944 - DNA, 285 bp, Macaca Mulatta
agttgtctctcttagcatttagttgcctaaaatctgtctaagatatgaatatactgtgttaaaataaattctaattcttttgtgaagtaaatggcaagaataaaaggctctcctttataatctttaattcatggtgtaccctcgagtccttgaaatttgccaaagataaaaaatttgcatatataaacaaatgcatatatcagcattctaaaaaagaaaatcataagccactttgtaatgtgatttgaaggaattagggaagtttacaacagtttgtatgtttca

SEQ ID NO: 42945 - DNA, 257 bp, Macaca Mulatta
gctcctctctctgtccactccaggaaacctaggttttctgccaacctgggtaaccgtgtatttccttctggtaccctcctcccatctgcccaattaatatgtccctctgttttcaaaatagttctccagaaagccgggtcccattcacatcccatttagaaccaaccgggtgctgaaaacccagatgatgtacaccatcctctgcccacatagtagccagcactgggaaggcagaacgtggcaggaagaagttactg

SEQ ID NO: 42946 - DNA, 789 bp, Macaca Mulatta
  misc_feature (1)...(789): n = A,T,C or G
gggactagatgccagtagatctgccttccagttgtaacaaccaaaactgtctacagacattgcctaatgtccgcctgtgggtcaaaatcgtccctgttttgagaaccaaggatccagacccgtgcttctcaaaatacagtccgtggtccagtaagcgtctgcctcatctagaactttgttagaagtgaagactcttgaggcccactccaaatctactgactcagaaactgcattttaacaaggtcctcaggtgattcatatgcagttagaattgacaagcgctgacctaaaccaacttcttcagtttacaagtgaggagatggctttccagagggcagatcacctactcaaggtcatgtctcctgaatcctgcacatgaaagtttcaacacagtggaagagacagaccgatcaaaactgcaatacaaagcgaaatgtaaaacggagtaagcgaggcacccccaaagtgctacgggattgagaagaagacggaaaagcgaagatccaagagatggcctgcatcaaacccccatcaagccaaaatcaggcctcggggtctcaagtctcctgggcccggacacccaccctgtgccaatgaaacactggggtttgatacacaaaaaccgggctttggacagatctaattcctannnnnnnnnnnnnnnnnnggaatcagggcaaggctggcaaaaaccttcgggaaatccaactggagttttaaaagcctggcttaattccttttccacaaaaaaatggcgccccaatttttcccctttctggacaaaaaaaa

SEQ ID NO: 42947 - DNA, 254 bp, Macaca Mulatta
gtgtttgttccgaggtacaggttttgttcgactgacgtatcagatagtcagagtggttaccacaccgacgttgtagcagctgcataataaatgactgagagaatcatgttaggcatgcccacctaacctaacttgaatcatgcgaaaggggagctgttggaattcaaatagactttctggttcccagcagtcggcagtaatagaatgctttcaggaagatgacagaatcaggagaaagatgctgttttgcacta

SEQ ID NO: 42948 - DNA, 2669 bp, Macaca Mulatta
  misc_feature (1)...(2669): n = A,T,C or G
ccagaggtcgacagtgtcgggagttggagtgagccggctggatgtgacccccaagacagaatggtgctggactccggggctcaggcgtatgatcaggcaccccccagcccgcctaccagtcccccatccctgcgccataggctgaagccctcagaccgagatgggccaccactgtacccctggtctcagtccctggccttgcccctggctctggcagtccccccagcactgcagcccgagcctgagcagcagcccttctcacagatgcacctgggccaccgtggccacatgcgtcgcagtgagagcacctactctgtaaatagtactggccggcggggacgtggcaccctgggacggcctccacctggacggggacagaacccaggtgggggcaccctgcggcctgcagcctccctgcctcacattgctaagactcaaagggatgcaggccatnnnnnnnnnnnnnnnnnnnnnnnnnnnnnnnnnnnnnnnnnnnnnnnnnnnnnnnnnnnnnnnnnnnnnnnnnnnnnnnnnnnnnnnnnnnnnnnnnnnnnnnnnnnnnnnnnnnnnnnnnnnnnnnnnnnnnnnnnnnnnnnnnnnnnnnnnnnnnnnnnnnnnnnnnnnnnnnnnnnnnnnnnnnnnnnnnnnnnnnnnnnnnnnnnnnnnnnnnnnnnnnnnnnnnnnnnnnnnnnnnnnnnnnnnnnnnnnnnnnnnnnnnnnnnnnnnnnnnnnnnnnnnnnnnnnnnnnnnnnnnnnnnnnnnnnnnnnnnnnnnnnnnnnnnnnnnnnnnnnnnnnnnnnnnnnnnnnnnnnnnnnnnnnnnnnnnnnnnnnnnnnnnnnnnnnnnnnnnnnnnnnnnnnnnnnnnnnnnnnnnnnnnnnnnnnnnnnnnnnnnnnnnnnnnnnnnnnnnnnnnnnnnnnnnnnnnnnnnnnnnnnnnnnnnnnnnnnnnnnnnnnnnnnnnnnnnnnnnnnnnnnnnnnnnnnnnnnnnnnnnnnnnnnnnnnnnnnnnnnnnnnnnnnnnnnnnnnnnnnnnnnnnnnnnnnnnnnnnnnnnnnnnnnnnnnnnnnnnnnnnnnnnnnnnnnnnnnnnnnnnnnnnnnnnnnnnnnnnnnnnnnnnnnnnnnnnnnnnnnnnnnnnnnnnnnnnnnnnnnnnnnnnnnnnnnnnnnnnnnnnnnnnnnnnnnnnnnnnnnnnnnnnnnnnnnnnnnnnnnnnnnnnnnnnnnnnnnnnnnnnnnnnnnnnnnnnnnnnnnnnnnnnnnnnnnnnnnnnnnnnnnnnnnnnnnnnnnnnnnnnnnnnnnnnnnnnnnaggtgtcctatgaggatgtggaccacctgcggccccatggggtgctggataatacccgggtgccccacttcatgcaggacttggcacgctaccggcagcagctggagcacatcatggccaccaaccggctggatgaggcagagttgggtcgcctgctacccgactgatgtccgttgagggctgcagacagaggtcctggacagaagcttcagataggccccaagaacatgaagctgtttgctccgtgcttccacggcctgggtgtttcttgggggtgttgggagggcaggagcattccttgaggaggagtggcaacatcaaagggtttgtgtcccttgctagcctccctggggcctggggacctgcagcagcatgtctggcaaactgagtccccctcctgcctccagctctctgttgagcagagggaagccatgggggcaggaagggagctgagcattgatggggatgggggtggtttgggaatagaaacttgttcttgcatgagatggctttggttgtcccagtactccagtctcccttccctcacctggccccttggtgctccttcagcaatcgtgctgtnnnnnnnnnnnnnnnnnnnnnnnnnnnnnnnnnnnnnnnnnnnnnnnnnnnnnnnnnnnnnnnnnnnnnnnnnnnnnnnnnnnnnnnnnnnnnnnnnnnnnnnnnnnnnnnnnnnnnnnnnnnnnnnnnnnnnnnnnnnnnnnnnnnnnnnnnnnnnnnnnnnnnnnnnnnnnnnnnnnnnnnnnnnnnnnnnnnnnnnnnnnnnnnnnnnnnnnnnnnnnnnnnnnnnnnnnnnnnnnnnnnnnnnnnnnnnnnnnnnnnnnnnnnnnnnnnnnnnnnnnnnnnnnnnnnnnnnnnnnnnnnnnnnnnnnnnnnnnnnnnnnnnnnnnnnnnnnnnnnnnntcaggccttgtgaatcaagcccaagagctcccttggccctgtccccactccctccactggcctctgctgttcctgtctctgcccacaccctcacagctggtctctggcagaggctggcgtagtctaggagcagctgcaattgcgcctgagggacagtccctagagtttggtggcccaagtcctgaacccctcctggaccaggtgaggtgcagaggtggttgctgcttccagtttccctttagacttagctgtgtgagccccactcataccctttggccttagttttcccatctgtaaaactcagaaacacagttggaaagtccttattcatttagtcagcgaatataatatgtatagagcgccttttgtgtaagttactggtcagaatcctcactgagctcccagtccagagggaagccagacaattaaaacagtaa

SEQ ID NO: 42949 - DNA, 1816 bp, Macaca Mulatta
  misc_feature (1)...(1816): n = A,T,C or G
gagtctcctgagacgccgagatgcgggtcatggcgccnnnnnnnnnnnnnnnnnnnnnnnnnnnnnnnnnnnnnnnnnnnnnnnnnnnnnnnnnnnnnnnnnnnnnnnnnnnnnnnnnnnnnnnnnnnnnnnnnnnnnnnnnnnnnnnnnnnnnnnnnnnnnnnnnnnnnnnnnnnnnnnnnnnnnnnnnnnnnnnnnnnnnnnnnnnnnnnnnnnnnnnnnnnnnnnnnnnnnnnnnnnnnnnnnnnnnnnnnnnnnnnnnnnnnnnnnnnnnnnnnnnnnnnnnnnnnnnnnnnnnnnnnnnnnnnnnnnnnnnnnnnnnnnnnnnnnnnnnnnnnnnnnnnnnnnnnnnnnnnnnnnnnngctcgcactccttgaggtatttcagcgccggcacgtcccggcccggccgcggggagccccgcttcatgtccgtgggctacgtggacgacacgcagttcctgcggttcgacagcgacgccgcgagtccgaggatggagccgcgggcgccgtgggcggagcaggagggtctggagtattgggaagagcagacacggatcgccaaggccaacgcacagactgaccgagtgggcctggggaccctgcgcggctactacaaccagagcgaggcngggtctcacaccctccagtggatgtacggctgcgacctgggacccgacgggcgcctcctccgcgggtatgaccagtccgcctacgacggaaggattacatcgccctgaacgaggacctgcgctcctggaccgcggcggacacggcggctcagaacacccagcgcaagtgggaggcggcgggtgtggcggagcagatgagagcctacctggagggcgagtgcctggagtggctccgcagatacctggagaacgggaaggagacgctgcagcgcgcggnncccaaagacacacgtgacccaccaccccgtctctgaccatgaggccaccctgaggtgctgggccctgggcttctaccctgcggagatcacgctgacctggcagcgggatggggaggatcaaactcaggacaccgaacttgtggagaccaggccaggaggagatggaaccttccaaaagtggggagctgtggtggtgccttctggagaagagcagagatacacatgccacgtacagcacgagggattgccggagcccctcaccctgagatgggngagccatcttcccagtccaccatccccatcatgggcattgttgctggcctggctgtcctagcagttgtggtcaccggagctgtggtcgcagctgtgatgtggaggaggaagagctcaggtnnnncaggtggaaaaggagggagctactctcaggctnnnnnnncgacagtgcccagggctctgatgtgtctctcacagcttgaaaaagcctgagacaactgtcttgtgtgggactgagaagcaggatttcttcacgcctcccttttgtgacttcaagagactctggcctctctttctgcaaaggcatctgaacgtgtctgtgtccctgttagcataatgtgaggaggtggagggacagcccacccccgtgtccaccgtgacccctgttcccacgctgacctgtgtttcctccccagtcatctttcctgttccagagaggtggggctggatgtctccatctcagtctcaactttatgtgcagtgagctgcaacttcttacttccctactgaaaataagaatctgaatataaatttgttttctcaaatatctgctatgagaggttgatggattaattaaataggtcaattcctagaatttgagagagcaaataaagacctgagaaccttccagaa

SEQ ID NO: 42950 - DNA, 741 bp, Macaca Mulatta
aggtgttttgtgcctttctaaggcagcactgtatcccaggctgcattttaggacttaatatggaaataccagagtctgagctcctctaccttgagtttcattagtccttagtgtctaggagacaggaaagaatgctctctgtgactggagaggtgacaggcaggtgcagtgtgtccggagtccctttcccctgccgtgagacttcagtggaggagagcagcattgtaccctgggatcatttggttggttccaatcagaagcttagttatcaggttgcatgcgttgtctcctgcaagagacagaacgttccacaattcccaggtaaactctggaccattccaagtgtcctagcctcctgatgacattaattacccagttgtgtggaggagtgtaggatggactctcctgagaaggggaggttggtggttttgtcttctttttgctggatcctgaactggtctagacctcctgtccccaccccccgcccccatcagatgtggctggcctttcatttgaaggcttcagacttaaagcattaagcagctagtgccctctgcagggcctggtttccccagggaagggcagcaaggaacacggaccagaaagcctgtcctcagtaattgtgactatagttgagcctttagcaaaaagttttttctaaataaatggacatttgtaactttatcctccttaacccctgttcccctcaaattttttccccccttgtgccctctttaaaac

SEQ ID NO: 42951 - DNA, 675 bp, Macaca Mulatta
  misc_feature (1)...(675): n = A,T,C or G
catgatggcaaacagtgattttttttctttttcatagtttaggtgtcattgttgccagcacctttantgctcgagtcttcagtgaaaaatataaagtgccaaaaaaatcttgcaagacagaatccatacttaacactctttccaagacactgtgaccatgtacagtagaagtttttatttcctgatgaccaaatctatcaacgaatcatgttattaataaatatttttagcactcgtcagtattctccaatgtgaccttctcactggagtacacagaaggaaagcaaagaagagcatctgacttctggctctggcttacagcctctccaccaggccgaacgaagcaagagacccacggcggcagctccctgccactcagacctgggtggtgatagcctcaaagaatggctctgttttctgttgatagaaaacccacttgattttgcttctgagttagcaatcagaagaccctctaagtacaatagaagtgctcttaacggactctgcctatatgactcccaggccccggagtctccatctctctcgtaagccacctgccccagcacagctggaggctgctctctagtgttctcagtgctccggctccctcccttgagttgtgcgcccgtcccaaactactacatgcaagctctgcttcctcttgttagtacacac

SEQ ID NO: 42952 - DNA, 164 bp, Macaca Mulatta
gccattcagcatttttgtctgtttgttttaattaatatcatgtgggtcaaacaaactatgtcaatggtacctatctggcctggggctactagcttgtcgccttcagccagtggtgtgctaataaaagtttaaccaccagctctccaacagaaaagggaggtggg

SEQ ID NO: 42953 - DNA, 235 bp, Macaca Mulatta
gatcatcagtcaggtcaagaagcatccaagcttggtgtccctctttgtatttatcggagctagaggtactggtgcagcactgtatctcttgtgtctggcattgttcaatccagatgttagttgggacaggaagaaaaacccagagccctgaaacgaactggatcccagtgatcaatacaagttctactcagtgaatgtggattacagcaaactgaagaaagaaggtccaggtttc

SEQ ID NO: 42954 - DNA, 609 bp, Macaca Mulatta
acaggctgaggttgaggtggcttccttgaactgcaggatccagctggttgatgagaagctggaccatgctcaggagcgcctggccactgccctgcaaaagctggaagaagcggaaaaagctgctgctaagagtgagagaggtatgaaagttattgaaaaccggccttaaaaaatgaagaaaagatggaactccaggaaatccaactcaaagaagctaagcacattgcaaaagaggcagataggaagtataaaaaggtggctcataagttggtgatcattgaaagagacttgaaacacgcagaggaacaagctgagctggcagagtcccgctgccgagagatagatgagcatatcagacggagggaccagaacctgaagtgtctgagtgctgctgaagaaaagtactctcaaaaagaagacaaatatgagaaagagatcaagattcttactgataaactcaaggaggcagagacctgtgctgggtttgctcagagatccgtagccaagctggaaaagacaattgatgacttggaagataaactgaaatgcaccaaagaagagcacctctgtacacaaaggatgctggaccagactctgcttgacctgaat

SEQ ID NO: 42955 - DNA, 510 bp, Macaca Mulatta
  misc_feature (1)...(510): n = A,T,C or G
gggggctcggggaaaccactgtttcagttgtataagattttttttgccacattcttatggcccagttaattaataccttttttcctcattgagagaggaacacgtactgcctgtcataacagcattgtaatgccagtgtctcagtaagtaacagaaccctggtggtattaattgggtgttttttgccctggagaattcagattcccttctataccttctattctgcccagaagaggggggaatcaccagtgttataaaattagaagattgttttgccctatttactgaatatttgaacactgcagcattactagccaccagtgttaaaggacagatgaggggaaacatttgtttttagcagtaattccatgattcatcttttttaagtaatttgttccaatgaacctttattgactgatgctccaatatcatttgaaaatnacaattgtaatgaatcagatctggatgagatctgtgctccatgccaagatcggaacgtagggcacgcta

SEQ ID NO: 42956 - DNA, 756 bp, Macaca Mulatta
tgagtaggcctggtgaaggcgtccatggtgccagccgtgccattcgtcaagcctgtggcgccaagtcctccattcagagccgccatacctgagagcatttgagcaactgctagtgcattaatattattcagtccaacagtggctccagccagtccttgcagagtcccaagagaggtcaaggagttcatggctgcaccagcagtggagtttggggttgaagcagccactcgactcagcccatcgggtccccggaggatccggcattcttctatctggccaaatggagagaacatcaccctgatgtcgttttcattacatttcttcgaaaccattcctatgaacaattttctatcttccacagcgtttgacttttcactatctgcaggtttcatctgaatgggatgatgcatcccaggtaaagttttaatattgtgcagtgcattctgggcctcaagtgcagcttttcttgtataaaatgttacgaaacaacaacctttactctgcggagggttctgactccgatcccggaggacgttgatctggtagacggctccgtaaggctcaaaaagttctttcagctccttttccgaccacgaccgggggatctgtccgacaaacatcttaatggcatctgggtctggttggtctgagtgatccaaagctccgttcatcttgttggctgtgccgttaattctgtcaggaacgagcaggcggctctcgaccatcatgtccgggaggaaatccagcttgaagccc

SEQ ID NO: 42957 - DNA, 474 bp, Macaca Mulatta
gggaactataaatatatccaaatgaagtaatgtttatgcgtattgtaaaaaaattttatctgagctatggtcacttagcattggtagttgaaagagtcttgggaagatgactgtcccagtgaagcaagcttaggtcacacaaggcatgactccaaccgtacctggctttgcgaatgtgcagctgaggatagtggctgtgcctgtgacatatatgcactgcaaagtcttcctcatacgtcagacatggaatgttccccacttggtcaaaaacagttatgagagttgagcctaaatcacagagataaagaaacatgtccttatttatcaagaaataaatttgggatgtcagaacaaaatgtagtttccattctaaattgtgctttaattgctctaatcaaatatgcacatgatacattgagggcctggagaccattcttatttctcattccccaaagcaccattctgggagtgaat

SEQ ID NO: 42958 - DNA, 817 bp, Macaca Mulatta
  misc_feature (1)...(817): n = A,T,C or G
gggttattttcatcatcaagttctctagcaaaggccttagtacgtgccaggcactgaaaagattattgttaaatgagttagtaagtgaaaccttaaacaatataagaaattaggtgttcagtattttttcttgtcttcaaatagacagctttcaaggactaatagaaaatattatctagattgcttatcaattcttagcttttggactaaaatttgttatcaggtttagtctatagatttttttgatattcagatttcagaatactgaagaaaagcccataaaaactccttagatgcagtttgttgttaaaaaattataggttccaaattatgcatttttaaagtccgaaaattgctctatacatcaactataacactattagtatgttttcttattataaaggaccattgaaaatcaaaatgcgtagttaaagtcattaatttgtgttaagatacttacaaagaaattataatacttagttttctcaggtacccacnctgtggtttttttgttggtggttagtcatttgaaaataaaaataattcacttagaagtaattcaggtctcttttttttccacaagtaattacctaccgtgttttactttcctagggagtttaagaccccagccaagaaaggttaaatgagggaaaaaaaggtagaaaccattaaccaagccggtccagtaaagaaaaaatttttaagaaagcggcattaaaattttaacctatttccaaatttctttccaattaattttgccnnnnnnnnnnnnnnnnnnnncctggaaagaaaaatggggggggggttaagaaaatgg

SEQ ID NO: 42959 - DNA, 469 bp, Macaca Mulatta
tccatcataggtacacaggtgtgaccatctcccactcccaaatttctttgtcacgctgaggattactcaagaggagcaagacatgttggttgcagcaggagaaacttgaaagcattcacttttatggaatgcataagggagaacatctcttaaagtatttagaatcatctttgatacatttattatgttaaaagataatgtagtcaaatgtcttcctgtgttaaatctttacaaaactgaaatcttaaaatggtgacaaaaattctacttctgatagaatctattcgtttttccaattagatagggcataattcttaatttgcaaaacaaaatggaatatgcttatgaggttccatcccaaagaacctgctattgagagtagcattcagaataacgggtggaaatgccaattccagagtttcagatcctacccctaattggggtagggaggggctttgggcggggcctc

SEQ ID NO: 42960 - DNA, 1321 bp, Macaca Mulatta
  misc_feature (1)...(1321): n = A,T,C or G
agagcttccagttagttcacctctttgtcatgcggttctaaaaactcttcaatgttgggaacaagttcttctccgacgacttgaaatccatggtgggccacctcaaaattatatcgcaagtcatacctctgaagagagtttgtctgcaggtcctgcaattcttcgccacaaagctttactggaacctacaaacactcctttcannnnnnnnnnnnnnnnnnnnnnnnnnnnnnnnnnnnnnnnnnnnnnnnnnnnnnnnnnnnnnnnnnnnnnnnnnnnnnnnnnnnnnnnnnnnnnnnnnnnnnnnnnnnnnnnnnnnnnnnnnnnnnnnnnnnnnnnnnnnnnnnnnnnnnnnnnnnnnnnnnnnnnnnnnnnnnnnnnnnnnnnnnnnnnnnnnnnnnnnnnnnnnnnnnnnnnnnnnnnnnnnnnnnnnnnnnnnnnnnnnnnnnnnnnnnnnnnnnnnnnnnnnnnnnnnnnnnnnnnnnnnnnnnnnnnnnnnnnnnnnnnnnnnnnnnnnnnnnnnnnnnnnnnnnnnnnnnnnnnnnnnnnnnnnnnnnnnnnnnnnnnnnnnnnnnnnnnnnnnnnnnnnnnnnnnnnnnnnnnnnnnnnnnnnnnnnnnnnnnnnnnnnnnnnnnnnnnnnnnnnnnnnnnnnnnnnnnnnnnnnnnnnnnnnnnnnnnnnnnnnnnnnnnnnnnnnnnnnnnnnnnnnnnnnnnnnnnnnnnnnnnnnnnnnnnnnnnnnnnnnnnnnnnnnnnnnnnnnnnnnnnnnnnnnnnnnnnnnnnnnnnnnnnnnnnnnnnnnnnnnnnnnnnnnnnnnnnnnnnnnnnnnnnnnnnnnnnnnnnnnnnnnnnnnnnnnnnnnnnnnnnnnnnnnnnnnnnnnnnnnnnnnnnnnnnnnnnnnnnnnnnnnnnnnnnnnnnnnnnnnnnnnnnnnnnnnnnnnnnnnnnnnnnnnnnnnnnnnnnnnnnnnnnnnnnnnnnnnnnnnnnnnnnnnnnnnnnnnnnnnnnnnnnnnnnnnnnnnnnntacagctggtctttcaactgacaatagnnnnnnnnnnnnnnnnnnnnnnnnnnnnnnnnnnnnnnnnnnnnnnnnnnnnnnnnnnnnnnnnnnnnnnnnnnnnnnnnnnnnnnnnnnnnnnnnnnnnnnnnnnnnnnnnnnnnnnnnnnnnnnnnnnnnnnnnnnnnnnnnnnnnnnnnnnnnnnnnnnnnnnnnnnagaggcagcttttccagagccatgattctcctgttaaagccattgctgttgatccaactgaagagtactttgttacaggatctgctgaaggcaatataaa

SEQ ID NO: 42961 - DNA, 712 bp, Macaca Mulatta
cacactactcattatcccagtggctcttacgagaaaatatttctgtaattattcctgcaaaccagggctacagattttgcctgaataaagtactttgattttcttctatacattttgtattctggacacgtgttaagacctgactgggcatggaaggattatcacatgatagaacagaccgggatgtaccttcctgagagatagtatatgttctgtacgtagtgagtagttgctgccacaaacagtatctataaaaagcacaagtctggttcgttggttgtctgagaaatgaggaccaagtgctactcatgctatccatactccaacagaaaaggaagtgtaataatatgtagcaaaggtccctgtaagcagagtctttactatatagaccttattcatttactatttttataataaccaagggaaagagtccaggtcagctccttagaatgttaagtattagatttagattcttaatgtaattctcctcctctaaacgtattactgtgctttgcaactaggttccaatcttgacaaaaagttcttctcactctgaatacatcatctactcattttggctatttctggtcccacatagtggtgatttatgcatgagcactgacgatgcaaaaatcaccactatgtgctgctgatttttgcatggtgggtgtctggggtgtcattttaaatacattacagctagtatggtatg

SEQ ID NO: 42962 - DNA, 801 bp, Macaca Mulatta
gggttttccggttttggcgcggcctttgtctctggctgcagcccgaccttcaggtctccttttcaccgctctgtgccctattctcctggaggcccagtctctgtggcgctgtgacctgcaggtattgggagatccacagctaaaacgccaggaccccctggaagcctagaaatggtcttcagacaatcggtaataacaaactcctccaagctaaaggaggatgttcgaacccgtcacaaagaagctaaaaacattgaagaaatgttcaacaaatgcctaactgtaatagaccgtgtagagaagagcttcagtgacctgatggagctgaaaaccatgacacgagaaatacgtgatgcatatataagcttcagtagcaaatctgatcaagtggaagaaagggtatcagtgattgaagatcaaatgaatgaaatgaagcaagaggagaagttttagagaaaaacaactaaaaagaaatgaacaaagcctccaagaaatatgggactatgtgaaaagaccaaatctacgtctgattggtgtacctgaaagtgacagggagaaatggaacaagttggaaaacactcttcaggatattatccagggagaacttccccaacctaagcaaggcaggtcaacatttcaaattcaggaaataccgagaaacaccacaaagatacttcctcaagaagagcgactccaagaacacaaaaattgtcagaatcaccaaaagttgtaaattgaaggaaaaaatgttaaagggccagcccagaaaagaaaagttcggggtaaccaccaaaggggaaa

SEQ ID NO: 42963 - DNA, 337 bp, Macaca Mulatta
  misc_feature (1)...(337): n = A,T,C or G
ttgacttgtgtgtgttgcatgaaacatcttcctgtgggagtggtactgggtctccattttcagctagagtaacctttgaagtgtntgagctaggtctctataaaagaatggatgagacaggctgccatgagagtcattctttcatgaccttttcagtgtcaaaactggggcagtgttactttaatactcaaccatttgcaccatcatctgtcaggaggtactgtctatagcaaaaggagaacatgtcctgtgggtccctagttcggcctttggaagacatggctaatggctcagggattcttactgcctctgcatggaaaggctagacaactcctgt

SEQ ID NO: 42964 - DNA, 455 bp, Macaca Mulatta
tatactgttggccactgctgatcaggccctcctggaccagcccgtagaatgccagcctcctctaggtgcacagagctgtgcatgcctgctctcagggaagcagagtaacgccagtcagggttgggctgtcgtggtttgactgagtgatcaacgtccacatcctgtttctcctctctatcccggctaattggacaaggaggaaggctagggctaaaagccatgaggtcggtcttgggcaactcctctccagagcacaccctctgctgcctctgctgcgagtatgaccagctccccaccgcgctggagcacaccagcgtgggcttgcccggcccacacgcgccttcggttggcggcgcagagcacctcagagcagtatatagcagcagtgtgagcaccaacagactagacactgcgcagacggcgatgatcaagtacacgttgacatccaccagtga

SEQ ID NO: 42965 - DNA, 139 bp, Macaca Mulatta
gtaaaaagcacaaactgtacaaaagcaaaatgttagagtatatgaccaagtgatttaaaaagcattacttgtacattcctttaaacatttgttgttagaagtaaaatagtaatttatcctgctaaatttggcaccattt

SEQ ID NO: 42966 - DNA, 613 bp, Macaca Mulatta
  misc_feature (1)...(613): n = A,T,C or G
gggaaagaggctgcctcacaactatactagcacctttnnnnnnnnnnnnnnnnnnnnnnnnnnnnnnnnnnnnnnnnnnnnnnnnnnnnnnnnnnnnnnnnnnnnnnnnnnnnnnnnnnnnnnnnnnnnnnnnnnnnnnnnnnnnnnnnnnnnnnnnnnnnnnnnnnnnnnnnnnnnnnnnnnnnnnnnnnnnnnnnnnnnnnnnnnnnnnnnnnnnnnnnnnnnnnnnnnnnnnnnnnnnnnnnnnnnnnnnnnnnnnnnnnnnnnnnnnnnnnnnnnnnnnnnnnnnnnnnnnnnnnnnnnnnnnnnnnnnnnnnnnnnnnnnnnnnnnnnnnnnnnnnnnnnnnnnnnnnnnnnnnnnnnnnnnnnnnnnnnnnnnnnnnnnnnnnnnnnnnnnnnnnnnnnnnnnnnnnnnnnnnnnnnnnnnnnnnnnnnnnnnnnnnnnnnnnnnnnnnnnnnnnnnnnnnnnnnnnnnnnnnnnnnnnnnnnnnnnnnnnnnnnnnnnnnnnnnnnnnnnnnnnnnnnnnnnnnnnnnnnnnnnnnnnnnnnnnnnnnncatgtaagaaacaatcacccgcatatactctccttggttaatctgcaggattacggg

SEQ ID NO: 42967 - DNA, 682 bp, Macaca Mulatta
  misc_feature (1)...(682): n = A,T,C or G
nnnnnnnnnnnnnnnnnnnnnnnnttatttaaggtcctttttacattaacaaagtcactccagtcaatctctttgactcacctacatgaaaaatttggatgtctgtaaaagtcctatgctaacactagtgagaaaaactggtgcatcctttaaatttgtgtagccttcttaggacagagtttgtttgttggttggttggtttgttggtttcaaacgaacaggtcctaatcatcaacagtctgcacagagtattgaacattacatagataattcaaagatacgccaacgagaaagagggaaagaaaaagtacttatttcttcatgaaaccaaataaaacataatacacattctggttggtgaaagtagatggcatttggggaaatattcaggggatcagtgtactcagcttgaacaaataatttccatttcagataaggtaatttattgattgatacgatgagttaacagatgtaaaagtagtctgaaaatttcaaagcagaatacacaatgttatcgtctgtggtaccattgttatttttagcacataatacattaacaattaccaacatttatgatttaaagcattaaaaacctccataatatattaaataattacatatctgactattaatgaatgggttaattgggatggttactctgaaataataagtttgatggaaa

SEQ ID NO: 42968 - DNA, 1410 bp, Macaca Mulatta
  misc_feature (1)...(1410): n = A,T,C or G
agcccgctcaagctgaaacgctgcacaagctatgtcgtcctctccgccgcgaatgcgggcaggatgctagcgaaagacctggcaannnnnnnnnnnnnnnnnnnnnnnnnnnnnnnnnnnnnnnnnnnnnnnnnnnnnnnnnnnnnnnnnnnnggtgccctctgcggtaggcattactatttccagcatcctcacgagggatctnnnnnnnnnnnnnnnnnnnnnnnnnnnnnnnnnnnnnnnnnnnnnnnnnnnnnnnnnnnnnnnnnnnnnnnnnnnnnnnnnnnnnnnnnnnnnnnnnnnnnnnnnnnnnnnnnnnnnnnnnnnnnnnnnnnnnnnnnnnnnnnnnnnnnnnnnnnnnnnnnnnnnnnnnnnnnnnnnnnnnnnnnnnnnnnnnnnnnnnnnnnnnnnnnnnnnnnnnnnnnnnnnnnnnnnnnnnnnnnnnnnnnnnnnnnnnnnnnnnnnnnnnnnnnnnnnnnnnnnnnnnnnnnnnnnnnnnnnnnnnnnnnnnnnnnnnnnnnnnnnnnnnnnnnnnnnnnnnnnnnnnnnnnnnnnnnnnnnnnnnnnnnnnnnnnnnnnnnnnnnnnnnnnnnnnnnnnnnnnnnnnnnnnnnnnnnnngggggccacagatgccccgggagccccctggaccctctggagggtcgggcggggaaggggagatttctgtcttgaccacacacttgtaacccattcttggcacactggggtaccttgcccgcaggtagtgctctgttctcggggagagggcacaacctctaaccctctgaccgaggctctctgcctctcacaaggagcccccaacacactggttttcctcacagcctgctccaactgctcataggaacctggagcccccttccctgccccaactgtccctccgtggaccccattactctactttctgtcgaacccaactcccctatcctttatgcaggctgtcgggggcaatggtggttagcataggctatggagtcagatggcctgggttcaaatcctggctctgccatgttctgagtgtgtgaccttgggccagtttctttactttctgcctcagttttctcatctgtaaaattgaaagaatggtggcatctatctcatagggcggctgtgggggttatagcaggcagactgccacaggcacaatgaatgtcagctcttgttgccaacctcccccacacaacacacagcttagtaactttaccctcacccaacacataacacctagcttgtccctcataatgagctctcagcctaaatcagtgccttcagcaaacctgtggctcagggcaggtggtaaggtagacaagagcaaggggaagactctctgactccacagaggcagtgctgtctgcaggtgggatttggcccagacgttaagagccgaggac

SEQ ID NO: 42969 - DNA, 642 bp, Macaca Mulatta
  misc_feature (1)...(642): n = A,T,C or G
agtacattaacgtcgttcatcaggnnnnnnnnnnnnnnnnnnnnnnnnnnnnnnnnnnnnnnnnnnnnnnnnnnnnnnnnnnnnnnnnnnnnnnnnnnnnnnnnnnnnnnnnnnnnnnnnnnnnnnnnnnnnnnnnnnnnnnnnnnnnnnnnnnnnnnnnnnnnnnnnnnnnnnnnnnnnnnnnnnnnnnnnnnnnnnnnnnnnnnnnnnnnnnnnnnnnnnnnnnnnnnnnnnnnnnnnnnnnnnnnnnnnnnnnnnnnnnnnnnnnnnnnnnnnnnnnnnnnnnnnnnnnnnnnnnnnnnnnnnnnnnnnnnnnnnnnnnnnnnnnnnnnnnnnnnnnnnnnnnnnnnnnnnnnnnnnnnnnnnnnnnnnnnnnnnnnnnnnnnnnnnnnnnnnnnnnnnnnnnnnnnnnnnnnnnnnnnnnnnnnnnnnnnnnnnnnnnnnnnnnnnnnnnnnnnnnnnnnnnnnnnnnnnnnnnnnnnnnnnnnnnnnnnnnnnnnnnnntaatcatcccagccgagaacacagcacacaagagcactaggatttaagtggcttccttccttgtatattccgtagtgtgcgggatttcgctgcagagcgaacttgaggctaggtcgcgtacctgtgagcggtaatcgc

SEQ ID NO: 42970 - DNA, 1614 bp, Macaca Mulatta
  misc_feature (1)...(1614): n = A,T,C or G
agccaagctccgttgcctggtcggaggcccgaagcagggctctggagttgcccagtgatcgggaagtcttgcacccatttgttcgaagacatgccctccaccggaactccctagagggtgggcacacagaaagtaacacgagtttggcaagcggcatccaggcttctctcacctccattagctctttaccttttgaggannnnnnnnnnnnnnnnnnnnnnnnnnnnnnnnnnnnnnnnnnnnnnnnnnnnnnnnnnnnnnnnnnnnnnnnnnnnnnnnnnnnnnnnnnnnnnnnnnnnnnnnnnnnnnnnnnnnnnnnnnnnnnnnnnnnnnnnnnnnnnnnnnnnnnnnnnnnnnnnnnnnnnnnnnnnnnnnnnnnnnnnnnnnnnnnnnnnnnnnnnnnnnnnnnnnnnnnnnnnnnnnnnnnnnnnnnnnnnnnnnnnnnnnnnnnnnnnnnnnnnnnnnnnnnnnnnnnnnnnnnnnnnnnnnnnnnnnnnnnnnnnnnnnnnnnnnnnnnnnnnnnnnnnnnnnnnnnnnnnnnnnnnnnnnnnnnnnnnnnnnnnnnnnnnnnnnnnnnnnnnnnnnnnnnnnnnnnnnnnnnnnnnnnnnnnnnnnnnnnnnnnnnnnnnnnnnnnnnnnnnnnnnnnnnnnnnnnnnnnnnnnnnnnnnnnnnnnnnnnnnnnnnnnnnnnnnnnnnnnnnnnnnnnnnnnnnnnnnnnnnnnnnnnnnnnnnnnnnnnnnnnnnnnnnnnnnnnnnnnnnnnnnnnnnnnnnnnnnnnnnnnnnnnnnnnnnnnnnnnnnnnnnnnnnnnnnnnnnnnnnnnnnnnnnnnnnnnnnnnnnnnnnnnnnnnnnnnnnnnnnnnnnnnnnnnnnnnnnnnnnnnnnnnnnnnnnnnnnnnnnnnnnnnnnnnnnnnnnnnnnnnnnnnnnnnnnnnnnnnnnnnnnnnnnnnnnnnnnnnnnnnnnnnnnnnnnnnnnnnnnnnnnnnnnnnnnnnnnnnnnnnnnnnnnnnnnnnnnnnnnnnnnnnnnnnnnnnnnnnnnnnnnnnnnnnnnnnnnnnnnnnnnnnnnnnnnnnnnnnnnnnnnnnnnnnnnnnnnnnnnnnnnnnnnnnnnnnnnnnnnnnnnnnnnnnnnnnnnnnnnnnnnnnnnnnnnnnnnnnnnnnnnnnnnnnnnnnnnnnnnnnnnnnnnnnnnnnnnnnnnnnnnnnnnnnnnnnnnnnnnnnnnnnnnnnnnnnnnnnnnnnnnnnnnnnnnnnnnnnnnnnnnnnnnnnnnnnnnnnnnnnnnnnnnnnnnnnnnnnnnnnnnnnnnnnnnnnnnnnnnnnnnnnnnnnnnnnnnnnnnnnnnnnnnnnnnnnnnnnnnnnnnnnnnnnnnnnnnnnnnnnnnnnnnnnnnnnnnnnnnnnnnnnnnnnnnnnnnnnnnnnnnnnnnnnnnnnnnnnnnnnnnnnnnnnnnnccgaattaggtaaaaggaaaccacaggtagtgaatgctgggggaagaggggggacatttttgagtgtttgctgtataaaagcaatattatgacgccttctgtataccactgagttaagctaacttgtgacttttaataaattatttttaaagcagaagta

SEQ ID NO: 42971 - DNA, 822 bp, Macaca Mulatta
ggggcaggcgccatggagctgagctataggctctttatctgccttctgctctggggtagtaccgagctgtgctacccccaacccttctggctcttgcagggtggagccagtcgtgctgagacgtccgtacagcccgtactggtggagtgtcgggaggctaccctgctggtcacggtcagcaaagacctttttggcactgggaagctcatcagggctgctgacctcaccttgggcccggaggcctgtgagcctctggtctccatggacaccgaggatgtggtcaggtttgaggttggactccacgagtgtggcagcagcatgcaggtgactgacgatgccctggtgtacagcaccttcctgctccacaacccccgccctgtgggaaacctgtccatcgtgaggactaaccgtgcagagattcccattgagtgccgctaccccaggcagggcaatgtgagcagccaggccatcctgcccacctggttgcccttcaggaccacggtattctcgggggagaagctgactttctctctgcgtctgatggaggagaactggaacgcttagaagaggtcccctacctttcacctgggagatgcagcccaactccaggcagaaatccacactggcagccacgtgcccactgcgggttgtttgtgggaccactgcgttgggcacaccaacaacccaagaccagaattgccttcccccttttcacacccgattcttggaaatttccatggggcgtggcctttggtttggaaggggtcattcaactgggatggcccctcctatcttcgccgtgttgaaaaaggtttctctcca

SEQ ID NO: 42972 - DNA, 864 bp, Macaca Mulatta
ggtttgtgttcccacacggatctgtaggaccttcagtgaaagtctcctccaggtattcctggaggtatcctggcattgtctcacatgtgttttgagagccccactcccttggggggggtcttacgcttttgcttccttgttgatgaccatgggccaaaggggctctgtgggtgaggctctacctcagccatagctggtgtcctcctgaagaggatttatgccaaaaagagtcacaggccaggccttgttttttcaagtttgcaaatctaggggagagggaggctccagaaaaatgctggaacctggtatgtgccctgcagaaacatccttgactccctttgtcgccaggagcctaattttactgtgtgtttctgtgactcacagaggcagggggcaaagacattcctccccacttcttcctgcagctgcttgctgcatcagcctcagccagtccggggctgggcagggaaacaaaccctcttccttctcttggtttatcccctggtttgctcagagagacctttgtgtctgaggcccccttcttgccttgcagctcagctggtgcggtgctgaatgccttattgatggccaggggcccctgatccatctgcattcccagaacgtctgaatctcatttgggggccacccagcccccactactcttagtagatgaaataaggtggaatagataagaggatggaactggcccctggatgcatgatggggccaataacggaggtacagggtgcataggtggctgggctgttagacagggaaagaggatggaattgagatgcaaggtagaaaagcatgactatgttcagtttgggatttgaagaaaataggtactggtaggacagttca

SEQ ID NO: 42973 - DNA, 1245 bp, Macaca Mulatta
  misc_feature (1)...(1245): n = A,T,C or G
tggggaatatacccaggaaaggaagcagagacctggtggttgacagtgccacgtccctggaagatggcccatccgcagcacttcactcgaaactctatgaagccatcatgagagaagactgcactacgatcgaggtactcctgagaaatcaccctgtcaacnnnnnnnnnnnnnnnnnnnnnnnnnnnnnnnnnnnnnnnnnnnnnnnnnnnnnnnnnnnnnnnnnnnnnnnnnnnnnnnnnnnnnnnnnnnnnnnnnnnnnnnnnnnnnnnnnnnnnnnnnnnnnnnnnnnnnnnnnnnnnnnnnnnnnnnnnnnnnnnnnnnnnnnnnnnnnnnnnnnnnnnnnnnnnnnnnnnnnnnnnnnnnnnnnnnnnnnnnnnnnnnnnnnnnnnnnnnnnnnnnnnnnnnnnnnnnnnnnnnnnnnnnnnnnnnnnnnnnnnnnnnnnnnnnnnnnnnnnnnnnnnnnnnnnnnnnnnnnnnnnnnnnnnnnnnnnnnnnnnnnnnnnnnnnnnnnnnnnnnnnnnnnnnnnnnnnnnnnnnnnnnnnnnnnnnnnnnnnnnnnnnnnnnnnnnnnnnnnnnnnnnnnnnnnnnnnnnnnnnnnnnnnnnnnnnnnnnnnnnnnnnnnnnnnnnnnnnnnnnnnnnnnnnnnnnnnnnnnnnnnnnnnnnnnnnnnnnnnnnnnnnnnnnnnnnnnnnnnnnnnnnnnnnnnnnnnnnnnnnnnnnnnnnnnnnnnnnnnnnnnnnnnnnnnnnnnnnnnnnggggcgggggtcagctgcatccgtccgctgctcactcacggagccaaagtcaatgcccaggactaccacggccaaacagccatccacgaggcatgctttggaggcagagaggcaatcatcaatctcctgcttgactttgaagcaaatgttaacattttaacaagaaacggggaatctccaatttatatgtaccttcagcgcagtttcaatgtaagagatacggcacttctggccaggctactttatcacacttatcctctgagaatgaccaataaccaaggaattctccctgcaggaatcatgctaccagaattccgcctcttaagggacaccctaataaagcaatcgcaaaaacctttatccctacagggtatctgcaaaagaaacatcaggaatatttacggggagaaatacaaacagcacttgaagcaacttctcccggtgacgatatggaattctgtctactgctgttacgacctggcata

SEQ ID NO: 42974 - DNA, 626 bp, Macaca Mulatta
gcatgctcattccagaagcccacccagggccttggagttgccagcaggatgctggtcaagcccttggcccaggtccccctcctgagaagttcccaaagggatccttccattcaagacatcgtaagggtgatgacagagtcagtcaacaaagactgacacccccttggggagggaaacactccagtttgctagcaggtgaacacaaagacttataggaaagtactcatagagtcacagcatgagcatagcaaaggtcaaggcttaatgcccaatgccccctcactagggcattggtttaagtctttaggcaagagggacagctggctggtcagttccggtcctcttcatcctttgccatcctggtcctgagggtcagtcagtggctgctttgtatgctggtgggatccaggaatccgtgctcctagtgccctcgtaaggcgtagatgggcagcaggccccttggtagcagctcggcatgaagaggaggtggtccttgaagacaaggaggtggacgtatgatgtcatccctgaggagagacccaggtgagggatcctctcgtgggcgccccagctctcccgaggagccgcagccaaggccagcaagccaaggcgcgctgcctctccgc

SEQ ID NO: 42975 - DNA, 602 bp, Macaca Mulatta
tgatttggagaaaatgattgtttagcatctttacagatggagaggacagattcagtctcattaggataattccaatcgtcttccttttacaggtgggtaaagtagattaggacaagatcacacattctatcggtgtctgtggctgcatattttgcaaaaccagaaacaaaatcacagactgcctcaaaactgtaatgacaacataaaatttctgttcacttttatgctaccagtatgactttataggggagaaggaaagccttttaattagccacctgggaattactcttttaaaaaatgccttttctcaaaataacatgataccactccaagtaaatcattgccactaggggttttcctccttccttctgttgcccatgcccctgcctgaaagtgtagggtaagaggaaaaacaagtaaagccttagtgtttatggtaaaccgagaactctgtagcttaccttggattccagagcagaagattggtttacattcaatgctgatccttattgacattaacaccaggaatctccatgtttattatttctcgtggaaactccatgtctattatctccgagggtctctattgaccgatgtattca

SEQ ID NO: 42976 - DNA, 1240 bp, Macaca Mulatta
  misc_feature (1)...(1240): n = A,T,C or G
ggattggtgtaagggtataccattcaggtatgccacttattttattcatttttgtgtaagggaaatgagatgatgtatcccaagggcttttctggaactacttgtttgatttcagaataaaacattattatttttacactgcacatgctgttcgcaatttggtaaattataggcaatttatctttttctaatgatccaaagagtgtgacttccccatttgtgaataattcacaaattttcctgttaaaaaacctaaaaccatctaccctttttcttaacccaagtggaaaaataaccaaaatttccccactattcttcaaattttttaaaattgaaaaacaaaggnnnnnnnnnnnnnnnnnnnnnnnnnaagaaataattggggcccaaaaatttataaaacatttttttaataaccactggataaaatacttttggcgctatctttttttactagggggagaaaatatttattaccccaacggaagaaatagggggagagttctctcttttttccagataaaccaacaacgtaggtaagtggcatatcttttgtttaataaacaacagcctactcaagtataggctcttctgagaggacatgaatacaacacaaaagaaagccatattaattatacatagcacattcacataataatgcatcgccctcgctcttcacgagacaggcaatgtatatagatcatcccatcttatataatctaattacttcaataaataaatatatataaaaaattacaacacactaaattttatcgtttangtatattcgcgccgattggtcgtttagtgaaggtagaaattaattcaatcatcgtaatccgtctcttncgagcatttaaggtgatatgtgcaaagcaacaactaagcagaatatctatataaaacagtaacacagcgcatatgtatgagttagttttttctctaactcctcccacctctctctcatttacctactcacatttttaataactaactctatctctacanatgcctccagtttttgtttaataagccacatgcagttgttgtaggagcnaatataatattactcatatttcgtgctgtgantaatatcaacttacacgtaactctagtgacagatagacttctacataacacgataacttaaaataataaaaaaatgaaaggtattgcataatagcatagccaaaatacaaccgcccgacggctatcgaatcatcgtacgtatgagatatcc

SEQ ID NO: 42977 - DNA, 708 bp, Macaca Mulatta
tttggattcttactgttctgaatgttcataaaagtttgagaactgtgaaagtattatggaattcttcaaaccaaaatgcaggcaatggttgtgaagcccctccaatcccaacaacacaatggtaaaagctagccccacaccaggtaacgtgcctgcttagtgacttggattttatcaagtttgagcatcttaaaactccacctggcctttgagaaaggtgtaccaggcttttcattgtactggtatattgcatttcactttacctaacagataaacctcagaagcatcatgaaaattgagttttttaataaacctaatcacattttaatgttgtttttaaacgggattctacaatatgtatttctaagttcataaatccttcgtattctaacttagcaccctgacacatatatatatgtgtgtgtgcatctacacacatgtatatagacacatctattttaggtggaagaagttattggtaaatgtctgtttcatctttttaagtagggtacaaacatgctgacctagacaatgttgatgctacctgcataaatatgccttgacagaaacacccaaatttttcaaatagttgattttatatttgatgtgtagcccaattagattttccttatggacctaaattaatttatcacaattagtccactctgttatccgttaagaacaagagttatgcctcaaatacctaaa

SEQ ID NO: 42978 - DNA, 321 bp, Macaca Mulatta
cctgaattcagtgctcagtgcccaggtctgctctgctcagagtcaggctctgctcctccacctgtacggagagggtggccgtggtcatggtccaaggtgaggttcctggaggaaggcaggcacattaggacttctgatggggcctcgcacaacataacaagacctctacagcccatcctcaccagttcccttttggcaagtggaaaaggggcaatgcactatttgtgctgaaggctgtgcaagctgcagacacaaaaattggttgcaatggaaacctgaagcaaagggcataggttccaagttctgctgtgccccgtggtg

SEQ ID NO: 42979 - DNA, 492 bp, Macaca Mulatta
aaatgctgaaggctcttttactgttttatatattcaagttgttcaaatgcaatccaactaaatttttaatttgtctcactgttctcttcttaaagaattaagtgttatcctttggaaaacagagtttgataaaagaaactaaaatccaacaactcaaaatatctcagcagaaaccaacataaggaatcagtacaatcctcattggttgcccccagagtaatttagggaatcaacatcaaagtaaaagtaatcaataatttgctttaaattcaaaaagatgcatacatcataaactaaaattccaaacactatcagaaggtatacaataaaaaaggtctccctgtcatctgatttccctatcaccctactgtcaacagtttttttgtgtgttctttcagaaattctttacacatacaaccaaaaatatatattttgataaatttatagttgtgttacatacacattggttttggctggttgctttttcttcct

SEQ ID NO: 42980 - DNA, 827 bp, Macaca Mulatta
gggaagaagcctcgagcactgcccaagcacaaaagccttcggtgccccggatgcaattttcagggcaccaagaaaagtctcctgatgtccatattagcgcttatcttcatcatgggcaacatcgccaaggaagctctggtctggaaagtgctggggaagttaggaatgcagcctggacgccagcacagcatctttggagatccgaagaagatcgtcacagaagagtttgtgcgcagaggttacctgatttataagccggtgccccgtagcagtccggtggagtacgagttcttctggggtccccgagcacacgtggaatcgagcaaactgaaagtcatgcattttgtggcaagggttcgtaaccgatgctctaaagactggccttgtaattatgactgggaatcagacgatgaagcagaggttgaggctatcctcaattcaggtggcaggggttattccgcccccctaagtagatctgaggcagaacccttgggggggtggaaaaagaaaagtcccagggtaacccccagggaaattacaatgggcaagggtccctaagatttaaaaatgaagccgggaatgggggggcgggggggaaacctgtaattttgaaaacttggtgcactaaggggatcggtgggtttgaagagggcaaaaatagaagggggcgttgcgttattggattagagggagaaaatttgcgaagtttcgttttttaaaaaactcttgttccagggttgagcaattaaacatattcggggcgcctaaaaaagggcccacatttgccaaaccgatagataattgtgtcttcggctaatggtaactaa

SEQ ID NO: 42981 - DNA, 856 bp, Macaca Mulatta
  misc_feature (1)...(856): n = A,T,C or G
ggattatgattgccattattaatcggcaaaatgtggagtgtatgttcttttcacagtaatatatgccttttgtaacttcacttggttattttattgtaaatgagtacaaaattcttaatttaagagattgtatgtaatatttatttcattaatttctttccttgtttacgtaaattttgaaagattgcatgatttcttgacagaaatctatcttgatgctgtggaagtagtttgaggaacatcctatgagttttcttagaatgtataaaggttgtagcccatccaactttaaagaaaaaaatgaccacatactttgcaatcaggttgaaatgtggcatgcttttctaattccaactttataaactagcaaaaaagtgtttgcttattccaccagttctgctgtgacatactggagtatcttaagacatgtatcaataatggggagtgggggggagtctcacagtgcctttggaaaggcccgaacttgcctttaaatcttcctccaccaaaataagtttttttttaattgctttgaaaacaatcctgaaaggttagaatggggttccaactcgcccaaaaaggaaaagaacttttttcnnnnnnnnnnnnnnnnnnnnnnnnnnnngtgaaagccaacccgccctcttttaaggccttaacaaaatgcaaataaaacacaaacaatgcccattggtttatatttaacgaaaaaatttcccataaatctctggcaacatannnnnnnnnnnnnnnnnnngaggtaataaaaagagggttagttaaatgttttctcactacaccttcttctcctgggcaatatgcctaatgtcaacttgtaacgctggaaatccctatt

SEQ ID NO: 42982 - DNA, 823 bp, Macaca Mulatta
  misc_feature (1)...(823): n = A,T,C or G
gaaaaaaagttcttcttttaaaggcaatggcttttaaggcttatattccccaacaaaattttggaattaccccataatttttcatttttcggttcaggttccaaaaatattttcaaaattttccccttgagacttccctttttgaccccattgattatttataagggttggtgcttaactttaatctaagagtttgaagacttttctgctatttttctgttattatttctagtgaaattacagcatagtgagagaacatacatttaattattgcattcctttaaattttgttcaggtntgtgttatgactcaaaatatggtccatcttggtgaatgttctataggcagttgaaaaaagtgtgtattctgctgttggatagaatgttcgataagtatcaatcatatctagtccatttgatggtgcacttctatatccttgctgatgttctatctattagttctatttattacaaaaaaaaaagagtaaaaagcctccaaatataattttagatttgtctatttttccttttatttctgtaagtctttatttcaactattttgaagctcagttgttaggtatacacacatttgggattcctatgttttcttggtgaactgaccttatttacttatttttttcctttaagttccaggatacatgtgcagaacgggcaggtttgttacacaggtatacatgtgccatggtggtttgctgcacctatcaacccatcacttgttttaagccccacatgtattacctatttgtcctgatgctctccctcccctcactccccaccaaaaggccccagtgtgtgttgttccc

SEQ ID NO: 42983 - DNA, 820 bp, Macaca Mulatta
gggaagaagaggatatcaaagatgtttttaacagtaataacgaggttccagttgttcattcattgtccaatggtgaagtaacaaaaatggttctgaatcaaggtgatcatgatagtaatgataatgaagatgatgttaatactgcagaaaaagtgcctatagatgacatggtaaaaatgtgtgatgggcttattaaaggactagagcagcatgcattcataacagaacaagaaatcatgtcagtttataaaatcaaagagagacttctaagacaaaaagcgtcattaatgaggcagatgactctgaaagaaacatttaaaaaagccatccagaggaatgcttcttcctctctacagaacccacttcttggtccctcaactgcttctgatgcttcttctcacctaaaaataaaatacagtgtacagtaacctcttaaagcatagcatcatacttggaaactgaaagcctactgttatttgttattgttgcttaacagctgatacaggtattctggtgacactactgtgctggctcacttaacctgaatacactatttttttccattgtattactgggatgtcatatttttttactggtaaagtacttatgtgtgaaaaagtggttaaaaaatgattgcttaattggtagcatataaattcccaaattcgggaatgattggtgatgcccaaacaattcccccaaatcctccaccatggggggggtgggaaaatctttacccccctttgtcttttccggagtggctccacgggttttcgccccactgtgtttttccgtgctccaaattttattctgaatgtct

SEQ ID NO: 42984 - DNA, 2512 bp, Macaca Mulatta
  misc_feature (1)...(2512): n = A,T,C or G
ctcaggaggaggtatccgagagcagctcgagcgcagacaagctgcctaatggctacctccctgattcgtcgtctgnnnnnnnnnnnnnnnnnnnnnnnnnnnnnnnnnnnnnnnnnnnnnnnnnnnnnnnnnnnnnnnnnnnnnnnnnnnnnnnnnnnnnnnnnnnnnnnnnnnnnnnnnnnnnnnnnnnnnnnnnnnnnnnnnnnnnnnnnnnnnnnnnnnnnnnnnnnnnnnnnnnnnnnnnnntgcatcactgtgaccagtgccgaggatggcggggccgagaccacgaggtacctgatcctgcagggcccagatgatggnggagcccccatgacatcaccaatgtccagttccaccttggcccacagcctggcagccattgaggccctggcagatggccccacatccacatccacatgcctggagnggaggcacagggtgggcccagctccccggtgcagctgcctccagcctctggtgctgaagaaccagacctgcagagcctggaggccatgatggaggtggtggtggtgcagcagttcaagtgcaagatgtgccagtaccggagcagcaccaaggccacactgctgcgccacatgcgggagcgccacttccgtccagnnnnnnnnnnnnnnnnnnnnnnnnnnnnnnnnnnnnnnnnnnnnnnnnnnnnnnnnnnnnnnnnnnnnnnnnnnnnnnnnnnnnnnnnnnnnnnnnnnnnnnnnnnnnnnnnnnnnnnnnnnnnnnnnnnnnnnnnnnnnnnnnnnnnnnnnnnnnnnnnnnnnnnnnnnnnnnnnnnnnnnnnnnnnnnnnnnnnnnnnnnnnnnnnnnnnnnnnnnnnnnnnnnnnnnnnnnnnnnnnnnnnnnnnnnnnnnnnnnnnnnnnnnnnnnnnnnnnnnnnnnnnnnnnnnnnnnnnnnnnnnnnnnnnnnnnnnnnnnnnnnnnnnnnnnnnnnnnnnnnnnnnnnnnnnnnnnnnnnnnnnnnnnnnnnnnnnnnnnnnnnnnnnnnnnnnnnnnnnnnnnnnnnnnnnnnnnnnnnnnnnnnnnnnnnnnnnnnnnnnnnnnnnnnnnnnnnnnnnnnnnnnnnnnnnnnnnnnnnnnnnnnnnnnnnnnnnnnnnnnnnnnnnnnnnnnnnnnnnnnnnnnnnnnnnnnnnnnnnnnnnnnnnnnnnnnnnnnnnnnnnnnnnnnnnnnnnnnnnnnnnnnnnnnnnnnnnnnnnnnnnnnnnnnnnnnnnnnnnnnnnnnnnnnnnnnnnnnnnnnnnnnnnnnnnnnnnnnnnnnnnnnnnnnnnnnnnnnnnnnnnnnnnnnnnnnnnnnnnnnnnnnnnnnnnnnnnnnnnnnnnnnnnnnnnnnnnnnnnnnnnnnnnnnnnnnnnnnnnnnnnnnnnnnnnnnnnnnnnnnnnnnnnnnnnnnnnnnnnnnnnnnnnnnnnnnnnnnnnnnnnnnnnnnnnnnnnnnnnnnnnnnnnnnnnnnnnnnnnnnnnnnnnnnnnnnnnnnnnnnnnnnnnnnnnnnnnnnnnnnnnnnnnnnnnnnnnnnnnnnnnnnnnnnnnnnnnnnnnnnnnnnnnnnnnnnnnnnnnnnnnnnnnnnnnnnnnnnnnnnnnnnnnnnnnnnnnnnnnnnnnnnnnnnnnnnnnnnnnnnnnnnnnnnnnnnnnnnnnnnnnnnnnnnnnnnnnnnnnnnnnnnnnnnnnnnnnnnnnnnnnnnnnnnnnnnnnnnnnnnnnnnnnnnnnnnnnnnnnnnnnnnnnnnnnnnnnnnnnnnnnnnnnnnnnnnnnnnnnnnnnnnnnnnnnnnnnnnnnnnnnnnnnnnnnnnnnnnnnnnnncaggggccaagcccttcgcctgtgagtactgccacttcagcacacggcacaagaagaacctacgcctgcacgtacggtgccgacatgcaagcagcttcgaggaatgggggaggcgccaccctgaggagcccccctcccgccgtcgccccttcttctctctgcagcagattgaggagctgaagcagcagcacagtgtggcccctggaccacctcccagctccccaggacctcctgagnagatacccccagaggcgacacctttccagtcatctgaggctccctcactgctctgtcctgacaccctgggcggcgccaccatcatctaccannnnnnnnnnnnnnnnnnnnnnnnnnnnnnnnnnnnnnnnnnnnnnnnnnnnnnnnnnnnnnnnnnnnnnnnnnnnnnnnnnnnnnnnnnnnnntgcaggtggccgtggtgaagtcggaggacatggaagcagggttagcatcccctggtgggcagccctcccctgaaggtgccactccacaggtggtcaccctccatgtggcagagccggggggcggtgcggcagccgagagccagctaggccctcctgacctaccacagatcaccctggcacctggtccatttggtgggactgggtacagtgtcatcacggcaccccctatggaggaggggacgtgagctcctggcacaccttaca

SEQ ID NO: 42985 - DNA, 644 bp, Macaca Mulatta
acttactgaaatacaacagaagttttacttagaagagattttcaggtaggtgtcgctttgccaggaaaagggaggtggaacaaggaggggtccaggcaggcggaagtaataacttccagcagtgctcttggatttaggggggaagagaaggaaggtacacagcaatttagaggtagtatggggccagagtgggagaagatatggccacatatctccattttcttcttgtgttttataatttcccctttctgtctcccattcacacaatgatatgtttgcgtgtagcactcacccaaacttggccctttatacctctttagtcaacatctgtgcccatgttaccctcctatactttcacaaattctcaactattgtacataggactactccaaagagcttacacttaatagcttgtgtttctttatattgacttgtaagaaatagtcagtgaaaatataatttatatatgtgtatatatacacatacatttttatatatatacagtcctcccttggtatctgtgagggatttgttccagaaccattgcagataccaaattccatagatgctcaagttccttttataaaatgatgtagtatttgctgattacctatgaatatcctccagtaccctttaaatcatac

SEQ ID NO: 42986 - DNA, 646 bp, Macaca Mulatta
atgaacttcaacaggcacttcccctgcttcccactctcatgcccgctcacccctgtctgccctggcccctggtctctgcaggagctgaagggggcctggattttgggattgtcagggtcacagaggaggtgaagcagcccctgcaattgaagaaccgtgggaaatacgagatcgcattcaggtaactggaatcccatcgggtgtaaggccatcaagtccactgtggggaggaatgtagggaaatacgagatcacattcaggtaacctgaatcccatggggtttgtggccatcaggtccaccgttgggaggaatgtggtctgggaaacttttcttatcagtcagtcaaggaaatcataagaaccgtctctgcttttttgcctcccttggcttcaaatgaatggaattccacctgctaagggagcagagattttcacattgctctcaactctgcagcttaacaggggcctttaagtggcccggatgtacccggccagttggaactgtgggtgtctgggagtggaggaagagacttggggaagaggctgggagggggagattctaggggtgagaagaggtcccggggtggagggagagactggagatgggtgacctggccgcaagctgtcctgccttctgccagctctt

SEQ ID NO: 42987 - DNA, 619 bp, Macaca Mulatta
  misc_feature (1)...(619): n = A,T,C or G
ggggaatacatttgctttgaacttggaaaatgtgttcagaaagaaaagtggaattgaatttcatttatacactaattccttggattttgcacagttacctaatggttttagtctggagttaaattcagatgcatggaatcctgaaggaaaatggtagctttttaatctttttgtctgtgtgtgagtcttttaaatcaaatactgattaactattaaatacaacttttgagattttagttttaactcttcagaagccagtgtgaaatagaattggttattctcaaagactcaggataaactaaataagctatatagagtacatttaaaatgtacaacacaaattggaaatacaataagttacaagataagtttacagggatatattgcttataatttttaaaaggcagtttgttttttatgtgaatatgtttcttagtgaaattttacattcctttgttttggaagattggcgatatttgaagagttaaaaatagtacagaaatgtgaagtttggtagctctaaatgtgttgtacttgactttctgnnnnnnnnnnnnnnnnnnnnnnnnnnnnnnnnnnnnnactactagaattttccaattctaatagattgtttcaa

SEQ ID NO: 42988 - DNA, 505 bp, Macaca Mulatta
caacatcagtgggctccaagctgagactgagggcctcaaagtccaaggggcttccctggaagctgtcatcacggatgctatgcagcatgtggagctggctgttaaggccaccaagctgttggagctggaggccatcctgcagtgagccaagcagaacatggtgcgacagctgcatgagcaccaggagatgatgaatgtcaagctggccctggacattgcgattgccacctacaggtagctgctggagggagaggagaaccagctgaagtctgggatgcagaacatgagtatccatacgaagatcaccagtgtctgctcaggtgggctgaacttggcttacagaggcctcacaagccctggccttacctatggcctgggctccagctttggctctggcatgggctccaacttcttcaggagtaccagctcctgtaggactgtggttatgaagattgagacccacgatgggaagctggcctctgagtcatctgatctcctgcccaag

SEQ ID NO: 42989 - DNA, 783 bp, Macaca Mulatta
  misc_feature (1)...(783): n = A,T,C or G
ggggtgtcatttctatattgttccttcatcttgtattaaaatatccctcttgatactcatgtcagttggttaagtcatannnnnnnnnnnnnnnnnnnnntcaatcttagtcgagtcccttcttttatcaaaacatatttaagttcaacattcatatgaataaagtctaataccccaaaaagtcattcacttgatagtctctgttccactgacctttaccccaactctttttcaggtttctattctgtgactcatattatagattataaattataaaaatattcatttcaaaaatggctaaatgtcagaaatttcatacagtttaacaaaatagaatttgtcctcaattctctgcctgataaggcttggatctacgtccccacacaaatctcatgtcaaattgtaatccccaatgttggaggtggggcctgatgggaggtgactggatcatgggggcagtttctcatgaatggtttagtaccatctccttggtactgccctcacaatcgtgagttctcacatggtctggtcatttaaaagtattgtagcaactcccccgtctatctcttgctcctactcccaccatgtgagaggtctctccccctgctttgtcttccaacaataaatggaaagctttcctcacaccctcccccaaaagttagaaaacccacttatgccttcccccatacagccaaaaacccttttgcccaaattaaaaaccttcctttttcctttttcccaaatattaacccccagtccacataggggatatttttccttttn

SEQ ID NO: 42990 - DNA, 272 bp, Macaca Mulatta
  misc_feature (1)...(272): n = A,T,C or G
attttagaatgaaagctccatatcagcgaattgagaagccggtgttttaattgagaatatatttgcacaagtcttggcataaacattgggtttacaaacaaacatacaaagtaatgtcattaatcttgcatcaggagctgcccaacaactccgaaaagtcagcttatgcaaaaccagccaaggacagatgaatcagtcaaacaagagggaaaggggaagggaaagtgtcgttcacagngcagtcctttgaaggcagtgcataaactatgcct

SEQ ID NO: 42991 - DNA, 795 bp, Macaca Mulatta
  misc_feature (1)...(795): n = A,T,C or G
ggnnnnnnnnnnnnnnnnnnnnnnnnnnnnnnnnnnnnnnnnnnnnnnnnnnnnnnnnnnnnnnnnnnnnnnnnnnnnnnnnnnnnnnnnnnnnnnnnnnnnnnnnnnnnnnnnnnnnnnnnnnnnnnnnnnnnnnnnnnnnnnnnnnnnnnnnnnnnnnnnnnnnnnnnnnnnnnnnnnnnnnnnnnnnnnnnnnnnnnnnnnnnnnnnnnnnnnnnnnnnnnnnnnnnnnnnnnnnnnnnnnnnnnnnnnnnnnnnnnnnnnnnnnnnnnnnnnnnnnnnnnnnnnnnnnnnnnnnnnnnnnnnnnnnnnnnnnnnnnnnnnnnnnnnnnnnnnnnnnnnnnnnnnnnnnnnnnnnnnnnnnnnnnnnnnnnnnnnnnnnnnnnnnnnnnnnnnnnnnnnnnnnnnnnnnnnnnnnnnnnnnnnnnnnnnnnnnnnnnnnnnnnnnnnnnnnnnnnnnnnnnnnnnnnnnnnnnnnnnnnnnnnnnnnnnnnnnnnnnnnnnnnnnnnnnnnnnnnnnnnnnnnnnnnnnnnnnnnnnnnnnnnnnnnnnnnnnnnnnnnnnnnnnnnnnnnnnnnnnnnnnnnnnnnnnnnnnnnnnnnnnnnnnnnnnnnnnnnnnnnnnnnnnnnnnnnnnnnnnnnnnnnnnncccaccctcaataactacttttccttgaacccggttgggaagaaggagaaccctatcccatatccaccacctaatcctgaattctttgggcccccccgggaaagccaacatcccttaattctccccccgggtttcggaataaatct

SEQ ID NO: 42992 - DNA, 306 bp, Macaca Mulatta
caggatcacgaagcccaagagcaagaagccagacaagttcaaagtccggtatctcccaggctcttctggagctggagattaacttggacctcaaggctcagttcagggagctgaatattacagcagccaaggaaactgaagatgatggtggtgggaaagctatcataatctttgttcccattgctcacctgaaatctttccagaaaatccaagtctggctagtatgtgaattagagaaaaagtttagggggaagcatgttgtctttattgctcagaggagaattctgcctaagccaacctgaaaag

SEQ ID NO: 42993 - DNA, 693 bp, Macaca Mulatta
  misc_feature (1)...(693): n = A,T,C or G
gggggaggcggcactcggagtctcagtactcctttgctgctggggtcccttgcgctcggcatccagttctgggtgcaccgagaggccccaggtgcctccgccacggctcctgtgacgctgtcacctgcgctgtgacctgctccgcagtcataaagaggacgccgggacactcagaatcagggaaatgggaaaaaatggaaagaccagaatattgaagatcagcacaaacatcccaggaggactctaaggcacatcagagccgacactggacaccaaccatgtaagtgtcagaaatttggagagaagccatataagcataaacaacgtgggaaagccttgagcgatagccactgctttcaagcacatgaaaggcctcacgctagagagaaaccttttgattgtaaggaatgtggaaaatctttcatttctcctgcaaacattcgaagacatatggtaatgcacagcggagatggaccttgtaaatgtanagtttgtgggaaaggcttggattgtctcagttgataccttaatcatgaaaggactcacactggaagagaaaccatatgaatgtaacaatgtggtaaacccttcatttggcacgtttcgttccatcctgaagaatccccttgggagaccctgtgatgcaagatgggggaatcttcgtttccgttctttccgattaaagcatacaga

SEQ ID NO: 42994 - DNA, 1632 bp, Macaca Mulatta
  misc_feature (1)...(1632): n = A,T,C or G
tggcagaagaaactccgcagagcagattggccgcagccaagaaaaaggtaaaannnnnnnngcagagaaagagccctggcgttccagcaggagcaaagaggaacaggaaaacaaacggcagtggccctgagacagccactgctgatggttgccactcacctgnnnnnnnnnnnnnnnnnnnnnnnnnnnnnnnnnnnnnnnnnnnnnnnnnnnnnnnnnnnnnnnnnnnnnnnnnnnnnnnnnnnnnnnnnnnnnnnnnnnnnnnnnnnnnnnnnnnnnnnnnnnnnnnnnnnnnnnnnnnnnnnnnnnnnnnnnnnnnnnnnnnnnnnnnnnnnnnnnnnnnnnnnnnnnnnnnnnnnnnnnnnnnnnnnnnnnnnnnnnnnnnnnnnnnnnnnnnnnnnnnnnnnnnnnnnnnnnnnnnnnnnnnnnnnnnnnnnnnnnnnnnnnnnnnnnnnnnnnnnnnnnnnnnnnnnnnnnnnnnnnnnnnnnnnnnnnnnnnnnnnnnnnnnnnnnnnnnnnnnnnnnnnnnnnnnnnnnnnnnnnnnnnnnnnnnnnnnnnnnnnnnnnnnnnnnnnnnnnnnnnnnnnnnnnnnnnnnnnnnnnnnnnnnnnnnnnnnnnnnnnnnnnnnnnnnnnnnnnnnnnnnnnnnnnnnnnnnnnnnnnnnnnnnnnnnnnnnnnnnnnnnnnnnnnnnnnnnnnnnnnnnnnnnnnnnnnnnnnnnnnnnnnnnnnnnnnnnnnnnnnnnnnnnnnnnnnnnnnnnnnnnnnnnnngagcctccagcagtgccctctaaggtcgagctgcagcatctgaggaaggaggtggagagaatggcaggagaactccaagcccaggtggacaacaatcagcgcatgagtgtcctgatctgggggcaaaannnnnnnnnnnnnnnnnnnnnnnnnnnnnnnnnnnnnnnnnnnnnnnnnnnnnnnnnnnnnnnnnnnnnnnnnnnnnnnnnnnnnnnnnnnnnnnnnnnnnnnnntggaggctgtggagagaggggatgatttttctcacctgcctccacccttcccgatgccatgggaggcagacaccaagttcttggttctccagctgcagcgggtggctgctgattgcttctctctgtccagaacaatgagaacaagagcgcactgcagttggagcagcaggtaaaggagctgcaggagaagctnnnnnnnnnnnnnnnnnnnnnnnnnnnnnnnnnnnnnnnnnnnnnnnnnnnnnnnnnnnnnnnnnnnnnnnnnnnnnnnnnnnnnnnnnnnnnnnnnnnnnnnnnnnnnnnnnnnnnnnnnnnnnnnnnnnnnnnnnnnnnnnnnnnnnnnnnnnnnnnnnnnnnnnnnnnnnnnnngccatcagtgagcaggaggccagggcatagcagggggagctgcagggccatcagaggggtctcagcgtctgagccctgtcctcccacaggaaagttcatcaccttataatagagccagggggtagtgccaaagatgcggcacggggaggaggacttcatcaggctggcccaggacannnnnnnnnnnnaggtgaagctgctggagctgcaggagatgatgctgtggcttgtggtgactacaacaaggagcacagcaaat

SEQ ID NO: 42995 - DNA, 782 bp, Macaca Mulatta
  misc_feature (1)...(782): n = A,T,C or G
gggaaggaggagttgggatggccttaaggattctggcttgagcgactgatagatgggggtgctgcttactgaaatgggaagatgagaagagaggtgtacgttggagaaagatgagtggattttgtgatgtcagtgaggcagctaacacaaacagaaatgagtctggagcttaggcgagagatctgggctggagacaaactcgagagtatttggcgaacaggagatttaaaaatcctggggatggatgagaggaagaaagcatgaagtataaatgggaaaggggttcaagtccgagccttcaaggatggcagcagctggcgatcaggtcgaatctaaaagaatcaggcatctaaaagaattggtcagaaagttaggacgaaaacaagggaaatgcaccaaggaatgtaagtttcaagaggaagagagtgaccagaggtgctgaatgctgccaagagatcgaataggaagagaatggaaaactgtccactagaacagttctccactgggggcgattattgcctcacgaggatgcttggcaatgtctgtagacattctcagttgtcaaaacatangaaggctactggtatctagagtgtagaggccagggatgctgctaaaatcctctacagcacagacagcccctcacaacaaagaattattggaatccagccgggatgcggtgggctcacggcctgtgatctcagcacttttgggaggctgaggccgaacaaatcaccagggtcagggatttcaaagaccagccctggcccaacatggtgaaa

SEQ ID NO: 42996 - DNA, 673 bp, Macaca Mulatta
ctcagcagcaaagagaagagcattggggctggagtgttccggcaaagacagagccagcagctgcgctgggggaggggagcgtgcctccccacccctcccctcacggcgaaggtttccttttctcgtgcttgtgccccccccttggggtggtgacgtgacattgacatcaaacaaggattactctgaatgtggctgtgcagtggtgtcgtctctgctttggagggagagtggaagtcctacgaccgttctcattggagaatcccttgggatccccgccctccattttattcctgaaatattttacagtgtgaaggatttcctaatgttcagatgccttgaccccaaatccctcaggactttcgtggcccgccccatggctaatctgcttttctcggattgtcacggtcccgtgatctctcccggacagtggccaggctccttccagagcaggcctccgagctgaagtctcttcgagcggctcaggccatggatctaggaccatggctcggtacggcgcggcactagaggccaggagatgcccacccgtctctgggggccgtttgaccaacatcggctacttccggacaagccactggtcccgccatcttggcttgttcatgcatattcagcaagagaactgcatattcatgaacaaccgccctcccccgggagc

SEQ ID NO: 42997 - DNA, 585 bp, Macaca Mulatta
  misc_feature (1)...(585): n = A,T,C or G
ggagtgagtgaacttgaagctttaatacagagaagcaacacttaaacaaatttgatggaatcaagtttagccttggcttacaacagtggaatcacatacttgttaaaatcagcaaagctcttagcagggatgttggagcagaatcacaggtatgttttaaaaaagtacacccaccaacagtaaaaccaaaaatcctttatatatgaaaggtaaaacaatcagatagcatctattcaagggataagtaaaaaaaagaagtgatgttgtcaagggtgattgtgaaactaataaatgctctgtgttgaaagacatagcaaataaaaataaccgaaatccagacgtttatttacatcctggagggatttgaagccccagatagaaagtgattctaaatggttctcgctagcctcttttccctaatgacttacagttcagtgtatgtagacgacttacagatgagattcactgagtactatctgcgtttgtttcaaatcctgtaggggaaagaaaatagaagagtggtaaaaggaaaatatagtactgattttnnnnnnnnnnnnnnnnnnnnnnnnnnnaaaacatgtc

SEQ ID NO: 42998 - DNA, 814 bp, Macaca Mulatta
  misc_feature (1)...(814): n = A,T,C or G
atttcaaataaccactttaacgttacccattccacagggtaatnnnnnnnnnnnnnnnnnnnnnnnnnnnaaagtctcattctgtccacccagggcgggcatgaactcagctccactgtaacttccgcccccccaggttccaagcaattctccctgcttcagccccntgagtagccggaatcacaggcacccgccaccacgctggnnnnnnnnnnnnnnnnnnnnnnnnnagtggagacaggcgtggtggcaagcgcccgcagtcccggccactctggaggctaaggcaagagaacggcatgaacccggtaggcggagcctgcagtgaacccagattgcnnnnnnnnnnnnnnngnnnnnnnnnnnnnnnnnnnnncgnnnnnnnnnnnnnnnnnnnnnnnnagaaaatagaaagttttaattttacctccacttttctaatgctcatcctttatgcagatttgagcttctgacctacataattttccttctttctgaagaacttcttttaacatttcttacaaggcagatctaccagcaaaaattccttcagtttttatttgtttgagaaatgctttactacctcttatctcttgcaggataattttgcaggataccaaagtctaggttggtcattttttattcccaatacattaaatatttcactctactctcttcttgtttggatagcttctgaggagaggtcagatgcaatttttacgtttgctgctctgtaaataaggtttctctcccctgctcaagattttcttattcgtgtttgcttctctgcagttttaatgatattcctagctcc

SEQ ID NO: 42999 - DNA, 864 bp, Macaca Mulatta
  misc_feature (1)...(864): n = A,T,C or G
gaaaacattttatagggcaagagtcccaaagctgaaancttcaagtcaagggcagaagtgacagacaaaaagatttgataaagagaaggagatctagtngtcttntgagatgtatcccttaactttgaaagctacatttaatgtctcaaagatggtcttttggtgttgcctgagtgagattcttggttgcaaaggcatcagagctagattagtagcatataatgttctcctgacaaattatccatcgttgttactttgtaattgcatatcagttacaaattttcaagttaaactaagccttctttctgtttttaggtttgtaattatagatcatcatcattttgtgatgtagaaactcattttagaacatcccatgaaaatacgaagaacttgctatgcccgttttgcctcaaagttattaaaattgcaacaccatatatgcatcattatatgaagcatcaggtgagatttaccagttcttatttgtttatgttgtcttagtgaaaaaactgattatgacttggagaatctttagatttgttcttcaagaaaagcagagttgttccaaatgacactattaatttacacttcatgttgaattgcttgtgaaacttccacttcttttccttacttcctttctggtgatggtgtgggtcataaattatgaaaattctgaaagatagctaggaataggaagcctaggattgagagaaaatagaaaaagtgagtggaatatccaaaagattgaatatttcagggtctaaaggtagatatgagaatgattttgaagggagttatcaggacaaggggaaaaatgagtttgaactgaggaagaaaagattgaggatttataatcttattttt

SEQ ID NO: 43000 - DNA, 808 bp, Macaca Mulatta
  misc_feature (1)...(808): n = A,T,C or G
gggagaactatgaagggcttttcttgctctggtaatcccccacagtgtaattggtgctgaaaatagctttgtgcctgaggtctgttttcactcactcactttctgaccattaggtgagccacttcaggattttctagcctgaagttataaaaacttggcatctgtccttagataattgtaaaggcaaaatgaaagcattgaggtgaatttaggttatatggcatttatatggtaatgtgtttcagaaaagctagaatgaaaatatgatgtaagggatggcaagtataggttgattcataattcttggtataaaagcaagttttccttagtcttgaggaatttgaagaaaggtaaaatgttggattttaggcaaagtaggattgaccagagactgttctgactttgacattcagacgtttcagacgttcttcctttagaccagtccaagacactcaccatttccagccaagttgtctttttttttctgccaataaagtattcagtagttgacatttgtttgtattttaagtaaagtcaatttttttaaaacattaatttaattcataggtatgcctttcatttctctggccttcagtnnnnnnnnnnnnnnnnnnnnnnnnnncttagccagaccattctttctttagtaaacattttttatttttcctaaatttttcccggccaaaatttccctcccatttttcatgggaatgtccataatggaacttttaccctttatttttcctaggcctcttttttcactccataagaaaaaaaatgttaagaagagcaattggccacccacttt

SEQ ID NO: 43001 - DNA, 758 bp, Macaca Mulatta
ggaagtgaaaagggtttcctcttattccagcagtattcttgccttcgaagagtagtccattacatattgccttgatttttaaggttgtgtttttggatgaaaagcttaactggatagtaatttccatatgctctttataaccactctgtatattataagcaaaattttttcatatttcattgtatctttttctgttgagcactttattcattttagtctattgcatttgagaatgtagtttagaaattctttcactttttaaagccatgtgaaaactgatagaggataatgaaaatgagtgtacattattttgaatttaactgttttgtggtgtgtgtaaacaaaacattagaaatatattgtctttttgtaataatactctgacctcacttaaagtgatctgccatgaagtatcaatgatttatgtttattctgatacctaaggaattcagccaactttgtttcaatcatcagataatctcagaaaataatgttttacttatattactgcctcttgtcaatatttaagagaataattgtcttctggtttctactgagcctagtaataatcactgaagacctaaaaaagtgagtaattctttccttctgttaagagtatttggatagccccttcacgataatggtggtgtgaaaatgaatcatcccagcttttctgacgtatctaaattttgaataattaatttccactttcaaacagcccaaatgttttcttaaagcagtcactactatttggcata

SEQ ID NO: 43002 - DNA, 591 bp, Macaca Mulatta
  misc_feature (1)...(591): n = A,T,C or G
ttggagctatgggctgaagatataagattaacagcattaacaggcacccccagaatgatgacatctggatttggtagaacaataaggagccatttagtgaggattcttcnnnnnnnnnnnnnnnnnnnnnnnnnnnnnnnnnnnnnnnnctctttcctcttcaacttcaactgtgtataagttagcaaactggtttttagatccaaagagtaccttggttaggtggattacattttgtttgtttaacattcatgtttctcaaatgtaggtgattaggtcttttaggttgctaaggtagtatttactcatcctaccatttgctcgtacactaagcaaaggaatgcctttaagcttatcagagcatttagttcatttcttatgctcagcaagaataaggtaattatctgtatgagaaaatgacttgtcatatttagatcaaggcatgtctcctgagtgcatactctgttatggccagttagaagtgacatcttgatgtgtcattgtaaattgccacagtgcctttggggaaaagaacttttccccagtaggcgcatattgataatctactgtatattagcaggtgctctcttg

SEQ ID NO: 43003 - DNA, 789 bp, Macaca Mulatta
  misc_feature (1)...(789): n = A,T,C or G
gnnnnnnnnnnnnnnnnnnnnnnnnnnnnntcatctctattaaaaatacnnnnnnnnnnnnnnnnnnnngctgggtgtggtggcacgtgctactccagctactccagaggctgaggcaggataatccnnnnnnnnnnnnnnnnnnnnnnnnnnnnnnnnnnnaattgcaccactgcactctagcctgggtaacagagtgagacttcatctnnnnnnnnnnnnnnnnnnnnnnnaaagattaaaatccctaatgtctaaaatcctgaaaaatcataatcctaaaagattaaaatctcaaactgaactgaaattctgaaagccaaattctggagaagggattagtgcatcttcagttgtacacaagatagttgaatcatgttggctgcagcatgctaggcagaactattaccttgttattgtctttatttggaaattaagtttggtttaaggagatgcgtgtatgtgccaaattgacaagngggaattgtgcacttaattttaagtgtcaattcaactggattaaagaatacctagaaacctggtaaagcatgatttcaggtgggtctgtgagggtgtttccacaagagattgctgtgtgagtctgagtggactaggtggggaaaatctgccctcatcgttggtatgcaccatccagtcatccagggatcccgagaagacaaatcccgaaggggaatgaattctgtctctgaaagcttagaaaaggctttttcttctactactttgggacataaaaaatgccgaatttgacagccttcctaacttcccggc

SEQ ID NO: 43004 - DNA, 480 bp, Macaca Mulatta
gttgaggcgcgtttttggtggcgcgtttcagcgaagtcgcacgtgaaggatagcagtggcctgagaaagacccagtcatggcagcctccagcatgagttcacgatggggaaagcatctgttcaaagccatcctgatggtcctagtggccctcatcctcctccactcagcattggcccagtcccatcaagactctgcaccaccgggccagcagaagagagaggccccagttgatctcttgacccagataggtcgatctgtgcgggggacactggatgcctggattgggccagagaccatgcacctggtgtcagagtcttcgtcccaagtgttgtgggccatctcatcagccatttctgtggccttctttgctctgtctgggatctccgcacagctgctaaatgccttggggctggctggtgattacctcgcccagggcctgaagctcagccctggccaagtccagaccttcctgctgtggg

SEQ ID NO: 43005 - DNA, 561 bp, Macaca Mulatta
aagtttccatctgtgctgtaaatcagtgccaacatcaatatgttcaattacaagctacctttttgaaagatgtttcaattttataaaattaaatgtaatcttcttaatgtagctttaagttagtttatagagtgaatagggatggtatggctgccacacaacttcctagttcttcaaatttcttcttcagtaagttctccctgtattcctgggaaaatagagaagctccttgattttcagaacgggtgaaataccaagaagctgtgagagtgtttttgctagtcatttggacaagtgagtataaacgagtaggggtcagagttcttccttgcataactacgaaaatcagtgtgttgaaagtttataaatagaggggaggcactgagcaacaggtaagagtatttgttaggatctttctgccaatgcttttccctttggccttttccaggagcacggctcttttgtatttgtcacccaggaccttggtatctgagtaaatagcatggttttagacagcaaataactctctagccatagcagaattcaaacgtgagttgatac

SEQ ID NO: 43006 - DNA, 728 bp, Macaca Mulatta
  misc_feature (1)...(728): n = A,T,C or G
aatcaattcttgtcctaacaattgctctggtcatgggaagtgtacaactagtatctctgttccaagtcaagtatattgtgattgtgataaatactggaagggtgaagcttgtgatattccttactgtaaagccaattgcggtagtccagatcatggttactgtgacctaacgggagaaaaattatgtgtctgcaatgatagttggcaaggtnnnnnnnnnnnnnnnnnnnnnnnnnnnnnnnnnnnnnnnnnnnnnnnnnnnnnnnnnnnnnnnnnnnnnnnnnnnnnnnnnnnnnnnnnnnnnnnnnnnnnnnnnnnnnnnnnnnnnnnnnnnnnnnnnnnnnnnnnnnnnnnnnnnnnnnnnnnnnnnnnnnnnnnnnnnnnnnnnnnnnnnnnnnnnnnnnnnnnnnnnnnnnnnnnnnnnnnnnnnnnnnnnnnnnnnnnnnnnnnnnnnnnnnnnnnnnnnnnncaggaaaacatctttatgtatggaggcagaattgaaacaaatgatggcaatgtcacagatgaattatgggtttttaacatacatagtcagtcatggagtacaaaaactcctactgttcttggacatggtcagcagtatgctgtggagggacattcagcacatattatggagttggatagtagagatgttgtcatgatcataatatttggatattctgcaatatatggttatacaagcagcatacaggaataccatatct

SEQ ID NO: 43007 - DNA, 173 bp, Macaca Mulatta
ccaggaaatgtgtcatctcgccaggcacctggctgagtgtgttggagtgaggatcttgaacagaaacttccttgtctgttattatcactcacacagctaaaatggccaaatatgaactgtgaaaattgatttcacctaacaaaagatcagatccccccttcagctgtacacgt

SEQ ID NO: 43008 - DNA, 687 bp, Macaca Mulatta
ctctgatgagagcaaatgattttgcaagtataaaacaatgtccagagaggctggagggatgtctgtgaaccagaggaaacaccaggggatcctgtgtgaagcaccggggcttcagctggggtgggaggagtgggtgggcctctctctaatgacttatcctggtgtttgtgttttaaagatctgtttttggagagcatatccgatgatgaggatttgtaggtaggtaactactttccatgttagatccaatgggagagagttcccagggccttcggggtatccgtgctgcttgggaggttgagggagggggcatgaaatcaaaaagaaaaaggaaatatgtgttaaactggatttggtgttttccaggtttcttgccataatgtgagaactgtctgtgtgggctgggagggtgctgtgtgatttgaaggagatctttcccagaacacctggccttctctgcctctgccaaacatcacagcctttgggttggactggtcagcactgcttgggattgtgcagaagaggtttggggttgcatcaagtggcacctgtggcgaacagaatctgagggacacactccctcacaggcacttacttgaacctggagacacagttatcctggtgtgtgcccaggggtgcaggagaaattcacggtcatcctctgaacttttaggactttaaaaagca

SEQ ID NO: 43009 - DNA, 226 bp, Macaca Mulatta
atccttcttacagttctctatgatgcctcagagagctggaaatgatccacctggtgtttcaaatgtgaatgaaatggaaatggagataagtaacatgagagaaacgtttcttatgagtgtaacaaagttagtagaaagcaaaagttacaacagcaaggtattttccaaagaaaagtactttcaaacaataaaggaagttaaagaagctaaagaaaaagggaagaag

SEQ ID NO: 43010 - DNA, 160 bp, Macaca Mulatta
cctctcttcagctaagaaaaagaaacgggacgatggcattcgtgagcacgtgacaggctgtgcccgcagcgagggcttctacaccatcgacaagaaggacaagctcagatacctcaacagcagccgtgccagcaccgatgagccccctgcagacacccag

SEQ ID NO: 43011 - DNA, 772 bp, Macaca Mulatta
ggggaaaggggctcttgttattcaccatgttcccattttaattatgattttcctggcatcatttttaacaagaataacctaaggcctgcaaggagtgatttcccctaatcacttcttaaaccttccctcaccacccccaactaactgctatagctacagctacacagatgaaatgaaatggagacttgagcaattacctggtggatctgaacagtgtggagtcagcagtcaattagaatagttcaattatgaaaatccttttttctcccttcttcttttcctctgtagaattatcaccttaactcttgctcatccacccaccctggattgaggcctcctttctcatccttctgcttctgttggccccagacccctctctagtggatggccctggctcctctgccggcctagccctcatctccattccttttcaaggagaggccgcggattcctcctctccctattggatgggcttaaaatggggaaaccttgtgttatgctgatccctgaactctcacatcatttcccaggtgtcagtgtaccttcaaaaaacctgtgcctgaggtcctgagccccatccccttggccttccatgttgctattctgagattctctttgcccaccccattggcctccccagattccattcacccttagggaaacactaatttattcttgcccaactttcccctcaccaaaggaaattgaattcgaaaacccaaattccaataatgaatgaagaaccacccgggcccccaaaaacacaagaaag

SEQ ID NO: 43012 - DNA, 818 bp, Macaca Mulatta
  misc_feature (1)...(818): n = A,T,C or G
ggattctagaggccgaggctgccgacatgnnnnnnnnnnnnnnnnnnnnnnnnnnnnnnnnnnngcggagtctctctctgtcactcaggctggagggcagtggtgcagtcttgggccactgcaatctccacctctccagttcaagtgattctccctgcctcagccccgccaagtagctgggattgcagatggccaccatcacacctaannnnnnnnnnnnnnnnnnnnnnnnnnnnnnnnntgccatgttggccgnnnnnnnnnnnnnnnnnnnnnnnnnnnnnnnnnannnnnnnnnnnnnnnnnnnnnnnnnnnnngacaggcgtgaaccacctcacccgaccgaggttatatttctgaaaggtggagtaccatgctttgaactataagcttggtgtggtttatcctggcatcggctcagtgacctcaccatgtggacactgttttgattccttatttgtacaaggagaatttctcgctgacagaaaggtctgcccccgtgtttctaagttttcccgcttgctacccaagatgaaactatagcttttttgttccaagcttcacccgtctgggaattcatttttataagctggggaaaccctttccttcttccccccttttggattacacccttgattctatctgatttggatgtctccgtttcccctttttactcccccttgaattggggcgctttccaaaattctctattattctcccttttactatacatcttgttacccttctccatttatagactcttggccgcccatctcctattttcacaatagctgttttctaatgtagacncactgta

SEQ ID NO: 43013 - DNA, 710 bp, Macaca Mulatta
tgaagaagagatgttggctttgcagaatgagcgcacagaacgaatacgaagcctgttggaacgtcaagccagagagattgaagcttttgactctgaaagcatgagattaggttttagtaatatggtcctttctaatctctcccctgaggcattcagccacagctacccaggagcttctggttggtcacacaaccctactgggggtccaggacctcactggggtcatcccatgggtggcccaccacaagcttggggccatccaatgcaaggtggaccccagccatggggtcacccctcagggccaatgcaaggggtacctcgaggtagcagtatgggagtccgcaatagcccccaggctctgaggcggacagcttctgggggacggacggagcagggcatgagcagaagcacgagtgtcacttcacaaatatccaatgggtcacacatgtcttatacataacttaataattgagagtggcaattccgctggagctgtctgccaaaagaaactgcctacagacatcgtcacagcagcctcctcacttgggtactacagtgtggaagctgagtgcatatggtatattttattcatttttgtaaagcgttctgttttgtgtttactaattgggatgtcatagtacttggctgccgggtttgtttgtttttttaacttttggggaaattttgaaaagtggagttgatattaaaaa

SEQ ID NO: 43014 - DNA, 543 bp, Macaca Mulatta
aagaactctttctctcatctatttttcaaagttcgaactcctcagaagcttgttaagcatcccagcttctcactgtcaccccaacaactgcctgctgtattgactgtccacatttaggagcctttggaaagacagtatattggcaatttagaactttgaaaacaagacagacacaaccccatggccaaccgaaaccactcactcttcaaagcactgtctgtgtgggcagctacgccccaacacccagcccagtgcacgctgagcaggaagagaagtgagctctcagctcagcgcactttccagaagccaagtgcatcggctgagcacacgacatttaaaatacttagaaaggcacagaacggcatctgtaaatacagcaagaaaacctggcgaaagctcggcgggatcctgagcatgttttaagccactgcaccccactgttcttatgccctttagtgtagacattgtctacgtcgcctgcttggtctgaaatgatttggagaaagaagtctttgtgtcaggccgggctcagaggaggtgggt

SEQ ID NO: 43015 - DNA, 280 bp, Macaca Mulatta
  misc_feature (1)...(280): n = A,T,C or G
gtctatcgtatccccaagatcagaagctctccaagatcttcaacggaagactgatagactcacctgatgagctgtgcttggtgcactgtccaggcagncccccatcctgtcnttggggggagaacaangnnnttttcccccttttttgggggcaaacacacttgtttcccacacnggcacctttcttgctnntgccntcntntgngnnatgtcactcctctttcccttggtattgaaactgctggtggagtaatgaccgtccttattaagcgtaatacca

SEQ ID NO: 43016 - DNA, 672 bp, Macaca Mulatta
gatgggaacgttggtaggtataaaaggaagaagttcatctctgacttaggatttaaacatatcttagattgctctgtactttccttttcctgaatgtcatctattgtgaatatcgtatactttctttaatttgcttttactttgaatggagaattcaattgagagacaacataaaaagtaaaaaaattatataaattacaaattaggacaagttaaagttcttggaataaaattattttgcttatgttaagcctaggtagtattttgaacttttatttttgaaaagcaccctttataggttacctcaggttgctgtgggttctttttttctgacttgaatatatttttatatatagacttaacattattttattatagattttttaaaataatgttttctattctgttttatagcaccctaaaaagaaagaataaaacaacaacaggaaaaaaaggaaaatatttaaattgtgacaaaaacccactgggtaggtatttcaagggggcacactgtggatttgggatattttaatatttgatctcttaaaaatgaatattagaaaaatatatagttagtacacaggcattccaaaatcgttttaagggaaactaccttttgtaaaattatattcaaatatgtgtgcttccaaaaaactgtttgcatgcactcct

SEQ ID NO: 43017 - DNA, 697 bp, Macaca Mulatta
ctgctctcactaaaactttgtcttataaaaccttgagggggatcccttatcttgctagaacacctgagaaactcaagagatcaccatacaggtaccctgtagactattgcttttggcactgtaaggagcatacaaagtacctggggatctctttaaaatgcagataccgatttagaagatttggggtagggccaggtaatctgcatttttaaaaaagctgacgccaaggctactgatcggaaaccacactttgaacagggctttagactctaaaaattagagaaatgaagccacaccgagtggctggcatagttggcttgttcctaatttcaagatgccagggggtacagagccctgaaggaaagtagcccacagactcatgaattcaccaccattttctctgtgatataagttccaaaaaccttggttggattttatttttgccagggaagtcaactaccttttgaactatccagatgctcacacaaacagactgaaccacactccctctgagcaatatgatcaaaggagcagaggggactttgccctgggacctcaaattaatgggaaattcacctacctgctttgtagacatctcatcccaaagcttgaaattgtcttttatgtttctttcccaaaagtaccagaataggagtttcctctgtggactgaagccttggttaaacctcagtaacag

SEQ ID NO: 43018 - DNA, 757 bp, Macaca Mulatta
  misc_feature (1)...(757): n = A,T,C or G
ggatacattttcaggtgtagagaagccggtatctttagtgtgtacctctaaaatagtagaatgtcatctatgaatgnnnnnnnnnnnnnnnnnnnngttttcttatttttaacagagttaaggaggcagattataaagaggcagtcatttgactactctaaactctttttaaaacaagtccccctttagaagattagaatttagctcttattctcactttctccacctccataaatgcaaacctcatttctacctccccattttctcactatagttttcatattcatttcaattacatcagtagtctgttttttcagttggatagtataaacactagtcatacatgggctgtgattgtttttcctctcttgcaaaactttttgttttctccagaattaataattgtcttttgtttacttaattttctatatgcttatgattaattgaatttcaaattctctgaattacaaatatcctcctgttcattctgaatatgtttactcatcttaattttaaaagagaagtaaacatagtttgggttttagagttttggtataacgaanattcttagtgttagaatttactggcaaaatcaggttaaataatctttgttactttttctgtttatacacataccctgtccagctgcagctaaacaaatggttttacctttatttctgcttagttcctgatttttgtcaaaagtctgtttcttcatcgattccaaacattggtcacctaggggaagtaagaaagn

SEQ ID NO: 43019 - DNA, 811 bp, Macaca Mulatta
agtctaactctattcatttgcctttcttctattagtctgtgtttcccaaatatccctttggctatatcccagcaggatctgtggttagattgaattagaaataatagatttgaatcaaataatagcttgatttatcaataatccagattgagttgatatagtactacagctgaaatttaaagctaactatatatttttttctatagaaaccaaaattcagttctaaaagtcacatttggcatgtttataatgaaaattccaacagacagaagctggaacatgtaaaagttaataaaggaagcaaagagagtttatttataaataaagaagatgtatatgaacattaccaaaaagatccccaaaacacaaaatttggtaaatccaagcataaacaatcaactcttaaccagatatactctacaggactcagaaagggcaatctccataatgtcaaagatcccaacacaaatgtgccaaaaggtataggaagaagaaaaacacaacgtaaaaggactcaagtagatgatgtagactgtaatccaagaaagacactagctgtctctccttccaggagaataaacagattggttacctatcagcagtgtgttctagaaacccttaatgaccttccagaagaatcgtgtgaaccttccagcttaactctgtcaagcctgaaaaatggattagataatagtactgaggcttgttcggtttccaagagacacacatccagaacctggatttatcagatagtcaagaagttcaatgcttggaattagaatccattgaccaaactgaagttgtttctttc

SEQ ID NO: 43020 - DNA, 806 bp, Macaca Mulatta
  misc_feature (1)...(806): n = A,T,C or G
ggtgttttaataatgcaaagctattgctgaaactaagaacgagcataagtgtgatcagaaacaaaattgttacataaaattaatagccaccacatatttactgttcaggcaactaccggttgtattgtaaaatggaagaaaaagacttgatttgaaatnnnnnnnnnnnnnnnnnnnnnnngagggggataatatatctaggaatgaacttagccagaagtatgaaaaatccacatgaagtaaatttttaaatgctactaaggggcaaatagtaagtaaataaatggaaagacaaccattctctgaaacaaggaaaatcaaattataaagatgtcatctctccccaaattaatcagagaatttaatacaactctagtgagcccagcatgnnnnnnnnnnnnnnnnnnnnnnnnnttctgtgaggctgaggcaggcgaatcacttgaagtcaggagttcgaaacccgcctggccaatatagtnnnnnnnnnnnnnnnnnnnnnnnnncannnnnnnnnnnnnnncannnnnnnnnnnnnnnnnnnnnnnnnnnnnnnnnnnnnnnnnnnnnnnnnnnnnnnnnnnnnnnnnnnnnnnnnnnnnnnnnnnnnnnnnnnnnnnnnnnnnnnnnnnnnnnnnnnnnngtgacagatgaaaactgtctcaaaatttatataagnnnnnnnnnnnnnnnnnnnnntcggcccgcctttggccctccaaaaacttttctaaaacatttccttttggcgcccggggccccnttaggaaaatgaaacaggtgcaaaactcgtttttccaaggaaa

SEQ ID NO: 43021 - DNA, 605 bp, Macaca Mulatta
  misc_feature (1)...(605): n = A,T,C or G
aagtccatcagacacacaagtctccatgtattgggcattcagacatagagatctaatccatcacacaagtctctatgagttagacatccgggtagcctcacagacatctcagacagggcactcttagctgctttcttcttgatggaagctggggatttttctttcccttcattttttgttcatttgtttgtttttatgtgtgnnnnnnnnnnnnnnnnnnnnnnngagacagtcttgannnnnnnnnnnnnnnnnnnnnnntggcatnnnnnnnnnnnnnnnnnnnnnnnnnnnntggagttcaagagatttgcctgtttctcctgcctcagcatcacaaatagctgagacaacaggcatgcaccaccaaatgaggctatnnnnnnnnnnnnnnnnnnnngtgttgnnnnnnnnnnnnnnnnnnnnnnnnnnnnnttnnnnnnnnnnnnnnnnnnnnnnnnnnnnnnnnnnactnnnnnnnnnnnnnnnnnnnnnnaggatttcaggtgtgagccattgcacctggcctttcttcacttcttaacacagggaaatacccaaatattagagggatggagcagtggggaatgtataatccatgacgt

SEQ ID NO: 43022 - DNA, 883 bp, Macaca Mulatta
  misc_feature (1)...(883): n = A,T,C or G
gggagactcttcaatattttgttgctttattcatataaaagatatttatttagtcctcacgatatgccaagcactatgctgggtgttgggaatgtatccgataataataatagtaactatggctaagaagcattgaacttttactaccaatttcatactgtgctaagtgctttacatatatacttcatataaccctcaaatcaaccttgtaattaggtgcttttatcatctttatacgaagataatgaaaatgagatccccaagaacaccgctactaataaacaatttaaagttgggatacagccccaatgcagtggctcacacatgtaatgctagcatactggggaaaccaagtaggtggatcacttaaagtcaggggttcaagatcagcctgaccaaactgggtgaaaccctggtctctacttnnnnnnnnnnnnnnnnnnnntctgggacttggtggcctggtactggtaattcacagctacttggggaaggcttgaagctggtagaatttctcgggaccccgggaaggtcggaatttttgcatgtaacgcccgagtatcacccaccttggtcctcccagacacgggggctatcacaaacaaataactaccattccacaagagatataaattaacaattacccaaatttaagtcctaattttgcctaacttcctatgagcccctctgccaacattttttccacctcccgttcaactaattgtctcttattacgcaacaatgccaattgtacacttttacctcctgttcccgccattgtggaatactccgctaactcctgccaatattagtcgaaccaccttcttttttcatcctaccaccctatttccctctataaaagtgaagaattccccagcgcagg

SEQ ID NO: 43023 - DNA, 926 bp, Macaca Mulatta
  misc_feature (1)...(926): n = A,T,C or G
ggggcagttcggcggtcccgcgggtctgtctcttgcttcaacagtgtttggacggaacagatccggggactctttcttccagcctccgagcgccctccgatttcctctccacttgcaacctccgggaccatcttctcggccatctcctgcttctgggacctgccagcaccgtttttgtggttagttccgtcttgccgacaaccatgagcttccagaatcgtcagaattattccaccgacgtggaggcagccgttcacagcctggtcaatatgttactggcaggcttctaacactacctcttctttgggctttctatttccaaccgcaaataatttggttcttggaaaggctggaccccctttcttcccccaaattnnnnnnnnnnnnnnnnnnnnnncagggggctacaaaacgtctccctgaaaaataccaaaacccaggtggggggggccccgcccctcttttttttagggagcttnnnnnnnnnnnnnntcnnnnnnnnnnnnnnnnnnnnnnnnnnnnnnnnnnggatagcccctgaaaaacccccccccttgggcccccnnnnnnnnnnnnnnnnnnnngaattcggggcgcccctttttggggattttttttggcccccccggggttttttcccccccaacgggggaacccccccctctctttggggaaaccccccgcgggggaaaacaccactctccccccaatgtggggaggaggagtnnnnnnnnnnnnnnnnnnnnnnnnnnnnnnngggggagaaaccccttgttataaaaaccctttttaaggggggtgtggggcgggcccccccaaaaaaaatagtgggtggggggtggaagagaaatttttctttctttaaaagaagggcagcttctttctctcgggcnnnnnnnnnnnnnnnnnnnnnnnnnnnnnnnnng

SEQ ID NO: 43024 - DNA, 902 bp, Macaca Mulatta
  misc_feature (1)...(902): n = A,T,C or G
gggggttggcgtgtgagaggttttctcactctagaacctcagaaattctctctcagggtgattcttcaagcagtcactatgtcaacagacacaggtgtttcccttccttcatatgaggaagatcagggatccaaacttattcgaaaagctaaagaggcaccattcgtgcccattggaatggcaggttttgcagcaattgttgcatatggattatacaaactgaagagcaggggaaatactaaaatgtcccttcatctgatccacatgcgtgtggcagcccaaggctttgttgtaggagcaatgactattggtatgggctattccatgtatcgggaattctgggcaaaacctaagccttagaagaagagatgctgtcttggtcttgttggaggaacttgctttagttagatgtctcattattgaagttacctattattgttggaaataaactaatttgtatggatttagatggtaacatggcattttgaatattggcttcctttcttacaggcttgatttgcctggtgaccgaattactagtgactagtttactaactaggtcattcaaggaagtcaagttaacttaaacctgtcacctaaatgtacttgatagtgttggaaatgtccaccttcttaaattttttaagatgaacttagttctaaagaagataacaggccagtcctgaaagtactccccagtcccagtttgctgcagaatctcgtattttggatgttgtataagagtcctatttgccccagttaattcaacttttttctacctattttatggactgtctgctctgttagaactctgtccnaaaagtgcatggaatatattttgtaaagcttccacagctgacatatatgtgcatgtgtttaacccaatcagaaagctacagtaa

SEQ ID NO: 43025 - DNA, 983 bp, Macaca Mulatta
  misc_feature (1)...(983): n = A,T,C or G
gggaggcattgaggcagccagcgcaggggtttctgctgaagtggcaggcgcagcttgaggaacccgcagataagttttctctctttgaaagacagagattaatacaactacttaagaaatgtagtcagtagcttactaagattttacttaggattaggttcttaacgtaatttgaataagattttaagagaaaatatgaagagttaaaagtgtagcgtgaggaaggaaaaaacgtttctaaaacatgacggaggttgagacgaaacttcttcaagaagtaaaaaaatgtattaaaaagaaaattgagagaagggacgccagagccctgaattaataccattcagaagggcacgtgctttttaaattaaaataaaggtgatttaaacacgagcttaaaacggttgttttgaaaaagttgtaaggtgaattaaaaataaattttggaaacgccgaatcaattttggaaaatgcagcaatttaaaaatccggaaaaggttcnnnnnnnnnnnnnnnnnnnnnnntttgaaaaacttacccattgaaacaggccaatggggtaagaaaagctttggtccgcgtccccaatttgaataaaaaggcccccttaaagatatataatattacattgttaaacagagccagattatattgatcttaaaaaaaccgaccatgtatagccgcaacgaacaaagttatggttacatacagcaaattatacattttgggggacaaattaggggccaacggaaatttaaaaaaactattattctgggggcgagcaaagacatctagagnntaatgtcttgtgtgaactgcttggcaaatagacacctcaatataaaccgtgcaataggtaccaattggataaagtgtcttgaaaataataaaaaatgctaaacttctattgnataaataacaatctctcgctggaacttagtacatcaggcgcacacattctctctagtgttacaggaccccgcacg

SEQ ID NO: 43026 - DNA, 398 bp, Macaca Mulatta
  misc_feature (1)...(398): n = A,T,C or G
gacnnnnnnnnnnnnnnnnnnnnnnnnnnnnnnnnnngaaaaaagctnnnnnnnnnnnnnnnnnnnnnnnnnnnnnnnnnnnnnnnnnnnnnnnnngcttaaaattctttgcttgttagtgaccttgatcgtggttctctttgtgcgatagttgggcatttgtatttttacttgtgttaatttgcctttaaattttggttatgggtttcaccttttaaagtaatcaaacatatttatcttttcctgtgtgatagtttttttctgtgtcttttcctgttaaacacatagacccctccccagtatggagattgaataaatactcattttccnnnnnnnnnnnnnnnnnnnnnnnnnnnnnnnnnnnnnnnnnnnnnnnnnnnnnnnnnnnnnnnnnnnnc

SEQ ID NO: 43027 - DNA, 1699 bp, Macaca Mulatta
  misc_feature (1)...(1699): n = A,T,C or G
agtttcgccatgggtgacttcggcctgagatgcgctccatggagcagattctggagttgctggtgctggaacagttcctgactatcctgtcccaggacatccacagcagggtgcagaagctgcaacaggcgagctgtgaagaagctgtaactcttttaaagtatatgtatgacttttaaaagatagagcttgtgaaagtgagggaataggtgagtgagaaaggttttatctgccatcttcctcaaggaggcccagcctcccctttattcacagggttctgggtctggtgggtccagaggactgagatatctcgctgtcttagttccccattcagattttcttgattgccctcagtagaccttacacgggccannnnnnnnnnnnnnnnnnnnnnnnnnnnnnnnnnnnnnnnnnnnnnnnnnnnnnnnnnnnnnnnnnnnnnnnnnnnnnnnnnnnnnnnnnnnnnnnnnnnnnnnnnnnnnnnnnnnnnnnnnnnnnnnnnnnnnnnnnnnnnnnnnnnnnnnnnnnnnnnnnnnnnnnnnnnnnnnnnnnnnnnnnnnnnnnnnnnnnnnnnnnnnnnnnnnnnnnnnnnnnnnnnnnnnnnnnnnnnnnnnnnnnnnnnnnnnnnnnnnnnnnnnnnnnnnnnnnnnnnnnnnnnnnnnnnnnnnnnnnnnnnnnnnnnnnnnnnnnnnnnnnnnnnnnnnnnnnnnnnnnnnnnnnnnnnnnnnnnnnnnnnnnnnnnnnnnnnnnnnnnnnnnnnnnnnnnnnnnnnnnnnnnnnnnnnnnnnnnnnnnnnnnnnnnnnnnnnnnnnnnnnnnnnnnnnnnnnnnnnnnnnnnnnnnnnnnnnnnnnnnnnnnnnnnnnnnnnnnnnnnnnnnnnnnnnnnnnnnnnnnnnnnnnnnnnnnnnnnnnnnnnnnnnnnnnnnnnnnnnnnnnnnnnnnnnnnnnnnnnnnnnnnnnnnnnnnnnnnnnnnnnnnnnnnnnnnnnnnnnnnnnnnnnnnnnnnnnnnnnnnnnnnnnnnnnnnnnnnnnnnnnnnnnnnnnnnnnnnnnnnnnnntttctgttgaaggtttaccctcagattcctgtcataatttttcttttctattgagccctgtcatgatgataagcgatggcaggttggttcctagatcatacatcatagacctagcacagaagtgttttcagaagagccttttccttacaaaacagcatgaaagtcatggagccagtggatactgagatttcaaactggagccaatggatacttagaggagccctgtggtgtagagtagttgctacttcttgttcactaggtctaattagcatgtcatcaatgtaatagactagtgtgttgtcttgtagaaaaggtgatcacgattcctgtgagctaaactatgatgtagggctggaaaattgatgtacaatatacctgaggtaggatggtgagggtgtattcctggtcttgccagctgaaagcaaattgcttctggtggtctttactaacagttattgagaaaaaaaaagtattttcaaggtcaagaggtgcatactaggttccagggaatgtgttaatttgcttaagaaatgaaaccacatctggaacagcactgcaattggagtcatcacctggcttagtttacaatgacccactaccgtcttccaagatccatctggcttctgcataggccaaacagg

SEQ ID NO: 43028 - DNA, 202 bp, Macaca Mulatta
agaaggtgctggggctgctgctggcacattcagcagatgtgaatgcccgggacaagctgtggcagacaccactgcatgtggctgctgccaaccgggccaccaagtgtgctgaggctctggcacccctgttgagcagcctcaacgtggctgacaggagcgggcgcagtgctctgcaccatgcagtgcatagtgggcatcttga

SEQ ID NO: 43029 - DNA, 225 bp, Macaca Mulatta
agaaaataatatatgatcaaaattatttaagacagaataaatacaaagtaagtcctttgaaaacaggttaggactagtaaaagaacattcaactctaaacagtaggtaataaacgtacaatatcaggatctgatagattctggttcagtaacttcaggaaggtccttggcacgtttaaaaatgatggataacaggacatccaaggaggccggaggtatgtttgtg

SEQ ID NO: 43030 - DNA, 140 bp, Macaca Mulatta
caactggctggtttggaagggacttcaggactgggataagaagaagcatagtgcaggactcaggactgggattagggaaggagtgttctaggcggagggaacaagtggagcaggtctggtttggggctcttttggctgaa

SEQ ID NO: 43031 - DNA, 853 bp, Macaca Mulatta
  misc_feature (1)...(853): n = A,T,C or G
ggggcggccgccatgttctctgtgtgtctttgtcgtttgtgtgttctttcattctccaccacccccggcacggaccccaacaagtggcgcagcgagcagggtcatcacgggtgagtaggggagaacaagaaggggaaccccctaggggcgggtaaggcccagatattgttaaggggaaccttcttaagctttcattatggggaattccatctctctggcctcagaatatttatggctgtttcaaggactgttgctgtctataggagtagaagtgaaagaaaaagactttgaaagcgatttgtttgcccatgttgaacaacattgttactggtttcagtaatcagactaaagtgcagctgaaatcgcaaagaatggttacaggtagtaaaaactctgcttagagctctccagtttagggaaattatgccttccaaaattgtgggaccttgtgtgactctatccctcagaacatttaaagttacttggagactgattcagaatgtggtaaaggttgccccccatgaaaggaaaggtaatcctgaagattttgggaaaaaattataacaaccaagcaaattaaatcatatctgaaaatgatagagaattaatgtagtgataaaattgtttggccccccctcagnnnnnnnnnnnnnnnnnnnnnttataaccttttcttttttggcccccccggggcccccttttagggataagatgaaaacaggggtcctatatcctttttttcccaaagggaaattccctgtgttccttaacataaatgtgctttggaaattcccccaccccattataaataatatcccctggggcgggccaaacaataacgtcttccttgaaa

SEQ ID NO: 43032 - DNA, 1092 bp, Macaca Mulatta
  misc_feature (1)...(1092): n = A,T,C or G
agccagagagaccagctgagcttgcagctggggcagcagcagggggatctgcagcggctacagcaggaactggctaatgagcagaaggttcgggccagcctggaggcggccctggtccaggccacctccttcctccagaacattctgcagncagatgcaccccgatgaagaggacagcgacttcgacgtgacattccagctatggcacaaggagatgctacagcaactgctggtcatgctcagcgcccctgtggtcccgagaccccagaagtctgtctgtccccacccggagtcacagccccatggcccacccaaggagagnagccggcccagcatccagctgcccaggactgggtctctgctgccgcagctctctgacatcacccactaccagccgggggatctaggcctggtacctcgccaggcccacatcccacccaacccccaggacctcnnnnnnnnnnnnnnnnnnnnnnnnnnnnnnnnnnnnnnnnnnnnnnnnnnnnnnnnnnnnnnnnnnnnnnnnnnnnnnnnnnnnnnnnnnnnnnnnnnnnnnnnnnnnnnnnnnnnnnnnnnnnnnnnnnnnnnnnnnnnnnnnnnnnnnnnnnnnnnnnnnnnnnnnnnnnnnnnnnnnnnnnnnnntctcagctcacggcaaccttcgcctcccgggttcaagtgattctcctgcctcagcctcccgagtagctgggattacaggcgtgcgccaccacgccccggctaatttttgtatttttagtagagatggggtttcatcatgttggccaggctggtctcgaactcctgaggtcaagcaatcccccagcttcggcctcctaaagtgctgggattacaggcgtgagccactgcgccaggcctccaagccagcatctttaatcttacagatacgtgcccctgcttctctaaaaaggctcaaaacgtttagtcttcctgaagttcccctacgttccaaataggacacagagagaagaacctacttcagaaatggactggtccagtcacagtcacccccactttaatccgcaggcagcctggaacagtctagaggacagttgtataaaaagtagatac

SEQ ID NO: 43033 - DNA, 741 bp, Macaca Mulatta
  misc_feature (1)...(741): n = A,T,C or G
ggnnnnnnnnnnnnnnnnnnnnnnnnnnnnnnnnnnnnnnnnnnnnnnnnnnnnnnnnnnnnnnnnnnnnnnnnnnnnnnnnnnnnnnnnnnnnnnnnnnnnnnnnnnnnnnnnnnnnnnnnnnnnnnnnnnnnnnnnnnnnnnnnnnnnnnnnnnnnnnnnnnnnnnnnnnnnnnnnnnnnnnnnnnnnnnnnnnnnnnnnnnnnnnnnnnnnnnnnnnnnnnnnnnnnnnnnnnnnnnnnnnnnnnnnnnnnnnnnnnnnnnnnnnnnnnnnnnnnnnnnnnnnnnnnnnnnnnnnnnnnnnnnnnnnnnnnnnnnnnnnnnnnnnnnnnnnnnnnnnnnnnnnnnnnnnnnnnnnnnnnnnnnnnnnnnnnnnnnnnnnnnnnnnnnnnnnnnnnnnnnnnnnnnnnnnnnnnnnnnnnnnnnnnnnnnnnnnnnnnnnnnnnnnnnnnnnnnnnnnnnnnnnnnnnnnnnnnnnnnnnnnnnnnnnnnnnnnnnnnnnnnnnnnnnnnnnnnnnnnnnnnnnnnnnnnnnnnnnnnnnnnnnnnnnnnnnnnnnnnnnnnnnnnnnnnnnnnnnnnnnnnnnnnnnnnnnnnnnnnnnnnnnnnnnnnnnnnnnnnnnnnnccctttattattgggattcccctttcctcttttggtcggcctcatcccgccaattacttaacaccactttcccatccggaaccatcactttcttgccttcaaagacccgccccttt

SEQ ID NO: 43034 - DNA, 2554 bp, Macaca Mulatta
  misc_feature (1)...(2554): n = A,T,C or G
gtaaaccgcagaggctcgcggctgcgggtaggctcccgcagatccccgcagatctcagtagatccggcgtgcattccccacccgcggagtatcccggcgtgcagcgatctcccgagagttggcgcggggccacttggctgcaggaaaggtgtgcaccttgaatccgggaaacacgccccagccgagtagccgtgcatcctgtggaggctggcgagccacggcgccgggggcggccaaggggaggcgggatgagtctgcgagccggctnnnnnnnnnnnnnnnnnnnnnnnnnnnnnnnnnnnnnnnnnnnnnnnnnnnnnnnnnnnnnnnnnnnnnnnnnnnnnnnnnnnnnnnnnnnnnnnnnnnnnnnnnnnnnnnnnnnnnnnnnnnnnnnnnnnnnnnnnnnnnnnnnnnnnnnnnnnnnnnnnnnnnnnnnnnnnnnnnnnnnnnnnnnnnnnnnnnnnnnnnnnnnnnnnnnnnnnnnnnnnnnnnnnnnnnnnnnnnnnnnnnnnnnnnnnnnnnnnnnnnnnnnnnnnnnnnnnnnnnnnnnnnnnnnnnnnnnnnnnnnnnnnnnnnnnnnnnnnnnnnnnnnnnnnnnnnnnnnnnnnnnnnnnnnnnnnnnnnnnnnnnnnnnnnnnnnnnnnnnnnnnnnnnnnnnnnnnnnnnnnnnnnnnnnnnnnnnnnnnnnnnnnnnnnnnnnnnnnnnnnnnnnnnnnnnnnnnnnnnnnnnnnnnnnnnnnnnnnnnnnnnnnnnnnnnnnnnnnnnnnnnnnnnnnnnnnnnnnnnnnnnnnnnnnnnnnnnnnnnnnnnnnnnnnnnnnnnnnnnnnnnnnnnnnnnnnnnnnnnnnnnnnnnnnnnnnnnnnnnnnnnnnnnnnnnnnnnnnnnnnnnnnnnnnnnnnnnnnnnnnnnnnnnnnnnnnnnnnnnnnnnnnnnnnnnnnnnnnnnnnnnnnnnnnnnnnnnnnnnnnnnnnnnnnnnnnnnnnnnnnnnnnnnnnnnnnnnnnnnnnnnnnnnnnnnnnnnnnnnnnnnnnnnnnnnnnnnnnnnnnnnnnnnnnnnnnnnnnnnnnnnnnnnnnnnnnnnnnnnnnnnnnnnnnnnnnnnnnnnnnnnnnnnnnnnnnnnnnnnnnnnnnnnnnnnnnnnnnnnnnnnnnnnnnnnnnnnnnnnnnnnnnnnnnnnnnnnnnnnnnnnnnnnnnnnnnnnnnnnnnnnnnnnnnnnnnnnnnnnnnnnnnnnnnnnnnnnnnnnnnnnnnnnnnnnnnnnnnnnnnnnnnnnnnnnnnnnnnnnnnnnnnnnnnnnnnnnnnnnnnnnnnnnnnnnnnnnnnnnnnnnnnnnnnnnnnnnnnnnnnnnnnnnnnnnnnnnnnnnnnnnnnnnnnnnnnnnnnnnnnnnnnnnnnnnnnnnnnnnnnnnnnnnnnnnnnnnnnnnnnnnnnnnnnnnnnnnnnnnnnnnnnnnnnnnnnnnnnnnnnnnnnnnnnnnnnnnnnnnnnnnnnnnnnnnnnnnnnnnnnnnnnnnnnnnnnnnnnnnnnnnnnnnnnnnnnnnnnnnnnnnnnnnnnnnnnnnnnnnnnnnnnnnnnnnnnnnnnnnnnnnnnnnnnnnnnnnnnnnnnnnnnnnnnnnnnnnnnnnnnnnnnnnnnnnnnnnnnnnnnnnnnnnnnnnnnnnnnnnnnnnnnnnnnnnnnnnnnnnnnnnnnnnnnnnnnnnnnnnnnnnnnnnnnnnnnnnnnnnnnnnnnnnnnnnnnnnnnnnnnnnnnnnnnnnnnnnnnnnnnnnnnnnnnnnnnnnnnnnnnnnnnnnnnnnnnnnnnnnnnnnnnnnnnnnnnnggtttcctgagtctgccgtgaaggttctcgcatcagggtgtctacagaatatgctgctgaagtcgctgcagatggaccccgtgttctgggaaagccaaggcggggcccaggggctgaagcacgtcctccacaccctggagcagcgaggacaggtgctgctgggacacatccgaaagcacaacctcacactcttcagggacgaggacccgtgagcctcacaccagccctgagtcaatgagcatccatcctgatggccacattttcttgggctcactcatcttgaggacaaatgggaaaaaccagaagccagaggggcacaaggatgtcatgggatatttcacctgcccgggatggtggagnnnnnnnnnnnnnnnnnnnnnnnnnnnnnnnnnnnnnnnnnnnnnnnnnnnnnnnnnnnnnnnnnnnnnnnnnnnnnnnnnnnnnnnnnnnnnnnnnnnnnnnnnnnnnnnnnnnnnnnnnnnnnnnnnnnnnnnnnnnnnnnnnnnnnnnnnnnnnnnnnnnnnnnnnnnnnnnnnnnnnnnnnnnnnnnnnnnnnnnnnnnnnnnnnnnnnnnnnnnnnnnnnnnnnnnnnnnnnnnnnnnnnnnnnnnnnnnnnnngatctaatcctgtctcaccaccgagggactgaacatgcaagtggacaatgaccaaactacatataataataaaactctacccaccacctctgtagcagctcagagaaccaaccac

SEQ ID NO: 43035 - DNA, 650 bp, Macaca Mulatta
  misc_feature (1)...(650): n = A,T,C or G
tcgaagacatattggtagctgcaagtggagatgggccttataaatgtgaattgtcgtgggaaagcctttttttggcccagtttattgcgtatgcatgaaagaacnnnnnnnnnnnnnnnnnngtatgaatgtaagcactgttctaaagccttccctgtttacagttcctatctaagacatgaaaaaatacacactggagagaaaccgtatgaatgtaagcagtgttccaaagccttccctgattatagttcatatctaagacatgaaagaacnnnnnnnnnnnnnnnnnnnnnnaaatgtgaacaatgtgggaaagccttcagtgtttccggttcccttcgagtacatgaaagaatnnnnnnnnnnnnnnnnnnctatacatgtaaacagtgtgggaaagcgttttgtcatcttggaagctttcaaagacacatgataatgcacagtggagatggacctcacaaatgtaagatatgtgggaaaggctttgattttcctggttcagcacgaattcatgagggaactcacactctagagaaaccctatgaatgttagcaatgtgggaaattgttatctcatcgctcaagctttcgaagacacatgatggcacacgctggagatgggcctcataaatgcctggtatgtgggaa

SEQ ID NO: 43036 - DNA, 532 bp, Macaca Mulatta
  misc_feature (1)...(532): n = A,T,C or G
agtctgccaagtctctagcccactggccttgagagatgagagtgtgcccaaccaaatgctggctataccagttacagcctccactcnnnnnnnnnnnnnnnnnnntctttatggtaaacaaacactgatctccacagctcttaacaagaatgtttatagccccaaaccaatgaatggacatgtaatcaacaaatgatcaaatgctacctcatttgaggtgttgaattttcccctagagactcagttcttgtgcaggttgggcctgggaaagtcccaagccatcagctcaggtccagccagcctcctgaatggccagatatgcaggagagcgggtttcctccatttcccagattggtgaaagggaagacttttccaccaggctagcagggcagggcctggagcactgaggcagagatttccctgcctgagcaccttggccccttctcattccggtttcctttgacccattcttgggtgagagccaatgttctagaaaggggagtgaaggccaggttctagaatggctttcccc

SEQ ID NO: 43037 - DNA, 781 bp, Macaca Mulatta
  misc_feature (1)...(781): n = A,T,C or G
ggcatctccatcccagggttgaaagttttcatagaaataaaattctaagtaagtagaacaactgataatcaaaaataaaaacataaagaaactaagcactgtgagcaggagtcaacagcagacctgctagaaaataggaataggcagatacagaatatgaaataagtgtttcatgtgtttcaacaaaagacaagttaaaaatatgttccaagattcagaaactataaagaatattcaaagagatttttaaaaatagtatttatacaattgaaaattatagtagttgaaactttattaaaaatcctcaatagatgaatttaactgcagattatataaactcaaaaaaggaaataaggaactgaataattacttaacaagcattcaagagaaacagttgaaaagaatgaaagagaagttgtacatatttaaaaataaatatttgtctgaatggtcttctgtaagagagaatggtagacaacagttaaaaaataatggctaagaattttctacaactcgtgagcaacactaaactataatttcaagaagcacaggaacctaaggtggttaaatagataaattctcacttagccttgttancataaaatagcagaacaccaaagacaaagaaaagatctttgacatatttgggaaggaagacagatttaccattaataaggtcacacccagaagacaggggaacattttcttaaaataaaaatctagaattttatactaagaagaaaaaatcaggggaaattcttacgttttctttgcagacaaa

SEQ ID NO: 43038 - DNA, 838 bp, Macaca Mulatta
  misc_feature (1)...(838): n = A,T,C or G
tagacccatgttcaattaccctatggggccccgcgcgcccaaagaaatggtttagaaagctttccgagggccgaaggcgggcgaacatgttttnnnnnnnnntnnntnnnntntnnnngggagagacannnnnnnnnnnnnnnnnntctnnnnnnnnnnnnnnnnnnaactcaaagtggtccactgccttcggccttccaaagtgctggaattatagtcgtgagccaccacacctggccctgtattgcattcttgacagctacaaaagaaactgcaaatagtattgaaaggttgattcttatgattcatggtgtttatattgacttttatggtctcctgtgtttcacaagaaattttctttgtgaaaatctctcctcttatctttttatacttgtgttcccccaggatgaatgcttaattaagccatattcttatagtgtgatggtattccaattatgctctactctgaatttctctttgttttactgtcacacactttgattggtaaaatttagtaatagacttgtgaaatactaaattgaaagagactttagaaataataaagtagagggagtctttttaggggtatggagtcttgctggagtgccgtggtgcannnnnnnnnnnnnnnnnnnnnnnnnnnnnnnnnnnnnnnnnnnnnnccatnnnnnnnnnnnnnnnnnnnnnnnnnnnnnnnnnntgccaccacgtctggctaatctttannnnnnnnnnnnnnnnnnnnnnnngnnnnnnnnnnnnnnnnnnannnnnnnnnnnnnnnnnnnnnnnnnnaccctcctcagcttccgaaagtnnnnnnnnnnnnnnnnnnncc

SEQ ID NO: 43039 - DNA, 160 bp, Macaca Mulatta
cttgtcaaggagttccttaaagtgaccttacatcagtcccacatgtatctgttatcacctgcagataatgagctctttgaccaaatagatcattctaagagggtctcattgagcattttgagctatttgtcatgaagatagctgagtgtttccatgcagc

SEQ ID NO: 43040 - DNA, 788 bp, Macaca Mulatta
  misc_feature (1)...(788): n = A,T,C or G
ggtatgatttatttatttttctagaagttagttttaactgatgtgtatctgtatgtctatttgtgtatattttgtcacaatcatgtgacagaggctgaaaagtgtggaagagacagttttcaggaacaacaagcaattattcctactttccaagttattttgacgccatggtggctcacacctgtgatctgagtnnnnnnnnnnnnnnnnnnnnacggatcannnnnnnnnnnnnnnnnnnnnnnnnnnnaggcaacatagcaagactccatctctacaaaaaaaatacaaaatttaactgggcatggtggtgtgttnnnnnnnnnnnnnnnnnnnnnnnnnnnnnagtgggaggatcccctgagcccagagaggtcaaggttgtggtgagctatgctcacaccactgcacttcagcatgggagacannnnnnnnnnnnnnnagnnnnnnnnnnnnnnnnnnnccaccagcaccacaaacaacaacaaaaagtttattttgcactgggttttgagcacaggactcctgcggtgtctttgcatttaatattgtatggggatgccagtgggaaatgatgtgtatgcttggcctcatgaactaaaaccccgtgttaattatgacaaaaagaaagtgtgtgaagaaggacctttaactaccctagcagctctagctgccattcttgaaccgtgaagaaaaaaggccccactttaaggggtagccgggttggtgaaccaccaaagaacctttgttgggatgaaggcctggaaggacccgaaatccctgtggga

SEQ ID NO: 43041 - DNA, 415 bp, Macaca Mulatta
  misc_feature (1)...(415): n = A,T,C or G
ccaaaattgaaaatgccacacatcctctttacacttttatctaaactaagtcactccctttggttgataccagctaagatacaatttctgagatcataatcttttcatgaaattaaagcagaaaactgtccaggaaaatgagacttcagagttggtgcatcttagctgatctcatgaaaattctttggaaccttctgttggtctgtaaccaatcaaggactctttacggccatcatccacaagtagatccaccagcacatgcggtttatcataaccaaaggaggtgggggcttttattactgttatgagctcttgtccttctgtttttatttcacctttattatttggnggaaattctgaatcagatgagttatgtgattccagacagctggaatcagtatcaaaaccatttctg

SEQ ID NO: 43042 - DNA, 780 bp, Macaca Mulatta
  misc_feature (1)...(780): n = A,T,C or G
ggataaaggaggtgcctggaccagtcagagttttgaaggagccggcctgtggagcctaaggagctcttagccaccgggtgacttcccctgactggccttctgtttattttgtagccatgtgagggagggaagtcctaggaaaataattgacacaaagaagtacaaatcagtgtatggtgaactgtgccttgtctctttgtaccttctctgtctcattattggacacaccacttggccttgtggttacttgctgttttatggacaattggttccttgaggcttgngactgggtctcatttgttgggccagattcagggcctggcccagggttggcactcagtgcacagttgttgaattgtagcccagttgctggcctgcaagcagccaaatccaggataatgggtcttgttttgaaggntgtggcngttngggtgtgtctgctttcgcagtaagatagaaggcagtccatctagaaggagtcttaaaagtcatctggggcaaattcccaggcacgaaattaaattgaaccgtcccaaggacacagacctcttatggaagggccttaccttgggaccctccacccttggaatccctagccccccccccttacttgggtccttcctgggaattttttgaaaccggttccctttttcgccccggggcggggttcaccccccccctaagccaaaccggggggggtccccccgcttcccgggaaatcccccctatttgttggcccaaaattttttggggaaaaccctgtaagggggcttattggtg

SEQ ID NO: 43043 - DNA, 390 bp, Macaca Mulatta
  misc_feature (1)...(390): n = A,T,C or G
attgagaaggtcaactccatggactttggagaatttgtggatgtgtttgggaatgtcattgaaggatgtcctctgattgcagctgctgtttggtcccannnnnnnnnnnnnnnnnnnnnnnnnnnnnnnnnnnnnnnnnnnnnnnnnnnnnnnnnnnnnnnnnnnaggccaggagggcatcctgcgctgccacccggacctggcgggcagcgagctgcggcggggcacgctcacggccgagtcgcagcgggaacagagcgccgcgggcctgacgagcctgggcgcggacgagcggctccggctggcggagctcaatgcgcagtaccgcgcgcgcttcggcttccccttcgtgctggccgcgcgcttcaccgaccgggcggtggtgtcgcg

SEQ ID NO: 43044 - DNA, 825 bp, Macaca Mulatta
ggagagatggtgattcatcctgtgtgaatgagatatttattttcaaatagatatttttgaaatagatatttattttgaaatagatatattttgacagatattttgaaaggcagagaaaagaatctaatacagtatttagtgagcacctactatgtgtcaggtcttttgctaaatattttgtgtatattatctcattttgtctttgcaacagaagtgttatcaagaaattgatgcttggagaagctaaataatatccctaacgttatacagtggttcttattatctgtagtttcactttctacaatttcagttacctatagtcaaatgtggtctgaaaatgttaagtacaaaattcaagaaataaacaatttataagttttaaattgcatgccgttctgagtagcatgatgaaatcttgtgctgtcctgctctgcccaccctggatgtgaatcatccctttgtccagtgtctccatgctgtagacactctctggcccatcagccgcttagtagccgcctcagtgattggctgttgtgatattgcgtgcttattttcaggtaatccttattttatttcataatggtccaaagtgcaggagtagtgatgcttgcatatcgttataaatgttcaattttattggtgttaatttcttactgggactaattttgaagattaaaacctttatcactagaaagtgtattattttaaagaaaaaactgggctggggccgcttttggtctccaccgccctcttaattcccaaacactttttttggggaaggcgccaagaacagaggccgggaatcaccttttgaagggccctcgc

SEQ ID NO: 43045 - DNA, 738 bp, Macaca Mulatta
ggggaatggaagtgccactagaaactgccctgctactttaagtctgacctttgcaggaggtacactttgctgttctatgattgtattcacctacctaaaatacaaatgaagacggaacatatcatttactacacgatgaatttttcatttattaaatgaaaaacgtttgctagacattttaaatattcagtattttgactacacagattaagtgattctatcaggcattctgatatttaacaactctattaaaatatttatagaaaaataaaagcaaattgataaaaatttttgagcaattctatttttgtagaaaaaaatgacaacctgtaattataaagatgttttttgaatgtgtagtatcctagacaataaaagttcttgtgaaacttaacaatgaatgaaaaccaactaatagcatgcaagatcatagaccctgcattaaatttttatttgtgaaaatttgaaaattatgagctttaacttacaaagtttgccttcttaggtctaaagtcttttaaaggattatttgcatttatgtaaaactcaaaatgaagttatatatgagtgcaaagaaattaacttctgctcaaatatgtgttgataccctacagtaagttgaattaaatttttatcccaactgtttgattttgttatttcatggattagcccttatggttaagtgaaataaataagttatgtttgttaaccaccccctaaagagtgaactccccatat

SEQ ID NO: 43046 - DNA, 667 bp, Macaca Mulatta
tcttccctgtggatgtgtctccaagtatcaggtactggtggtccttcaaatcaattcccatttacccagatgagttttcttaattggattctgcttggaaagtacatctggaatgaacatggggttcttgtccaaaaggaaaattattggtagaaagaagtgggtgatcattttagaaatggcaaatgagccagccgccttggcctggactttaaatgtgaaattggccttattcagctacactattctcaaatggccaaaatactttctgcagtaccaaacttctttttaatattctaaccaaagaaatgggaggaaaagtgaaaggtggatacaatctcatagtgttgaagaatttaacaacatgttcaattcaaggacctttacgaactttctagatgactataattcggtttaacagacctctaatttaaggcacagcagaggcaaaggaattacagactccctggaagctggaaggactgggttactgctctacagccttaccaacagtgagattccgagaaagaatttctgaaaaagaaattttgttttccacagttgtaactttaggtggtatgcttttcagcttgtttatattagctgtctggggttgagttgacatttttcaaatattaaagcagtagaatgccttttgaggaaatct

SEQ ID NO: 43047 - DNA, 755 bp, Macaca Mulatta
  misc_feature (1)...(755): n = A,T,C or G
ggttaagtgaaagagctttttgaaatgcattaaatggaagtttgtttctgcccatcagcttatcttctgcatattcctatttatagttcaaagcacttaagagttgcagagtgatttgctttttatgatcaccacttcatccaggatcatttgctttgtatcttcaacattttcagattcttataaatcttcacagtttacttagaggttagtttaaaacttgcttcagataagaaattgactagatataaaattcacataatctcagagatagccatagatcaatatccccagtctttttctcaaagtaattgaacatttttttttcccaggatagttgtatacaagcattttcatcctcaccatagatgattctagttcttcagtatatgaggggactatatttgcttgcttgttatctaaataaacatttttattattgtcaaaggaaaaagactctaatatagaaaaaaaatttgtgtccataggactagcctcattttggaggttaatattaatatttgactttattcattgtgtatttcttggttttgtcatgtcacagaattccccttctctaaatatgcatttttttctctacccttggaagagatgagttnttaaaaagaaattactggtaaaaataaaaactggtgccttgaatgtaagttttttccccagaaaacctctccttttaatatttatccaatttaaaaattttgcctttggggcttaaactggtttaccaaaaaggc

SEQ ID NO: 43048 - DNA, 781 bp, Macaca Mulatta
  misc_feature (1)...(781): n = A,T,C or G
ggnnnnnnnnnnnnnnnnnnnnnnnnnnnnnnnnnnnnnnnnnnnnnnnnnnnnnnnnnnnnnnnnnnnnnnnnnnnnnnnnnnnnnnnnnnnnnnnnnnnnnnnnnnnnnnnnnnnnnnnnnnnnnnnnnnnnnnnnnnnnnnnnnnnnnnnnnnnnnnnnnnnnnnnnnnnnnnnnnnnnnnnnnnnnnnnnnnnnnnnnnnnnnnnnnnnnnnnnnnnnnnnnnnnnnnnnnnnnnnnnnnnnnnnnnnnnnnnnnnnnnnnnnnnnnnnnnnnnnnnnnnnnnnnnnnnnnnnnnnnnnnnnnnnnnnnnnnnnnnnnnnnnnnnnnnnnnnnnnnnnnnnnnnnnnnnnnnnnnnnnnnnnnnnnnnnnnnnnnnnnnnnnnnnnnnnnnnnnnnnnnnnnnnnnnnnnnnnnnnnnnnnnnnnnnnnnnnnnnnnnnnnnnnnnnnnnnnnnnnnnnnnnnnnnnnnnnnnnnnnnnnnnnnnnnnnnnnnnnnnnnnnnnnnnnnnnnnnnnnnnnnnnnnnnnnnnnnnnnnnnnnnnnnnnnnnnnnnnnnnnnnnnnnnnnnnnnnnnnnnnnnnnnnnnnnnnnnnnnnnnnnnnnnnnnnnnnnnnnnnnnnnnnntggtgattaatcggggtccgcagtttccctcttttatcctggcttcatgtcccgcgaacttagctgagatcaactttggacggtcgagaaccaatgccaccttccgggcgtttccaaagggcttgcccgcgctttggaaaaagtggaacaccn

SEQ ID NO: 43049 - DNA, 189 bp, Macaca Mulatta
ctctgggctccggtccagacgccttccccttctacgttgaatatagatcacatggaacagaaggatctgcagctcgatgagaagctccaccactctgttcttcagacaccagatgatctaggcaatatttcaaaattagatatttaccttttttcttttagggcatcagtgtcaggagatcataaataa

SEQ ID NO: 43050 - DNA, 768 bp, Macaca Mulatta
  misc_feature (1)...(768): n = A,T,C or G
acactagagaaacttcgagcccagaaatacatgctgactttctagaaaccagtgtaaagaggtttttttaaattgtgtatatgtagcattagacaaaattatttaaagtcaataaattttattcnaaggaattccatgttgtgatttcttccactgtccatcaaggtcactttagatcccctaaaaagctggagtcaaaagatcttcaagtttgccctttttaatgaaactgatccagctgtcctgtcagcccataattactttggcttctgtcatctccttttaatatgggtatactgatgaagacttcaaaattcaccaagaatctttgggatctaatttcttcaaccaatttgctttagggtccttttgattgtaggtggtggggatctgcctggttctcaatttgacaccctctcaacatgaatgagttcaaatcacattcattcctaagcgatcactcaagaatggtacagatgtgtggtttttgccaatacctttaactccagacatcatgttctcaagataaaagcctttaaaacaaaaagccatcatatatatcgtcaacatgaaattggaatgcaaaattaatactgctgaggatttccctcatatccatgctgtttatctattctacagtcctagaatcaaccttttttttcttaagagacagtgtctgtctttgttacccaggctggagtagtgatgccatcaaagttcagtgcagcccccaattcttgggctcaatccctctgcctcaacctcccc

SEQ ID NO: 43051 - DNA, 866 bp, Macaca Mulatta
  misc_feature (1)...(866): n = A,T,C or G
nnnnnnnnnnnnnnnnnnnnnnnnnnnnnnnnnnnnnnnnnnnnnnnnnnnnnnnnnnnnnnnnnnnnnnnnnnnnnnnnnnnnnnnnnnnnnnnnnnnnnnnnnnnnnnnnnnnnnnnnnnnnnnnnnnnnnnnnnnnnnnnnnnnnnnnnnnnnnnnnnnnnnnnnnnnnnnnnnnnnnnnnnacaaacaagagatcggattcttnacctntgcctcagtattctgtacggacctgcatctctcactttaccacagaatttcttggaaagtaacactgtgtccactccctctggtccctcgttacatacttttgaccccactatattctaattcctatttgatgatgcttttccttgcagagctttctgctcttgagcataagacatgtcagcctcttgggtatgggctcactctcatgacttcactgacttcatcattttatctcacactacctgccgctaaaccagaggccttcctctgggtgatcagttggtagtttcgctagctctacaccatctccctgggtaatctgttccacccccagagcttcagctatcaccactgtacagatgttctcaaatctatattaactcaaggtctaaatttccagcagacaattagtctccatgtaaaagtctgtcaagtatatcaaacagaatgggtttaaaaatagagttcattttaaaacatggtttattatgaaaaatttcaagcataaacattaattaatataatgattagtctaactgataagtatagttaatatcccccacgctaattcattatttgtcaatgtattgtcacagttgctttgtctctttttttcctttttcctgaagtactttaaaacaaatcttagaccc

SEQ ID NO: 43052 - DNA, 834 bp, Macaca Mulatta
gggatgccccagttagacacatcgacatgattcaccactattatggcgatgcttcctacactatatcttatcatacagctaaagctactaaacacgaaccactaccaaccaccccttacaaaaaactccacccttcaactccacaacatccgctgacaaccaaaatggacgaaaacttgtttacccctttctcaaccccaacaattttaaatcaacccgctacgatccccattatcctattccctaccctactaatcttaacccccaagcaccccattaataatcgactagctaccattcaacaagacctgactcgattcaccctaaaacaaataatgacaactcacaacgctaaaggacagacctggatccttaatactagcatccctaatcacctttattaccacaacagacctcctaggacttacgccctactcgttcacaccaactacccaactttccataaacctagctatagcaatccctctatgaacagctacagtagtaatggggacttcgcttttaaaaccaaaaacttcctagccccacctccctaaccacaagggcaaaaccaacaccttctgatgtgtagtagcaatcgaaactatcagccctactcattcaaaccagtagcctctagcccgtacgaattaaccgcaaaacatcacagccgggcccatctggctaaatacaaccctaaatcgggaaaacgcctgttacttagcccctattcaaccacccaaccttctggcataaactcctggctaaaccttccacaacttttcgggggaattacctaaacttactccctagaaaattgccagaaagctctaa

SEQ ID NO: 43053 - DNA, 3278 bp, Macaca Mulatta
  misc_feature (1)...(3278): n = A,T,C or G
gaattctgaggaaaccaacctcaaggctgggaacagactgctggatccagtaagatttgactctttccaggcgagaagggacagggcagcaacacaggctcccctggcaaggaaacccggagctccttggcagccagggccgtatagatcctggacactggagaacagaaaagagctggggtttggtggcaacctgagctcctgtgtgtccaggatggactaggaatttcagggtgttcagctggaggagctttctcaaactctcattgtattcacagaaccagagtccaactcatatcggaaactgcaggaaagaaaatcgttccaaggacagctgccaagacagagcaggtagaatcttggtgttttttcttgttggtggtagtggtggtttttttgttttttatttgccccaaaaggcaaattatcaggaaactttcatatgagacttgagcagaaaggcagttactgacaagtaaatttttgagatcttagcactctgagaatatttggggactcacaaggggttcagcctcacttcattccagtgctgagatggtcaggaaggagtgggagagacaagtggggttcacctgggtgcacaggaggttctggaaatgagggtctgtggggacccttgctggcccgcctctcacaagctttctctgtagggaactgtccagaagaggagtgcagcttgatgnnnnnnnnnnnnnnnnnnnnnnnngatcctcccactgtgctgtgcacaacagtgaaatccaggagacccgtgatgcccaccatagggacattccagggcttgctcagcaagcggcacaggtctcgggccctaggagtccaaacaccactcacatcgaaaaagcttgatgacctctgtgccagctatgtctgaggctatttatcaagacctagcccaggtgcaggcccagcagatcagtttctcctctaactgggagcagctgacactgctcatccggggcctctgtgtgcccaggtgcagaccttgtattccacggccacccaggcagcttatgtcttccctgcttgagggctggcttgtcccagcacattgcctggtcctgggtattcagccctggtgcagagaagcccatcccttccctgggcaggagataactgagcctctcagtggtatcagatgaggctgagctgaataccctgatcctgttcagtagaggatgcagctctgggaatgacaacaaggatctgctacttctcagattcttccacatgaccagcactgacaactgtccgcgaaattccggccaggtctcccctccatggctctcccgacaccttccgacagcacccttcccgcggaagcccgaggacgaggacggcgaaggagactcgtttggaccccgagccaaagggaggccctgcgagcctgctttgagcggaaccagtacccgggcatcgccaccagagaacagctggcccaggccatcggcattccagagcccagggtccagatctggtttcagaatgagagatcacgccagctgaggcagcacctgcgggaatctcggccctggcccgggaaacgcggccagcaagaaggcaggcgaaagcggaccgccgtcacccggtcccagactaccctgctcctcagagccttccggcagcgtcgctttccaggcatcgccaccagggaagaactggccagagagacgggcctcccggagtcccgcattcagatttggtttcagaaccggagggccaggcatctgggccagggtagcagggcaccggcgcaggcaggcggcctgtgcaaggcggcccccggggtgtcccgttccctcgtcagtagccttcacccacctcggagccgtggggaacggggcttccgcactccacatgccctgcgcgcctggggctcaggggacaggggcctctccagcccagccaggctgcgcaggccagaggaatctctgcacctgcccctgcactcggggctttgtgttgggtcctggctcctctggaagtgggactgtcccgtcggctcctcggtggcctctcgacgcaacaaatgccagaaagaccaggacccgagcgcggtggcctgctgggtgcgtgctcggtggacagcctgggcctgctcgagctgagtcacagaccaaggtgtgcttgagccacccacgtcccagggagtcgctggtggctggagccccaggtctgcagggcagctccacctcctgagccccagaccccggacgcctccgcgtgtcaggcacagatgcaagccatccaggcgccctcccaaccgctccaaagcttcaggcctagtctgcactccccctccagcctgttagatgagctctcgcagagtttcagaaaatgaccaacctttcctagatccggcgccactgggggagctgaaggacgtggaagagcgctccgctggaatcactcctcaaccaggaggcacaccgggctctgctggaggagctttaggacgcggggttgggagggggtgggggcagggcggcggcctctccttcgtggtgaacctctggctgggtatggagaggcgtctcttcccttccagctgacctgtctaggatccagagcccgccagtaccgggagaggactgtctactggtgcatgcgcgggtccatagccgcctaggttttccaatcagcccaggcgagttctcatccctttttcccccgcgttcttcagtggagttggcggagatctcagtccgcgaaacactgggcccgggcagaagccaggccagttctccttttcgaggcttgactcctgtgcctcttagctccaccatcactttgccaaccctcctcctgccagcctcttcaccatcaccacggagctccttgccaacctaaatgtagatccgagatccggaaaccgcctgctgcctttccaggcaagagggaaggcaggcagagataaggacaggaacgaagacagagtgggaggaaggatggagctaggaaggatggatcagaggacctcgaggagagaacagnnnnnnnnnnnnnnnnnnnacgaggaggaggttaagaacagagggaaggatggactcgaggacaaaaggagcaagaaacagagaaaggaaggtagagagaaaaacggtcttctgccttccaggaccaacaggacccagcactccgggaaaatgttgggtgcgcagtgcgggctaagtgctcggcccacagccccattgaccggcggggcgctcaccgaatcgccagcctgggttatttcatgctggagcaattcagacgaattc

SEQ ID NO: 43054 - DNA, 948 bp, Macaca Mulatta
  misc_feature (1)...(948): n = A,T,C or G
ggggccttcgcagcctctgtacactagcgatggccccctggtgtttacctttctctcaaactgtctttttctcaatcctttgactttgctggactttgtcatccccacgacctggtgttgagtctgatcagcccaacattcctggctgcccaacgtggggcaacaagaccccagtaaaggagcgctagagcatgtgaaagtggaggattatgaagagcaggagtgaaagtactcagaattttttatcactcactccttagtgcagtaaagcagttttgcctatggttcccagaacaagggactatggagttggataaatgggagagaactggcagatattttttaaacgtgtataaagatggagcaaaaattccagtctcggtttggtgaatgtgggcactaataaaagcagctcttgagccatttcaaacagatgaggcagattcagatgaggaagaaggggaccagtgtaaaaaactaacttcagattctgaatgtgaggaacaggaaacaggaaattaaagggagactgaaaaagtatgttttactagcccgccagctccacctgctgaattacgtgaaaggcccctcatctttctcccctatgngcgagaaatgaatagctacaactctctngagtgcacataaactgtgtgcttcaatcatcaagctagcaaactacagatcgtcttccaagagatctctgtactagaatccgctacgaatctgcnnnnnnnnnnnnnnnnnnnnnnnnnnnnnnnnnnnnnnnnnnnnnnnnnnnnnnnnnnnnnnnnnnnnnnnnnnnnnnnnnnnnnnnnnnnnnnnnnnnnnnnnnnnnnnnnnnnnnnnnnnnnnnnnnnnnnnnnnnnnnnnnnnnnnnnnnnnnnnnnnnnnnnnnnnnnnnnnnnnnnnnnnnnnnnnnnnnnnnnnnnnnnnnnnnnnnnnnnn

SEQ ID NO: 43055 - DNA, 188 bp, Macaca Mulatta
gacagagaagatcaggaaatttcctttcacattacataagttcatggaatgcatgggggagaacatggaggaggtgggctaaattcctgcaattagagaaagttttgtcagcaactgactattctatttatgtgcggtgataccacactagatgtgagcgcagctaagcggtcatcattagttagtga

SEQ ID NO: 43056 - DNA, 755 bp, Macaca Mulatta
ttcctggataggcagtggcagaagagcatttggtagtgggtatcgcagggatgatgactatagaagaggtggggaccgctatgaagaccgatacgacagacgggatgatcggtcgtggagctccagagatgattactctcgggatgattataggcgtgatgatagcggtccccccgccaaagacccaaactgaatctaaagcctcagagtactcctaaggaagatgattcctctgctagtacctcccagtccagtagagctgcttctatctttggacgggcaaagcccgttgacacagctgctagagaaagagaagtagaagaacggctacagaaggaacaagagaagttgcagcgtcaactggatgagccaaaactagaacgatggcctcgggagggacacccaagctggcgaagtgaagaaactcaggaacgggaacagtcgaggacaggaagtgagtcatcgcagactgggacctccaccacatctggcagaaatgcacggagagagagtgagaagtctctagaaaatgaaacactcaataaggaggaagattgtcactctccaacttctaaacctcccaaacctgatcagcccctaaaggtaatgccagtccctccaccaaaggagaatgcttgggtgaagcgaagttctaaccctcctgctccatctcagagctcagacacagagcagcaatcccctacaagtggtgggggaaaagtagctccagctcaaccatctgaggaaggaccagc

SEQ ID NO: 43057 - DNA, 326 bp, Macaca Mulatta
tggatttacaaaaattgcaaagctagacaacaatacagaagatattatgtgataatgtgcccctcaaaagaataagtaaccttctcgtgagttcatgataatgaaaaatttcattcagtaagctgtaaggaggaaaaaatgcactgtgccttgaaggatgaggaaggagttggtaagcaaaggggtgagtggagtaggaaggacatatcacatcagaagactgaaatatgcagagacatagaaggaggagccaagaacaaaatccagggtatttgctctcacacatcaggtatcactggctaaaagcaaggaggttcaggatttgt

SEQ ID NO: 43058 - DNA, 1456 bp, Macaca Mulatta
gggggacaaatgctggctgcaatccagccagccctctgccctttcctgagcccgagggactgccacctccactgtgtgcacgcttggctacaggacacgtttcaggtatccaaggcagcagaggtgagtgggtcccctgagctccgtgaccttatgctccacactaactctggcagagcctctgtttcctcatagaacaaagaacagccgccatgcagctcttcctcctcttgtgcctggtgcttctcagccctcaggaggcctcccttcaccgccaccacccccgggagacgaagaagagagtcaaggacctccatgtaggtgccacggtggcccccagcagcagaagggactttacgttcgacctctacagggccttggcttctgctgcccccagccagaaagtcttcttctcccctgtgagcatctccgtgaggctggccattgctctccctgggggctgggtccagcacaaggaggcagatcctggagggcctgggcctcgacctccagaaaagctcagaggagcagctcacagaggctttcagcagctcctgcaggagctcaaccagccccgagatggcttccagctgagcctcggcaatgcccttttcaccgacctggtggtggacgtgcaggacaccttcatgagtgccatgaagacgctgtacctggcagactctttccccaccaactttggggactctgcgggagccctgaagcagatcaatgattatgtggcaaagcaaacgaagggcaagattgtggacttgcttaagaacctcgacagcaacgcagtcatggtcatggtgaattacatcttctttaaagctaagtgggagacaagcttcaaccacaaaggcacccaagagcaagacttctacgtgaccccggagactgtggtgcgggtacccatgatgagccgcgaggaccagtatcactacctcctggaccggaacctctcctgcagggtggtgggggtcccctaccaaggcaatgccacggctttgttcattctccccagtgagggaaagatgcagcaggtggagaatggactgagcgagaaaacactgaggaagtggcttaagatgttcaaaaagaggcagctcgagctttaccttcccaaattctccattgagggctcctatcagctggataaaatccttcccaagctggggatcagtaatgtcttcacctcccacgctgacctgtccggcatcagtaaccacactaatatccaggtgtctgagatggtgcacaaagctgtggtggaggtggatgagtcgggaaccagagcagcggcagccacggggcaatcttcatgttcaggtcggcccgcctgagctctcagaagatagtgttcaacaggccttttctgatgttcattgtggataatgacatcctcttccttggcaaagtgaaccgcccctgaggtggggcttctcctgaaatctac

SEQ ID NO: 43059 - DNA, 1827 bp, Macaca Mulatta
  misc_feature (1)...(1827): n = A,T,C or G
gtctgctccttgtgctgacagctgagataggnnaggctctgcttaccagctgacatgctacttctccaactgggcccagtaccggccaggcctggggcgcttcatgcctgacgacatcgacccctgcctctgtacccacctgatctacgcctttgctgggatgcagaacaacaagatcaccaccatcgaatggaatgacgtgactctctaccaagctttcaatggcctgaaaaacaagtaagtgacggaaaacctgagtttcaagtcttttaaccttcaaggacagtttaaacaagatcttccacagctgacttcaggctgaaattccaaacaggccaacaagcaggtaaattcagctttcttattacttcaagtgcaagaatgactctaatattaaggggaatggctggctcacagaagctagttgccaactaaatcccacctcagctgccaagggaagcttacaagtccaactactggtggactcagatgagaacaatcttctacttagaatcaatccaaagctgtcactgataaagcattcagtctccttggtcaggagattcactcctagggaaataattagaactgtgcagacattggggtgcagcaaaccaacatggcacatgtatacctacgtaacaaaccggcacgttgtgcacatgtaccctagaacttaaagtatattnnnnnnnnnnactgtggagacattgaaacttaccaatcatagtcacctattccaacattcaaaaagtaggaaatagggatgagaacaaagataaaccaggatgagaggctgcatgacactttcctggcttcctcctcactattgcagctaaatgttgaaatgccttccctttcttttcatttgttctgataaaacactttgtttcttttccctcagaaatagtcaactgaaaactctcttggctattggtggctggaactttggcactgctccntttcactgccatggtttccactcctgcgaaccgccagactttcatcaactcagtcatcgaattcctgcgccagtatgagtttgatgggctggacttcgactgggagtaccccggctctcgtgggagcccttctcaagacaagcatctcttcactgtcctggtgcaggnnnnnnnnnnnnnnnnnnnnnnnnnnnnnnnnnnnnnnnnnnnnnnnnnnnnnnnnnnnnnnnnnnnnnnnnnnnnnnnnnnnnnnnnnnnnnnnnnnnnnnnnnnnnnnnnnnnnnnnnnnnnnnnnnnnnnnnnnnnnnnnnnnnnnnnnnnnnnnnnnnnnnnnnnnnnnnnnnnnnnnnnnnnnnnnnnnnnnnnnnnnnnnnnnnnnnnnnnnnnnnnnnnnnnnnnnnnnnnnnnnnnnnngattatgccatcaactactggaagaacaacggggccccagctgagaagctcatcgttggattcccagcctatggacataccttccttctgagcaatccctccgatcatggaattggcgcccctaccactggtcctggccctgctgggccctataccagggagtctgggttctgggcctactatgagnnnnnnnnnnnnnnnnnnnnnnnnnnnnnnnnnnnnnnnnnnnnnnnnnnnnnnnnnnnnnnnnnnnnnnnnnnnnnnnnnnnnnnnnnnnnnnnnnnnnnnnnnnnnnnnnnnnnnnnnnnnnnnnnnnnnnnnnnnnnnnnacaacttcggaggcgccatggtctgggccattgacttggatgatttcacaggcactttctgcaatgaaggaaaattccctctgatcaccaccctaaaggatgctctgggcctgcagagtaca

SEQ ID NO: 43060 - DNA, 689 bp, Macaca Mulatta
  misc_feature (1)...(689): n = A,T,C or G
aacacttcacccatttagttctgccagtctctgaaagcatttgcccttnaccatagagaatgattttggataagaccaccagcacagggcgagaaatgtgcagtgtatacagtggggaccaaagtaaaagagatgccagaggtaatggagaacaaagggcatagatgccacaataggatcagaatggtgctgaaagatggcagctgggagggagagatgctccaagggtcacatttcagagattgtatctggataaaagcatggaaactgcagatggaaaagttatttgcaatctttgatagagcattggaagcaatgatgagtgataaactcgttttaaggaaagagaaggtaatgagatgccaaagtgagaaatatggaggtcttgatgtgtgggggcgaagacccagagaggaaagccaaaagtggcagcctacagcaagaattcatggatgttgcaaagactggctgtgggtcctggagaagaacagcgaagaaagaaacagtcttagattcaaatctgcattctgtcccttactgtgtaacctgaggaaagtgtcctaatctgagctttgctttgcccatcactaaatgagactaatagaattgaagcccttctgaaaaaggatatataacatacaagcacagtgtctgcggtagagcagatgtncggtgtatgatcaatgcta

SEQ ID NO: 43061 - DNA, 221 bp, Macaca Mulatta
tccttcattcgcagaaaccaagacctcatctgcagcttcttcacctggttttcagaccacagccttccagagtccgacaaaattgctgagattattaaagaggatctgtggccaaatccactgcaatactacctgttgcgtgaaggagtccgtagagccagacgtcgcccactaagggagccagtagagatcccgaggccctttgggttccagtctggtta

SEQ ID NO: 43062 - DNA, 810 bp, Macaca Mulatta
  misc_feature (1)...(810): n = A,T,C or G
ggaaatctgttgtatattgaacatatttgactgcattttattctttttacttgttcctgctttgccattttgatctccttagatgctgaattatatttttggaatgaaacagtcatcagcttttttatcattagctattttactatttaatttagaataaagcacagaatgataaaattagatacaagaggccactatgtgtcatcaagtaacctaatctacttttggtaatgaaaataaaattctctttaaataattgctagctcattttgaaccagctttgttcagatgaatagccctcagtctgggtgaagaggatgagaaactcatctctccctcacaaggtctttccaacaattaaaattatccttttcttaatttcattctattgctcctaattatgaccctgataattagtgtgctaattacatcccctgtataatttctctgcctccttgatgttcccccttcatttatttttagccctgcctccctttatctgccccctgaattccctgcttacctgtttccctcactggggcatgtggtttggggcccctcaaatttgagaaaagaagcttttccccaatcccttttaaccagcccgcctcctccnnnnnnnnnnnnnnnnnnnngcccctaggggcaatttgttaccttaagggaaaaaaaaagtggtagtttagaagtaacctggagaaaaccccgcaatcccagcccctgggccccttctggttaatgccctgccgggaagggggccactccctttaccttgggggggcgggggcttcaactaaacctaatgggaaa

SEQ ID NO: 43063 - DNA, 2004 bp, Macaca Mulatta
  misc_feature (1)...(2004): n = A,T,C or G
gaaaataacgactctgaatggtataaaaataatacaagtttcctgtggacactaccactccctggcattatcaaaannnnnnnnnnnnnnnnnnnnnnnnnnnnnnnnnnnnnnnnnnnnnnnnnnnnnnnnnnnnnnnnnnnnnnnnnnnnnnnnnnnnnnnnnnnnnnnnnnnnnnnnnnnnnnnnnnnnnnnnnnnnnnnnnnnnnnnnnnnnnnnnnnnnnnnnnnnnnnnnnnnnnnnnnnnnnnnnnnnnnnnnnnnnnnnnnnnnnnnnnnnnnnnnnnnnnnnnnnnnnnnnnngtgcaaagcaacaagcctctctcaattggtgcactgaagaatctaggtgtgatttatatcagctgtggtgatgagcacactgcggtgcttatccaggncaggatgggaaagtgttcacatttggagacaatagctctggacagctgggatacagccccactcctgagaagagaggtccacaacttgtggaaagaattgatggcctagtttcgcagatagattgcggaagnnnnnntaagcatggatttatgactttcttttagacctcgtggatgttcaagtcaaacacatttttgctggaacatatgccaactttgtgacaactcatcannnnnnnnnnnnnnnnnnnnnnnnnnnnnnnnnnnnnnnnnnnnnnnnnnnnnnnnnnnnnnnnnnnnnnnnnnnnnnnnnnnnnnnnnnnnnnnnnnnnnnnnnnnnnnnnnnnnnnnnnnnnnnnnnnnnnnnnnnnnnnnnnnnnnnnnnnnnnnnnnnnnnnnnnnnnnnnnnnnnnnnnnnnnnnnnnnnnnnnnnnnnnnnnnnnnnnnnnnnnnnnnnnnnnnnnnnnnnnnnnnnnnnnnnnnnnnnnnnnnnnnnnnnnnnnnnnnnnnnnnnnnnnnnnnnnnnnnnnnnnnnnnnnnnnnnnnnnnnnnnnnnnnnnnnnnnnnnnnnnnnnnnnnnnnnnnnnnnnnnnnnnnnnnnnnnnnnnnnnnnnnnnnnnnnnnnnnnnnnnnnnnnnnnnnnnnnnnnnnnnnnnnnnnnnnnnnnnnnnnnnnnnnnnnnnnnnnnnnnnnnnnnnnnnnnnnnnnnnnnnnnnnnnnnnnnnnnnnnnnnnnnnnnnnnnnnnnnnnnnnnnnnnnnnnnnnnnnnnnnnnnnnnnnnnnnnnnnnnnnnnnnnnnnnnnnnnnnnnnnnnnnnnnnnnnnnnnnnnnnnnnnnnnnnnnnnnnnnnnnnnnnnnnnnnnnnnnnnnnnnnnnnnnnnnnnnnnnnnnnnnnnnnnnnnnnnnnnnnnnnnnnnnnnnnnnnnnnnnnnnnnnnnnnnnnnnnnnnnnnnnnnnnnnnnnnnnnnnnnnnnnnnnnnnnnnnnnnnnnnnnnnnnnnnnnnnnnnnnnnnnnnnnnnnnnnnnnnnnnnnnnnnnnnnnnnnnnnnnnnnnnnnnnnnnnnnnnnnnnnnnnnnnnnnnnnnnnnnnnnnnnnnnnnnnnnnnnnnnnnnnnnnnnnnnnnnnnnnnnnnnnnnnnnnnnnnnnnnnnnnnnnnnnnnnnnnnnnnnnnnnnnnnnnnnnnnnnnnnnnnnnnnnnnnnnnnnnnnnnnnnnnnnaagtgaataatacactccaggttaccctcattcatagcatttggactccacaggcagggccggaccataaatatgtgaatgcaaaataaataagattgtattaggggcccagcatggtgcctcatgcctgtaatcccagcactttggttgaccgaggcaggcagatcacttgaggtctggagctcgagaccagcctggccaatgtggcgaaatgccatctctagtaaaaatacaaaaactagcnnnnnnnnnnnnnnnnnnnnnnnaatctcagctacttgggaggctgaggcaggagaatcgcttgaacccaggaggtggaggttacagtgagctgaaattgtgccactgcactgcagcctggggcacagagcaacactctgtct

SEQ ID NO: 43064 - DNA, 323 bp, Macaca Mulatta
atcaactgagggtctgtgactgtaggcatgggatcaggcagcagggcttttgtctcccttgttttggtccttcgcaggactgagccacccggctgtgggggaaggggtcaaggccatatcccgctaagtgttgggtgagggtccttgttggcacctccaggctgtgggccgagctgtgctggggagaagagacctgggcttggagggaactggtccccaaagctttccgcttgcctcaccttttcccccttttgtcagctgatcagtttgtggtttctgtacctactaaagtttcaggatgtattaacaaaagaaacatacat

SEQ ID NO: 43065 - DNA, 875 bp, Macaca Mulatta
  misc_feature (1)...(875): n = A,T,C or G
gggtctcgatctcccnnnnnnnnnnnnnnnnngtnnnnnnnnnnnnnnngnnnnnnnnnnnnnnnnnnnnnnnnnnnnnnnagcctaattgttgtaattttatnnnnnnnnnnnnnnnnnnnnngtgaccaagatggtcttgatctcctgaccttaggtgatttgcctacctccgcctccganagtgctgggattaccgacatgagccactgtgcctggctggctttcgtttcaaagtgacctcattgtccatgatgccagtcggcacgggaaaagtaagggaaggtaaaaggaattgtcccttgcggtctccaaaaggcccactcctgtgcttgtttgtttcccggagcctagtccacacttagttccgaaaaaccctgggaatacagttgttggggtagatgatttcccgcggtgcattcgctcccgccgaaaaaaattggggttccggttgagtaacgcaaggagagaaaagagaggaacggacggggggaggttgaaatccntgaacgacgagaggttacacgaaggctaaaggggaagccgaagatttcccgatggagcgagaaacntgaggggggcgcttcacgccggccctagacgaagagcgaacaaaattattaccgaagtgacgcaacaagagaccacgcganattgtatatagatnnnnnnnnnnnnnnnnnnnnctacctgggcggccaccagggcaaaaagggaccagaagaatgcagaagcgtgaacactcgcctgaangaccgagagggccaacancaggaatcagaacaaaatggaccgagggaaagggccctcccgagagagacgaggaaaatacaagacggggcacccaaacgaaccgcgggaaagaaaatagaaga

SEQ ID NO: 43066 - DNA, 1085 bp, Macaca Mulatta
  misc_feature (1)...(1085): n = A,T,C or G
ggggggggcttttcctgtagcagcatccggggtgagaggaacgtggttttctcctctctccgccatggcgtgtgctcgcccactgatatcggtgtactccgaaaagggggagtcatctggcaaaaatgtcactttgcctgctgtattcaaggctcctattcgaccagatattgtgaactttgttcacaccaacctgcgcaaaaacaacagacagccctacgctgtcagtgaattagcaggtcatcagaccagtgctgagtcttggggtactggcagagctgtggctcgaattcccagagttcgaggtggtgggactcaccgctctggccagggtgcttttggaaacatgtgtcgtggaggccgaatgtttgcaccaaccaaaacctggcgccgttggcatcgtagagtgaacacaacccaaaaacgatatgccatctgttctgccctggctgcctcagccctaccagcactggtcatgtctaaaggtcatcgtattgaggaagttcctgaacttcctttggtagtggaagataaagttgaaggctacaagaagaccaaggaagctgttttgctccttaagaaacttaaagcctggaatgatatcaaaaaggtctatgccctctcagcgaatgagaagctgggcaaaggcaaaattgagaaaaccgtctgccgttatcccagcgcaaggggggccatgccatcatcttataatgaaggataaatgggtattcatcaaagggccctttcagaaaacatccctggaaattactcctgcctttaaatggtaaagcaaattgacctttgaagcctggtctggttgccttggacgtccgccatggcgggaagatccggagtaataacgttgacatgctaaacgtcccaaaataccntgcgcggagaatacattcgattagcacaacagatgcgcgaagcctgcttcagctntngtctccccccccccccgttctcttcgcctcgcctctcctgttcgttttctgttttacgcacgacacaaaacagaacgtaaaagcaaaaagacaagcagacagccaaagagagtctagagtcagacagacaagtagcca

SEQ ID NO: 43067 - DNA, 698 bp, Macaca Mulatta
cagacttctgcttctgagtcaaagccatggtggtgacaaattcaagccctgagcacccgttgtattctttgatgtcagcattggcagtcaggtagttggccacatgtagatgcagctttttgtagacattgtatctaacacaactgagaactttaggcagttctgcaccagataattcagtaaagatcgggttccaataggatacaaagggagcacctttcacagggtcataaaggatttcatgattcagggtggagattttgttaatggagatgttactggagtcaccagcatttaccagggactatttgcagatgaaaattttaaaatcagacacccagctccagtcctgctttccatggtgaacagtggtcccagtacaaatggctgtcagttctttatcacctgctctaagtgcaatggtctggatgggaagcatgtagtgtttggaaaaatcattgatggacttctactgatgaaaaagattgagaatgttcccacaggccccaataataaggccaaggtacacatgctgatctcacggtgtggggagatgtatttcagaccaagactgaatcagaccttcacttcctcttggcgatgttcttgagtaagataatctggactggcccctgtgtttgcttccctgcctgctgctatgccatttgaccaacagactctggaagtatcagagattc

SEQ ID NO: 43068 - DNA, 800 bp, Macaca Mulatta
  misc_feature (1)...(800): n = A,T,C or G
ggggagaattagttgagaagagacctcagagaagactgacgaggattttgtcaaaaagagaatttttgtcaggggtcatcaacagaaccaggagagaaaaatatctgagtggtaggcagcagccaaaacacaccaaccatctacagtgagaccctgtttctacaaaaatttgaaagnnnnnnnnnnnnnnnnnnnnnntaaaactaggagagtggtgcacatacttgtagtcctnnnnnnnnnnnnnnnnnntgctggaggatcacttgagccccggagtttgaggctgcagtgagttttgatctagccactgcactccagtctgggtaccagagtgagactctctttcannnnnnnnnnnnnnnnnnnnnnnnnnnnnttaaattctagcagtgtaagaaaatattatttttgggaaaggcattgtggcttacatcatgaatccaccaagtggcttaaaaataccagcactttgggagcccaaggggggaaggaccacttgaggttagggcttcaataccagccctgggcagcatggggaagactcctnnnnnnnnnnnnnnnnnnnnnnnnctggggcagaatggccctgtgcctgttaatttccagttaccgaagcagggctggaactggaaagaattaccttctatccccaggtatttttgcggctgccctggtaccaaatatgggagccctctgaaatctctacaccaggggggattataaataattttcccttggtctccaaaaaatgttatttataagatctaatacggtagaatttaatatttacccaatac

SEQ ID NO: 43069 - DNA, 617 bp, Macaca Mulatta
  misc_feature (1)...(617): n = A,T,C or G
aacagagaatatctatttaagtgccatttgtgtcaaattgtcctaactanctgttgggattgggaggtgctgtttgggtcataaatagcaagttttctctccaataaagcaatgtctgagaatctcaagattctcatttagtagatctgggttgacctagaagccagttaattcatttagcctccaaatgtatattgagtgccttcctattgtgtatttattaccatattgtgcgggtagtgttagaagacatcatactctgtaattggaggacagataataaacaaacagggtaattttatatagtggtattctgtgaagaaagtataccatgatacgtgccagagaattacctggcaggggaaaggagagagagctttgcatagagtaatcttgggaagtgtcttttgaagagataactcttattttttatcttgnnnnnnnnnnnnnnnnnnnnntattttttaagttgtagtaaaatatatataacataaaatttaccattttagccatttttaaatgtgcgtttcagtggcattaagtacattcacattgttgtgtagccattcaccaccatctacctccagaacttttttcatgtcgtaaaactgaaactc

SEQ ID NO: 43070 - DNA, 182 bp, Macaca Mulatta
cccacagaggatatggactggcagccattttgaaatcagaacacatttgtgtgcaatcggtataatatagttgcctactttgacacttgttatagttattctgattgtttctcttatgcctgtagccttagttacaagttgacaaggagtttcaagatcctatatattcatgtgtcctgtac

SEQ ID NO: 43071 - DNA, 285 bp, Macaca Mulatta
tctcatagctacaagaaggcaatttctaacgaagccctccgtgcctttttatggattattttggccgccttccacccggacaggatgccaaccgaatggctggaccagtgcacgggagcggctgtcatttgcggagtgcctcattgcgagctaggcgcctcacggcgcagattttccagtaatttgtctgaaatcgatgctggtttgttttccgaaggcaaatcagcagcttatacagacactggggccagcaagccggtggaacaatgggagacagcttgctga

SEQ ID NO: 43072 - DNA, 774 bp, Macaca Mulatta
  misc_feature (1)...(774): n = A,T,C or G
ggcaaaggacatcgttggccaacaaatgctagactaactagataccaaagctcactctgtgaaaatccctgcataaccattgatgtttacagcatcctaaatcccactaccttgctcccggtatcagaaagctcagttaaacataactatgtagaggtattggactcagttcattctagtgggcccaacctctgagaccatccttaaatatcagtagactgggagctgtatgtggatgggagcagctttgccaaaccctgcaaagtgactctgaaaaagacaacaagccctgctccagtcatatccggaaactgactggtccacgcatggccgaagcatgaggagactcatcacgggactcattttccttaaaatttggacttgtacagtaagaacttcaactgactttcttcagattgagggctgttcccagtgtacacatcaagtcactgaggtggacaaaaggttgatacggtcgtattattttacggttattataagtgtactgggaatnnnnnnnnnnnnnnnnnnnnnnnnnnttgcttgtataataattattatatacaagaatatggtagccccaggaaaatgaccaaaccctaattggtgtgattatgaacccattctaaatcccttccccattggccccacnnnnnnnnnnnnnnnnnnttaaacgnnnnnnnnnnnnnnnnnnnaaaacataacctgtgagtggggggggggacccttcctgttataaaaacggaaaattatttgggaaacgtataaaaaaga

SEQ ID NO: 43073 - DNA, 886 bp, Macaca Mulatta
ggtagtatgcgtgtattgggataaatgtcttaattcattaacatattatgacaacacgtagttatagcagactcagtcattccctcccccagaagttttctctgaggtcagtttagttggtattttgccaaaggcacactcttgtatctatctacattgggaggtatttctctcatcttaatctttttcataggaagaagaaataaatgtcttctctctaagatatcactgtcaagaacactgaaagaagaacccattaatgtagggaacgttgagaactggaacaggctgtagggcatctttcctacacttcaggttataacttccattgcatcaccaccatttaccggtaaaccagcacacacagcaatcagtactcgaaatggtcctcttttgcagaaaaagcctgcttttctcccagctttggtgagatagatatgtaatcttcataaggacctataaggaattcctctgtggaacaaaattttaagcctccagtgcaggatgctaaaagaagcaacgctttaatcttgccagcccatacacagtgaagctgaagtgcttcaatttacagatgttttacatttaggaaggcttttccaacaaagacctactgcagttacatcacaggctccacctccgcctgccagcctgcttctgcaagcctgttagttaggatactatgtattgctgtgcttgattaatgaagaaaagaaatctccaaatcaaagatttatttatttctctttttgcgttctgctgatttaattgaaaaatatgaaaatttcaaaaattaatacttgcagccaggacttaactgaggcgtgataataactctataaatgttagctttccaaagagatcttaagcaaaattacagtattct

SEQ ID NO: 43074 - DNA, 287 bp, Macaca Mulatta
gttcccaattccttccttagtgaatgaagaacttaatcccaaaagccctggcacaaactctaggttctctttccctagctcctcccctccccctgtccctcattcctagaagggcaggcgcctcagtttgaatgcatgggagagcccagagtggtgaccgggacagggggaaaggcttccccctcagggaaagggaccgaggagtacagtgcagtgaagtgagggctcccatagcctggggtaccaaaatggggccctggggccagaggaaaggacactggtccccc

SEQ ID NO: 43075 - DNA, 670 bp, Macaca Mulatta
tctcccttcaccttgcctgctatttgtgtcacctatttaagaccataattacagccccttacatactcacaaggcaaagttgttccagaaaacatgtcatctctctttattacaaattggacattatactatacctgttacattttacagcatgttgcacctgaggctatccatctggcagatattgcatgaatagtatgttaaacacaggtttatgatttactggagtgctatggtttaccagttgggaattttgggaccatgagtgtgggagaatcactaggcttaggagggaaccacaactcatatgtggccaggaggtgaggcggtgttctataaatcattgaagaatgtggggaagcttattttttaagaagggggattctagaggtcacaaagaaaagattccaggtggcaaggagagcagtgaaacagtagattaaaggggaagttggagtagattactacttttcattctctctatttgttttctttattatgagaataatatgttcccagagtcctgaaaggcaagaagtgtgagtgaacaagcagggagtcagagaaggtgagaaaggaaaacatacactgtctgagaatgtcagatgtgatgggagagcagtggggggaagatagattgcaagccttaggatggattgataagtcttag

SEQ ID NO: 43076 - DNA, 973 bp, Macaca Mulatta
  misc_feature (1)...(973): n = A,T,C or G
ggcgcaacctcaggtgatccgcccannnnnnnnnnnnnnnnnnnnnnnnnnnnnnnnnnnnnntaccacgcccggccctatctttctaattttttttacccatctgatagctgctacataatggtatctcctcannnnnnnnnnnnnnnnnnnnncgtctcattgnnnnnnnnnnnnnnnnnnnnnnnnnnncagtcacagttcactgcagcctccacctcttgggctcacaagatccctctnnnnnnnnnnnnnnnnnnnnnaggacttaaaggcactgccnncccattcgggtaattttttgtagagatgcggccctgcctctgctgctcaagctggtctcaaattccccgcggtaagcggcccctctttatcctcccgcaaggccggggatattacaagccnacccnnccgagcaccgcccnccgnagcgngtctcccgcgggggggggtcgatgccggccgcccagcccatgcgcctctctcggcacgcgctcaccaggcacggctcctggcgtccccccacggccgccgcgctggcggccgggtgggcgggcttctgtcnggaggcatgcgcttgactccactcccccgcggtgcaccccgtcccccccaccaccagggccgggatggaggggcccctnnnnnnnnnnnnnnnnnnnnngcgcgcccngcgccgcagccgccggggcgggtccaggcgggcgcgcngtcggccgnaacggacggaccaacgcgcacctgttccctgttcttccatgccggcctcgccccgcgtccccacgacgaggtgatctccgtgttgcggccctngacccggtccccgcgcacgtcccgcccttctcttcgcgtcctcgcgtgggggctccccctctgcaagccggctgtaccncgtacgcgcccctntctgcgtggcncgnnccgcgcngnnggtnnnnncgngtcccntcggcgcccgantgcccgcncgtgn

SEQ ID NO: 43077 - DNA, 250 bp, Macaca Mulatta
gcagatccactgaacccctgcaaccaggctctggtagccgccacctcttgtcacatgttccttcatcacaatgtgggggatgctgggctctgaaataggccagccctcaccccaatcctggctcagcctcattcactctgcccagaagacaggcaggagttctggtcctgacccctggagcagagtgggttgcatcctgatggttggcaagagtaggtagtgtgaggagctgcagaagaaaccaggacaa

SEQ ID NO: 43078 - DNA, 973 bp, Macaca Mulatta
ggtatgaaaaaacattgtaaaactttctgttctgttagctgatgcatgtagccccccagtcacgtttcccacacttgctcaatttatcacgaccctttcacgtggaccccttaaagttgtaagcctttaaaaaggccaagtatttctttctcggagagctcagctcttaagacgcgagtctgccgaggctcccggctgaataaaaaacctcttccttctttaatccggtgtctgaggagttttgtctgcggctcgtcctgctacagtcaagtgcttaccctctgaagatgtcttccttggtctttgcctccatctgggtgtcacaaactctgaactggatcccaaggttttcataaatgcacttatgtttgctgtggctgtcgcattatgttgtgtgggatgtgcatgcaggacctcccattctgtcctcttgcttatgttactctcctttatgtttcactttctgaaatgcatgtcaagcttgtgatttttagattcaaaagttgtaaaataaattgttcaaatttacacattatgtaagttgtaaataaaatttcttgtaggtgctacatatttattaaaattttttgttgtaattttaagcccactgtaggcagaaaggaatcattaaaatttatattctttttttagtctgtatctaaatgatgttatattttaattccaaatatttactttatacctcagtaatgctcgttttttgcaaaatttatgttgttcttttaattgaaaatataaaactttttagctcctgaaagctatattatagtcatatagttttattacattttgtggtaagaatagtagcaacatattgagaacataataaaattcacctggtctttttagtgctttatttattaaaatcttctcattagaacctgttgttaatgattgtaaatatattttctgtataattgtactgcaatttattaaatgcccaatgtacttgaaa

SEQ ID NO: 43079 - DNA, 171 bp, Macaca Mulatta
atgaagtttcgcgccaagatcaccgacaagggccgtctagagctgttcatccacgtcagcggcaccatcgccaggctggcgaaggtctgcgtgctccgcgtgcgccctgacagcctgtgcttcggtcccgcgggcttccgcggcctccgtgaggccgggctgtggtgcgag
